United States Patent Application Publication US 2021/0260178 A1 - sequence listing, part 16

SEQ ID NO: 26507 - RNA, 1714 nt, Artificial Sequence
  mRNA product Design a-1 (hSL-A64-N5) comprising derived and/or modified sequence from LASV(KAK-428;Clade n.d. (VII))__ANH09740__GPCmut4 (opt1)
aggagagucccgcagucggcguccagcggcucugcuuguucgugugugugucguugcaggccuuauucaagcuuaccaugggccagaucgugaccuucuuccaggaggucccccacgugaucgaggaggugaugaacaucguccugaucgcccucagccugcuggccauccucaaggggcuguacaacuucgcgaccugcggcgugaucgggcugaucacguuccuccugcugugcggccgcuccugcagcgccaccuacaaggggcaguacgagcuccagacccuggagcugaacauggagucccucaacaugugcaugccgcugagcugcacgaagaacaacucccaccacuacauccgggccggcaacaacaccggccuggagcucacccugaccaacacgagcaucaucucccacaaguucugcaaccugagcgacgcccacaagaagaaccucuacgaccacacccugauguccaucaucaccaccuuccaccugagcauccccaacuucaaccaguacgaggccauguccugcgacuucaacgggggcaagaucagcauccaguacaaccucucccacagcuacgcgggggacgccgcccagcacugcggcacgguggccaacgggguccugcagaccuucaugcgcauggcguggggcggcuccuaccuggcccucgacagcgggcggcgcggcugggacugcaucaucuccagcuaccaguaccugaucauccagaacaccaccugggacgaccacugccaguucucccggcccagccccaucggguaccugggcuucgugagccagaagacgcgcgacaucuacaucucccggcgccgccggggcaccuucaccuggacccugagcgacuccgaggggcacgacaugccgggcggguacugccucacgcgguggaugcugaucgaggccgaccugaagugcuucggcaacaccgccguggccaagugcaacgagaagcacgacgaggaguucugcgacauguggcgccucuucgacuucugcaagcaggcgauccagcggcugaaggcccccgcccagaugaacauccagcugaucaacaaggccgucaacgcccucaucaacgaccagcugaugaugaagaaccaccuccgcgacaucauggggauccccuacugcaacuacagcaaguucugcuaccugaacaacaccaccacgggccggaccucccugccccgcugcugccugaucagcaacggcuccuaccucaacgagacccacuucagcgacgacaucgagcagcaggcggacaacaugaucaccgagaugcugcagaaggaguacauggaccggcaggggaagacgccccugggccucguggaccuguucguguucuccaccagcuucuaccugaucaccaucuuccuccaccuggucaagaucccgacccaccgccacaucguggggaagcccugccccaagccccaccggcugaaccacaugggcaucugcuccugcgggcuguacaagcagccgggcgugcccguccgcuggaagcggugaggacuagucccuguucccagagcccacuuuuuuuucuuuuuuugaaauaaaauagccugucuuucagaucucaaaggcucuuuucagagccaccaaaaaaaaaaaaaaaaaaaaaaaaaaaaaaaaaaaaaaaaaaaaaaaaaaaaaaaaaaaaaaaaagaauu

SEQ ID NO: 26508 - RNA, 1714 nt, Artificial Sequence; identical to SEQ ID NO: 26502
  mRNA product Design a-1 (hSL-A64-N5) comprising derived and/or modified sequence from LASV(Pinneo-NIG-1969;Clade I)__AIT17836__GPCmut4 (opt1)

SEQ ID NO: 26509 - RNA, 1714 nt, Artificial Sequence
  mRNA product Design a-1 (hSL-A64-N5) comprising derived and/or modified sequence from LASV(ISTH0009-NIG-2011;Clade II)__AIT17404__GPCmut4 (opt1)
aggagagucccgcagucggcguccagcggcucugcuuguucgugugugugucguugcaggccuuauucaagcuuaccaugggccagaucaucaccuucuuccaggaggugccccacgucaucgaggaggugaugaacaucgugcugaucgcccucagccugcuggccauccucaaggggaucuacaacgucgcgaccugcggccuguucgggcugguguccuuccuccugcugugcggccgcagcugcuccacgaccuacaaggggguguacgagcuccagacccuggagcuggacauggccagccucaacaugugcaugccgcuguccugcacgaagaacaacagccaccacuacaucauggucggcaacgagaccggccuggagcucacccugaccaacacguccaucaucaaccacaaguucugcaaccugagcgacgcccacaagaagaaccucuacgaccacgcccugauguccaucaucagcaccuuccaccuguccauccccaacuucaaccaguacgaggccaugagcugcgacuucaacgggggcaagaucuccgugcaguacaaccucagccacgcguacgccguggacgccgccaaccacugcgggaccaucgcgaacggcguccugcagaccuucaugcggauggccuggggcggguccuacaucgcccuggacagcggcaagggguccugggacugcaucaugacgagcuaccaguaccucaucauccagaacaccaccugggaggaccacugccaguucucccgccccagccccaucggcuaccuggggcugcucagccagcggacccgcgacaucuacaucucccggcgccgccggggcacguucaccuggacccucagcgacuccgagggcaacgagacccccgggggcuacugccugacgcgguggaugcugaucgaggccgagcucaagugcuucgggaacaccgccguggcgaagugcaacgagaagcacgacgaggaguucugcgacaugcugcgccuguucgacuucugcaagcaggccauccggcgccucaagacccccgcccagaugagcauccagcugaucaacaaggccgugaacgcccugaucaacgaccagcucaucaugaagaaccaccuccgggacaucaugggcaucccguacugcaacuacuccaaguacugcuaccugaaccacaccgucacggggaagaccagccugccccgcugcugccugguguccaacggcagcuaccugaacgagacccacuucuccgacgacaucgagcagcaggcggacaacaugaucaccgagcuccugcagaaggaguacauggaccggcagggcaagacgccccuggggcucguggaccuguucgucuucagcaccuccuucuaccugaucagcaucuuccugcaccucaucaagaucccgacccaccgccacaucaccggcaagcccugccccaagccccaccggcugaaccacauggggaucugcuccugcggccuguacaagcacccgggggugcccgugaaguggaagcgcugaggacuagucccuguucccagagcccacuuuuuuuucuuuuuuugaaauaaaauagccugucuuucagaucucaaaggcucuuuucagagccaccaaaaaaaaaaaaaaaaaaaaaaaaaaaaaaaaaaaaaaaaaaaaaaaaaaaaaaaaaaaaaaaaagaauu

SEQ ID NO: 26510 - RNA, 1714 nt, Artificial Sequence
  mRNA product Design a-1 (hSL-A64-N5) comprising derived and/or modified sequence from LASV(ISTH2010-NIG-2012;Clade II)__AIT17482__GPCmut4 (opt1)
aggagagucccgcagucggcguccagcggcucugcuuguucgugugugugucguugcaggccuuauucaagcuuaccaugggccagaucaucaccuucuuccaggaggugccccacgucaucgaggaggugaugaacaucgugcugaucgcccucagccugcuggccauccucaaggggaucuacaacgucgcgaccugcggccuguucgggcugguguccuuccuccugcugugcggccgcagcugcuccacgaccuacaaggggguguacgagcuccagacccuggagcuggacauggccagccucaacaugugcaugccgcuguccugcacgaagaacaacagccaccacuacaucauggucggcaacgagaccggccuggagcucacccugaccaacacguccaucaucaaccacaaguucugcaaccugagcgacgcccacaagaagaaccucuacgaccacgcccugauguccaucaucagcaccuuccaccuguccauccccaacuucaaccaguacgaggccaugagcugcgacuucaacgggggcaagaucuccgugcaguacaaccucagccacgcguacgccguggacgccgccaaccacugcgggaccaucgcgaacggcguccugcagaccuucaugcggauggccuggggcggguccuacaucgcccuggacagcggcaagggguccugggacugcaucaugacgagcuaccaguaccucaucauccagaacaucaccugggaggaccacugccaguucucccgccccagccccaucggcuaccuggggcugcucagccagcggacccgcgacaucuacaucucccggcgccgccggggcaccuucacguggacccucagcgacuccgagggcaacgagacccccgggggcuacugccugacccgguggaugcugaucgaggccgagcucaagugcuucgggaacacggccguggcgaagugcaacgagaagcacgacgaggaguucugcgacaugcugcgccuguucgacuucugcaagcaggccauccggcgccucaagacccccgcccagaugagcauccagcugaucaacaaggccgugaacgcccugaucaacgaccagcucaucaugaagaaccaccuccgggacaucaugggcauccccuacugcaacuacuccaaguacugcuaccugaaccacaccgucaccgggaagacgagccugccccgcugcugccugguguccaacggcagcuaccugaacgagacccacuucuccgacgacaucgagcagcaggcggacaacaugaucaccgagcuccugcagaaggaguacaucgaccggcagggcaagaccccgcuggggcucguggaccuguucgucuucagcacguccuucuaccugaucagcaucuuccugcaccucgugaagaucccgacccaccgccacguggucggcaagcccugccccaagccccaccggcugaaccacauggggaucugcuccugcggccuguacaagcacccgggggugcccgugaaguggaagcgcugaggacuagucccuguucccagagcccacuuuuuuuucuuuuuuugaaauaaaauagccugucuuucagaucucaaaggcucuuuucagagccaccaaaaaaaaaaaaaaaaaaaaaaaaaaaaaaaaaaaaaaaaaaaaaaaaaaaaaaaaaaaaaaaaagaauu

SEQ ID NO: 26511 - RNA, 1714 nt, Artificial Sequence
  mRNA product Design a-1 (hSL-A64-N5) comprising derived and/or modified sequence from LASV(Lassa virus/H.sapiens-wt/NGA/2015/ISTH_0543;Clade II)__AVO03639__GPCmut4 (opt1)
aggagagucccgcagucggcguccagcggcucugcuuguucgugugugugucguugcaggccuuauucaagcuuaccaugggccagaucaucaccuucuuccaggaggugccccacgucaucgaggaggugaugaacaucgugcugaucgcccucagccugcuggccauccucaaggggaucuacaacgucgcgaccugcggccuguucgggcugguguccuuccuccugcugugcggccgcagcugcuccacgaccuacaaggggguguacgagcuccagacccuggagcuggacauggccaaccucaacaugugcaugccgcugagcugcacgaagaacaacucccaccacuacaucauggucggcaacgagaccggccuggagcucacccugaccaacacgagcaucaucaaccacaaguucugcaaccuguccgacgcccacaagaagaaccucuacgaccacgcccugaugagcaucaucuccaccuuccaccugagcauccccaacuucaaccaguacgaggccauguccugcgacuucaacgggggcaagaucagcgugcaguacaaccucucccacaccuacgcgguggacgccgccaaccacugcgggaccaucgccaacggcguccugcagacguucaugcggauggcguggggcgggagcuacaucgcccuggacuccggcaaggggagcugggacugcaucaugaccuccuaccaguaccucgugauccagaacaccaccugggaggaccacugccaguucagccgccccucccccaucggcuaccuggggcugcucagccagcggacgcgcgacaucuacaucagccggcgccgccggggcaccuucaccuggacccucuccgacagcgagggcaacgagacgcccgggggcuacugccugacccgguggaugcugaucgaggccgagcucaagugcuucgggaacaccgccguggccaagugcaacgagaagcacgacgaggaguucugcgacaugcugcgccuguucgacuucugcaagcaggcgauccggcgccucaagacccccgcccagauguccauccagcugaucaacaaggccgucaacgcccugaucaacgaccagcucaucaugaagaaccaccuccgggacaucaugggcauccccuacugcaacuacagcaaguacugcuaccugaaccacacggugaccgggaagaccucccugccccgcugcugccuggugagcaacggcuccuaccugaacgagacccacuucagcgacgacaucgagcagcaggccgacaacaugaucacggagcuccugcagaaggaguacaucgaccggcagggcaagaccccgcuggggcucgucgaccuguucguguucuccaccagcuucuaccugaucuccaucuuccugcaccucgugaagaucccgacccaccgccacaucacgggcaagcccugccccaagccccaccggcugaaccacauggggaucugcagcugcggccuguacaagcacccggggguccccgugaaguggaagcgcugaggacuagucccuguucccagagcccacuuuuuuuucuuuuuuugaaauaaaauagccugucuuucagaucucaaaggcucuuuucagagccaccaaaaaaaaaaaaaaaaaaaaaaaaaaaaaaaaaaaaaaaaaaaaaaaaaaaaaaaaaaaaaaaaagaauu

SEQ ID NO: 26512 - RNA, 1714 nt, Artificial Sequence
  mRNA product Design a-1 (hSL-A64-N5) comprising derived and/or modified sequence from LASV(Lassa virus/H.sapiens-wt/NGA/2016/ISTH_0009;Clade II)__AVO03571__GPCmut4 (opt1)
aggagagucccgcagucggcguccagcggcucugcuuguucgugugugugucguugcaggccuuauucaagcuuaccaugggccagaucaucaccuucuuccaggaggugccccacgucaucgaggaggugaugaacaucgugcugaucgcccucagccugcuggccauccucaaggggaucuacaacgucgcgaccugcggccugcuggggcucguguccuuccugcugcucugcggccgcagcugcuccacgaccuacaaggggguguacgagcugcagacccuggagcucgacauggccagccugaacaugugcaugccgcuguccugcacgaagaacaacagccaccacuacaucauggucggcaacgagaccggccucgagcugacccugaccaacacguccaucaucaaccacaaguucugcaaccucagcgacgcccacaagaagaaccuguacgaccacgcccugauguccaucaucagcaccuuccaccucuccauccccaacuucaaccaguacgaggccaugagcugcgacuucaacgggggccggaucuccgugcaguacaaccugagccacuccuacgcgguggacgccgccaaccacugcgggaccaucgccaacggcguccugcagaccuucaugcgcauggcguggggcgggagcuacaucgcccucgacuccggcaaggggagcugggacugcaucaugacguccuaccaguaccugaucauccagaacaccaccugggaggaccacugccaguucagccggcccagccccaucggcuaccuggggcuccugucccagcgcacccgggacaucuacaucagccgccggcgccggggcacguucaccuggacccuguccgacagcgagggcaacgagacccccgggggcuacugccugacgcgcuggaugcucaucgaggccgagcugaagugcuucgggaacaccgccguggccaagugcaacgagaagcacgacgaggaguucugcgacaugcugcggcuguucgacuucugcaagcaggcgauccgccggcugaagacccccgcccagauguccauccagcugaucaacaaggccgugaacgcccucaucaacgaccagcugaucaugaagaaccaccuccgcgacaucaugggcaucccguacugcaacuacagcaaguacugcuaccucaaccacaccgucacggggaagaccucccugccccggugcugccuggugagcaacggcuccuaccucaacgagacccacuucagcgacgacaucgagcagcaggccgacaacaugaucaccgagcugcugcagaaggaguacaucgaccgccagggcaagacgccccucgggcugguggaccuguucgucuucuccaccagcuucuaccugaucuccaucuuccuccaccuggugaagaucccgacccaccggcacaucaccggcaagcccugccccaagccccaccgccugaaccacauggggaucugcagcugcggccucuacaaccacccgggggugcccgucaaguggaagcggugaggacuagucccuguucccagagcccacuuuuuuuucuuuuuuugaaauaaaauagccugucuuucagaucucaaaggcucuuuucagagccaccaaaaaaaaaaaaaaaaaaaaaaaaaaaaaaaaaaaaaaaaaaaaaaaaaaaaaaaaaaaaaaaaagaauu

SEQ ID NO: 26513 - RNA, 1714 nt, Artificial Sequence
  mRNA product Design a-1 (hSL-A64-N5) comprising derived and/or modified sequence from LASV(Lassa virus/H.sapiens-wt/NGA/2016/ISTH_0017;Clade II)__AVO03567__GPCmut4 (opt1)
aggagagucccgcagucggcguccagcggcucugcuuguucgugugugugucguugcaggccuuauucaagcuuaccaugggccagaucaucaccuucuuccaggaggugccccacgucaucgaggaggugaugaacaucgugcugaucgcccucagccugcuggccauccucaaggggaucuacaacgucgcgaccugcggccuguucgggcugguguccuuccuccugcugugcggccgcagcugcuccacgaccuacaaggggguguacgagcuccagacccuggagcuggacauggccagccucaacaugugcaugccgcuguccugcacgaagaacaacagccaccacuacaucauggucggcaacgagaccggccuggagcucacccugaccaacacguccaucaucaaccacaaguucugcaaccugagcgacgcccacaagaagaaccucuacgaccacgcccugauguccaucaucagcaccuuccaccuguccauccccaacuucaaccaguacgaggccaugagcugcgacuucaacgggggcaagaucuccgugcaguacaaccucagccacaccuacgcgaucgacgccgccaaccacugcgggaccaucgccaacggcgugcugcagacguucaugcggauggcguggggcggguccuacaucgcccuggacagcggcaagggguccugggacugcaucaugaccagcuaccaguaccucaucauccagaacaccaccugggaggaccacugccaguucucccgccccagccccaucggcuaccuggggcugcucagccagcggacgcgcgacaucuacaucucccggcgccgccggggcaccuucaccuggacccucagcgacuccgagggcaacgagacgcccgggggcuacugccugacccgguggaugcugaucgaggccgagcucaagugcuucgggaacaccgccgucgccaagugcaacgagaagcacgacgaggaguucugcgacaugcugcgccuguucgacuucugcaagcaggcgauccggcgccucaagacccccgcccagaugagcauccagcugaucaacaaggccgugaacgcccugaucaacgaccagcucaucaugaagaaccaccuccgggacaucaugggcauccccuacugcaacuacuccaaguacugcuaccugaaccacacggugaccgggaagaccagccugccccgcugcugccuggucuccaacggcagcuaccugaacgagacccacuucuccgacgacaucgagcagcaggccgacaacaugaucacggagcuccugcagaaggaguacauggaccggcagggcaagaccccgcuggggcucguggaccuguucguguucagcaccuccuucuaccugaucagcaucuuccugcaccucguccgcaucccgacccaccggcacgugaucggcaagcccugccccaagccccaccgccugaaccacauggggaucugcuccugcggccuguacaagcacccgggggugcccgucaaguggaagcggugaggacuagucccuguucccagagcccacuuuuuuuucuuuuuuugaaauaaaauagccugucuuucagaucucaaaggcucuuuucagagccaccaaaaaaaaaaaaaaaaaaaaaaaaaaaaaaaaaaaaaaaaaaaaaaaaaaaaaaaaaaaaaaaaagaauu

SEQ ID NO: 26514 - RNA, 1714 nt, Artificial Sequence
  mRNA product Design a-1 (hSL-A64-N5) comprising derived and/or modified sequence from LASV(Lassa virus/H.sapiens-wt/NGA/2018/ISTH_0959;Clade II)__AVV65099__GPCmut4 (opt1)
aggagagucccgcagucggcguccagcggcucugcuuguucgugugugugucguugcaggccuuauucaagcuuaccaugggccagaucaucaccuucuuccaggaggugccccacgucaucgaggaggugaugaacaucgugcugaucgcccucagccugcuggccauccucaaggggaucuacaacgucgugaccugcggccuguucgggcugguguccuuccuccugcugugcggccgcagcugcuccacgaccuacaagggggucuacgagcuccagacccuggagcuggacauggcgagccucaacaugugcaugccgcuguccugcacgaagaacaacagccaccacuacaucauggugggcaacgagaccggccuggagcucacccugaccaacacguccaucaucaaccacaaguucugcaaccugagcgacgcccacaagaagaaccucuacgaccacgcccugauguccaucaucagcaccuuccaccuguccauccccaacuucaaccaguacgaggccaugagcugcgacuucaacgggggcaagaucuccgugcaguacaaccucagccacgccuacgcgaucgacgccgccaaccacugcgggaccaucgccaacggcguccugcagaccuucaugcggauggcguggggcggguccuacaucgcccuggacagcggcaagggguccugggacugcaucaugacgagcuaccaguaccucaucauccagaacaccaccugggaggaccacugccaguucucccgccccagccccaucggcuaccuggggcugcucagccagcggacccgcgacaucuacaucucccggcgccgccggggcacguucaccuggacccucagcgacuccgagggcaacgagacccccgggggcuacugccugacgcgguggaugcugaucgaggccgagcucaagugcuucgggaacaccgccguggccaagugcaacgagaagcacgacgaggaguucugcgacaugcugcgccuguucgacuucugcaagcaggcgauccggcgccucaagacccccgcccagaugagcauccagcugaucaacaaggccgugaacgcccugaucaacgaccagcucaucaugaagaaccaccuccgggacaucaugggcaucccguacugcaacuacuccaaguacugcuaccugaaccacaccgucacggggaagaccagccugccccgcugcugccugguguccaacggcagcuaccugaacgagacccacuucuccgacgacaucgagcagcaggccgacaacaugaucaccgagcuccugcagaaggaguacaucgaccggcagggcaagacgccccuggggcucguggaccuguucgucuucagcaccuccuucuaccugaucagcaucuuccugcaccucgugaagaucccgacccaccgccacgugaucggcaagcccugccccaagccccaccggcugaaccacauggggaucugcuccugcggccuguacaagcacccggggguccccgugaaguggaagcgcugaggacuagucccuguucccagagcccacuuuuuuuucuuuuuuugaaauaaaauagccugucuuucagaucucaaaggcucuuuucagagccaccaaaaaaaaaaaaaaaaaaaaaaaaaaaaaaaaaaaaaaaaaaaaaaaaaaaaaaaaaaaaaaaaagaauu

SEQ ID NO: 26515 - RNA, 1714 nt, Artificial Sequence
  mRNA product Design a-1 (hSL-A64-N5) comprising derived and/or modified sequence from LASV(LASV003-NIG-2008;Clade II)__AIT17580__GPCmut4 (opt1)
aggagagucccgcagucggcguccagcggcucugcuuguucgugugugugucguugcaggccuuauucaagcuuaccaugggccagaucaucaccuucuuccaggaggugccccacgucaucgaggaggugaugaacaucgugcugaucgcccucagccugcuggccauccucaaggggaucuacaacgucgcgaccugcggccuguucgggcugguguccuuccuccugcugugcggccgcagcugcuccacgaccuacaaggggguguacgagcuccagacccuggagcuggacauggccagccucaacaugugcaugccgcuguccugcacgaagaacaacagccaccacuacaucauggucggcaacgagaccggccuggagcucacccugaccaacacguccaucaucaaccacaaguucugcaaccugagcgacgcccacaagaagaaccucuacgaccacgcccugauguccaucaucagcaccuuccaccuguccauccccaacuucaaccaguacgaggccaugagcugcgacuucaacgggggcaagaucuccgugcaguacaaccucagccacaccuacgcgguggacgccgccaaccacugcgggaccaucgccaacggcguccugcagacguucaugcggauggcguggggcggguccuacaucgcccuggacagcggcaagggguccugggacugcaucaugaccagcuaccaguaccucaucauccagaacaccaccugggaggaccacugccaguucucccgccccagccccaucggcuaccuggggcugcucagccagcggacgcgcgacaucuacaucucccggcgccgccggggcaccuucaccuggacccucagcgacuccgagagcaacgagacgccgggcggguacugccugacccgguggaugcugaucgaggccgagcucaagugcuucggcaacaccgccguggccaagugcaacgagaagcacgacgaggaguucugcgacaugcugcgccuguucgacuucugcaagcaggcgauccggcgccucaaggcccccgcccagauguccauccagcugaucaacaaggccgugaacgcccugaucaacgaccagcucaucaugaagaaccaccuccgggacaucauggggauccccuacugcaacuacagcaaguacugcuaccugaaccacaccgucacgggccgcaccucccugccccggugcugccuggugagcaacggguccuaccugaacgagacccacuucagcgacgacaucgagcagcaggcggacaacaugaucaccgagcuccugcagaaggaguacauggaccgccagggcaagacgccccugggccucguggaccuguucgucuucuccaccagcuucuaccugaucuccaucuuccugcaccucgugaagaucccgacccaccggcacgugaucgggaagcccugccccaagccccaccgccugaaccacaugggcaucugcagcugcgggcuguacaagcacccgggcguccccgugaaguggaagcggugaggacuagucccuguucccagagcccacuuuuuuuucuuuuuuugaaauaaaauagccugucuuucagaucucaaaggcucuuuucagagccaccaaaaaaaaaaaaaaaaaaaaaaaaaaaaaaaaaaaaaaaaaaaaaaaaaaaaaaaaaaaaaaaaagaauu

SEQ ID NO: 26516 - RNA, 1714 nt, Artificial Sequence
  mRNA product Design a-1 (hSL-A64-N5) comprising derived and/or modified sequence from LASV(LASV035-NIG-2009;Clade II)__AIT17588__GPCmut4 (opt1)
aggagagucccgcagucggcguccagcggcucugcuuguucgugugugugucguugcaggccuuauucaagcuuaccaugggccagaucaucaccuucuuccaggaggugccccacgucaucgaggaggugaugaacaucgugcugaucgcccucagccugcuggccauccucaaggggaucuacaacgucgcgaccugcggccuguucgggcugguguccuuccuccugcugugcggccgcagcugcuccacgaccuacaaggggguguacgagcuccagacccuggagcuggacauggccagccucaacaugugcaugccgcuguccugcacgaagaacaacagccaccacuacaucauggucggcaacgagaccggccuggagcucacccugaccaacacguccaucaucaaccacaaguucugcaaccugagcgacgcccacaagaagaaccucuacgaccacgcccugauguccaucaucagcaccuuccaccuguccauccccaacuucaaccaguacgaggccaugagcugcgacuucaacgggggcaagaucuccgugcaguacaaccucagccacgcguacgccguggacgccgccaaccacugcgggaccaucgcgaacggcguccugcagaccuucaugcggauggccuggggcggguccuacaucgcccuggacagcggcaagggguccugggacugcaucaugacgagcuaccaguaccucaucauccagaacaccaccugggaggaccacugccaguucucccgccccagccccaucggcuaccuggggcugcucagccagcggacccgcgacaucuacaucucccggcgccgccggggcacguucaccuggacccucagcgacuccgagggcaacgagacccccgggggcuacugccugacgcgguggaugcugaucgaggccgagcucaagugcuucgggaacaccgccguggcgaagugcaacgagaagcacgacgaggaguucugcgacaugcugcgccuguucgacuucugcaagcaggccauccggcgccucaaggcccccgcccagaugagcauccagcugaucaacaaggccgugaacgcgcugaucaacgaccagcucaucaugaagaaccaccuccgggacaucaugggcauccccuacugcaacuacuccaaguacugcuaccugaaccacaccgucaccgggaagacgagccugccccgcugcugccugguguccaacggcagcuaccugaacgagacccacuucuccgacgacaucgagcagcaggccgacaacaugaucaccgagcuccugcagaaggaguacaucgaccggcagggcaagaccccgcuggggcucguggaccuguucgucuucagcacguccuucuaccugaucagcaucuuccugcaccucgugaagaucccgacccaccgccacgugaucggcaagcccugccccaagccccaccggcugaaccacauggggaucugcuccugcggccuguacaagcacccggggguccccgugaaguggaagcgcugaggacuagucccuguucccagagcccacuuuuuuuucuuuuuuugaaauaaaauagccugucuuucagaucucaaaggcucuuuucagagccaccaaaaaaaaaaaaaaaaaaaaaaaaaaaaaaaaaaaaaaaaaaaaaaaaaaaaaaaaaaaaaaaaagaauu

SEQ ID NO: 26517 - RNA, 1714 nt, Artificial Sequence
  mRNA product Design a-1 (hSL-A64-N5) comprising derived and/or modified sequence from LASV(LASV1000-NIG-2009;Clade II)__AIT17782__GPCmut4 (opt1)
aggagagucccgcagucggcguccagcggcucugcuuguucgugugugugucguugcaggccuuauucaagcuuaccaugggccagaucaucaccuucuuccaggaggugccccacgucaucgaggaggugaugaacaucgugcugaucgcccucagccugcuggccauccucaaggggaucuacaacgucgcgaccugcggccuguucgggcugguguccuuccuccugcugugcggccgcagcugcuccacgaccuacaaggggguguacgagcuccagacccuggagcuggacauggccagccucaacaugugcaugccgcuguccugcacgaagaacaacagccaccacuacaucauggucggcaacgagaccggccuggagcucacccugaccaacacguccaucaucaaccacaaguucugcaaccugagcgacgcccacaagaagaaccucuacgaccacgcccugauguccaucaucagcaccuuccaccuguccauccccaacuucaaccaguacgaggccaugagcugcgacuucaacgggggcaagaucuccgugcaguacaaccucagccacaccuacgcgguggacgccgccaaccacugcgggaccaucgccaacggcguccugcagacguucaugcggauggcguggggcggguccuacaucgcccuggacagcggcaagggguccugggacugcaucaugaccagcuaccaguaccucaucauccagaacaccaccugggaggaccacugccaguucucccgccccagccccaucggcuaccuggggcugcucagccagcggacgcgcgacaucuacaucucccggcgccgccggggcaccuucaccuggacccucagcgacuccgagggcaacgagacgcccgggggcuacugccugacccgguggaugcugaucgaggccgagcucaagugcuucgggaacaccgccguggccaagugcaacgagaagcacgacgaggaguucugcgacaugcugcgccuguucgacuucugcaagcaggcgaucaagcggcucaagacccccgcccagaugagcauccagcugaucaacaaggccgugaacgcccugaucaacgaccagcucaucaugaagaaccaccuccgcgacaucaugggcauccccuacugcaacuacuccaaguacugcuaccugaaccacacggucaccgggaagaccagccugccccggugcugccugguguccaacggcagcuaccugaacgagacccacuucuccgacgacaucgagcagcaggccgacaacaugaucacggagcuccugcagaaggaguacaucgaccgccagggcaagaccccgcuggggcucguggaccuguucgucuucagcaccuccuucuaccugaucagcaucuuccugcaccucgugaagaucccgacccaccggcacguggucggcaagcccugccccaagccccaccgccugaaccacauggggaucugcuccugcggccuguacaagcacccgggggugcccgugaaguggaagcggugaggacuagucccuguucccagagcccacuuuuuuuucuuuuuuugaaauaaaauagccugucuuucagaucucaaaggcucuuuucagagccaccaaaaaaaaaaaaaaaaaaaaaaaaaaaaaaaaaaaaaaaaaaaaaaaaaaaaaaaaaaaaaaaaagaauu

SEQ ID NO: 26518 - RNA, 1714 nt, Artificial Sequence
  mRNA product Design a-1 (hSL-A64-N5) comprising derived and/or modified sequence from LASV(LASV221-NIG-2010;Clade II)__AIT17624__GPCmut4 (opt1)
aggagagucccgcagucggcguccagcggcucugcuuguucgugugugugucguugcaggccuuauucaagcuuaccaugggccagaucaucaccuucuuccaggaggugccccacgucaucgaggaggugaugaacaucgugcugaucgcccucagccugcuggccauccucaaggggaucuacaacgucgcgaccugcggccuguucgggcugguguccuuccuccugcugugcggccgcagcugcuccacgaccuacaaggggguguacgagcuccagacccuggagcuggacauggccagccucaacaugugcaugccgcuguccugcacgaagaacaacagccaccacuacaucauggucggcaacgagaccggccuggagcucacccugaccaacacguccaucaucaaccacaaguucugcaaccugagcgacgcccacaagaagaaccucuacgaccacgcccugauguccaucaucagcaccuuccaccuguccauccccaacuucaaccaguacgaggccaugagcugcgacuucaacgggggcaagaucuccgugcaguacaaccucagccacaccuacgcgaucgacgccgccaaccacugcgggaccaucgccaacggcgugcugcagacguucaugcggauggcguggggcggguccuacaucgcccuggacagcggcaagggguccugggacugcaucaugaccagcuaccaguaccucaucauccagaacaccaccugggaggaccacugccaguucucccgccccagccccaucggcuaccuggggcugcucagccagcggacgcgcgacaucuacaucucccggcgccgccggggcaccuucaccuggacccucagcgacuccgagggcaacgagacgcccgggggcuacugccugacccgguggaugcugaucgaggccgagcucaagugcuucgggaacaccgccgucgccaagugcaacgagaagcacgacgaggaguucugcgacaugcugcgccuguucgacuucugcaagcaggcgauccggcgccucaagacccccgcccagaugagcauccagcugaucaacaaggccgugaacgcccugaucaacgaccagcucaucaugaagaaccaccuccgggacaucaugggcauccccuacugcaacuacuccaaguacugcuaccugaaccacacggugaccgggaagaccagccugccccgcugcugccuggucuccaacggcagcuaccugaacgagacccacuucuccgacgacaucgagcagcaggccgacaacaugaucacggagaugcuccagaaggaguacauggaccggcagggcaagaccccgcuggggcugguggaccucuucguguucagcaccuccuucuaccugaucagcaucuuccugcaccuggucaagaucccgacccaccgccacgugaucggcaagcccugccccaagccccaccggcucaaccacauggggaucugcuccugcggccuguacaagcacccgggggugcccgucaaguggaagcgcugaggacuagucccuguucccagagcccacuuuuuuuucuuuuuuugaaauaaaauagccugucuuucagaucucaaaggcucuuuucagagccaccaaaaaaaaaaaaaaaaaaaaaaaaaaaaaaaaaaaaaaaaaaaaaaaaaaaaaaaaaaaaaaaaagaauu

SEQ ID NO: 26519 - RNA, 1714 nt, Artificial Sequence
  mRNA product Design a-1 (hSL-A64-N5) comprising derived and/or modified sequence from LASV(LASV237-NIG-2010;Clade II)__AIT17638__GPCmut4 (opt1)
aggagagucccgcagucggcguccagcggcucugcuuguucgugugugugucguugcaggccuuauucaagcuuaccaugggccagaucaucaccuucuuccaggaggugccccacgucaucgaggaggugaugaacaucgugcugaucgcccucagccugcuggccauccucaaggggaucuacaacgucgcgaccugcggccuguucgggcugguguccuuccuccugcugugcggccgcagcugcuccacgaccuacaaggggguguacgagcuccagacccuggagcuggacauggccagccucaacaugugcaugccgcuguccugcacgaagaacaacagccaccacuacaucauggucggcaacgagaccggccuggagcucacccugaccaacacguccaucaucaaccacaaguucugcaaccugagcgacgcccacaagaaggaccucuacgaccacgcccugauguccaucaucagcaccuuccaccuguccauccccaacuucaaccaguacgaggccaugagcugcgacuucaacgggggcaagaucuccgugcaguacaaccucagccacaccuacgcgguggacgccgccaaccacugcgggaccaucgccaacggcguccugcagacguucaugcggauggcguggggcggguccuacaucgcccuggacagcggcaagggguccugggacugcaucaugaccagcuaccaguaccucaucauccagaacaccaccugggaggaccacugccaguucucccgccccagccccaucggcuaccuggggcugcucagccagcggacgcgcgacaucuacaucucccggcgccgccggggcaccuucaccuggacccucagcgacuccgagggcaacgagacgcccgggggcuacugccugacccgguggaugcugaucgaggccgagcucaagugcuucgggaacaccgccguggccaagugcaacgagaagcacgacgaggaguucugcgacaugcugcgccuguucgacuucugcaagcaggcgauccggcgccucaagacccccgcccagaugagcauccagcugaucaacaaggccgugaacgcccugaucaacgaccagcucaucaugaagaaccaccuccgggacaucaugggcauccccuacugcaacuacuccaaguacugcuaccugaaccacacggucaccgggaagaccagccugccccgcugcugccugguguccaacggcagcuaccugaacgagacccacuucuccgacgacaucgagcagcaggccgacaacaugaucacggagcuccugcagaaggaguacauggaccggcagggcaagaccccgcuggggcucguggaccuguucgucuucagcaccuccuucuaccugaucagcaucuuccugcaccucaucaagaucccgacccaccgccacaucacgggcaagcccugccccaagccccaccggcugaaccacauggggaucugcuccugcggccuguacaagcacccgggggugcccgugaaguggaagcgcugaggacuagucccuguucccagagcccacuuuuuuuucuuuuuuugaaauaaaauagccugucuuucagaucucaaaggcucuuuucagagccaccaaaaaaaaaaaaaaaaaaaaaaaaaaaaaaaaaaaaaaaaaaaaaaaaaaaaaaaaaaaaaaaaagaauu

SEQ ID NO: 26520 - RNA, 1714 nt, Artificial Sequence
  mRNA product Design a-1 (hSL-A64-N5) comprising derived and/or modified sequence from LASV(LASV253-NIG-2011;Clade II)__AIT17670__GPCmut4 (opt1)
aggagagucccgcagucggcguccagcggcucugcuuguucgugugugugucguugcaggccuuauucaagcuuaccaugggccagaucaucaccuucuuccaggaggugccccacgucaucgaggaggugaugaacaucgugcugaucgcccucagccugcuggccauccucaaggggaucuacaacgucgcgaccugcggccuguucgggcugguguccuuccuccugcugugcggccgcagcugcuccacgaccuacaaggggguguacgagcuccagacccuggagcuggacauggccagccucaacaugugcaugccgcuguccugcacgaagaacaacagccaccacuacaucauggucggcaacgagaccggccuggagcucacccugaccaacacguccaucaucaaccacaaguucugcaaccugagcgacgcccacaagaagaaccucuacgaccacgcccugauguccaucaucagcaccuuccaccuguccauccccaacuucaaccaguacgaggccaugagcugcgacuucaacgggggcaagaucuccgugcaguacaaccucagccacaccuacgcgguggacgccgccaaccacugcgggaccaucgccaacggcguccugcagacguucaugcggauggcguggggcggguccuacaucgcccuggacagcggcaagggguccugggacugcaucaugaccagcuaccaguaccucaucauccagaacaccaccugggaggaccacugccaguucucccgccccagccccaucggcuaccuggggcugcucagccagcggacgcgcgacaucuacaucucccggcgccgccggggcaccuucaccuggacccucagcgacuccgagggcaacgagacgcccgggggcuacugccugacccgguggaugcugaucgaggccgagcucaagugcuucgggaacaccgccguggccaagugcaacgagaagcacgacgaggaguucugcgacaugcugcgccuguucgacuucugcaagcaggcgauccggcgccucaaggcccccgcccagaugagcauccagcugaucaacaaggccgugaacgcccugaucaacgaccagcucaucaugaagaaccaccuccgggacaucaugggcaucccguacugcaacuacuccaaguacugcuaccugaaccacaccgucacggggcgcaccagccugccccggugcugccugguguccaacggcagcuaccugaacgagacccacuucuccgacgacaucgagcagcaggcggacaacaugaucaccgagcuccugcagaaggaguacaucgaccgccagggcaagacgccccuggggcucguggaccuguucgucuucagcaccuccuucuaccugaucagcaucuuccugcaccucgugaagaucccgacccaccggcacaucaucggcaagcccugccccaagccccaccgccugaaccacauggggaucugcuccugcggccuguacaagcacccgggggugcccgucaaguggaagcggugaggacuagucccuguucccagagcccacuuuuuuuucuuuuuuugaaauaaaauagccugucuuucagaucucaaaggcucuuuucagagccaccaaaaaaaaaaaaaaaaaaaaaaaaaaaaaaaaaaaaaaaaaaaaaaaaaaaaaaaaaaaaaaaaagaauu

SEQ ID NO: 26521 - RNA, 1714 nt, Artificial Sequence
  mRNA product Design a-1 (hSL-A64-N5) comprising derived and/or modified sequence from LASV(LASV254-NIG-2011;Clade II)__AIT17674__GPCmut4 (opt1)
aggagagucccgcagucggcguccagcggcucugcuuguucgugugugugucguugcaggccuuauucaagcuuaccaugggccagaucaucaccuucuuccaggaggugccccacgucaucgaggaggugaugaacaucgugcugaucgcccucagccugcuggccauccucaaggggaucuacaacgucgcgaccugcggccuguucgggcugguguccuuccuccugcugugcggccgcagcugcuccacgaccuacaaggggguguacgagcuccagacccuggagcuggacaugaccaaccucaacaugugcaugccgcugagcugcaccaagaacaacucccaccacuacaucauggucggcaacgagaccggccuggagcucacccugacgaacaccagcaucaucaaccacaaguucugcaaccuguccgacgcccacaagaagaaccucuacaaccacgcccugaugagcaucaucuccaccuuccaccugagcauccccaacuucaaccaguacgaggccauguccugcgacuucaacgggggcaagaucagcgugcaguacaaccucucccacagcuacgccguggacgcggccaaccacugcgggaccaucgccaacggcguccugcagacguucaugcggauggccuggggcggguccuacaucgcgcuggacagcggcaaggggaacugggacugcaucaugaccuccuaccaguaccucaucauccagaacaccaccugggaggaccacugccaguucagccgccccucccccaucggcuaccuggggcugcucagccagcggacgcgcgacaucuacaucagccggcgccgccggggcaccuucaccuggacccucuccgacagcgagggcaacgagacgcccgggggcuacugccugacccgguggaugcugaucgaggccgagcucaagugcuucgggaacaccgccguggccaagugcaacgagaagcacgacgaggaguucugcgacaugcugcgccuguucgacuucugcaagcaggccauccggcgccucaagacccccgcgcaggccaacauccagcugaucaacaaggccgugaacgcccugaucaacgaccagcucaucaugaagaaccaccuccgggacaucaugggcauccccuacugcaacuacuccaaguacugcuaccugaaccacacggucaccgggaagaccagccugccccgcugcugccugguguccaacggcagcuaccugaacgagacccacuucuccgacgacaucgagcagcaggccgacaacaugaucacggagcuccugcagaaggaguacauggaccggcagggcaagaccccgcuggggcucguggaccuguucgucuucagcaccuccuucuaccugaucagcaucuuccugcaccucgugaagaucccgacccaccgccacgugaucggcaagcccugccccaagccccaccggcugaaccacauggggaucugcuccugcggccuguacaagcacccggggguccccgugaaguggaagcgcugaggacuagucccuguucccagagcccacuuuuuuuucuuuuuuugaaauaaaauagccugucuuucagaucucaaaggcucuuuucagagccaccaaaaaaaaaaaaaaaaaaaaaaaaaaaaaaaaaaaaaaaaaaaaaaaaaaaaaaaaaaaaaaaaagaauu

SEQ ID NO: 26522 - RNA, 1714 nt, Artificial Sequence
  mRNA product Design a-1 (hSL-A64-N5) comprising derived and/or modified sequence from LASV(Nig08-A19;Clade III)__ADU56618__GPCmut4 (opt1)
aggagagucccgcagucggcguccagcggcucugcuuguucgugugugugucguugcaggccuuauucaagcuuaccaugggccagaucgugaccuucuuccaggaggucccccacgugaucgaggaggugaugaacaucguccugaucgcccucagcauccuggccauccugaaggggcucuacaacaucgcgaccugcggccugaucgggcuggugacguuccuccugcuguccggccgcagcugcuccaugaccuacaaggggguguacgagcuccagacccuggagcugaacaugaacacccucaacaugugcaugccgcugagcugcaccaagaacaacucccaccacuacaucauggucggcaacgagaccggccuggagcucacccugacgaacaccagccugcuccaccacaaguucugcaaccuguccgacgcccacaagaagaaccuguacgaccacacccucaugagcaucaucuccaccuuccaccugagcauccccaacuucaaccaguacgaggccauguccugcgacuucaacgggggcaagaucacggugcaguacaaccugagccacuccuacgccaucgacgccgcgaaccacugcgggaccguggccaacggcguccuccagaccuucaugcggauggccuggggcgggagcuacaucgcccuggacuccggccgcgggaagugggacugcaucaugaccagcuaccaguaccugaucauccagaacacgaccugggaggaccacugccaguucucccggcccagccccaucggcuaccucgggcugcugucccagcgcacccgggacaucuacaucagccgccggcgccggggcaccuucacguggacccugagcgacuccgagggcaacgagacccccgggggcuacugccucacccgcuggaugcugaucgaggcggagcugaagugcuucgggaacacggccguggccaagugcaacgagaagcacgacgaggaguucugcgacaugcuccggcuguucgacuucugcaagcaggccauccgccggcugaaggcccccgcgcagaugagcauccagcucaucaacaaggccgugaacgcccugaucaacgaccagcugaucaugaagaaccaccuccgcgacaucaugggcauccccuacugcaacuacuccaaguacugcuaccugaaccacaccagcaccgggcggaccucccugccccgcugcugccucgucagcaacggcuccuaccugaacgagacgcacuucagcgacgacaucgagcagcaggccgacaacaugaucaccgagaugcugcagaaggaguaccucgaccggcagggcaagaccccgcuggggcugguggaccuguucguguucuccaccagcuucuaccucaucuccaucuuccugcaccuggucaagaucccgacgcaccgccacaucgugggcaagcccugccccaagccccaccggcucaaccacauggggaucugcagcugcggccuguacaagcagccgggggugcccguccgcuggaagcggugaggacuagucccuguucccagagcccacuuuuuuuucuuuuuuugaaauaaaauagccugucuuucagaucucaaaggcucuuuucagagccaccaaaaaaaaaaaaaaaaaaaaaaaaaaaaaaaaaaaaaaaaaaaaaaaaaaaaaaaaaaaaaaaaagaauu

SEQ ID NO: 26523 - RNA, 1717 nt, Artificial Sequence
  mRNA product Design a-1 (hSL-A64-N5) comprising derived and/or modified sequence from LASV(G1180-SLE-2010;Clade IV)__AIT17168__GPCmut4 (opt1)
aggagagucccgcagucggcguccagcggcucugcuuguucgugugugugucguugcaggccuuauucaagcuuaccaugggccagaucgugaccuucuuccaggaggucccccacgugaucgaggaggugaugaacaucguccugaucgcccucagcauccuggccgugcugaaggggcucuacaacuucgcgaccugcggccugguggggcugcucaccuuccugcugcucugcggccgcuccugcaccgccagccgguacaagggggucuacgagcugcagacccuggagcucaacauggagacccugaacaugugcaugccgcuguccugcaccaagaacaacagccaccacuacaucauggugggcaacgagaccggccucgagcugacccugacgaacaccuccaucaucaaccacaaguucugcaaccucagcgacgcccacaagaagaaccuguacgaccacgcccugauguccaucaucagcaccuuccaccucuccauccccaacuucaaccaguacgaggccaugagcugcgacuucaacgggggcaagaucuccgugcaguacaaccugagccacuccuacgcgggggacgccgccaaccacugcggcaccgucgccaacggggugcugcagacguucaugcgcauggcguggggcggcagcuacaucgcccucgacuccgggcacggcagcugggacugcaucaugaccuccuaccaguaccugaucauccagaacaccaccugggaggaccacugccaguucagccggcccucccccaucggguaccugggccuccugagccagcgcacgcgggacaucuacaucagccgccggcgccggggcaccuucaccuggacccuguccgacagcgaggggaaggacacgccgggcggguacugccugacccgcuggaugcucaucgaggccgagcugaagugcuucggcaacaccgccguggccaagugcaacgagaagcacgacgaggaguucugcgacaugcugcggcuguucgacuucugcaagcaggcgauccagcgccugaaggcccccgcccagauguccauccagcugaucaacaaggccgucaacgcccucaucaacgaccagcugaucaugaagaaccaccuccgggacaucauggggauccccuacugcaacuacagcaaguacugcuaccucaaccacaccacgaccggcaagaccucccugcccaagugcugccuggugagcaacggcuccuaccucaacgagacccacuucagcgacgacaucgagcagcaggcggacaacaugaucacggagaugcugcagaaggaguacauggagcgccaggggaagacgccccugggccucguggaccuguucgucuucuccaccagcuucuaccugaucuccaucuuccugcaccucgugaagaucccgacccaccggcacaucgugggcaagagcugccccaagccccaccgccugaaccacauggggaucugcuccugcgggcuguacaagcagcccggcgucccggugaaguggaagcggugaggacuagucccuguucccagagcccacuuuuuuuucuuuuuuugaaauaaaauagccugucuuucagaucucaaaggcucuuuucagagccaccaaaaaaaaaaaaaaaaaaaaaaaaaaaaaaaaaaaaaaaaaaaaaaaaaaaaaaaaaaaaaaaaagaauu

SEQ ID NO: 26524 - RNA, 1717 nt, Artificial Sequence
  mRNA product Design a-1 (hSL-A64-N5) comprising derived and/or modified sequence from LASV(G1442-SLE-2011;Clade IV)__AIT17180__GPCmut4 (opt1)
aggagagucccgcagucggcguccagcggcucugcuuguucgugugugugucguugcaggccuuauucaagcuuaccaugggccagaucgugaccuucuuccaggaggucccccacgugaucgaggaggugaugaacaucguccugaucgcccucagcauccuggccgugcugaaggggcucuacaacguggcgaccugcggccugaucgggcuggucacguuccuccugcugugcggccgcuccugcaccaccacccucuacaaggggguguacgagcugcagacgcuggagcucaacauggagacccugaacaugugcaugccgcugagcugcaccaagaacaacucccaccacuacauccgggugggcaacgagacgggccucgagcugacccugaccaacaccagcaucaucaaccacaaguucugcaaccucuccgacgcccacaagaagaaccuguacgaccacgcccugaugagcaucaucuccacguuccaccucagcauccccaacuucaaccaguacgaggccauguccugcgacuucaacgggggcaagaucagcguccaguacaaccugucccacagcuacgccggggacgcggccaaccacugcggcaccguggccaacggggugcugcagaccuucaugcgcauggccuggggcggcuccuacaucgcgcucgacagcgggcggggcaacugggacugcaucaugaccuccuaccaguaccugaucauccagaacacgaccugggacgaccacugccaguucagccgccccucccccaucggguaccugggccuccugagccagcggacccgcgacgucuacaucucccggcgccgccggggcaccuucacguggacccugagcgacagcgaggggaaggacaccccgggcggguacugccugacccgguggaugcucaucgaggccgagcugaagugcuucggcaacacggccguggccaagugcaacgagaagcacgacgaggaguucugcgacaugcugcgccucuucgacuucugcaagcaggccauccagcggcugaaggcgcccgcccagauguccauccagcugaucaacaaggccgugaacgcccucaucaacgaccagcugaucaugaagaaccaccuccgcgacaucauggggauccccuacugcaacuacagcaaguacugcuaccugaacaacaccgccaccggcaagaccucccugcccaagugcugccugaucagcaacggcuccuaccucaacgagacgcacuucagcgacgacaucgagcaggaggcggacaacaugaucaccgagaugcugcagaaggaguacauggagcggcaggggaagacgccccugggccucgucgaccuguucguguucuccaccagcuucuaccugaucuccaucuuccugcaccucgugaagaucccgacccaccgccacaucgucggcaagagcugccccaagccccaccggcugaaccacauggggaucugcuccugcgggcuguacaagcagcccggcgugccggugcgcuggaagcggugaggacuagucccuguucccagagcccacuuuuuuuucuuuuuuugaaauaaaauagccugucuuucagaucucaaaggcucuuuucagagccaccaaaaaaaaaaaaaaaaaaaaaaaaaaaaaaaaaaaaaaaaaaaaaaaaaaaaaaaaaaaaaaaaagaauu

SEQ ID NO: 26525 - RNA, 1717 nt, Artificial Sequence
  mRNA product Design a-1 (hSL-A64-N5) comprising derived and/or modified sequence from LASV(G3010-SLE-2013;Clade IV)__AIT17344__GPCmut4 (opt1)
aggagagucccgcagucggcguccagcggcucugcuuguucgugugugugucguugcaggccuuauucaagcuuaccaugggccagaucgugaccuucuuccaggaggucccccacgugaucgaggaggugaugaacaucguccugaucgcccucagcauccuggccgugcugaaggggcucuacaacuucgcgaccugcggccugguggggcuggucacguuccuccugcugugcggccgcuccugcaccaccagccucuacaaggggguguacgagcugcagacccuggagcucaacauggagacgcugaacaugugcaugccgcuguccugcaccaagaacaacagccaccacuacaucauggugggcaacgagaccggccucgagcugacgcugaccaacaccuccaucaucaaccacaaguucugcaaccucagcgacgcccacaagaagaaccuguacaaccacgcccugauguccaucaucagcaccuuccaccucuccauccccaacuucaaccaguacgaggccaugagcugcgacuucaacgggggcaagaucuccguccaguacaaccugagccacuccuacgccggggacgcggccagccacugcggcacgguggccaacggggugcugcagaccuucaugcggauggccuggggcggcuccuacaucgcgcucgacagcggguacggcaagugggacugcaucaugaccuccuaccaguaccugaucauccagaacaccacgugggaggaccacugccaguucagccgccccucccccaucggguaccugggccuccugagccagcggacccgcgacaucuacaucagccggcgccgccggggcaccuucaccuggacgcuguccgacagcgaggggaaggacaccccgggcggguacugccugacccgguggaugcucaucgaggccgagcugaagugcuucggcaacaccgccgucgccaagugcaacgagaagcacgacgaggaguucugcgacaugcugcgccucuucgacuucugcaagcaggccauccagcggcugaagacgcccgcgcagauguccauccagcugaucaacaaggccgugaacgcccucaucaacgaccagcugaucaugaagaaccaccuccgcgacaucauggggauccccuacugcaacuacagcaaguacugcuaccugaaccacaccaccaccggcaagacgucccugcccaagugcugccuggugagcaacggcuccuaccucaacgagacccacuucagcgacgacaucgagcagcaggccgacaacaugaucaccgagaugcugcagaaggaguacauggagcggcaggggaagacgccccugggccucgucgaccuguucguguucuccaccagcuucuaccugaucuccaucuuccugcaccucgugaagaucccgacccaccgccacaucgucggcaagagcugccccaagccccaccggcugaaccacauggggaucugcuccugcgggcuguacaagcagcccggcgugccggugcgcuggaagcggugaggacuagucccuguucccagagcccacuuuuuuuucuuuuuuugaaauaaaauagccugucuuucagaucucaaaggcucuuuucagagccaccaaaaaaaaaaaaaaaaaaaaaaaaaaaaaaaaaaaaaaaaaaaaaaaaaaaaaaaaaaaaaaaaagaauu

SEQ ID NO: 26526 - RNA, 1717 nt, Artificial Sequence
  mRNA product Design a-1 (hSL-A64-N5) comprising derived and/or modified sequence from LASV(G502-SLE-2009;Clade IV)__AIT17126__GPCmut4 (opt1)
aggagagucccgcagucggcguccagcggcucugcuuguucgugugugugucguugcaggccuuauucaagcuuaccaugggccagaucgugaccuucuuccaggaggucccccacgugaucgaggaggugaugaacaucguccugaucgcccucagcauccuggccgugcugaaggggcucuacaacuucgcgaccugcggccugguggggcugcucacguuccugcugcucugcggccgcuccugcaccaccgggcuguacaagggcgucuacgagcugcagacccucgagcugaacauggagacgcugaacaugugcaugccgcucagcugcaccaagaacaacucccaccacuacaucauggugggcaacgagaccgggcuggagcugacgcucaccaacaccagcaucaucaaccacaaguucugcaaccuguccgacgcccacaagaagaaccuguacgaccacgcccucaugagcaucaucuccaccuuccaccugagcauccccaacuucaaccaguacgaggccauguccugcgacuucaacggcgggaagaucagcgugcaguacaaccugucccacagcuacgccggcgacgcggccgaccacugcgggacggucgccaacggcgugcuccagaccuucaugcggauggccuggggcggguccuacaucgcgcuggacagcggccgcgggcggugggacugcaucaugaccuccuaccaguaccugaucauccagaacaccacgugggaggaccacugccaguucagccgccccucccccaucggcuaccucggccugcugagccagcggacccgcgacaucuacaucucccggcgccgccgggggaccuucaccuggacgcugagcgacagcgagggcaaggacacccccgggggcuacugccucacccgguggaugcugaucgaggccgagcugaagugcuucgggaacaccgccguggccaagugcaacgagaagcacgacgaggaguucugcgacaugcuccgccuguucgacuucugcaagcaggccauccagcggcugaaggcgcccgcccagauguccauccagcucaucaacaaggccgucaacgcccugaucaacgaccagcuggugaugaagaaccaccuccgcgacaucaugggcauccccuacugcaacuacagccgguacugcuaccugaaccacacgaccaccggccgcaccucccugcccaagugcugccucgugagcaacggguccuaccugaacgagacgcacuucagcgacgacaucgagcagcaggccgacaacaugaucaccgagaugcugcagaaggaguacauggagcggcagggcaagaccccgcucgggcuggucgaccuguucguguucuccaccagcuucuaccugaucuccaucuuccuccaccuggugaagaucccgacgcaccgccacaucgucggcaagagcugccccaagccccaccggcugaaccacauggggaucugcuccugcggccucuacaagcagcccggcgugccggugaaguggaagcgcugaggacuagucccuguucccagagcccacuuuuuuuucuuuuuuugaaauaaaauagccugucuuucagaucucaaaggcucuuuucagagccaccaaaaaaaaaaaaaaaaaaaaaaaaaaaaaaaaaaaaaaaaaaaaaaaaaaaaaaaaaaaaaaaaagaauu

SEQ ID NO: 26527 - RNA, 1717 nt, Artificial Sequence
  mRNA product Design a-1 (hSL-A64-N5) comprising derived and/or modified sequence from LASV(G733-SLE-2010;Clade IV)__AIT17154__GPCmut4 (opt1)
aggagagucccgcagucggcguccagcggcucugcuuguucgugugugugucguugcaggccuuauucaagcuuaccaugggccagaucgugaccuucuuccaggaggucccccacgugaucgaggaggugaugaacaucguccugaucgcccucagcauccuggccgugcugaaggggcucuacaacuucgcgaccugcggcaucguggggcuggucuccuuccugcuccugugcggccgcagcugcacgaccucccuguacaaggggguguacgagcuccagacccuggagcugaacauggagacccucaacaugugcaugccgcugagcugcaccaagaacaacucccaccacuacaucauggugggcaacgagaccggccuggagcucacccugacgaacaccagcaucaucaaccacaaguucugcaaccuguccgacgcccacaagaagaaccucuacgaccacgcccugaugagcaucaucuccaccuuccaccugagcauccccaacuucaaccaguacgaggccauguccugcgacuucaacgggggcaagaucagcguccaguacaaccucucccacagcuacgccggggacgcggccaaccacugcggcaccaucgccaacggggugcugcagacguucaugcggauggccuggggcggcuccuacaucgcgcuggacagcgggcgcgaccggugggacugcaucaugaccuccuaccaguaccucaucauccagaacaccaccugggaggaccacugccaguucagccgccccucccccaucggcuaccuggggcugcucagccagcggacgcgcgacaucuacaucagccggcgccgccggggcaccuucaccuggacccucuccgacagcgagggcaaggacacgcccgggggcuacugccugacccgguggaugcugaucgaggccgagcucaagugcuucgggaacaccgccguggccaagugcaacgagaagcacgacgaggaguucugcgacaugcugcgccuguucgacuucugcaagcaggccauccagcggcucaaggcgcccgcccagauguccauccagcugaucaacaaggccgucaacgcccugaucaacgaccagcucaucaugaagaaccaccuccgcgacaucaugggcauccccuacugcaacuacagcaaguacugcuaccugaaccacaccacgaccgggaagaccucccugcccaagugcugccuggugagcaacggcuccuaccugaacgagacccacuucagcgacgacaucgagcagcaggccgacaacaugaucacggagaugcuccagaaggaguacauggagcggcagggcaagaccccgcuggggcugguggaccucuucgucuucuccaccagcuucuaccugaucuccaucuuccugcaccuggugaagaucccgacccaccgccacguggucggcaagagcugccccaagccccaccggcucaaccacauggggaucugcuccugcggccuguacgggcagcccggcgugccggugaaguggaagcgcugaggacuagucccuguucccagagcccacuuuuuuuucuuuuuuugaaauaaaauagccugucuuucagaucucaaaggcucuuuucagagccaccaaaaaaaaaaaaaaaaaaaaaaaaaaaaaaaaaaaaaaaaaaaaaaaaaaaaaaaaaaaaaaaaagaauu

SEQ ID NO: 26528 - RNA, 1717 nt, Artificial Sequence
  mRNA product Design a-1 (hSL-A64-N5) comprising derived and/or modified sequence from MOPV/LASV reassortant(IGS-1;Clade IV)__AFY05576__GPCmut4 (opt1)
aggagagucccgcagucggcguccagcggcucugcuuguucgugugugugucguugcaggccuuauucaagcuuaccaugggccagaucgugaccuucuuccaggaggucccccacgugaucgaggaggugaugaacaucguccugaucgcccucagcgugcuggccgugcugaaggggcucuacaacuucgcgaccugcggccuggucgggcuggugacguuccuccugcugugcggccgcuccugcaccaccagccucuacaaggggguguacgagcugcagacccuggagcucaacauggagacgcugaacaugugcaugccgcuguccugcaccaagaacaacagccaccacuacaucauggucggcaacgagaccggccucgagcugacgcugaccaacaccuccaucaucaaccacaaguucugcaaccucagcgacgcccacaagaagaaccuguacgaccacgcccugauguccaucaucagcaccuuccaccucuccauccccaacuucaaccaguacgaggccaugagcugcgacuucaacgggggcaagaucuccgugcaguacaaccugagccacuccuacgccggggacgcggccaaccacugcggcacgguggccaacgggguccugcagaccuucaugcggauggccuggggcggcagcuacaucgcgcucgacuccgggcgcggcaacugggacugcaucaugaccagcuaccaguaccugaucauccagaacaccacgugggaggaccacugccaguucucccggcccagccccaucggguaccugggccuccugucccagcgcacccgggacaucuacaucagccgccggcgccggggcaccuucaccuggacgcugagcgacuccgagggggaggacaccccgggcggguacugccugacccgcuggaugcucaucgaggccgagcugaagugcuucggcaacaccgccguggccaagugcaacgagaagcacgacgaggaguucugcgacaugcugcggcuguucgacuucugcaagcaggccauccagcgccugaaggcgcccgcccagaugagcauccagcugaucaacaaggccgugaacgcccucaucaacgaccagcugaucaugaagaaccaccuccgggacaucauggggauccccuacugcaacuacuccaaguacugcuaccucaaccacacgaccaccggccgcaccagccugcccaagugcugccuggucuccaacggcagcuaccucaacgagacgcacuucuccgacgacaucgagcagcaggccgacaacaugaucaccgagaugcugcagaaggaguacauggagcggcaggggaagacgccccugggccucguggaccuguucguguucagcaccuccuucuaccugaucagcaucuuccugcaccucgucaagaucccgacccaccgccacaucguggggaaguccugccccaagccccaccggcugaaccacaugggcaucugcagcugcgggcuguacaagcagcccggcgugccggucaaguggaagcgcugaggacuagucccuguucccagagcccacuuuuuuuucuuuuuuugaaauaaaauagccugucuuucagaucucaaaggcucuuuucagagccaccaaaaaaaaaaaaaaaaaaaaaaaaaaaaaaaaaaaaaaaaaaaaaaaaaaaaaaaaaaaaaaaaagaauu

SEQ ID NO: 26529 - RNA, 1717 nt, Artificial Sequence
  mRNA product Design a-1 (hSL-A64-N5) comprising derived and/or modified sequence from LASV(LM765-SLE-2012;Clade IV)__AIT17814__GPCmut4 (opt1)
aggagagucccgcagucggcguccagcggcucugcuuguucgugugugugucguugcaggccuuauucaagcuuaccaugggccagaucgugaccuucuuccaggaggucccccacgugaucgaggaggugaugaacaucguccugaucgcccucagcauccuggccgugcugaaggggcucuacaacuucgcgaccugcggccugguggggcuggucacguuccuccugcugugcggccgcuccugcaccaccagccucuacaaggggguguacgagcugcagacccuggagcucaacauggagacgcugaacaugugcaugccgcuguccugcaccaagaacaacagccaccacuacaucauggugggcaacgagaccggccucgagcugacgcugaccaacaccuccaucaucgaccacaaguucugcaaccucagcgacgcccaccggaagaaccuguacgaccacgcccugauguccaucaucagcaccuuccaccucuccauccccaacuucaaccaguacgaggccaugagcugcgacuucaacgggggcaagaucuccguccaguacaaccugagccacuccuacgccaaggacgcggccgaccacugcgggacgguggccaacggcgugcugcagaccuucaugcgcauggccuggggcgggagcuacaucgcgcucgacuccggccgggggcgcugggacugcaucaugaccagcuaccaguaccugaucauccagaacaccacgugggaggaccacugccaguucucccggcccagccccaucggcuaccuggggcuccugucccagcgcacccgggacaucuacaucagccgccggcgccggggcaccuucaccuggacgcugagcgacuccgagggcaaggacacccccgggggcuacugccugacccgcuggaugcucaucgaggccgagcugaagugcuucgggaacaccgccgucgccaagugcaacgagaagcacgacgaggaguucugcgacaugcugcggcuguucgacuucugcaagcaggccauccagcgccugaaggcgcccgcccagaugagcauccagcugaucaacaaggccgugaacgcccucaucaacgaccagcugaucaugaagaaccaccuccgggacaucaugggcauccccuacugcaacuacuccaaguacugcuaccucaaccacacgaccaccgggaagaccagccugcccaagugcugccugguguccaacggcagcuaccucaacgagacgcacuucuccgacgacaucgagcagcaggccgacaacaugaucaccgagaugcugcagaaggaguacauggagcgccagggcaagaccccgcuggggcucgucgaccuguucguguucagcaccuccuucuaccugaucagcaucuuccugcaccucgugaagaucccgacgcaccggcacaucgucggcaagcccugccccaagccccaccgccugaaccacauggggaucugcuccugcggccuguacaagcagccgggggugcccgugaaguggaagcggugaggacuagucccuguucccagagcccacuuuuuuuucuuuuuuugaaauaaaauagccugucuuucagaucucaaaggcucuuuucagagccaccaaaaaaaaaaaaaaaaaaaaaaaaaaaaaaaaaaaaaaaaaaaaaaaaaaaaaaaaaaaaaaaaagaauu

SEQ ID NO: 26530 - RNA, 1717 nt, Artificial Sequence
  mRNA product Design a-1 (hSL-A64-N5) comprising derived and/or modified sequence from LASV(LM776-SLE-2012;Clade IV)__AIT17824__GPCmut4 (opt1)
aggagagucccgcagucggcguccagcggcucugcuuguucgugugugugucguugcaggccuuauucaagcuuaccaugggccagaucgugaccuucuuccaggaggucccccacgugaucgaggaggugaugaacaucguccugaucgcccucagcauccuggccgugcugaaggggcucuacaacuucgcgaccugcggccugguggggcuggucacguuccuccugcugugcggccgcuccugcaccaccagcguguacaaggggguguacgagcuccagacccuggagcugaacauggagacgcucaacaugugcaugccgcuguccugcaccaagaacaacagccaccacuacaucauggucggcaacgagaccggccuggagcucacgcugaccaacaccuccaucaucaaccacaaguucugcaaccugagcgacgcccacaagaagaaccucuacgaccacgcccugauguccaucaucagcaccuuccaccuguccauccccaacuucaaccaguacgaggccaugagcugcgacuucaacgggggcaagaucuccgugcaguacaaccucagccacuccuacgccggggacgcggccaaccacugcggcacgguggccaacgggguccugcagaccuucaugcggauggccuggggcggcagcuacaucgcgcuggacuccgggcacggcaagugggacugcaucaugaccagcuaccaguaccucaucauccagaacaccacgugggaggaccacugccaguucucccgccccagccccaucggguaccugggccugcucucccagcggacccgcgacaucuacaucagccggcgccgccggggcaccuucaccuggacgcucagcgacuccgaggggaaggacaccccgggcggguacugccugacccgguggaugcugaucgaggccgagcucaagugcuucggcaacaccgccguggccaagugcaacgagaagcacgacgaggaguucugcgacaugcugcgccuguucgacuucugcaagcaggccauccagcggcucaaggcgcccgcccagaugagcauccagcugaucaacaaggccgugaacgcccugaucaacgaccagcucaucaugaagaaccaccuccgcgacaucauggggauccccuacugcaacuacuccaaguacugcuaccugaaccacacgaccaccggcaagaccagccugcccaagugcugccuggucuccaacggcagcuaccugaacgagacgcacuucuccgacgacaucgagcagcaggccgacaacaugaucaccgagaugcuccagaaggaguacauggagcggcaggggaagacgccccugggccugguggaccucuucguguucagcaccuccuucuaccugaucagcaucuuccugcaccuggucaagaucccgacccaccgccacaucguggggaaguccugccccaagccccaccggcucaaccacaugggcaucugcagcugcgggcuguacaagcagcccggcgugccgguccgcuggaagcggugaggacuagucccuguucccagagcccacuuuuuuuucuuuuuuugaaauaaaauagccugucuuucagaucucaaaggcucuuuucagagccaccaaaaaaaaaaaaaaaaaaaaaaaaaaaaaaaaaaaaaaaaaaaaaaaaaaaaaaaaaaaaaaaaagaauu

SEQ ID NO: 26531 - RNA, 1717 nt, Artificial Sequence
  mRNA product Design a-1 (hSL-A64-N5) comprising derived and/or modified sequence from LASV(Mad39;Clade IV)__ANH09722__GPCmut4 (opt1)
aggagagucccgcagucggcguccagcggcucugcuuguucgugugugugucguugcaggccuuauucaagcuuaccaugggccagaucgugaccuucuuccaggaggucccccacgugaucgaggaggugaugaacaucguccugaucgcccucagcauccuggccgugcugaaggggcucuacaacguggcgaccugcggccugaucgggcuggucacguuccuccugcugugcggccgcuccugcaccaccacccucuacaaggggguguacgagcugcaggcccuggagcucaacauggagacgcugaacaugugcaugccgcugagcugcaccaagaacaacucccaccacuacauccgggugggcaacgagaccggccucgagcugacgcugaccaacaccagccucaucaaccacaaguucugcaaccuguccgacgcccacaagaagaaccuguacgaccacgcccucaugagcaucaucuccaccuuccaccugagcauccccaacuucaaccaguacgaggccauguccugcgacuucaacgacgggaagaucagcguccaguacaaccugucccacacguacgcgggcgacaccgccaaccacugcgggaccguggccaacggcgugcuccagaccuucaugcgcauggccuggggcgggagcuacaucgcgcuggacuccggccgcgggggcugggacugcaucaugacgagcuaccaguaccugaucauccagaacaccaccugggaggaccacugccaguucucccggcccagccccaucggguaccucggccugcugucccagcggacccgcgacaucuacaucagccggcgccgccggggcacguucaccuggacccuguccgacagcgaggggaaggacaccccgggcggguacugccucacgcgguggaugcugaucgaggccgagcugaagugcuucggcaacaccgccgucgccaagugcaacgagaagcacgacgaggaguucugcgacaugcuccgccuguucgacuucugcaagcaggccauccagcggcugaaggcgcccgcccagaugagcauccagcucaucaacaaggccgugaacgcccugaucaacgaccagcugaucaugaagaaccaccuccgcgacaucauggggauccccuacugcaacuacuccaaguacugcuaccugaaccacaccgugaccggcaagacgagccugcccaagugcugccucgucuccaacggcagcuaccugaacgagacccacuucuccgacgacaucgagcagcaggccgacaacaugaucaccgagaugcugcagaaggaguacauggagcggcaggggaagacgccccucggccugguggaccuguucguguucagcaccuccuucuaccugaucagcaucuuccuccaccuggucaagaucccgacccaccgccacgugguggggaagcccugccccaagccccaccggcugaaccacaugggcaucugcuccugcggguucuacaagcagccgggcguccccgugcgcuggaagcggugaggacuagucccuguucccagagcccacuuuuuuuucuuuuuuugaaauaaaauagccugucuuucagaucucaaaggcucuuuucagagccaccaaaaaaaaaaaaaaaaaaaaaaaaaaaaaaaaaaaaaaaaaaaaaaaaaaaaaaaaaaaaaaaaagaauu

SEQ ID NO: 26532 - RNA, 1717 nt, Artificial Sequence
  mRNA product Design a-1 (hSL-A64-N5) comprising derived and/or modified sequence from LASV(Z0947-SLE-2011;Clade IV)__AIT17840__GPCmut4 (opt1)
aggagagucccgcagucggcguccagcggcucugcuuguucgugugugugucguugcaggccuuauucaagcuuaccaugggccagaucgugaccuucuuccaggaggucccccacgugaucgaggaggugaugaacaucguccugaucgcccucagcauccuggccgugcugaaggggcucuacaacuucgcgaccugcggccugguggggcuggucacguuccuccugcugugcggccgcuccugcaccaucagccucuacaaggggguguacgagcugcagacccuggagcucaacauggagacccugaacaugugcaugccgcuguccugcaccaagaacaacagccaccacuacaucauggugggcaacgagaccggccucgagcugacccugacgaacaccuccaucaucaaccacaaguucugcaaccucagcgacgcccacaagaagaaccuguacgaccacgcccugauguccaucaucagcaccuuccaccucuccauccccaacuucaaccaguacgaggccaugagcugcgacuucaacgggggcaagaucuccguccaguacaaccugagccacuccuacgccggggacgcggccaaccacugcggcaccguggccaacggggugcugcagacguucaugcggauggccuggggcggcagcuacaucgcgcucgacuccgggcgcgaccggugggacugcaucaugaccagcuaccaguaccugaucauccagaacaccaccugggaggaccacugccaguucucccgccccagccccaucggcuaccuggggcuccugucccagcggacgcgcgacaucuacaucagccggcgccgccggggcaccuucaccuggacccugagcgacuccgagggcaaggacacgcccgggggcuacugccugacccgguggaugcucaucgaggccgagcugaagugcuucgggaacaccgccgucgccaagugcaacgagaagcacgacgaggaguucugcgacaugcugcgccucuucgacuucugcaagcaggccauccagcggcugaaggcgcccgcccagaugagcauccagcugaucaacaaggccgugaacgcccucaucaacgaccagcugaucaugaagaaccaccuccgcgacaucaugggcauccccuacugcaacuacuccaaguacugcuaccugaaccacaccacgaccgggaagaccagccugcccaagugcugccugguguccaacggcagcuaccucaacgagacccacuucuccgacgacaucgagcagcaggccgacaacaugaucacggagaugcugcagaaggaguacauggagcggcagggcaagaccccgcuggggcucgucgaccuguucguguucagcaccuccuucuaccugaucagcaucuuccugcaccucgugaagaucccgacccaccgccacaucgucggcaagcccugccccaagccccaccggcugaaccacauggggaucugcuccugcggccuguacaagcagccgggggugcccgugaaguggaagcgcugaggacuagucccuguucccagagcccacuuuuuuuucuuuuuuugaaauaaaauagccugucuuucagaucucaaaggcucuuuucagagccaccaaaaaaaaaaaaaaaaaaaaaaaaaaaaaaaaaaaaaaaaaaaaaaaaaaaaaaaaaaaaaaaaagaauu

SEQ ID NO: 26533 - RNA, 1717 nt, Artificial Sequence
  mRNA product Design a-1 (hSL-A64-N5) comprising derived and/or modified sequence from LASV(Josiah;Clade IV)__NP_694870__GPCmut4 (opt1)
aggagagucccgcagucggcguccagcggcucugcuuguucgugugugugucguugcaggccuuauucaagcuuaccaugggccagaucgugaccuucuuccaggaggucccccacgugaucgaggaggugaugaacaucguccugaucgcccucagcgugcuggccgugcugaaggggcucuacaacuucgcgaccugcggccuggucgggcuggugacguuccuccugcugugcggccgcuccugcaccaccagccucuacaaggggguguacgagcugcagacccuggagcucaacauggagacgcugaacaugugcaugccgcuguccugcaccaagaacaacagccaccacuacaucauggucggcaacgagaccggccucgagcugacccugacgaacaccuccaucaucaaccacaaguucugcaaccucagcgacgcccacaagaagaaccuguacgaccacgcccugauguccaucaucagcaccuuccaccucuccauccccaacuucaaccaguacgaggccaugagcugcgacuucaacgggggcaagaucuccgugcaguacaaccugagccacuccuacgccggggacgcggccaaccacugcggcaccguggccaacgggguccugcagacguucaugcggauggccuggggcggcagcuacaucgcgcucgacuccgggcgcggcaacugggacugcaucaugaccagcuaccaguaccugaucauccagaacaccaccugggaggaccacugccaguucucccggcccagccccaucggguaccugggccuccugucccagcgcacgcgggacaucuacaucagccgccggcgccggggcaccuucaccuggacccugagcgacuccgaggggaaggacacgccgggcggguacugccucacccgcuggaugcugaucgaggccgagcugaagugcuucggcaacaccgccguggccaagugcaacgagaagcacgacgaggaguucugcgacaugcuccggcuguucgacuucugcaagcaggccauccagcgccugaaggcgcccgcccagaugagcauccagcucaucaacaaggccgugaacgcccugaucaacgaccagcugaucaugaagaaccaccuccgggacaucauggggauccccuacugcaacuacuccaaguacugcuaccugaaccacaccacgaccggccgcaccagccugcccaagugcugccucgucuccaacggcagcuaccugaacgagacccacuucuccgacgacaucgagcagcaggccgacaacaugaucacggagaugcugcagaaggaguacauggagcggcaggggaagaccccgcucggccugguggaccuguucguguucagcaccuccuucuaccugaucagcaucuuccuccaccuggucaagauccccacccaccgccacaucguggggaaguccugccccaagccccaccggcugaaccacaugggcaucugcagcugcgggcucuacaagcagccgggcgugcccgucaaguggaagcgcugaggacuagucccuguucccagagcccacuuuuuuuucuuuuuuugaaauaaaauagccugucuuucagaucucaaaggcucuuuucagagccaccaaaaaaaaaaaaaaaaaaaaaaaaaaaaaaaaaaaaaaaaaaaaaaaaaaaaaaaaaaaaaaaaagaauu

SEQ ID NO: 26534 - RNA, 1714 nt, Artificial Sequence
  mRNA product Design a-1 (hSL-A64-N5) comprising derived and/or modified sequence from LASV(LP;Clade I)__AAF86701__GPCmut4 (opt1)
aggagagucccgcagucggcguccagcggcucugcuuguucgugugugugucguugcaggccuuauucaagcuuaccaugggccagaucaucaccuucuuccaggaggugccccacgucaucgaggaggugaugaacaucgugcugaucgcccucagccugcuggccauccucaaggggcuguacaacaucgcgaccugcggcaucaucgggcuggucgccuuccucuuccugugcggcaaguccugcagccugacgcucaagggcggguacgagcugcagacccuggagcucaacauggagacccugaacaugugcaugccgcuguccugcaccaagaacagcucccaccacuacauccgcgugggcaacgagacggggcucgagcugacccugaccaacaccagcaucaucaaccacaaguucugcaaccucuccgacgcccacaagaagaaccuguacgaccacgcccugaugagcaucaucuccacguuccaccucagcauccccaacuucaaccaguacgaggccauguccugcgacuucaacggcgggaagaucagcgugcaguacaaccugucccacagcuacgcgggcgacgccgccgagcacugcgggaccgucgccaacggcgugcugcagaccuucaugcggauggcguggggcgggcgcuacaucgcccucgacuccggcaaggggaacugggacugcaucaugaccagcuaccaguaccugaucauccagaacacgaccugggaggaccacugccaguucucccggcccagccccaucggcuaccugggccuccugucccagcgcacccgggacaucuacaucagccgccggcgccgggggaccuucacguggacccugagcgacuccgagggcaacgagacccccgggggcuacugccucacccgcuggaugcugaucgaggccgagcugaagugcuucgggaacacggccguggccaagugcaacgagaagcacgacgaggaguucugcgacaugcuccggcuguucgacuucugcaagcaggcgauccgccggcugaaggccccggcccagaugagcauccagcucaucaacaaggccgucaacgcccugaucaacgaccagcugaucaugaagaaccaccuccgcgacaucaugggcauccccuacugcaacuacuccaaguacugcuaccugaaccacaccagcuccggccggaccagccugcccaagugcugccucaucuccaacgggagcuaccugaacgagacccaguucuccgacgacaucgagcagcaggcggacaacaugaucacggagaugcugcagaaggaguacaucgagcgccagggcaagaccccgcucgggcugguggacaucuucaucuucagcaccuccuucuaccugaucagcaucuuccugcaccucaucaagauccccacccaccggcacaucgugggcaagcccugccccaagccgcaccgccugaaccacaugggggucugcuccugcggccuguacaagcaccccggcgugcccacgaaguggaagcggugaggacuagucccuguucccagagcccacuuuuuuuucuuuuuuugaaauaaaauagccugucuuucagaucucaaaggcucuuuucagagccaccaaaaaaaaaaaaaaaaaaaaaaaaaaaaaaaaaaaaaaaaaaaaaaaaaaaaaaaaaaaaaaaaagaauu

SEQ ID NO: 26535 - RNA, 1714 nt, Artificial Sequence
  mRNA product Design a-1 (hSL-A64-N5) comprising derived and/or modified sequence from LASV(803213;Clade II)__AAF86703__GPCmut4 (opt1)
aggagagucccgcagucggcguccagcggcucugcuuguucgugugugugucguugcaggccuuauucaagcuuaccaugggccagaucaucaccuucuuccaggaggugccccacgucaucgaggaggugaugaacaucgugcugaucgcccucagccugcuggccauccucaaggggaucuacaacgucgcgaccugcggccuguucgggcugaucuccuuccuccugcugugcggccgcagcugcuccgugacguacaaggggguguacgagcuccagacccuggagcugaacauggccaaccucaacaugugcaugccgcugagcugcaccaagaacaacucccaccacuacaucauggucggcaacgagaccggccuggagcucacgcugaccaacaccagcaucaucaaccacaaguucugcaaccuguccgacgcccacaagaagaaccucuacgaccacgcccugaugagcaucaucuccaccuuccaccugagcauccccaacuucaaccaguacgaggccauguccugcgacuucaacgggggcaagaucagcgugcaguacaaccucucccacagcuucgcgguggacgccgccaaccacugcgggacgaucgccaacggcguccugcagaccuucaugcggauggcguggggcggguccuacaucgcccuggacagcggcaaggggaacugggacugcaucaugaccuccuaccaguaccucaucauccagaacaccacgugggaggaccacugccaguucagccgccccucccccaucggcuaccuggggcugcucagccagcggacccgcgacaucuacaucagccggcgccggcgcggcaccuucaccuggacgcuguccgacagcgagggcaacgaggcccccgggggcuacugccugacccgguggaugcucaucgaggccgagcugaagugcuucgggaacaccgccguggcgaagugcaacgagaagcacgacgaggaguucugcgacaugcugcgccucuucgacuucugcaagcaggccaucaagcggcugaagaccccggcccagauguccauccagcugaucaacaaggccgugaacgcccucaucaacgaccagcugaucaugaagaaccaccuccgcgacaucaugggcauccccuacugcaacuacagccgguacugcuaccugaaccacacggucaccgggaagaccucccugccccgcugcugccuggugagcaacggcuccuaccucaacgagacccacuucagcgacgacaucgagcagcaggcggacaacaugaucacggagaugcugcagaaggaguacauggaccggcagggcaagaccccgcuggggcucguggaccuguucgucuucuccaccagcuucuaccugaucuccaucuuccugcaccucgugaagauccccacccaccgccacaucgugggcaagcccugccccaagccgcaccggcugaaccacauggggaucugcagcugcggccuguacaagcaccccgggguccccgugaaguggaagcgcugaggacuagucccuguucccagagcccacuuuuuuuucuuuuuuugaaauaaaauagccugucuuucagaucucaaaggcucuuuucagagccaccaaaaaaaaaaaaaaaaaaaaaaaaaaaaaaaaaaaaaaaaaaaaaaaaaaaaaaaaaaaaaaaaagaauu

SEQ ID NO: 26536 - RNA, 1714 nt, Artificial Sequence
  mRNA product Design a-1 (hSL-A64-N5) comprising derived and/or modified sequence from LASV(GA391;Clade III)__CAA36645__GPCmut4 (opt1)
aggagagucccgcagucggcguccagcggcucugcuuguucgugugugugucguugcaggccuuauucaagcuuaccaugggccagaucgugaccuucuuccaggaggucccccacgugaucgaggaggugaugaacaucguccugaucgcccucagcauccuggccauccugaaggggcucuacaacguggcgaccugcggccugaucgggcuggugacguuccuccugcuguccggccgcagcugcucccucaucuacaaggggaccuacgagcugcagacccuggagcucaacauggagacccugaacaugugcaugccgcugagcugcacgaagaacaacucccaccacuacauccgggucggcaacgagaccggccucgagcugacccugaccaacacgagcauccucaaccacaaguucugcaaccuguccgacgcccacaagcgcaaccuguacgaccacagccucauguccaucaucagcaccuuccaccuguccauccccaacuucaaccaguacgaggccaugagcugcgacuucaacgggggcaagaucaccgugcaguacaaccugucccacagcuucgccguggacgccgcggggcacugcggcacccucgccaacgggguccugcagacguucaugcggauggccuggggcggcuccuacaucgcccuggacagcgggcgcggcaacugggacugcaucaugaccuccuaccaguaccucaucauccagaacaccaccugggacgaccacugccaguucagccggcccucccccaucggguaccugggccugcucagccagcgcacgcgggacaucuacaucagccgccggcgccggggcaccuucaccuggacccuguccgacagcgaggggaacgagacgccgggcggguacugccugacccgcuggaugcucaucgaggcggagcugaagugcuucggcaacaccgccguggccaagugcaacgagaagcacgacgaggaguucugcgacaugcugcggcuguucgacuucugcaagcaggccauccgccggcugaagacccccgcccagauguccauccagcugaucaacaaggcggugaacgcccucaucaacgaccagcugaucaugaagaaccaccuccgcgacaucauggggauccccuacugcaacuacagccgguacugcuaccucaaccacacguccaccggcaagaccagccugccccgcugcugccugaucuccaacggcagcuaccucaacgagaccaaguucuccgacgacaucgagcagcaggccgacaacaugaucacggagaugcugcagaaggaguacaucgaccggcaggggaagaccccgcugggccuggucgaccucuucguguucagcaccuccuucuaccugaucagcaucuuccugcaccucgugaagauccccacccaccgccacaucgucgggaagcccugccccaagccgcaccggcugaaccacaugggcaucugcuccugcgggcuguacaagcagcccggcgugcccgugcgcuggaagcgcugaggacuagucccuguucccagagcccacuuuuuuuucuuuuuuugaaauaaaauagccugucuuucagaucucaaaggcucuuuucagagccaccaaaaaaaaaaaaaaaaaaaaaaaaaaaaaaaaaaaaaaaaaaaaaaaaaaaaaaaaaaaaaaaaagaauu

SEQ ID NO: 26537 - RNA, 1717 nt, Artificial Sequence
  mRNA product Design a-1 (hSL-A64-N5) comprising derived and/or modified sequence from LASV(AV;Clade V)__CCA30314__GPCmut4 (opt1)
aggagagucccgcagucggcguccagcggcucugcuuguucgugugugugucguugcaggccuuauucaagcuuaccaugggccagaucgugaccuucuuccaggaggucccccacgugaucgaggaggugaugaacaucguccugaucgcccucagcauccuggccgugcugaaggggcucuacaacaucgcgaccugcggccugaucgggcugaucacguuccuccugcugugcggccgcuccugcagcuccaaccucuacaaggggguguacgagcugcagagccuggaccucaacauggagacccugaacaugugcaugccgcuguccugcaccaagaacaacagccaccacuacauccgggucggcaacgacaccggccucgagcugacgcugaccaacaccuccauccucaaccacaaguucugcaaccugagcgacgcccacaagaaggaccuguacgaccacgcccucauguccaucaucagcaccuuccaccuguccauccccaacuucaaccaguacgaggccaugagcugcgacuucaacgggggcaagaucuccgugcaguacaaccugagccacuccuacgccaucgacgcggccaaccacugcgggacgguggccaacggcauccuccagaccuucaugcgcauggccuggggcgggagcuacaucgcgcuggacuccggccgggggaacugggacugcaucaugaccagcuaccaguaccugaucauccagaacaccacgugggagaaccacugccaguucucccgccccagccccaucggcuaccucgggcugcugagccagcggacccgcgacaucuacaucucccggcgccggcgcggcaccuucaccuggacgcucagcgacuccgagggcaacgccacccccgggggcuacugccugacccgguggaugcugaucgaggccgagcucaagugcuucgggaacaccgccgucgccaagugcaacgagaagcacgacgaggaguucugcgacaugcugcgccuguucgacuucugcaagcaggcgaucagccggcucaaguccccggcccagaugagcauccagcugaucaacaaggccgugaacgcccugaucaacgaccagcucaucaugaagaaccaccuccgcgacaucaugggcauccccuacugcaacuacuccaaguacugcuaccugaaccacacgaucaccgggaagaccagccugcccaagugcugccugguguccaacggcagcuaccugaacgagacccacuucuccgacgacaucgagcagcaggccgacaacaugaucacggagaugcuccagaaggaguacauggagcggcagggcaagaccccgcuggggcuggucgaccuguucguguucagcaccuccuucuaccucaucagcaucuuccugcgccuggugaagauccccacccaccggcacaucgucggcaagcccugccccaagccgcaccgccucaaccacauggggaucugcuccugcggccuguacaagcagcccggggugcccgugcgguggaagcgcugaggacuagucccuguucccagagcccacuuuuuuuucuuuuuuugaaauaaaauagccugucuuucagaucucaaaggcucuuuucagagccaccaaaaaaaaaaaaaaaaaaaaaaaaaaaaaaaaaaaaaaaaaaaaaaaaaaaaaaaaaaaaaaaaagaauu

SEQ ID NO: 26538 - RNA, 1714 nt, Artificial Sequence
  mRNA product Design a-1 (hSL-A64-N5) comprising derived and/or modified sequence from LASV(Togo/2016/7082;Clade VI)__AMR44577__GPCmut4 (opt1)
aggagagucccgcagucggcguccagcggcucugcuuguucgugugugugucguugcaggccuuauucaagcuuaccaugggccagaucaucaccuucuuccaggaggugccccacgucaucgaggaggugaugaacaucgugcugaucgcccucagccugcuggccauccucaagggggucuacaacguggcgaccugcggcaucaucgggcuggugacguuccuguuccucugcggccgcuccugcagccugaucuacaagggguccuacgagcugcagacccucgagcugaacauggagacccugaacaugugcaugccgcucagcugcaccaagaacuccagccaccacuacauccgggucggcaacgagacgggccuggagcugacccucaccaacaccuccaucaucaaccacaaguucugcaaccugagcgacgcccacaagcgcaaccuguacgaccacgcccucauguccauccugagcacguuccaccuguccauccccaacuucaaccaguacgaggccaugagcugcgacuucaacgggggcaagaucuccgugcaguacaaccucagccacgccuacgcgguggacgccgccgagcacugcgggaccgucgccaacggcgugcugcagaccuucaugcggauggcguggggcggguccuacaucgcccuggacagcggccgcgggaacugggacugcaucaugaccuccuaccaguaccucaucauccagaacacgaccugggaggaccacugccaguucagccggcccucccccaucggcuaccuggggcugcucagccagcgcacccgggacaucuacaucagccgccggcgccggggcaccuucacguggacccuguccgacagcgagggcaacgagacccccgggggcuacugccugacccgcuggaugcucaucgaggccgagcugaagugcuucgggaacacggccguggccaagugcaacgagaagcacgacgaggaguucugcgacaugcugcggcuguucgacuucugcaagcaggcgauccagcgccugaaguccccggcccagaugagcauccagcugaucaacaaggccgucaacgcccucaucaacgaccagcugaucaugaagaaccaccuccgggacaugaugggcauccccuacugcaacuacuccaaguacugcuaccucaaccacaccagcuccgggcgcaccagccugcccaagugcugccugguguccaacggcagcuaccucaacgagacccacuucuccgacgacaucgagcagcaggccgacaacaugaucacggagaugcugcagaaggaguacaucgaccggcagggcaagaccccgcuggggcucguggaccuguucgucuucagcaccuccuucuaccugaucagcaucuuccugcaccucaucaagauccccacccaccgccacaucgugggcaagcccugccccaagccgcaccggcugaaccacauggggaucugcuccugcggccuguacaagcagcccggggugcccacgcgcuggaagcggugaggacuagucccuguucccagagcccacuuuuuuuucuuuuuuugaaauaaaauagccugucuuucagaucucaaaggcucuuuucagagccaccaaaaaaaaaaaaaaaaaaaaaaaaaaaaaaaaaaaaaaaaaaaaaaaaaaaaaaaaaaaaaaaaagaauu

SEQ ID NO: 26539 - RNA, 1714 nt, Artificial Sequence
  mRNA product Design a-1 (hSL-A64-N5) comprising derived and/or modified sequence from LASV(KAK-428;Clade n.d. (VII))__ANH09740__GPCmut4 (opt1)
aggagagucccgcagucggcguccagcggcucugcuuguucgugugugugucguugcaggccuuauucaagcuuaccaugggccagaucgugaccuucuuccaggaggucccccacgugaucgaggaggugaugaacaucguccugaucgcccucagccugcuggccauccucaaggggcuguacaacuucgcgaccugcggcgugaucgggcugaucacguuccuccugcugugcggccgcuccugcagcgccaccuacaaggggcaguacgagcuccagacccuggagcugaacauggagucccucaacaugugcaugccgcugagcugcaccaagaacaacucccaccacuacauccgggccggcaacaacacgggccuggagcucacccugaccaacaccagcaucaucucccacaaguucugcaaccugagcgacgcccacaagaagaaccucuacgaccacacgcugauguccaucaucaccaccuuccaccugagcauccccaacuucaaccaguacgaggccauguccugcgacuucaacgggggcaagaucagcauccaguacaaccucucccacagcuacgcgggggacgccgcccagcacugcggcaccguggccaacgggguccugcagacguucaugcgcauggcguggggcggcuccuaccuggcccucgacagcgggcggcgcggcugggacugcaucaucuccagcuaccaguaccugaucauccagaacaccaccugggacgaccacugccaguucucccggcccagccccaucggguaccugggcuucgugagccagaagacccgcgacaucuacaucucccggcgccggcgcggcacguucaccuggacccucagcgacuccgaggggcacgacaugccgggcggguacugccugacccgguggaugcugaucgaggccgaccucaagugcuucggcaacacggccguggccaagugcaacgagaagcacgacgaggaguucugcgacauguggcgccuguucgacuucugcaagcaggcgauccagcggcugaaggcccccgcccagaugaacauccagcucaucaacaaggccgucaacgcccugaucaacgaccagcugaugaugaagaaccaccuccgcgacaucauggggauccccuacugcaacuacagcaaguucugcuaccugaacaacaccaccaccggccggacgucccugccccgcugcugccucaucagcaacggcuccuaccugaacgagacccacuucagcgacgacaucgagcagcaggcggacaacaugaucaccgagaugcugcagaaggaguacauggaccggcaggggaagaccccgcucggccugguggaccuguucguguucuccacgagcuucuaccucaucaccaucuuccugcaccuggucaagauccccacccaccgccacaucguggggaagcccugccccaagccgcaccggcugaaccacaugggcaucugcuccugcgggcucuacaagcagcccggcgugcccguccgcuggaagcggugaggacuagucccuguucccagagcccacuuuuuuuucuuuuuuugaaauaaaauagccugucuuucagaucucaaaggcucuuuucagagccaccaaaaaaaaaaaaaaaaaaaaaaaaaaaaaaaaaaaaaaaaaaaaaaaaaaaaaaaaaaaaaaaaagaauu

SEQ ID NO: 26540 - RNA, 1714 nt, Artificial Sequence; identical to SEQ ID NO: 26534
  mRNA product Design a-1 (hSL-A64-N5) comprising derived and/or modified sequence from LASV(Pinneo-NIG-1969;Clade I)__AIT17836__GPCmut4 (opt1)

SEQ ID NO: 26541 - RNA, 1714 nt, Artificial Sequence
  mRNA product Design a-1 (hSL-A64-N5) comprising derived and/or modified sequence from LASV(ISTH0009-NIG-2011;Clade II)__AIT17404__GPCmut4 (opt1)
aggagagucccgcagucggcguccagcggcucugcuuguucgugugugugucguugcaggccuuauucaagcuuaccaugggccagaucaucaccuucuuccaggaggugccccacgucaucgaggaggugaugaacaucgugcugaucgcccucagccugcuggccauccucaaggggaucuacaacgucgcgaccugcggccuguucgggcugguguccuuccuccugcugugcggccgcagcugcuccacgaccuacaaggggguguacgagcuccagacccuggagcuggacauggccagccucaacaugugcaugccgcuguccugcaccaagaacaacagccaccacuacaucauggucggcaacgagacgggccuggagcucacccugaccaacaccuccaucaucaaccacaaguucugcaaccugagcgacgcccacaagaagaaccucuacgaccacgcccugauguccaucaucagcacguuccaccuguccauccccaacuucaaccaguacgaggccaugagcugcgacuucaacgggggcaagaucuccgugcaguacaaccucagccacgcguacgccguggacgccgccaaccacugcgggaccaucgcgaacggcguccugcagaccuucaugcggauggccuggggcggguccuacaucgcccuggacagcggcaagggguccugggacugcaucaugaccagcuaccaguaccucaucauccagaacacgaccugggaggaccacugccaguucucccgccccagccccaucggcuaccuggggcugcucagccagcggacccgcgacaucuacaucucccggcgccggcgcggcaccuucacguggacccugagcgacuccgagggcaacgagacccccgggggcuacugccugacccgguggaugcucaucgaggccgagcugaagugcuucgggaacacggccguggcgaagugcaacgagaagcacgacgaggaguucugcgacaugcugcgccucuucgacuucugcaagcaggccauccggcgccugaagaccccggcccagaugagcauccagcugaucaacaaggccgugaacgcccucaucaacgaccagcugaucaugaagaaccaccuccgggacaucaugggcauccccuacugcaacuacuccaaguacugcuaccugaaccacaccgucaccgggaagacgagccugccccgcugcugccugguguccaacggcagcuaccucaacgagacccacuucuccgacgacaucgagcagcaggcggacaacaugaucaccgagcugcugcagaaggaguacauggaccggcagggcaagaccccgcucgggcugguggaccuguucgucuucagcacguccuucuaccugaucagcaucuuccuccaccugaucaagauccccacccaccgccacaucaccggcaagcccugccccaagccgcaccggcugaaccacauggggaucugcuccugcggccucuacaagcaccccggggugcccgugaaguggaagcgcugaggacuagucccuguucccagagcccacuuuuuuuucuuuuuuugaaauaaaauagccugucuuucagaucucaaaggcucuuuucagagccaccaaaaaaaaaaaaaaaaaaaaaaaaaaaaaaaaaaaaaaaaaaaaaaaaaaaaaaaaaaaaaaaaagaauu

SEQ ID NO: 26542 - RNA, 1714 nt, Artificial Sequence
  mRNA product Design a-1 (hSL-A64-N5) comprising derived and/or modified sequence from LASV(ISTH2010-NIG-2012;Clade II)__AIT17482__GPCmut4 (opt1)
aggagagucccgcagucggcguccagcggcucugcuuguucgugugugugucguugcaggccuuauucaagcuuaccaugggccagaucaucaccuucuuccaggaggugccccacgucaucgaggaggugaugaacaucgugcugaucgcccucagccugcuggccauccucaaggggaucuacaacgucgcgaccugcggccuguucgggcugguguccuuccuccugcugugcggccgcagcugcuccacgaccuacaaggggguguacgagcuccagacccuggagcuggacauggccagccucaacaugugcaugccgcuguccugcaccaagaacaacagccaccacuacaucauggucggcaacgagacgggccuggagcucacccugaccaacaccuccaucaucaaccacaaguucugcaaccugagcgacgcccacaagaagaaccucuacgaccacgcccugauguccaucaucagcacguuccaccuguccauccccaacuucaaccaguacgaggccaugagcugcgacuucaacgggggcaagaucuccgugcaguacaaccucagccacgcguacgccguggacgccgccaaccacugcgggaccaucgcgaacggcguccugcagaccuucaugcggauggccuggggcggguccuacaucgcccuggacagcggcaagggguccugggacugcaucaugaccagcuaccaguaccucaucauccagaacaucacgugggaggaccacugccaguucucccgccccagccccaucggcuaccuggggcugcucagccagcggacccgcgacaucuacaucucccggcgccggcgcggcaccuucaccuggacgcugagcgacuccgagggcaacgagacccccgggggcuacugccugacccgguggaugcucaucgaggccgagcugaagugcuucgggaacaccgccguggcgaagugcaacgagaagcacgacgaggaguucugcgacaugcugcgccucuucgacuucugcaagcaggccauccggcgccugaagacgccggcccagaugagcauccagcugaucaacaaggccgugaacgcccucaucaacgaccagcugaucaugaagaaccaccuccgggacaucaugggcauccccuacugcaacuacuccaaguacugcuaccugaaccacaccgucaccgggaagaccagccugccccgcugcugccugguguccaacggcagcuaccucaacgagacgcacuucuccgacgacaucgagcagcaggcggacaacaugaucaccgagcugcugcagaaggaguacaucgaccggcagggcaagaccccgcucgggcugguggaccuguucgucuucagcaccuccuucuaccugaucagcaucuuccuccaccuggugaagauccccacgcaccgccacguggucggcaagcccugccccaagccgcaccggcugaaccacauggggaucugcuccugcggccucuacaagcaccccggggugcccgugaaguggaagcgcugaggacuagucccuguucccagagcccacuuuuuuuucuuuuuuugaaauaaaauagccugucuuucagaucucaaaggcucuuuucagagccaccaaaaaaaaaaaaaaaaaaaaaaaaaaaaaaaaaaaaaaaaaaaaaaaaaaaaaaaaaaaaaaaaagaauu

SEQ ID NO: 26543 - RNA, 1714 nt, Artificial Sequence
  mRNA product Design a-1 (hSL-A64-N5) comprising derived and/or modified sequence from LASV(Lassa virus/H.sapiens-wt/NGA/2015/ISTH_0543;Clade II)__AVO03639__GPCmut4 (opt1)
aggagagucccgcagucggcguccagcggcucugcuuguucgugugugugucguugcaggccuuauucaagcuuaccaugggccagaucaucaccuucuuccaggaggugccccacgucaucgaggaggugaugaacaucgugcugaucgcccucagccugcuggccauccucaaggggaucuacaacgucgcgaccugcggccuguucgggcugguguccuuccuccugcugugcggccgcagcugcuccacgaccuacaaggggguguacgagcuccagacccuggagcuggacauggccaaccucaacaugugcaugccgcugagcugcaccaagaacaacucccaccacuacaucauggucggcaacgagacgggccuggagcucacccugaccaacaccagcaucaucaaccacaaguucugcaaccuguccgacgcccacaagaagaaccucuacgaccacgcccugaugagcaucaucuccacguuccaccugagcauccccaacuucaaccaguacgaggccauguccugcgacuucaacgggggcaagaucagcgugcaguacaaccucucccacaccuacgcgguggacgccgccaaccacugcgggaccaucgccaacggcguccugcagaccuucaugcggauggcguggggcgggagcuacaucgcccuggacuccggcaaggggagcugggacugcaucaugacguccuaccaguaccucgugauccagaacaccaccugggaggaccacugccaguucagccgccccucccccaucggcuaccuggggcugcucagccagcggacccgcgacaucuacaucagccggcgccggcgcggcacguucaccuggacccuguccgacagcgagggcaacgagacccccgggggcuacugccugacgcgguggaugcucaucgaggccgagcugaagugcuucgggaacaccgccguggccaagugcaacgagaagcacgacgaggaguucugcgacaugcugcgccucuucgacuucugcaagcaggcgauccggcgccugaagaccccggcccagauguccauccagcugaucaacaaggccgucaacgcccucaucaacgaccagcugaucaugaagaaccaccuccgggacaucaugggcauccccuacugcaacuacagcaaguacugcuaccugaaccacaccgugacggggaagaccucccugccccgcugcugccuggugagcaacggcuccuaccucaacgagacccacuucagcgacgacaucgagcagcaggccgacaacaugaucaccgagcugcugcagaaggaguacaucgaccggcagggcaagacgccgcucgggcuggucgaccuguucguguucuccaccagcuucuaccugaucuccaucuuccuccaccuggugaagauccccacccaccgccacaucaccggcaagcccugccccaagccgcaccggcugaaccacauggggaucugcagcugcggccucuacaagcaccccgggguccccgugaaguggaagcgcugaggacuagucccuguucccagagcccacuuuuuuuucuuuuuuugaaauaaaauagccugucuuucagaucucaaaggcucuuuucagagccaccaaaaaaaaaaaaaaaaaaaaaaaaaaaaaaaaaaaaaaaaaaaaaaaaaaaaaaaaaaaaaaaaagaauu

SEQ ID NO: 26544 - RNA, 1714 nt, Artificial Sequence
  mRNA product Design a-1 (hSL-A64-N5) comprising derived and/or modified sequence from LASV(Lassa virus/H.sapiens-wt/NGA/2016/ISTH_0009;Clade II)__AVO03571__GPCmut4 (opt1)
aggagagucccgcagucggcguccagcggcucugcuuguucgugugugugucguugcaggccuuauucaagcuuaccaugggccagaucaucaccuucuuccaggaggugccccacgucaucgaggaggugaugaacaucgugcugaucgcccucagccugcuggccauccucaaggggaucuacaacgucgcgaccugcggccugcuggggcucguguccuuccugcugcucugcggccgcagcugcuccacgaccuacaaggggguguacgagcugcagacccuggagcucgacauggccagccugaacaugugcaugccgcuguccugcaccaagaacaacagccaccacuacaucauggucggcaacgagacgggccucgagcugacccugaccaacaccuccaucaucaaccacaaguucugcaaccucagcgacgcccacaagaagaaccuguacgaccacgcccugauguccaucaucagcacguuccaccucuccauccccaacuucaaccaguacgaggccaugagcugcgacuucaacgggggccggaucuccgugcaguacaaccugagccacuccuacgcgguggacgccgccaaccacugcgggaccaucgccaacggcguccugcagaccuucaugcgcauggcguggggcgggagcuacaucgcccucgacuccggcaaggggagcugggacugcaucaugaccuccuaccaguaccugaucauccagaacacgaccugggaggaccacugccaguucagccggcccagccccaucggcuaccuggggcuccugucccagcgcacccgggacaucuacaucagccgccggcgccggggcaccuucacguggacccuguccgacagcgagggcaacgagacccccgggggcuacugccucacccgcuggaugcugaucgaggccgagcugaagugcuucgggaacacggccguggccaagugcaacgagaagcacgacgaggaguucugcgacaugcuccggcuguucgacuucugcaagcaggcgauccgccggcugaagaccccggcccagauguccauccagcucaucaacaaggccgugaacgcccugaucaacgaccagcugaucaugaagaaccaccuccgcgacaucaugggcauccccuacugcaacuacagcaaguacugcuaccugaaccacaccgucaccgggaagacgucccugccccggugcugccucgugagcaacggcuccuaccugaacgagacccacuucagcgacgacaucgagcagcaggccgacaacaugaucaccgagcugcuccagaaggaguacaucgaccgccagggcaagaccccgcuggggcugguggaccuguucgucuucuccacgagcuucuaccucaucuccaucuuccugcaccuggugaagauccccacccaccggcacaucaccggcaagcccugccccaagccgcaccgccucaaccacauggggaucugcagcugcggccuguacaaccaccccggggugcccgucaaguggaagcggugaggacuagucccuguucccagagcccacuuuuuuuucuuuuuuugaaauaaaauagccugucuuucagaucucaaaggcucuuuucagagccaccaaaaaaaaaaaaaaaaaaaaaaaaaaaaaaaaaaaaaaaaaaaaaaaaaaaaaaaaaaaaaaaaagaauu

SEQ ID NO: 26545 - RNA, 1714 nt, Artificial Sequence
  mRNA product Design a-1 (hSL-A64-N5) comprising derived and/or modified sequence from LASV(Lassa virus/H.sapiens-wt/NGA/2016/ISTH_0017;Clade II)__AVO03567__GPCmut4 (opt1)
aggagagucccgcagucggcguccagcggcucugcuuguucgugugugugucguugcaggccuuauucaagcuuaccaugggccagaucaucaccuucuuccaggaggugccccacgucaucgaggaggugaugaacaucgugcugaucgcccucagccugcuggccauccucaaggggaucuacaacgucgcgaccugcggccuguucgggcugguguccuuccuccugcugugcggccgcagcugcuccacgaccuacaaggggguguacgagcuccagacccuggagcuggacauggccagccucaacaugugcaugccgcuguccugcaccaagaacaacagccaccacuacaucauggucggcaacgagacgggccuggagcucacccugaccaacaccuccaucaucaaccacaaguucugcaaccugagcgacgcccacaagaagaaccucuacgaccacgcccugauguccaucaucagcacguuccaccuguccauccccaacuucaaccaguacgaggccaugagcugcgacuucaacgggggcaagaucuccgugcaguacaaccucagccacaccuacgcgaucgacgccgccaaccacugcgggaccaucgccaacggcgugcugcagaccuucaugcggauggcguggggcggguccuacaucgcccuggacagcggcaagggguccugggacugcaucaugacgagcuaccaguaccucaucauccagaacaccaccugggaggaccacugccaguucucccgccccagccccaucggcuaccuggggcugcucagccagcggacccgcgacaucuacaucucccggcgccggcgcggcacguucaccuggacccugagcgacuccgagggcaacgagacccccgggggcuacugccugacgcgguggaugcucaucgaggccgagcugaagugcuucgggaacaccgccgucgccaagugcaacgagaagcacgacgaggaguucugcgacaugcugcgccucuucgacuucugcaagcaggcgauccggcgccugaagaccccggcccagaugagcauccagcugaucaacaaggccgugaacgcccucaucaacgaccagcugaucaugaagaaccaccuccgggacaucaugggcauccccuacugcaacuacuccaaguacugcuaccugaaccacaccgugacggggaagaccagccugccccgcugcugccuggucuccaacggcagcuaccucaacgagacccacuucuccgacgacaucgagcagcaggccgacaacaugaucaccgagcugcugcagaaggaguacauggaccggcagggcaagacgccgcucgggcugguggaccuguucguguucagcaccuccuucuaccugaucagcaucuuccuccaccugguccgcauccccacccaccggcacgugaucggcaagcccugccccaagccgcaccgccugaaccacauggggaucugcuccugcggccucuacaagcaccccggggugcccgucaaguggaagcggugaggacuagucccuguucccagagcccacuuuuuuuucuuuuuuugaaauaaaauagccugucuuucagaucucaaaggcucuuuucagagccaccaaaaaaaaaaaaaaaaaaaaaaaaaaaaaaaaaaaaaaaaaaaaaaaaaaaaaaaaaaaaaaaaagaauu

SEQ ID NO: 26546 - RNA, 1714 nt, Artificial Sequence
  mRNA product Design a-1 (hSL-A64-N5) comprising derived and/or modified sequence from LASV(Lassa virus/H.sapiens-wt/NGA/2018/ISTH_0959;Clade II)__AVV65099__GPCmut4 (opt1)
aggagagucccgcagucggcguccagcggcucugcuuguucgugugugugucguugcaggccuuauucaagcuuaccaugggccagaucaucaccuucuuccaggaggugccccacgucaucgaggaggugaugaacaucgugcugaucgcccucagccugcuggccauccucaaggggaucuacaacgucgugaccugcggccuguucgggcugguguccuuccuccugcugugcggccgcagcugcuccacgaccuacaagggggucuacgagcuccagacccuggagcuggacauggcgagccucaacaugugcaugccgcuguccugcaccaagaacaacagccaccacuacaucauggugggcaacgagacgggccuggagcucacccugaccaacaccuccaucaucaaccacaaguucugcaaccugagcgacgcccacaagaagaaccucuacgaccacgcccugauguccaucaucagcacguuccaccuguccauccccaacuucaaccaguacgaggccaugagcugcgacuucaacgggggcaagaucuccgugcaguacaaccucagccacgccuacgcgaucgacgccgccaaccacugcgggaccaucgccaacggcguccugcagaccuucaugcggauggcguggggcggguccuacaucgcccuggacagcggcaagggguccugggacugcaucaugaccagcuaccaguaccucaucauccagaacacgaccugggaggaccacugccaguucucccgccccagccccaucggcuaccuggggcugcucagccagcggacccgcgacaucuacaucucccggcgccggcgcggcaccuucacguggacccugagcgacuccgagggcaacgagacccccgggggcuacugccugacccgguggaugcucaucgaggccgagcugaagugcuucgggaacacggccguggccaagugcaacgagaagcacgacgaggaguucugcgacaugcugcgccucuucgacuucugcaagcaggcgauccggcgccugaagaccccggcccagaugagcauccagcugaucaacaaggccgugaacgcccucaucaacgaccagcugaucaugaagaaccaccuccgggacaucaugggcauccccuacugcaacuacuccaaguacugcuaccugaaccacaccgucaccgggaagacgagccugccccgcugcugccugguguccaacggcagcuaccucaacgagacccacuucuccgacgacaucgagcagcaggccgacaacaugaucaccgagcugcugcagaaggaguacaucgaccggcagggcaagaccccgcucgggcugguggaccuguucgucuucagcacguccuucuaccugaucagcaucuuccuccaccuggugaagauccccacccaccgccacgugaucggcaagcccugccccaagccgcaccggcugaaccacauggggaucugcuccugcggccucuacaagcaccccgggguccccgugaaguggaagcgcugaggacuagucccuguucccagagcccacuuuuuuuucuuuuuuugaaauaaaauagccugucuuucagaucucaaaggcucuuuucagagccaccaaaaaaaaaaaaaaaaaaaaaaaaaaaaaaaaaaaaaaaaaaaaaaaaaaaaaaaaaaaaaaaaagaauu

SEQ ID NO: 26547 - RNA, 1714 nt, Artificial Sequence
  mRNA product Design a-1 (hSL-A64-N5) comprising derived and/or modified sequence from LASV(LASV003-NIG-2008;Clade II)__AIT17580__GPCmut4 (opt1)
aggagagucccgcagucggcguccagcggcucugcuuguucgugugugugucguugcaggccuuauucaagcuuaccaugggccagaucaucaccuucuuccaggaggugccccacgucaucgaggaggugaugaacaucgugcugaucgcccucagccugcuggccauccucaaggggaucuacaacgucgcgaccugcggccuguucgggcugguguccuuccuccugcugugcggccgcagcugcuccacgaccuacaaggggguguacgagcuccagacccuggagcuggacauggccagccucaacaugugcaugccgcuguccugcaccaagaacaacagccaccacuacaucauggucggcaacgagacgggccuggagcucacccugaccaacaccuccaucaucaaccacaaguucugcaaccugagcgacgcccacaagaagaaccucuacgaccacgcccugauguccaucaucagcacguuccaccuguccauccccaacuucaaccaguacgaggccaugagcugcgacuucaacgggggcaagaucuccgugcaguacaaccucagccacaccuacgcgguggacgccgccaaccacugcgggaccaucgccaacggcguccugcagaccuucaugcggauggcguggggcggguccuacaucgcccuggacagcggcaagggguccugggacugcaucaugacgagcuaccaguaccucaucauccagaacaccaccugggaggaccacugccaguucucccgccccagccccaucggcuaccuggggcugcucagccagcggacccgcgacaucuacaucucccggcgccggcgcggcacguucaccuggacccugagcgacuccgagagcaacgagaccccgggcggguacugccugacgcgguggaugcucaucgaggccgagcugaagugcuucggcaacaccgccguggccaagugcaacgagaagcacgacgaggaguucugcgacaugcugcgccucuucgacuucugcaagcaggcgauccggcgccugaaggcccccgcccagauguccauccagcugaucaacaaggccgugaacgcccucaucaacgaccagcugaucaugaagaaccaccuccgggacaucauggggauccccuacugcaacuacagcaaguacugcuaccugaaccacaccgucaccggccgcacgucccugccccggugcugccuggugagcaacggguccuaccucaacgagacccacuucagcgacgacaucgagcagcaggcggacaacaugaucaccgagcugcugcagaaggaguacauggaccgccagggcaagaccccgcucggccugguggaccuguucgucuucuccacgagcuucuaccugaucuccaucuuccuccaccuggugaagauccccacccaccggcacgugaucgggaagcccugccccaagccgcaccgccugaaccacaugggcaucugcagcugcgggcucuacaagcaccccggcguccccgugaaguggaagcggugaggacuagucccuguucccagagcccacuuuuuuuucuuuuuuugaaauaaaauagccugucuuucagaucucaaaggcucuuuucagagccaccaaaaaaaaaaaaaaaaaaaaaaaaaaaaaaaaaaaaaaaaaaaaaaaaaaaaaaaaaaaaaaaaagaauu

SEQ ID NO: 26548 - RNA, 1714 nt, Artificial Sequence
  mRNA product Design a-1 (hSL-A64-N5) comprising derived and/or modified sequence from LASV(LASV035-NIG-2009;Clade II)__AIT17588__GPCmut4 (opt1)
aggagagucccgcagucggcguccagcggcucugcuuguucgugugugugucguugcaggccuuauucaagcuuaccaugggccagaucaucaccuucuuccaggaggugccccacgucaucgaggaggugaugaacaucgugcugaucgcccucagccugcuggccauccucaaggggaucuacaacgucgcgaccugcggccuguucgggcugguguccuuccuccugcugugcggccgcagcugcuccacgaccuacaaggggguguacgagcuccagacccuggagcuggacauggccagccucaacaugugcaugccgcuguccugcaccaagaacaacagccaccacuacaucauggucggcaacgagacgggccuggagcucacccugaccaacaccuccaucaucaaccacaaguucugcaaccugagcgacgcccacaagaagaaccucuacgaccacgcccugauguccaucaucagcacguuccaccuguccauccccaacuucaaccaguacgaggccaugagcugcgacuucaacgggggcaagaucuccgugcaguacaaccucagccacgcguacgccguggacgccgccaaccacugcgggaccaucgcgaacggcguccugcagaccuucaugcggauggccuggggcggguccuacaucgcccuggacagcggcaagggguccugggacugcaucaugaccagcuaccaguaccucaucauccagaacacgaccugggaggaccacugccaguucucccgccccagccccaucggcuaccuggggcugcucagccagcggacccgcgacaucuacaucucccggcgccggcgcggcaccuucacguggacccugagcgacuccgagggcaacgagacccccgggggcuacugccugacccgguggaugcucaucgaggccgagcugaagugcuucgggaacacggccguggcgaagugcaacgagaagcacgacgaggaguucugcgacaugcugcgccucuucgacuucugcaagcaggccauccggcgccugaaggccccggcccagaugagcauccagcugaucaacaaggccgugaacgcgcucaucaacgaccagcugaucaugaagaaccaccuccgggacaucaugggcauccccuacugcaacuacuccaaguacugcuaccugaaccacaccgucaccgggaagaccagccugccccgcugcugccugguguccaacggcagcuaccucaacgagacgcacuucuccgacgacaucgagcagcaggccgacaacaugaucaccgagcugcugcagaaggaguacaucgaccggcagggcaagaccccgcucgggcugguggaccuguucgucuucagcaccuccuucuaccugaucagcaucuuccuccaccuggugaagauccccacgcaccgccacgugaucggcaagcccugccccaagccgcaccggcugaaccacauggggaucugcuccugcggccucuacaagcaccccgggguccccgugaaguggaagcgcugaggacuagucccuguucccagagcccacuuuuuuuucuuuuuuugaaauaaaauagccugucuuucagaucucaaaggcucuuuucagagccaccaaaaaaaaaaaaaaaaaaaaaaaaaaaaaaaaaaaaaaaaaaaaaaaaaaaaaaaaaaaaaaaaagaauu

SEQ ID NO: 26549 - RNA, 1714 nt, Artificial Sequence
  mRNA product Design a-1 (hSL-A64-N5) comprising derived and/or modified sequence from LASV(LASV1000-NIG-2009;Clade II)__AIT17782__GPCmut4 (opt1)
aggagagucccgcagucggcguccagcggcucugcuuguucgugugugugucguugcaggccuuauucaagcuuaccaugggccagaucaucaccuucuuccaggaggugccccacgucaucgaggaggugaugaacaucgugcugaucgcccucagccugcuggccauccucaaggggaucuacaacgucgcgaccugcggccuguucgggcugguguccuuccuccugcugugcggccgcagcugcuccacgaccuacaaggggguguacgagcuccagacccuggagcuggacauggccagccucaacaugugcaugccgcuguccugcaccaagaacaacagccaccacuacaucauggucggcaacgagacgggccuggagcucacccugaccaacaccuccaucaucaaccacaaguucugcaaccugagcgacgcccacaagaagaaccucuacgaccacgcccugauguccaucaucagcacguuccaccuguccauccccaacuucaaccaguacgaggccaugagcugcgacuucaacgggggcaagaucuccgugcaguacaaccucagccacaccuacgcgguggacgccgccaaccacugcgggaccaucgccaacggcguccugcagaccuucaugcggauggcguggggcggguccuacaucgcccuggacagcggcaagggguccugggacugcaucaugacgagcuaccaguaccucaucauccagaacaccaccugggaggaccacugccaguucucccgccccagccccaucggcuaccuggggcugcucagccagcggacccgcgacaucuacaucucccggcgccggcgcggcacguucaccuggacccugagcgacuccgagggcaacgagacccccgggggcuacugccugacgcgguggaugcucaucgaggccgagcugaagugcuucgggaacaccgccguggccaagugcaacgagaagcacgacgaggaguucugcgacaugcugcgccucuucgacuucugcaagcaggcgaucaagcggcugaagaccccggcccagaugagcauccagcugaucaacaaggccgugaacgcccucaucaacgaccagcugaucaugaagaaccaccuccgcgacaucaugggcauccccuacugcaacuacuccaaguacugcuaccugaaccacaccgucacggggaagaccagccugccccggugcugccugguguccaacggcagcuaccucaacgagacccacuucuccgacgacaucgagcagcaggccgacaacaugaucaccgagcugcugcagaaggaguacaucgaccgccagggcaagacgccgcucgggcugguggaccuguucgucuucagcaccuccuucuaccugaucagcaucuuccuccaccuggugaagauccccacccaccggcacguggucggcaagcccugccccaagccgcaccgccugaaccacauggggaucugcuccugcggccucuacaagcaccccggggugcccgugaaguggaagcggugaggacuagucccuguucccagagcccacuuuuuuuucuuuuuuugaaauaaaauagccugucuuucagaucucaaaggcucuuuucagagccaccaaaaaaaaaaaaaaaaaaaaaaaaaaaaaaaaaaaaaaaaaaaaaaaaaaaaaaaaaaaaaaaaagaauu

SEQ ID NO: 26550 - RNA, 1714 nt, Artificial Sequence
  mRNA product Design a-1 (hSL-A64-N5) comprising derived and/or modified sequence from LASV(LASV221-NIG-2010;Clade II)__AIT17624__GPCmut4 (opt1)
aggagagucccgcagucggcguccagcggcucugcuuguucgugugugugucguugcaggccuuauucaagcuuaccaugggccagaucaucaccuucuuccaggaggugccccacgucaucgaggaggugaugaacaucgugcugaucgcccucagccugcuggccauccucaaggggaucuacaacgucgcgaccugcggccuguucgggcugguguccuuccuccugcugugcggccgcagcugcuccacgaccuacaaggggguguacgagcuccagacccuggagcuggacauggccagccucaacaugugcaugccgcuguccugcaccaagaacaacagccaccacuacaucauggucggcaacgagacgggccuggagcucacccugaccaacaccuccaucaucaaccacaaguucugcaaccugagcgacgcccacaagaagaaccucuacgaccacgcccugauguccaucaucagcacguuccaccuguccauccccaacuucaaccaguacgaggccaugagcugcgacuucaacgggggcaagaucuccgugcaguacaaccucagccacaccuacgcgaucgacgccgccaaccacugcgggaccaucgccaacggcgugcugcagaccuucaugcggauggcguggggcggguccuacaucgcccuggacagcggcaagggguccugggacugcaucaugacgagcuaccaguaccucaucauccagaacaccaccugggaggaccacugccaguucucccgccccagccccaucggcuaccuggggcugcucagccagcggacccgcgacaucuacaucucccggcgccggcgcggcacguucaccuggacccugagcgacuccgagggcaacgagacccccgggggcuacugccugacgcgguggaugcucaucgaggccgagcugaagugcuucgggaacaccgccgucgccaagugcaacgagaagcacgacgaggaguucugcgacaugcugcgccucuucgacuucugcaagcaggcgauccggcgccugaagaccccggcccagaugagcauccagcugaucaacaaggccgugaacgcccucaucaacgaccagcugaucaugaagaaccaccuccgggacaucaugggcauccccuacugcaacuacuccaaguacugcuaccugaaccacaccgugacggggaagaccagccugccccgcugcugccuggucuccaacggcagcuaccucaacgagacccacuucuccgacgacaucgagcagcaggccgacaacaugaucaccgagaugcugcagaaggaguacauggaccggcagggcaagacgccgcuggggcucguggaccuguucguguucagcaccuccuucuaccugaucagcaucuuccugcaccucgucaagauccccacccaccgccacgugaucggcaagcccugccccaagccgcaccggcugaaccacauggggaucugcuccugcggccuguacaagcaccccggggugcccgucaaguggaagcgcugaggacuagucccuguucccagagcccacuuuuuuuucuuuuuuugaaauaaaauagccugucuuucagaucucaaaggcucuuuucagagccaccaaaaaaaaaaaaaaaaaaaaaaaaaaaaaaaaaaaaaaaaaaaaaaaaaaaaaaaaaaaaaaaaagaauu

SEQ ID NO: 26551 - RNA, 1714 nt, Artificial Sequence
  mRNA product Design a-1 (hSL-A64-N5) comprising derived and/or modified sequence from LASV(LASV237-NIG-2010;Clade II)__AIT17638__GPCmut4 (opt1)
aggagagucccgcagucggcguccagcggcucugcuuguucgugugugugucguugcaggccuuauucaagcuuaccaugggccagaucaucaccuucuuccaggaggugccccacgucaucgaggaggugaugaacaucgugcugaucgcccucagccugcuggccauccucaaggggaucuacaacgucgcgaccugcggccuguucgggcugguguccuuccuccugcugugcggccgcagcugcuccacgaccuacaaggggguguacgagcuccagacccuggagcuggacauggccagccucaacaugugcaugccgcuguccugcaccaagaacaacagccaccacuacaucauggucggcaacgagacgggccuggagcucacccugaccaacaccuccaucaucaaccacaaguucugcaaccugagcgacgcccacaagaaggaccucuacgaccacgcccugauguccaucaucagcacguuccaccuguccauccccaacuucaaccaguacgaggccaugagcugcgacuucaacgggggcaagaucuccgugcaguacaaccucagccacaccuacgcgguggacgccgccaaccacugcgggaccaucgccaacggcguccugcagaccuucaugcggauggcguggggcggguccuacaucgcccuggacagcggcaagggguccugggacugcaucaugacgagcuaccaguaccucaucauccagaacaccaccugggaggaccacugccaguucucccgccccagccccaucggcuaccuggggcugcucagccagcggacccgcgacaucuacaucucccggcgccggcgcggcacguucaccuggacccugagcgacuccgagggcaacgagacccccgggggcuacugccugacgcgguggaugcucaucgaggccgagcugaagugcuucgggaacaccgccguggccaagugcaacgagaagcacgacgaggaguucugcgacaugcugcgccucuucgacuucugcaagcaggcgauccggcgccugaagaccccggcccagaugagcauccagcugaucaacaaggccgugaacgcccucaucaacgaccagcugaucaugaagaaccaccuccgggacaucaugggcauccccuacugcaacuacuccaaguacugcuaccugaaccacaccgucacggggaagaccagccugccccgcugcugccugguguccaacggcagcuaccucaacgagacccacuucuccgacgacaucgagcagcaggccgacaacaugaucaccgagcugcugcagaaggaguacauggaccggcagggcaagacgccgcucgggcugguggaccuguucgucuucagcaccuccuucuaccugaucagcaucuuccuccaccugaucaagauccccacccaccgccacaucaccggcaagcccugccccaagccgcaccggcugaaccacauggggaucugcuccugcggccucuacaagcaccccggggugcccgugaaguggaagcgcugaggacuagucccuguucccagagcccacuuuuuuuucuuuuuuugaaauaaaauagccugucuuucagaucucaaaggcucuuuucagagccaccaaaaaaaaaaaaaaaaaaaaaaaaaaaaaaaaaaaaaaaaaaaaaaaaaaaaaaaaaaaaaaaaagaauu

SEQ ID NO: 26552 - RNA, 1714 nt, Artificial Sequence
  mRNA product Design a-1 (hSL-A64-N5) comprising derived and/or modified sequence from LASV(LASV253-NIG-2011;Clade II)__AIT17670__GPCmut4 (opt1)
aggagagucccgcagucggcguccagcggcucugcuuguucgugugugugucguugcaggccuuauucaagcuuaccaugggccagaucaucaccuucuuccaggaggugccccacgucaucgaggaggugaugaacaucgugcugaucgcccucagccugcuggccauccucaaggggaucuacaacgucgcgaccugcggccuguucgggcugguguccuuccuccugcugugcggccgcagcugcuccacgaccuacaaggggguguacgagcuccagacccuggagcuggacauggccagccucaacaugugcaugccgcuguccugcaccaagaacaacagccaccacuacaucauggucggcaacgagacgggccuggagcucacccugaccaacaccuccaucaucaaccacaaguucugcaaccugagcgacgcccacaagaagaaccucuacgaccacgcccugauguccaucaucagcacguuccaccuguccauccccaacuucaaccaguacgaggccaugagcugcgacuucaacgggggcaagaucuccgugcaguacaaccucagccacaccuacgcgguggacgccgccaaccacugcgggaccaucgccaacggcguccugcagaccuucaugcggauggcguggggcggguccuacaucgcccuggacagcggcaagggguccugggacugcaucaugacgagcuaccaguaccucaucauccagaacaccaccugggaggaccacugccaguucucccgccccagccccaucggcuaccuggggcugcucagccagcggacccgcgacaucuacaucucccggcgccggcgcggcacguucaccuggacccugagcgacuccgagggcaacgagacccccgggggcuacugccugacgcgguggaugcucaucgaggccgagcugaagugcuucgggaacaccgccguggccaagugcaacgagaagcacgacgaggaguucugcgacaugcugcgccucuucgacuucugcaagcaggcgauccggcgccugaaggccccggcccagaugagcauccagcugaucaacaaggccgugaacgcccucaucaacgaccagcugaucaugaagaaccaccuccgggacaucaugggcauccccuacugcaacuacuccaaguacugcuaccugaaccacaccgucaccgggcgcacgagccugccccggugcugccugguguccaacggcagcuaccucaacgagacccacuucuccgacgacaucgagcagcaggcggacaacaugaucaccgagcugcugcagaaggaguacaucgaccgccagggcaagaccccgcucgggcugguggaccuguucgucuucagcacguccuucuaccugaucagcaucuuccuccaccuggugaagauccccacccaccggcacaucaucggcaagcccugccccaagccgcaccgccugaaccacauggggaucugcuccugcggccucuacaagcaccccggggugcccgucaaguggaagcggugaggacuagucccuguucccagagcccacuuuuuuuucuuuuuuugaaauaaaauagccugucuuucagaucucaaaggcucuuuucagagccaccaaaaaaaaaaaaaaaaaaaaaaaaaaaaaaaaaaaaaaaaaaaaaaaaaaaaaaaaaaaaaaaaagaauu

SEQ ID NO: 26553 - RNA, 1714 nt, Artificial Sequence
  mRNA product Design a-1 (hSL-A64-N5) comprising derived and/or modified sequence from LASV(LASV254-NIG-2011;Clade II)__AIT17674__GPCmut4 (opt1)
aggagagucccgcagucggcguccagcggcucugcuuguucgugugugugucguugcaggccuuauucaagcuuaccaugggccagaucaucaccuucuuccaggaggugccccacgucaucgaggaggugaugaacaucgugcugaucgcccucagccugcuggccauccucaaggggaucuacaacgucgcgaccugcggccuguucgggcugguguccuuccuccugcugugcggccgcagcugcuccacgaccuacaaggggguguacgagcuccagacccuggagcuggacaugaccaaccucaacaugugcaugccgcugagcugcacgaagaacaacucccaccacuacaucauggucggcaacgagaccggccuggagcucacccugaccaacacgagcaucaucaaccacaaguucugcaaccuguccgacgcccacaagaagaaccucuacaaccacgcccugaugagcaucaucuccaccuuccaccugagcauccccaacuucaaccaguacgaggccauguccugcgacuucaacgggggcaagaucagcgugcaguacaaccucucccacagcuacgccguggacgcggccaaccacugcgggaccaucgccaacggcguccugcagaccuucaugcggauggccuggggcggguccuacaucgcgcuggacagcggcaaggggaacugggacugcaucaugacguccuaccaguaccucaucauccagaacaccaccugggaggaccacugccaguucagccgccccucccccaucggcuaccuggggcugcucagccagcggacccgcgacaucuacaucagccggcgccggcgcggcacguucaccuggacccuguccgacagcgagggcaacgagacccccgggggcuacugccugacgcgguggaugcucaucgaggccgagcugaagugcuucgggaacaccgccguggccaagugcaacgagaagcacgacgaggaguucugcgacaugcugcgccucuucgacuucugcaagcaggccauccggcgccugaagaccccggcgcaggccaacauccagcugaucaacaaggccgugaacgcccucaucaacgaccagcugaucaugaagaaccaccuccgggacaucaugggcauccccuacugcaacuacuccaaguacugcuaccugaaccacaccgucacggggaagaccagccugccccgcugcugccugguguccaacggcagcuaccucaacgagacccacuucuccgacgacaucgagcagcaggccgacaacaugaucaccgagcugcugcagaaggaguacauggaccggcagggcaagacgccgcucgggcugguggaccuguucgucuucagcaccuccuucuaccugaucagcaucuuccuccaccuggugaagauccccacccaccgccacgugaucggcaagcccugccccaagccgcaccggcugaaccacauggggaucugcuccugcggccucuacaagcaccccgggguccccgugaaguggaagcgcugaggacuagucccuguucccagagcccacuuuuuuuucuuuuuuugaaauaaaauagccugucuuucagaucucaaaggcucuuuucagagccaccaaaaaaaaaaaaaaaaaaaaaaaaaaaaaaaaaaaaaaaaaaaaaaaaaaaaaaaaaaaaaaaaagaauu

SEQ ID NO: 26554 - RNA, 1714 nt, Artificial Sequence
  mRNA product Design a-1 (hSL-A64-N5) comprising derived and/or modified sequence from LASV(Nig08-A19;Clade III)__ADU56618__GPCmut4 (opt1)
aggagagucccgcagucggcguccagcggcucugcuuguucgugugugugucguugcaggccuuauucaagcuuaccaugggccagaucgugaccuucuuccaggaggucccccacgugaucgaggaggugaugaacaucguccugaucgcccucagcauccuggccauccugaaggggcucuacaacaucgcgaccugcggccugaucgggcuggugacguuccuccugcuguccggccgcagcugcuccaugaccuacaaggggguguacgagcuccagacccuggagcugaacaugaacacccucaacaugugcaugccgcugagcugcacgaagaacaacucccaccacuacaucauggucggcaacgagaccggccuggagcucacccugaccaacacgagccugcuccaccacaaguucugcaaccuguccgacgcccacaagaagaaccuguacgaccacacccucaugagcaucaucuccaccuuccaccugagcauccccaacuucaaccaguacgaggccauguccugcgacuucaacgggggcaagaucaccgugcaguacaaccugagccacuccuacgccaucgacgccgcgaaccacugcgggacgguggccaacggcguccuccagaccuucaugcggauggccuggggcgggagcuacaucgcccuggacuccggccgcgggaagugggacugcaucaugaccagcuaccaguaccugaucauccagaacaccacgugggaggaccacugccaguucucccggcccagccccaucggcuaccucgggcugcugucccagcgcacccgggacaucuacaucagccgccggcgccggggcaccuucaccuggacgcucagcgacuccgagggcaacgagacccccgggggcuacugccugacccgcuggaugcugaucgaggcggagcucaagugcuucgggaacaccgccguggccaagugcaacgagaagcacgacgaggaguucugcgacaugcugcggcuguucgacuucugcaagcaggccauccgccggcucaaggccccggcgcagaugagcauccagcugaucaacaaggccgugaacgcccugaucaacgaccagcucaucaugaagaaccaccuccgcgacaucaugggcauccccuacugcaacuacuccaaguacugcuaccugaaccacacgagcaccgggcggaccucccugccccgcugcugccuggucagcaacggcuccuaccugaacgagacccacuucagcgacgacaucgagcagcaggccgacaacaugaucacggagaugcuccagaaggaguaccuggaccggcagggcaagaccccgcuggggcugguggaccucuucguguucuccaccagcuucuaccugaucuccaucuuccugcaccucgucaagauccccacccaccgccacaucgugggcaagcccugccccaagccgcaccggcugaaccacauggggaucugcagcugcggccuguacaagcagcccggggugcccguccgcuggaagcggugaggacuagucccuguucccagagcccacuuuuuuuucuuuuuuugaaauaaaauagccugucuuucagaucucaaaggcucuuuucagagccaccaaaaaaaaaaaaaaaaaaaaaaaaaaaaaaaaaaaaaaaaaaaaaaaaaaaaaaaaaaaaaaaaagaauu

SEQ ID NO: 26555 - RNA, 1717 nt, Artificial Sequence
  mRNA product Design a-1 (hSL-A64-N5) comprising derived and/or modified sequence from LASV(G1180-SLE-2010;Clade IV)__AIT17168__GPCmut4 (opt1)
aggagagucccgcagucggcguccagcggcucugcuuguucgugugugugucguugcaggccuuauucaagcuuaccaugggccagaucgugaccuucuuccaggaggucccccacgugaucgaggaggugaugaacaucguccugaucgcccucagcauccuggccgugcugaaggggcucuacaacuucgcgaccugcggccugguggggcugcucacguuccugcugcucugcggccgcuccugcaccgccagccgguacaagggggucuacgagcugcagacccuggagcucaacauggagacccugaacaugugcaugccgcuguccugcacgaagaacaacagccaccacuacaucauggugggcaacgagaccggccucgagcugacccugaccaacacguccaucaucaaccacaaguucugcaaccucagcgacgcccacaagaagaaccuguacgaccacgcccugauguccaucaucagcaccuuccaccucuccauccccaacuucaaccaguacgaggccaugagcugcgacuucaacgggggcaagaucuccgugcaguacaaccugagccacuccuacgcgggggacgccgccaaccacugcggcaccgucgccaacggggugcugcagaccuucaugcgcauggcguggggcggcagcuacaucgcccucgacuccgggcacggcagcugggacugcaucaugacguccuaccaguaccugaucauccagaacaccaccugggaggaccacugccaguucagccggcccucccccaucggguaccugggccuccugagccagcgcacccgggacaucuacaucagccgccggcgccggggcacguucaccuggacccuguccgacagcgaggggaaggacaccccgggcggguacugccucacgcgcuggaugcugaucgaggccgagcugaagugcuucggcaacaccgccguggccaagugcaacgagaagcacgacgaggaguucugcgacaugcuccggcuguucgacuucugcaagcaggcgauccagcgccugaaggcccccgcccagauguccauccagcucaucaacaaggccgucaacgcccugaucaacgaccagcugaucaugaagaaccaccuccgggacaucauggggauccccuacugcaacuacagcaaguacugcuaccugaaccacaccaccacgggcaagaccucccugcccaagugcugccucgugagcaacggcuccuaccugaacgagacccacuucagcgacgacaucgagcagcaggcggacaacaugaucaccgagaugcugcagaaggaguacauggagcgccaggggaagacgccgcucggccugguggaccuguucgucuucuccaccagcuucuaccugaucuccaucuuccuccaccuggugaagauccccacccaccggcacaucgugggcaagagcugccccaagccccaccgccugaaccacauggggaucugcuccugcgggcucuacaagcagccgggcguccccgugaaguggaagcggugaggacuagucccuguucccagagcccacuuuuuuuucuuuuuuugaaauaaaauagccugucuuucagaucucaaaggcucuuuucagagccaccaaaaaaaaaaaaaaaaaaaaaaaaaaaaaaaaaaaaaaaaaaaaaaaaaaaaaaaaaaaaaaaaagaauu

SEQ ID NO: 26556 - RNA, 1717 nt, Artificial Sequence
  mRNA product Design a-1 (hSL-A64-N5) comprising derived and/or modified sequence from LASV(G1442-SLE-2011;Clade IV)__AIT17180__GPCmut4 (opt1)
aggagagucccgcagucggcguccagcggcucugcuuguucgugugugugucguugcaggccuuauucaagcuuaccaugggccagaucgugaccuucuuccaggaggucccccacgugaucgaggaggugaugaacaucguccugaucgcccucagcauccuggccgugcugaaggggcucuacaacguggcgaccugcggccugaucgggcuggucacguuccuccugcugugcggccgcuccugcaccaccacccucuacaaggggguguacgagcugcagacgcuggagcucaacauggagacccugaacaugugcaugccgcugagcugcaccaagaacaacucccaccacuacauccgggugggcaacgagaccggccucgagcugacgcugaccaacaccagcaucaucaaccacaaguucugcaaccucuccgacgcccacaagaagaaccuguacgaccacgcccugaugagcaucaucuccaccuuccaccucagcauccccaacuucaaccaguacgaggccauguccugcgacuucaacgggggcaagaucagcguccaguacaaccugucccacagcuacgccggggacgcggccaaccacugcggcacgguggccaacggggugcugcagaccuucaugcgcauggccuggggcggcuccuacaucgcgcucgacagcgggcggggcaacugggacugcaucaugaccuccuaccaguaccugaucauccagaacaccacgugggacgaccacugccaguucagccgccccucccccaucggguaccugggccuccugagccagcggacccgcgacgucuacaucucccggcgccggcgcggcaccuucaccuggacgcugagcgacagcgaggggaaggacaccccgggcggguacugccucacccgguggaugcugaucgaggccgagcugaagugcuucggcaacaccgccguggccaagugcaacgagaagcacgacgaggaguucugcgacaugcuccgccuguucgacuucugcaagcaggccauccagcggcugaaggcgcccgcccagauguccauccagcucaucaacaaggccgugaacgcccugaucaacgaccagcugaucaugaagaaccaccuccgcgacaucauggggauccccuacugcaacuacagcaaguacugcuaccugaacaacacggccaccggcaagaccucccugcccaagugcugccucaucagcaacggcuccuaccugaacgagacccacuucagcgacgacaucgagcaggaggcggacaacaugaucacggagaugcugcagaaggaguacauggagcggcaggggaagaccccgcucggccuggucgaccuguucguguucuccaccagcuucuaccugaucuccaucuuccuccaccuggugaagauccccacccaccgccacaucgucggcaagagcugccccaagccccaccggcugaaccacauggggaucugcuccugcgggcucuacaagcagccgggcgugcccgugcgcuggaagcggugaggacuagucccuguucccagagcccacuuuuuuuucuuuuuuugaaauaaaauagccugucuuucagaucucaaaggcucuuuucagagccaccaaaaaaaaaaaaaaaaaaaaaaaaaaaaaaaaaaaaaaaaaaaaaaaaaaaaaaaaaaaaaaaaagaauu

SEQ ID NO: 26557 - RNA, 1717 nt, Artificial Sequence
  mRNA product Design a-1 (hSL-A64-N5) comprising derived and/or modified sequence from LASV(G3010-SLE-2013;Clade IV)__AIT17344__GPCmut4 (opt1)
aggagagucccgcagucggcguccagcggcucugcuuguucgugugugugucguugcaggccuuauucaagcuuaccaugggccagaucgugaccuucuuccaggaggucccccacgugaucgaggaggugaugaacaucguccugaucgcccucagcauccuggccgugcugaaggggcucuacaacuucgcgaccugcggccugguggggcuggucacguuccuccugcugugcggccgcuccugcaccaccagccucuacaaggggguguacgagcugcagacccuggagcucaacauggagacgcugaacaugugcaugccgcuguccugcaccaagaacaacagccaccacuacaucauggugggcaacgagaccggccucgagcugacccugacgaacaccuccaucaucaaccacaaguucugcaaccucagcgacgcccacaagaagaaccuguacaaccacgcccugauguccaucaucagcaccuuccaccucuccauccccaacuucaaccaguacgaggccaugagcugcgacuucaacgggggcaagaucuccguccaguacaaccugagccacuccuacgccggggacgcggccagccacugcggcaccguggccaacggggugcugcagacguucaugcggauggccuggggcggcuccuacaucgcgcucgacagcggguacggcaagugggacugcaucaugaccuccuaccaguaccugaucauccagaacaccaccugggaggaccacugccaguucagccgccccucccccaucggguaccugggccuccugagccagcggacgcgcgacaucuacaucagccggcgccggcgcggcaccuucaccuggacccuguccgacagcgaggggaaggacacgccgggcggguacugccucacccgguggaugcugaucgaggccgagcugaagugcuucggcaacaccgccgucgccaagugcaacgagaagcacgacgaggaguucugcgacaugcuccgccuguucgacuucugcaagcaggccauccagcggcugaagacccccgcgcagauguccauccagcucaucaacaaggccgugaacgcccugaucaacgaccagcugaucaugaagaaccaccuccgcgacaucauggggauccccuacugcaacuacagcaaguacugcuaccugaaccacacgaccaccggcaagaccucccugcccaagugcugccucgugagcaacggcuccuaccugaacgagacgcacuucagcgacgacaucgagcagcaggccgacaacaugaucaccgagaugcugcagaaggaguacauggagcggcaggggaagaccccgcucggccuggucgaccuguucguguucuccaccagcuucuaccugaucuccaucuuccuccaccuggugaagauccccacgcaccgccacaucgucggcaagagcugccccaagccccaccggcugaaccacauggggaucugcuccugcgggcucuacaagcagccgggcgugcccgugcgcuggaagcggugaggacuagucccuguucccagagcccacuuuuuuuucuuuuuuugaaauaaaauagccugucuuucagaucucaaaggcucuuuucagagccaccaaaaaaaaaaaaaaaaaaaaaaaaaaaaaaaaaaaaaaaaaaaaaaaaaaaaaaaaaaaaaaaaagaauu

SEQ ID NO: 26558 - RNA, 1717 nt, Artificial Sequence
  mRNA product Design a-1 (hSL-A64-N5) comprising derived and/or modified sequence from LASV(G502-SLE-2009;Clade IV)__AIT17126__GPCmut4 (opt1)
aggagagucccgcagucggcguccagcggcucugcuuguucgugugugugucguugcaggccuuauucaagcuuaccaugggccagaucgugaccuucuuccaggaggucccccacgugaucgaggaggugaugaacaucguccugaucgcccucagcauccuggccgugcugaaggggcucuacaacuucgcgaccugcggccugguggggcugcucacguuccugcugcucugcggccgcuccugcaccaccgggcuguacaagggcgucuacgagcugcagacccucgagcugaacauggagacgcugaacaugugcaugccgcucagcugcaccaagaacaacucccaccacuacaucauggugggcaacgagaccgggcuggagcugacccucacgaacaccagcaucaucaaccacaaguucugcaaccuguccgacgcccacaagaagaaccuguacgaccacgcccucaugagcaucaucuccaccuuccaccugagcauccccaacuucaaccaguacgaggccauguccugcgacuucaacggcgggaagaucagcgugcaguacaaccugucccacagcuacgccggcgacgcggccgaccacugcgggaccgucgccaacggcgugcuccagacguucaugcggauggccuggggcggguccuacaucgcgcuggacagcggccgcgggcggugggacugcaucaugaccuccuaccaguaccugaucauccagaacaccaccugggaggaccacugccaguucagccgccccucccccaucggcuaccucggccugcugagccagcggacgcgcgacaucuacaucucccggcgccggcgcgggaccuucaccuggacccucagcgacagcgagggcaaggacacgcccgggggcuacugccugacccgguggaugcugaucgaggccgagcucaagugcuucgggaacaccgccguggccaagugcaacgagaagcacgacgaggaguucugcgacaugcugcgccuguucgacuucugcaagcaggccauccagcggcucaaggcgccggcccagauguccauccagcugaucaacaaggccgucaacgcccugaucaacgaccagcucgugaugaagaaccaccuccgcgacaucaugggcauccccuacugcaacuacagccgguacugcuaccugaaccacaccacgaccggccgcaccucccugcccaagugcugccuggugagcaacggguccuaccugaacgagacccacuucagcgacgacaucgagcagcaggccgacaacaugaucacggagaugcuccagaaggaguacauggagcggcagggcaagaccccgcuggggcuggucgaccuguucguguucuccaccagcuucuaccucaucuccaucuuccugcaccuggugaagauccccacccaccgccacaucgucggcaagagcugccccaagccccaccggcucaaccacauggggaucugcuccugcggccuguacaagcagccgggcgugcccgugaaguggaagcgcugaggacuagucccuguucccagagcccacuuuuuuuucuuuuuuugaaauaaaauagccugucuuucagaucucaaaggcucuuuucagagccaccaaaaaaaaaaaaaaaaaaaaaaaaaaaaaaaaaaaaaaaaaaaaaaaaaaaaaaaaaaaaaaaaagaauu

SEQ ID NO: 26559 - RNA, 1717 nt, Artificial Sequence
  mRNA product Design a-1 (hSL-A64-N5) comprising derived and/or modified sequence from LASV(G733-SLE-2010;Clade IV)__AIT17154__GPCmut4 (opt1)
aggagagucccgcagucggcguccagcggcucugcuuguucgugugugugucguugcaggccuuauucaagcuuaccaugggccagaucgugaccuucuuccaggaggucccccacgugaucgaggaggugaugaacaucguccugaucgcccucagcauccuggccgugcugaaggggcucuacaacuucgcgaccugcggcaucguggggcuggucuccuuccugcuccugugcggccgcagcugcacgaccucccuguacaaggggguguacgagcuccagacccuggagcugaacauggagacccucaacaugugcaugccgcugagcugcacgaagaacaacucccaccacuacaucauggugggcaacgagaccggccuggagcucacccugaccaacacgagcaucaucaaccacaaguucugcaaccuguccgacgcccacaagaagaaccucuacgaccacgcccugaugagcaucaucuccaccuuccaccugagcauccccaacuucaaccaguacgaggccauguccugcgacuucaacgggggcaagaucagcguccaguacaaccucucccacagcuacgccggggacgcggccaaccacugcggcaccaucgccaacggggugcugcagaccuucaugcggauggccuggggcggcuccuacaucgcgcuggacagcgggcgcgaccggugggacugcaucaugacguccuaccaguaccucaucauccagaacaccaccugggaggaccacugccaguucagccgccccucccccaucggcuaccuggggcugcucagccagcggacccgcgacaucuacaucagccggcgccggcgcggcacguucaccuggacccuguccgacagcgagggcaaggacacccccgggggcuacugccugacgcgguggaugcucaucgaggccgagcugaagugcuucgggaacaccgccguggccaagugcaacgagaagcacgacgaggaguucugcgacaugcugcgccucuucgacuucugcaagcaggccauccagcggcugaaggcgccggcccagauguccauccagcugaucaacaaggccgucaacgcccucaucaacgaccagcugaucaugaagaaccaccuccgcgacaucaugggcauccccuacugcaacuacagcaaguacugcuaccugaaccacaccaccacggggaagaccucccugcccaagugcugccuggugagcaacggcuccuaccucaacgagacccacuucagcgacgacaucgagcagcaggccgacaacaugaucaccgagaugcugcagaaggaguacauggagcggcagggcaagacgccgcuggggcucguggaccuguucgucuucuccaccagcuucuaccugaucuccaucuuccugcaccucgugaagauccccacccaccgccacguggucggcaagagcugccccaagccccaccggcugaaccacauggggaucugcuccugcggccuguacgggcagccgggcgugcccgugaaguggaagcgcugaggacuagucccuguucccagagcccacuuuuuuuucuuuuuuugaaauaaaauagccugucuuucagaucucaaaggcucuuuucagagccaccaaaaaaaaaaaaaaaaaaaaaaaaaaaaaaaaaaaaaaaaaaaaaaaaaaaaaaaaaaaaaaaaagaauu

SEQ ID NO: 26560 - RNA, 1717 nt, Artificial Sequence
  mRNA product Design a-1 (hSL-A64-N5) comprising derived and/or modified sequence from MOPV/LASV reassortant(IGS-1;Clade IV)__AFY05576__GPCmut4 (opt1)
aggagagucccgcagucggcguccagcggcucugcuuguucgugugugugucguugcaggccuuauucaagcuuaccaugggccagaucgugaccuucuuccaggaggucccccacgugaucgaggaggugaugaacaucguccugaucgcccucagcgugcuggccgugcugaaggggcucuacaacuucgcgaccugcggccuggucgggcuggugacguuccuccugcugugcggccgcuccugcaccaccagccucuacaaggggguguacgagcugcagacccuggagcucaacauggagacgcugaacaugugcaugccgcuguccugcaccaagaacaacagccaccacuacaucauggucggcaacgagaccggccucgagcugacccugacgaacaccuccaucaucaaccacaaguucugcaaccucagcgacgcccacaagaagaaccuguacgaccacgcccugauguccaucaucagcaccuuccaccucuccauccccaacuucaaccaguacgaggccaugagcugcgacuucaacgggggcaagaucuccgugcaguacaaccugagccacuccuacgccggggacgcggccaaccacugcggcaccguggccaacgggguccugcagacguucaugcggauggccuggggcggcagcuacaucgcgcucgacuccgggcgcggcaacugggacugcaucaugaccagcuaccaguaccugaucauccagaacaccaccugggaggaccacugccaguucucccggcccagccccaucggguaccugggccuccugucccagcgcacgcgggacaucuacaucagccgccggcgccggggcaccuucaccuggacccugagcgacuccgagggggaggacacgccgggcggguacugccucacccgcuggaugcugaucgaggccgagcugaagugcuucggcaacaccgccguggccaagugcaacgagaagcacgacgaggaguucugcgacaugcuccggcuguucgacuucugcaagcaggccauccagcgccugaaggcgcccgcccagaugagcauccagcucaucaacaaggccgugaacgcccugaucaacgaccagcugaucaugaagaaccaccuccgggacaucauggggauccccuacugcaacuacuccaaguacugcuaccugaaccacaccacgaccggccgcaccagccugcccaagugcugccucgucuccaacggcagcuaccugaacgagacccacuucuccgacgacaucgagcagcaggccgacaacaugaucacggagaugcugcagaaggaguacauggagcggcaggggaagaccccgcucggccugguggaccuguucguguucagcaccuccuucuaccugaucagcaucuuccuccaccuggucaagauccccacccaccgccacaucguggggaaguccugccccaagccccaccggcugaaccacaugggcaucugcagcugcgggcucuacaagcagccgggcgugcccgucaaguggaagcgcugaggacuagucccuguucccagagcccacuuuuuuuucuuuuuuugaaauaaaauagccugucuuucagaucucaaaggcucuuuucagagccaccaaaaaaaaaaaaaaaaaaaaaaaaaaaaaaaaaaaaaaaaaaaaaaaaaaaaaaaaaaaaaaaaagaauu

SEQ ID NO: 26561 - RNA, 1717 nt, Artificial Sequence
  mRNA product Design a-1 (hSL-A64-N5) comprising derived and/or modified sequence from LASV(LM765-SLE-2012;Clade IV)__AIT17814__GPCmut4 (opt1)
aggagagucccgcagucggcguccagcggcucugcuuguucgugugugugucguugcaggccuuauucaagcuuaccaugggccagaucgugaccuucuuccaggaggucccccacgugaucgaggaggugaugaacaucguccugaucgcccucagcauccuggccgugcugaaggggcucuacaacuucgcgaccugcggccugguggggcuggucacguuccuccugcugugcggccgcuccugcaccaccagccucuacaaggggguguacgagcugcagacccuggagcucaacauggagacgcugaacaugugcaugccgcuguccugcaccaagaacaacagccaccacuacaucauggugggcaacgagaccggccucgagcugacccugacgaacaccuccaucaucgaccacaaguucugcaaccucagcgacgcccaccggaagaaccuguacgaccacgcccugauguccaucaucagcaccuuccaccucuccauccccaacuucaaccaguacgaggccaugagcugcgacuucaacgggggcaagaucuccguccaguacaaccugagccacuccuacgccaaggacgcggccgaccacugcgggaccguggccaacggcgugcugcagacguucaugcgcauggccuggggcgggagcuacaucgcgcucgacuccggccgggggcgcugggacugcaucaugaccagcuaccaguaccugaucauccagaacaccaccugggaggaccacugccaguucucccggcccagccccaucggcuaccuggggcuccugucccagcgcacgcgggacaucuacaucagccgccggcgccggggcaccuucaccuggacccugagcgacuccgagggcaaggacacgcccgggggcuacugccucacccgcuggaugcugaucgaggccgagcugaagugcuucgggaacaccgccgucgccaagugcaacgagaagcacgacgaggaguucugcgacaugcuccggcuguucgacuucugcaagcaggccauccagcgccugaaggcgccggcccagaugagcauccagcucaucaacaaggccgugaacgcccugaucaacgaccagcugaucaugaagaaccaccuccgggacaucaugggcauccccuacugcaacuacuccaaguacugcuaccugaaccacaccacgaccgggaagaccagccugcccaagugcugccucguguccaacggcagcuaccugaacgagacccacuucuccgacgacaucgagcagcaggccgacaacaugaucacggagaugcugcagaaggaguacauggagcgccagggcaagaccccgcucgggcuggucgaccuguucguguucagcaccuccuucuaccugaucagcaucuuccuccaccuggugaagauccccacccaccggcacaucgucggcaagcccugccccaagccgcaccgccugaaccacauggggaucugcuccugcggccucuacaagcagcccggggugcccgugaaguggaagcggugaggacuagucccuguucccagagcccacuuuuuuuucuuuuuuugaaauaaaauagccugucuuucagaucucaaaggcucuuuucagagccaccaaaaaaaaaaaaaaaaaaaaaaaaaaaaaaaaaaaaaaaaaaaaaaaaaaaaaaaaaaaaaaaaagaauu

SEQ ID NO: 26562 - RNA, 1717 nt, Artificial Sequence
  mRNA product Design a-1 (hSL-A64-N5) comprising derived and/or modified sequence from LASV(LM776-SLE-2012;Clade IV)__AIT17824__GPCmut4 (opt1)
aggagagucccgcagucggcguccagcggcucugcuuguucgugugugugucguugcaggccuuauucaagcuuaccaugggccagaucgugaccuucuuccaggaggucccccacgugaucgaggaggugaugaacaucguccugaucgcccucagcauccuggccgugcugaaggggcucuacaacuucgcgaccugcggccugguggggcuggucacguuccuccugcugugcggccgcuccugcaccaccagcguguacaaggggguguacgagcuccagacccuggagcugaacauggagacgcucaacaugugcaugccgcuguccugcaccaagaacaacagccaccacuacaucauggucggcaacgagaccggccuggagcucacccugacgaacaccuccaucaucaaccacaaguucugcaaccugagcgacgcccacaagaagaaccucuacgaccacgcccugauguccaucaucagcaccuuccaccuguccauccccaacuucaaccaguacgaggccaugagcugcgacuucaacgggggcaagaucuccgugcaguacaaccucagccacuccuacgccggggacgcggccaaccacugcggcaccguggccaacgggguccugcagacguucaugcggauggccuggggcggcagcuacaucgcgcuggacuccgggcacggcaagugggacugcaucaugaccagcuaccaguaccucaucauccagaacaccaccugggaggaccacugccaguucucccgccccagccccaucggguaccugggccugcucucccagcggacgcgcgacaucuacaucagccggcgccggcgcggcaccuucaccuggacccugagcgacuccgaggggaaggacacgccgggcggguacugccugacccgguggaugcucaucgaggccgagcugaagugcuucggcaacaccgccguggccaagugcaacgagaagcacgacgaggaguucugcgacaugcugcgccucuucgacuucugcaagcaggccauccagcggcugaaggcgcccgcccagaugagcauccagcugaucaacaaggccgugaacgcccucaucaacgaccagcugaucaugaagaaccaccuccgcgacaucauggggauccccuacugcaacuacuccaaguacugcuaccugaaccacaccacgaccggcaagaccagccugcccaagugcugccuggucuccaacggcagcuaccucaacgagacccacuucuccgacgacaucgagcagcaggccgacaacaugaucacggagaugcugcagaaggaguacauggagcggcaggggaagaccccgcugggccucguggaccuguucguguucagcaccuccuucuaccugaucagcaucuuccugcaccucgucaagauccccacccaccgccacaucguggggaaguccugccccaagccccaccggcugaaccacaugggcaucugcagcugcgggcuguacaagcagccgggcgugcccguccgcuggaagcggugaggacuagucccuguucccagagcccacuuuuuuuucuuuuuuugaaauaaaauagccugucuuucagaucucaaaggcucuuuucagagccaccaaaaaaaaaaaaaaaaaaaaaaaaaaaaaaaaaaaaaaaaaaaaaaaaaaaaaaaaaaaaaaaaagaauu

SEQ ID NO: 26563 - RNA, 1717 nt, Artificial Sequence
  mRNA product Design a-1 (hSL-A64-N5) comprising derived and/or modified sequence from LASV(Mad39;Clade IV)__ANH09722__GPCmut4 (opt1)
aggagagucccgcagucggcguccagcggcucugcuuguucgugugugugucguugcaggccuuauucaagcuuaccaugggccagaucgugaccuucuuccaggaggucccccacgugaucgaggaggugaugaacaucguccugaucgcccucagcauccuggccgugcugaaggggcucuacaacguggcgaccugcggccugaucgggcuggucacguuccuccugcugugcggccgcuccugcaccaccacccucuacaaggggguguacgagcugcaggcccuggagcucaacauggagacgcugaacaugugcaugccgcugagcugcaccaagaacaacucccaccacuacauccgggugggcaacgagaccggccucgagcugacccugacgaacaccagccucaucaaccacaaguucugcaaccuguccgacgcccacaagaagaaccuguacgaccacgcccucaugagcaucaucuccaccuuccaccugagcauccccaacuucaaccaguacgaggccauguccugcgacuucaacgacgggaagaucagcguccaguacaaccugucccacaccuacgcgggcgacacggccaaccacugcgggaccguggccaacggcgugcuccagaccuucaugcgcauggccuggggcgggagcuacaucgcgcuggacuccggccgcgggggcugggacugcaucaugaccagcuaccaguaccugaucauccagaacacgaccugggaggaccacugccaguucucccggcccagccccaucggguaccucggccugcugucccagcggacccgcgacaucuacaucagccggcgccggcgcggcaccuucacguggacccucuccgacagcgaggggaaggacaccccgggcggguacugccugacccgguggaugcugaucgaggccgagcucaagugcuucggcaacacggccgucgccaagugcaacgagaagcacgacgaggaguucugcgacaugcugcgccuguucgacuucugcaagcaggccauccagcggcucaaggcgcccgcccagaugagcauccagcugaucaacaaggccgugaacgcccugaucaacgaccagcucaucaugaagaaccaccuccgcgacaucauggggauccccuacugcaacuacuccaaguacugcuaccugaaccacaccgugaccggcaagaccagccugcccaagugcugccuggucuccaacggcagcuaccugaacgagacgcacuucuccgacgacaucgagcagcaggccgacaacaugaucaccgagaugcuccagaaggaguacauggagcggcaggggaagaccccgcugggccugguggaccuguucguguucagcaccuccuucuaccucaucagcaucuuccugcaccuggucaagauccccacgcaccgccacgugguggggaagcccugccccaagccgcaccggcucaaccacaugggcaucugcuccugcggguucuacaagcagcccggcguccccgugcgcuggaagcggugaggacuagucccuguucccagagcccacuuuuuuuucuuuuuuugaaauaaaauagccugucuuucagaucucaaaggcucuuuucagagccaccaaaaaaaaaaaaaaaaaaaaaaaaaaaaaaaaaaaaaaaaaaaaaaaaaaaaaaaaaaaaaaaaagaauu

SEQ ID NO: 26564 - RNA, 1717 nt, Artificial Sequence
  mRNA product Design a-1 (hSL-A64-N5) comprising derived and/or modified sequence from LASV(Z0947-SLE-2011;Clade IV)__AIT17840__GPCmut4 (opt1)
aggagagucccgcagucggcguccagcggcucugcuuguucgugugugugucguugcaggccuuauucaagcuuaccaugggccagaucgugaccuucuuccaggaggucccccacgugaucgaggaggugaugaacaucguccugaucgcccucagcauccuggccgugcugaaggggcucuacaacuucgcgaccugcggccugguggggcuggucacguuccuccugcugugcggccgcuccugcaccaucagccucuacaaggggguguacgagcugcagacccuggagcucaacauggagacccugaacaugugcaugccgcuguccugcacgaagaacaacagccaccacuacaucauggugggcaacgagaccggccucgagcugacccugaccaacacguccaucaucaaccacaaguucugcaaccucagcgacgcccacaagaagaaccuguacgaccacgcccugauguccaucaucagcaccuuccaccucuccauccccaacuucaaccaguacgaggccaugagcugcgacuucaacgggggcaagaucuccguccaguacaaccugagccacuccuacgccggggacgcggccaaccacugcggcaccguggccaacggggugcugcagaccuucaugcggauggccuggggcggcagcuacaucgcgcucgacuccgggcgcgaccggugggacugcaucaugacgagcuaccaguaccugaucauccagaacaccaccugggaggaccacugccaguucucccgccccagccccaucggcuaccuggggcuccugucccagcggacccgcgacaucuacaucagccggcgccggcgcggcacguucaccuggacccugagcgacuccgagggcaaggacacccccgggggcuacugccucacgcgguggaugcugaucgaggccgagcugaagugcuucgggaacaccgccgucgccaagugcaacgagaagcacgacgaggaguucugcgacaugcuccgccuguucgacuucugcaagcaggccauccagcggcugaaggcgccggcccagaugagcauccagcucaucaacaaggccgugaacgcccugaucaacgaccagcugaucaugaagaaccaccuccgcgacaucaugggcauccccuacugcaacuacuccaaguacugcuaccugaaccacaccaccacggggaagaccagccugcccaagugcugccucguguccaacggcagcuaccugaacgagacccacuucuccgacgacaucgagcagcaggccgacaacaugaucaccgagaugcugcagaaggaguacauggagcggcagggcaagacgccgcucgggcuggucgaccuguucguguucagcaccuccuucuaccugaucagcaucuuccuccaccuggugaagauccccacccaccgccacaucgucggcaagcccugccccaagccgcaccggcugaaccacauggggaucugcuccugcggccucuacaagcagcccggggugcccgugaaguggaagcgcugaggacuagucccuguucccagagcccacuuuuuuuucuuuuuuugaaauaaaauagccugucuuucagaucucaaaggcucuuuucagagccaccaaaaaaaaaaaaaaaaaaaaaaaaaaaaaaaaaaaaaaaaaaaaaaaaaaaaaaaaaaaaaaaaagaauu

SEQ ID NO: 26565 - RNA, 1717 nt, Artificial Sequence
  mRNA product Design a-1 (hSL-A64-N5) comprising derived and/or modified sequence from LASV(Josiah;Clade IV)__NP_694870__GPCmut4 (opt4)
aggagagucccgcagucggcguccagcggcucugcuuguucgugugugugucguugcaggccuuauucaagcuuaccaugggccagaucgugaccuucuuccaggaggugccccacgugaucgaggaggugaugaacaucgugcugaucgcccugagcgugcuggccgugcugaagggccuguacaacuucgccaccugcggccuggugggccuggugaccuuccugcugcugugcggcagaagcugcaccaccagccuguacaagggcguguacgagcugcagacccuggagcugaacauggagacccugaacaugugcaugccccugagcugcaccaagaacaacagccaccacuacaucauggugggcaacgagaccggccuggagcugacccugaccaacaccagcaucaucaaccacaaguucugcaaccugagcgacgcccacaagaagaaccuguacgaccacgcccugaugagcaucaucagcaccuuccaccugagcauccccaacuucaaccaguacgaggccaugagcugcgacuucaacggcggcaagaucagcgugcaguacaaccugagccacagcuacgccggcgacgccgccaaccacugcggcaccguggccaacggcgugcugcagaccuucaugagaauggccuggggcggcagcuacaucgcccuggacagcggcagaggcaacugggacugcaucaugaccagcuaccaguaccugaucauccagaacaccaccugggaggaccacugccaguucagcagacccagccccaucggcuaccugggccugcugagccagagaaccagagacaucuacaucagcagaagaagaagaggcaccuucaccuggacccugagcgacagcgagggcaaggacacccccggcggcuacugccugaccagauggaugcugaucgaggccgagcugaagugcuucggcaacaccgccguggccaagugcaacgagaagcacgacgaggaguucugcgacaugcugagacuguucgacuucugcaagcaggccauccagagacugaaggcccccgcccagaugagcauccagcugaucaacaaggccgugaacgcccugaucaacgaccagcugaucaugaagaaccaccugagagacaucaugggcauccccuacugcaacuacagcaaguacugcuaccugaaccacaccaccaccggcagaaccagccugcccaagugcugccuggugagcaacggcagcuaccugaacgagacccacuucagcgacgacaucgagcagcaggccgacaacaugaucaccgagaugcugcagaaggaguacauggagagacagggcaagaccccccugggccugguggaccuguucguguucagcaccagcuucuaccugaucagcaucuuccugcaccuggugaagauccccacccacagacacaucgugggcaagagcugccccaagccccacagacugaaccacaugggcaucugcagcugcggccuguacaagcagcccggcgugcccgugaaguggaagagaugaggacuagucccuguucccagagcccacuuuuuuuucuuuuuuugaaauaaaauagccugucuuucagaucucaaaggcucuuuucagagccaccaaaaaaaaaaaaaaaaaaaaaaaaaaaaaaaaaaaaaaaaaaaaaaaaaaaaaaaaaaaaaaaaagaauu

SEQ ID NO: 26566 - RNA, 1714 nt, Artificial Sequence
  mRNA product Design a-1 (hSL-A64-N5) comprising derived and/or modified sequence from LASV(LP;Clade I)__AAF86701__GPCmut4 (opt4)
aggagagucccgcagucggcguccagcggcucugcuuguucgugugugugucguugcaggccuuauucaagcuuaccaugggccagaucaucaccuucuuccaggaggugccccacgugaucgaggaggugaugaacaucgugcugaucgcccugagccugcuggccauccugaagggccuguacaacaucgccaccugcggcaucaucggccugguggccuuccuguuccugugcggcaagagcugcagccugacccugaagggcggcuacgagcugcagacccuggagcugaacauggagacccugaacaugugcaugccccugagcugcaccaagaacagcagccaccacuacaucagagugggcaacgagaccggccuggagcugacccugaccaacaccagcaucaucaaccacaaguucugcaaccugagcgacgcccacaagaagaaccuguacgaccacgcccugaugagcaucaucagcaccuuccaccugagcauccccaacuucaaccaguacgaggccaugagcugcgacuucaacggcggcaagaucagcgugcaguacaaccugagccacagcuacgccggcgacgccgccgagcacugcggcaccguggccaacggcgugcugcagaccuucaugagaauggccuggggcggcagauacaucgcccuggacagcggcaagggcaacugggacugcaucaugaccagcuaccaguaccugaucauccagaacaccaccugggaggaccacugccaguucagcagacccagccccaucggcuaccugggccugcugagccagagaaccagagacaucuacaucagcagaagaagaagaggcaccuucaccuggacccugagcgacagcgagggcaacgagacccccggcggcuacugccugaccagauggaugcugaucgaggccgagcugaagugcuucggcaacaccgccguggccaagugcaacgagaagcacgacgaggaguucugcgacaugcugagacuguucgacuucugcaagcaggccaucagaagacugaaggcccccgcccagaugagcauccagcugaucaacaaggccgugaacgcccugaucaacgaccagcugaucaugaagaaccaccugagagacaucaugggcauccccuacugcaacuacagcaaguacugcuaccugaaccacaccagcagcggcagaaccagccugcccaagugcugccugaucagcaacggcagcuaccugaacgagacccaguucagcgacgacaucgagcagcaggccgacaacaugaucaccgagaugcugcagaaggaguacaucgagagacagggcaagaccccccugggccugguggacaucuucaucuucagcaccagcuucuaccugaucagcaucuuccugcaccugaucaagauccccacccacagacacaucgugggcaagcccugccccaagccccacagacugaaccacaugggcgugugcagcugcggccuguacaagcaccccggcgugcccaccaaguggaagagaugaggacuagucccuguucccagagcccacuuuuuuuucuuuuuuugaaauaaaauagccugucuuucagaucucaaaggcucuuuucagagccaccaaaaaaaaaaaaaaaaaaaaaaaaaaaaaaaaaaaaaaaaaaaaaaaaaaaaaaaaaaaaaaaaagaauu

SEQ ID NO: 26567 - RNA, 1714 nt, Artificial Sequence
  mRNA product Design a-1 (hSL-A64-N5) comprising derived and/or modified sequence from LASV(803213;Clade II)__AAF86703__GPCmut4 (opt4)
aggagagucccgcagucggcguccagcggcucugcuuguucgugugugugucguugcaggccuuauucaagcuuaccaugggccagaucaucaccuucuuccaggaggugccccacgugaucgaggaggugaugaacaucgugcugaucgcccugagccugcuggccauccugaagggcaucuacaacguggccaccugcggccuguucggccugaucagcuuccugcugcugugcggcagaagcugcagcgugaccuacaagggcguguacgagcugcagacccuggagcugaacauggccaaccugaacaugugcaugccccugagcugcaccaagaacaacagccaccacuacaucauggugggcaacgagaccggccuggagcugacccugaccaacaccagcaucaucaaccacaaguucugcaaccugagcgacgcccacaagaagaaccuguacgaccacgcccugaugagcaucaucagcaccuuccaccugagcauccccaacuucaaccaguacgaggccaugagcugcgacuucaacggcggcaagaucagcgugcaguacaaccugagccacagcuucgccguggacgccgccaaccacugcggcaccaucgccaacggcgugcugcagaccuucaugagaauggccuggggcggcagcuacaucgcccuggacagcggcaagggcaacugggacugcaucaugaccagcuaccaguaccugaucauccagaacaccaccugggaggaccacugccaguucagcagacccagccccaucggcuaccugggccugcugagccagagaaccagagacaucuacaucagcagaagaagaagaggcaccuucaccuggacccugagcgacagcgagggcaacgaggcccccggcggcuacugccugaccagauggaugcugaucgaggccgagcugaagugcuucggcaacaccgccguggccaagugcaacgagaagcacgacgaggaguucugcgacaugcugagacuguucgacuucugcaagcaggccaucaagagacugaagacccccgcccagaugagcauccagcugaucaacaaggccgugaacgcccugaucaacgaccagcugaucaugaagaaccaccugagagacaucaugggcauccccuacugcaacuacagcagauacugcuaccugaaccacaccgugaccggcaagaccagccugcccagaugcugccuggugagcaacggcagcuaccugaacgagacccacuucagcgacgacaucgagcagcaggccgacaacaugaucaccgagaugcugcagaaggaguacauggacagacagggcaagaccccccugggccugguggaccuguucguguucagcaccagcuucuaccugaucagcaucuuccugcaccuggugaagauccccacccacagacacaucgugggcaagcccugccccaagccccacagacugaaccacaugggcaucugcagcugcggccuguacaagcaccccggcgugcccgugaaguggaagagaugaggacuagucccuguucccagagcccacuuuuuuuucuuuuuuugaaauaaaauagccugucuuucagaucucaaaggcucuuuucagagccaccaaaaaaaaaaaaaaaaaaaaaaaaaaaaaaaaaaaaaaaaaaaaaaaaaaaaaaaaaaaaaaaaagaauu

SEQ ID NO: 26568 - RNA, 1714 nt, Artificial Sequence
  mRNA product Design a-1 (hSL-A64-N5) comprising derived and/or modified sequence from LASV(GA391;Clade III)__CAA36645__GPCmut4 (opt4)
aggagagucccgcagucggcguccagcggcucugcuuguucgugugugugucguugcaggccuuauucaagcuuaccaugggccagaucgugaccuucuuccaggaggugccccacgugaucgaggaggugaugaacaucgugcugaucgcccugagcauccuggccauccugaagggccuguacaacguggccaccugcggccugaucggccuggugaccuuccugcugcugagcggcagaagcugcagccugaucuacaagggcaccuacgagcugcagacccuggagcugaacauggagacccugaacaugugcaugccccugagcugcaccaagaacaacagccaccacuacaucagagugggcaacgagaccggccuggagcugacccugaccaacaccagcauccugaaccacaaguucugcaaccugagcgacgcccacaagagaaaccuguacgaccacagccugaugagcaucaucagcaccuuccaccugagcauccccaacuucaaccaguacgaggccaugagcugcgacuucaacggcggcaagaucaccgugcaguacaaccugagccacagcuucgccguggacgccgccggccacugcggcacccuggccaacggcgugcugcagaccuucaugagaauggccuggggcggcagcuacaucgcccuggacagcggcagaggcaacugggacugcaucaugaccagcuaccaguaccugaucauccagaacaccaccugggacgaccacugccaguucagcagacccagccccaucggcuaccugggccugcugagccagagaaccagagacaucuacaucagcagaagaagaagaggcaccuucaccuggacccugagcgacagcgagggcaacgagacccccggcggcuacugccugaccagauggaugcugaucgaggccgagcugaagugcuucggcaacaccgccguggccaagugcaacgagaagcacgacgaggaguucugcgacaugcugagacuguucgacuucugcaagcaggccaucagaagacugaagacccccgcccagaugagcauccagcugaucaacaaggccgugaacgcccugaucaacgaccagcugaucaugaagaaccaccugagagacaucaugggcauccccuacugcaacuacagcagauacugcuaccugaaccacaccagcaccggcaagaccagccugcccagaugcugccugaucagcaacggcagcuaccugaacgagaccaaguucagcgacgacaucgagcagcaggccgacaacaugaucaccgagaugcugcagaaggaguacaucgacagacagggcaagaccccccugggccugguggaccuguucguguucagcaccagcuucuaccugaucagcaucuuccugcaccuggugaagauccccacccacagacacaucgugggcaagcccugccccaagccccacagacugaaccacaugggcaucugcagcugcggccuguacaagcagcccggcgugcccgugagauggaagagaugaggacuagucccuguucccagagcccacuuuuuuuucuuuuuuugaaauaaaauagccugucuuucagaucucaaaggcucuuuucagagccaccaaaaaaaaaaaaaaaaaaaaaaaaaaaaaaaaaaaaaaaaaaaaaaaaaaaaaaaaaaaaaaaaagaauu

SEQ ID NO: 26569 - RNA, 1717 nt, Artificial Sequence
  mRNA product Design a-1 (hSL-A64-N5) comprising derived and/or modified sequence from LASV(AV;Clade V)__CCA30314__GPCmut4 (opt4)
aggagagucccgcagucggcguccagcggcucugcuuguucgugugugugucguugcaggccuuauucaagcuuaccaugggccagaucgugaccuucuuccaggaggugccccacgugaucgaggaggugaugaacaucgugcugaucgcccugagcauccuggccgugcugaagggccuguacaacaucgccaccugcggccugaucggccugaucaccuuccugcugcugugcggcagaagcugcagcagcaaccuguacaagggcguguacgagcugcagagccuggaccugaacauggagacccugaacaugugcaugccccugagcugcaccaagaacaacagccaccacuacaucagagugggcaacgacaccggccuggagcugacccugaccaacaccagcauccugaaccacaaguucugcaaccugagcgacgcccacaagaaggaccuguacgaccacgcccugaugagcaucaucagcaccuuccaccugagcauccccaacuucaaccaguacgaggccaugagcugcgacuucaacggcggcaagaucagcgugcaguacaaccugagccacagcuacgccaucgacgccgccaaccacugcggcaccguggccaacggcauccugcagaccuucaugagaauggccuggggcggcagcuacaucgcccuggacagcggcagaggcaacugggacugcaucaugaccagcuaccaguaccugaucauccagaacaccaccugggagaaccacugccaguucagcagacccagccccaucggcuaccugggccugcugagccagagaaccagagacaucuacaucagcagaagaagaagaggcaccuucaccuggacccugagcgacagcgagggcaacgccacccccggcggcuacugccugaccagauggaugcugaucgaggccgagcugaagugcuucggcaacaccgccguggccaagugcaacgagaagcacgacgaggaguucugcgacaugcugagacuguucgacuucugcaagcaggccaucagcagacugaagagccccgcccagaugagcauccagcugaucaacaaggccgugaacgcccugaucaacgaccagcugaucaugaagaaccaccugagagacaucaugggcauccccuacugcaacuacagcaaguacugcuaccugaaccacaccaucaccggcaagaccagccugcccaagugcugccuggugagcaacggcagcuaccugaacgagacccacuucagcgacgacaucgagcagcaggccgacaacaugaucaccgagaugcugcagaaggaguacauggagagacagggcaagaccccccugggccugguggaccuguucguguucagcaccagcuucuaccugaucagcaucuuccugagacuggugaagauccccacccacagacacaucgugggcaagcccugccccaagccccacagacugaaccacaugggcaucugcagcugcggccuguacaagcagcccggcgugcccgugagauggaagagaugaggacuagucccuguucccagagcccacuuuuuuuucuuuuuuugaaauaaaauagccugucuuucagaucucaaaggcucuuuucagagccaccaaaaaaaaaaaaaaaaaaaaaaaaaaaaaaaaaaaaaaaaaaaaaaaaaaaaaaaaaaaaaaaaagaauu

SEQ ID NO: 26570 - RNA, 1714 nt, Artificial Sequence
  mRNA product Design a-1 (hSL-A64-N5) comprising derived and/or modified sequence from LASV(Togo/2016/7082;Clade VI)__AMR44577__GPCmut4 (opt4)
aggagagucccgcagucggcguccagcggcucugcuuguucgugugugugucguugcaggccuuauucaagcuuaccaugggccagaucaucaccuucuuccaggaggugccccacgugaucgaggaggugaugaacaucgugcugaucgcccugagccugcuggccauccugaagggcguguacaacguggccaccugcggcaucaucggccuggugaccuuccuguuccugugcggcagaagcugcagccugaucuacaagggcagcuacgagcugcagacccuggagcugaacauggagacccugaacaugugcaugccccugagcugcaccaagaacagcagccaccacuacaucagagugggcaacgagaccggccuggagcugacccugaccaacaccagcaucaucaaccacaaguucugcaaccugagcgacgcccacaagagaaaccuguacgaccacgcccugaugagcauccugagcaccuuccaccugagcauccccaacuucaaccaguacgaggccaugagcugcgacuucaacggcggcaagaucagcgugcaguacaaccugagccacgccuacgccguggacgccgccgagcacugcggcaccguggccaacggcgugcugcagaccuucaugagaauggccuggggcggcagcuacaucgcccuggacagcggcagaggcaacugggacugcaucaugaccagcuaccaguaccugaucauccagaacaccaccugggaggaccacugccaguucagcagacccagccccaucggcuaccugggccugcugagccagagaaccagagacaucuacaucagcagaagaagaagaggcaccuucaccuggacccugagcgacagcgagggcaacgagacccccggcggcuacugccugaccagauggaugcugaucgaggccgagcugaagugcuucggcaacaccgccguggccaagugcaacgagaagcacgacgaggaguucugcgacaugcugagacuguucgacuucugcaagcaggccauccagagacugaagagccccgcccagaugagcauccagcugaucaacaaggccgugaacgcccugaucaacgaccagcugaucaugaagaaccaccugagagacaugaugggcauccccuacugcaacuacagcaaguacugcuaccugaaccacaccagcagcggcagaaccagccugcccaagugcugccuggugagcaacggcagcuaccugaacgagacccacuucagcgacgacaucgagcagcaggccgacaacaugaucaccgagaugcugcagaaggaguacaucgacagacagggcaagaccccccugggccugguggaccuguucguguucagcaccagcuucuaccugaucagcaucuuccugcaccugaucaagauccccacccacagacacaucgugggcaagcccugccccaagccccacagacugaaccacaugggcaucugcagcugcggccuguacaagcagcccggcgugcccaccagauggaagagaugaggacuagucccuguucccagagcccacuuuuuuuucuuuuuuugaaauaaaauagccugucuuucagaucucaaaggcucuuuucagagccaccaaaaaaaaaaaaaaaaaaaaaaaaaaaaaaaaaaaaaaaaaaaaaaaaaaaaaaaaaaaaaaaaagaauu

SEQ ID NO: 26571 - RNA, 1714 nt, Artificial Sequence
  mRNA product Design a-1 (hSL-A64-N5) comprising derived and/or modified sequence from LASV(KAK-428;Clade n.d. (VII))__ANH09740__GPCmut4 (opt4)
aggagagucccgcagucggcguccagcggcucugcuuguucgugugugugucguugcaggccuuauucaagcuuaccaugggccagaucgugaccuucuuccaggaggugccccacgugaucgaggaggugaugaacaucgugcugaucgcccugagccugcuggccauccugaagggccuguacaacuucgccaccugcggcgugaucggccugaucaccuuccugcugcugugcggcagaagcugcagcgccaccuacaagggccaguacgagcugcagacccuggagcugaacauggagagccugaacaugugcaugccccugagcugcaccaagaacaacagccaccacuacaucagagccggcaacaacaccggccuggagcugacccugaccaacaccagcaucaucagccacaaguucugcaaccugagcgacgcccacaagaagaaccuguacgaccacacccugaugagcaucaucaccaccuuccaccugagcauccccaacuucaaccaguacgaggccaugagcugcgacuucaacggcggcaagaucagcauccaguacaaccugagccacagcuacgccggcgacgccgcccagcacugcggcaccguggccaacggcgugcugcagaccuucaugagaauggccuggggcggcagcuaccuggcccuggacagcggcagaagaggcugggacugcaucaucagcagcuaccaguaccugaucauccagaacaccaccugggacgaccacugccaguucagcagacccagccccaucggcuaccugggcuucgugagccagaagaccagagacaucuacaucagcagaagaagaagaggcaccuucaccuggacccugagcgacagcgagggccacgacaugcccggcggcuacugccugaccagauggaugcugaucgaggccgaccugaagugcuucggcaacaccgccguggccaagugcaacgagaagcacgacgaggaguucugcgacauguggagacuguucgacuucugcaagcaggccauccagagacugaaggcccccgcccagaugaacauccagcugaucaacaaggccgugaacgcccugaucaacgaccagcugaugaugaagaaccaccugagagacaucaugggcauccccuacugcaacuacagcaaguucugcuaccugaacaacaccaccaccggcagaaccagccugcccagaugcugccugaucagcaacggcagcuaccugaacgagacccacuucagcgacgacaucgagcagcaggccgacaacaugaucaccgagaugcugcagaaggaguacauggacagacagggcaagaccccccugggccugguggaccuguucguguucagcaccagcuucuaccugaucaccaucuuccugcaccuggugaagauccccacccacagacacaucgugggcaagcccugccccaagccccacagacugaaccacaugggcaucugcagcugcggccuguacaagcagcccggcgugcccgugagauggaagagaugaggacuagucccuguucccagagcccacuuuuuuuucuuuuuuugaaauaaaauagccugucuuucagaucucaaaggcucuuuucagagccaccaaaaaaaaaaaaaaaaaaaaaaaaaaaaaaaaaaaaaaaaaaaaaaaaaaaaaaaaaaaaaaaaagaauu

SEQ ID NO: 26572 - RNA, 1714 nt, Artificial Sequence; identical to SEQ ID NO: 26566
  mRNA product Design a-1 (hSL-A64-N5) comprising derived and/or modified sequence from LASV(Pinneo-NIG-1969;Clade I)__AIT17836__GPCmut4 (opt4)

SEQ ID NO: 26573 - RNA, 1714 nt, Artificial Sequence
  mRNA product Design a-1 (hSL-A64-N5) comprising derived and/or modified sequence from LASV(ISTH0009-NIG-2011;Clade II)__AIT17404__GPCmut4 (opt4)
aggagagucccgcagucggcguccagcggcucugcuuguucgugugugugucguugcaggccuuauucaagcuuaccaugggccagaucaucaccuucuuccaggaggugccccacgugaucgaggaggugaugaacaucgugcugaucgcccugagccugcuggccauccugaagggcaucuacaacguggccaccugcggccuguucggccuggugagcuuccugcugcugugcggcagaagcugcagcaccaccuacaagggcguguacgagcugcagacccuggagcuggacauggccagccugaacaugugcaugccccugagcugcaccaagaacaacagccaccacuacaucauggugggcaacgagaccggccuggagcugacccugaccaacaccagcaucaucaaccacaaguucugcaaccugagcgacgcccacaagaagaaccuguacgaccacgcccugaugagcaucaucagcaccuuccaccugagcauccccaacuucaaccaguacgaggccaugagcugcgacuucaacggcggcaagaucagcgugcaguacaaccugagccacgccuacgccguggacgccgccaaccacugcggcaccaucgccaacggcgugcugcagaccuucaugagaauggccuggggcggcagcuacaucgcccuggacagcggcaagggcagcugggacugcaucaugaccagcuaccaguaccugaucauccagaacaccaccugggaggaccacugccaguucagcagacccagccccaucggcuaccugggccugcugagccagagaaccagagacaucuacaucagcagaagaagaagaggcaccuucaccuggacccugagcgacagcgagggcaacgagacccccggcggcuacugccugaccagauggaugcugaucgaggccgagcugaagugcuucggcaacaccgccguggccaagugcaacgagaagcacgacgaggaguucugcgacaugcugagacuguucgacuucugcaagcaggccaucagaagacugaagacccccgcccagaugagcauccagcugaucaacaaggccgugaacgcccugaucaacgaccagcugaucaugaagaaccaccugagagacaucaugggcauccccuacugcaacuacagcaaguacugcuaccugaaccacaccgugaccggcaagaccagccugcccagaugcugccuggugagcaacggcagcuaccugaacgagacccacuucagcgacgacaucgagcagcaggccgacaacaugaucaccgagcugcugcagaaggaguacauggacagacagggcaagaccccccugggccugguggaccuguucguguucagcaccagcuucuaccugaucagcaucuuccugcaccugaucaagauccccacccacagacacaucaccggcaagcccugccccaagccccacagacugaaccacaugggcaucugcagcugcggccuguacaagcaccccggcgugcccgugaaguggaagagaugaggacuagucccuguucccagagcccacuuuuuuuucuuuuuuugaaauaaaauagccugucuuucagaucucaaaggcucuuuucagagccaccaaaaaaaaaaaaaaaaaaaaaaaaaaaaaaaaaaaaaaaaaaaaaaaaaaaaaaaaaaaaaaaaagaauu

SEQ ID NO: 26574 - RNA, 1714 nt, Artificial Sequence
  mRNA product Design a-1 (hSL-A64-N5) comprising derived and/or modified sequence from LASV(ISTH2010-NIG-2012;Clade II)__AIT17482__GPCmut4 (opt4)
aggagagucccgcagucggcguccagcggcucugcuuguucgugugugugucguugcaggccuuauucaagcuuaccaugggccagaucaucaccuucuuccaggaggugccccacgugaucgaggaggugaugaacaucgugcugaucgcccugagccugcuggccauccugaagggcaucuacaacguggccaccugcggccuguucggccuggugagcuuccugcugcugugcggcagaagcugcagcaccaccuacaagggcguguacgagcugcagacccuggagcuggacauggccagccugaacaugugcaugccccugagcugcaccaagaacaacagccaccacuacaucauggugggcaacgagaccggccuggagcugacccugaccaacaccagcaucaucaaccacaaguucugcaaccugagcgacgcccacaagaagaaccuguacgaccacgcccugaugagcaucaucagcaccuuccaccugagcauccccaacuucaaccaguacgaggccaugagcugcgacuucaacggcggcaagaucagcgugcaguacaaccugagccacgccuacgccguggacgccgccaaccacugcggcaccaucgccaacggcgugcugcagaccuucaugagaauggccuggggcggcagcuacaucgcccuggacagcggcaagggcagcugggacugcaucaugaccagcuaccaguaccugaucauccagaacaucaccugggaggaccacugccaguucagcagacccagccccaucggcuaccugggccugcugagccagagaaccagagacaucuacaucagcagaagaagaagaggcaccuucaccuggacccugagcgacagcgagggcaacgagacccccggcggcuacugccugaccagauggaugcugaucgaggccgagcugaagugcuucggcaacaccgccguggccaagugcaacgagaagcacgacgaggaguucugcgacaugcugagacuguucgacuucugcaagcaggccaucagaagacugaagacccccgcccagaugagcauccagcugaucaacaaggccgugaacgcccugaucaacgaccagcugaucaugaagaaccaccugagagacaucaugggcauccccuacugcaacuacagcaaguacugcuaccugaaccacaccgugaccggcaagaccagccugcccagaugcugccuggugagcaacggcagcuaccugaacgagacccacuucagcgacgacaucgagcagcaggccgacaacaugaucaccgagcugcugcagaaggaguacaucgacagacagggcaagaccccccugggccugguggaccuguucguguucagcaccagcuucuaccugaucagcaucuuccugcaccuggugaagauccccacccacagacacguggugggcaagcccugccccaagccccacagacugaaccacaugggcaucugcagcugcggccuguacaagcaccccggcgugcccgugaaguggaagagaugaggacuagucccuguucccagagcccacuuuuuuuucuuuuuuugaaauaaaauagccugucuuucagaucucaaaggcucuuuucagagccaccaaaaaaaaaaaaaaaaaaaaaaaaaaaaaaaaaaaaaaaaaaaaaaaaaaaaaaaaaaaaaaaaagaauu

SEQ ID NO: 26575 - RNA, 1714 nt, Artificial Sequence
  mRNA product Design a-1 (hSL-A64-N5) comprising derived and/or modified sequence from LASV(Lassa virus/H.sapiens-wt/NGA/2015/ISTH_0543;Clade II)__AVO03639__GPCmut4 (opt4)
aggagagucccgcagucggcguccagcggcucugcuuguucgugugugugucguugcaggccuuauucaagcuuaccaugggccagaucaucaccuucuuccaggaggugccccacgugaucgaggaggugaugaacaucgugcugaucgcccugagccugcuggccauccugaagggcaucuacaacguggccaccugcggccuguucggccuggugagcuuccugcugcugugcggcagaagcugcagcaccaccuacaagggcguguacgagcugcagacccuggagcuggacauggccaaccugaacaugugcaugccccugagcugcaccaagaacaacagccaccacuacaucauggugggcaacgagaccggccuggagcugacccugaccaacaccagcaucaucaaccacaaguucugcaaccugagcgacgcccacaagaagaaccuguacgaccacgcccugaugagcaucaucagcaccuuccaccugagcauccccaacuucaaccaguacgaggccaugagcugcgacuucaacggcggcaagaucagcgugcaguacaaccugagccacaccuacgccguggacgccgccaaccacugcggcaccaucgccaacggcgugcugcagaccuucaugagaauggccuggggcggcagcuacaucgcccuggacagcggcaagggcagcugggacugcaucaugaccagcuaccaguaccuggugauccagaacaccaccugggaggaccacugccaguucagcagacccagccccaucggcuaccugggccugcugagccagagaaccagagacaucuacaucagcagaagaagaagaggcaccuucaccuggacccugagcgacagcgagggcaacgagacccccggcggcuacugccugaccagauggaugcugaucgaggccgagcugaagugcuucggcaacaccgccguggccaagugcaacgagaagcacgacgaggaguucugcgacaugcugagacuguucgacuucugcaagcaggccaucagaagacugaagacccccgcccagaugagcauccagcugaucaacaaggccgugaacgcccugaucaacgaccagcugaucaugaagaaccaccugagagacaucaugggcauccccuacugcaacuacagcaaguacugcuaccugaaccacaccgugaccggcaagaccagccugcccagaugcugccuggugagcaacggcagcuaccugaacgagacccacuucagcgacgacaucgagcagcaggccgacaacaugaucaccgagcugcugcagaaggaguacaucgacagacagggcaagaccccccugggccugguggaccuguucguguucagcaccagcuucuaccugaucagcaucuuccugcaccuggugaagauccccacccacagacacaucaccggcaagcccugccccaagccccacagacugaaccacaugggcaucugcagcugcggccuguacaagcaccccggcgugcccgugaaguggaagagaugaggacuagucccuguucccagagcccacuuuuuuuucuuuuuuugaaauaaaauagccugucuuucagaucucaaaggcucuuuucagagccaccaaaaaaaaaaaaaaaaaaaaaaaaaaaaaaaaaaaaaaaaaaaaaaaaaaaaaaaaaaaaaaaaagaauu

SEQ ID NO: 26576 - RNA, 1714 nt, Artificial Sequence
  mRNA product Design a-1 (hSL-A64-N5) comprising derived and/or modified sequence from LASV(Lassa virus/H.sapiens-wt/NGA/2016/ISTH_0009;Clade II)__AVO03571__GPCmut4 (opt4)
aggagagucccgcagucggcguccagcggcucugcuuguucgugugugugucguugcaggccuuauucaagcuuaccaugggccagaucaucaccuucuuccaggaggugccccacgugaucgaggaggugaugaacaucgugcugaucgcccugagccugcuggccauccugaagggcaucuacaacguggccaccugcggccugcugggccuggugagcuuccugcugcugugcggcagaagcugcagcaccaccuacaagggcguguacgagcugcagacccuggagcuggacauggccagccugaacaugugcaugccccugagcugcaccaagaacaacagccaccacuacaucauggugggcaacgagaccggccuggagcugacccugaccaacaccagcaucaucaaccacaaguucugcaaccugagcgacgcccacaagaagaaccuguacgaccacgcccugaugagcaucaucagcaccuuccaccugagcauccccaacuucaaccaguacgaggccaugagcugcgacuucaacggcggcagaaucagcgugcaguacaaccugagccacagcuacgccguggacgccgccaaccacugcggcaccaucgccaacggcgugcugcagaccuucaugagaauggccuggggcggcagcuacaucgcccuggacagcggcaagggcagcugggacugcaucaugaccagcuaccaguaccugaucauccagaacaccaccugggaggaccacugccaguucagcagacccagccccaucggcuaccugggccugcugagccagagaaccagagacaucuacaucagcagaagaagaagaggcaccuucaccuggacccugagcgacagcgagggcaacgagacccccggcggcuacugccugaccagauggaugcugaucgaggccgagcugaagugcuucggcaacaccgccguggccaagugcaacgagaagcacgacgaggaguucugcgacaugcugagacuguucgacuucugcaagcaggccaucagaagacugaagacccccgcccagaugagcauccagcugaucaacaaggccgugaacgcccugaucaacgaccagcugaucaugaagaaccaccugagagacaucaugggcauccccuacugcaacuacagcaaguacugcuaccugaaccacaccgugaccggcaagaccagccugcccagaugcugccuggugagcaacggcagcuaccugaacgagacccacuucagcgacgacaucgagcagcaggccgacaacaugaucaccgagcugcugcagaaggaguacaucgacagacagggcaagaccccccugggccugguggaccuguucguguucagcaccagcuucuaccugaucagcaucuuccugcaccuggugaagauccccacccacagacacaucaccggcaagcccugccccaagccccacagacugaaccacaugggcaucugcagcugcggccuguacaaccaccccggcgugcccgugaaguggaagagaugaggacuagucccuguucccagagcccacuuuuuuuucuuuuuuugaaauaaaauagccugucuuucagaucucaaaggcucuuuucagagccaccaaaaaaaaaaaaaaaaaaaaaaaaaaaaaaaaaaaaaaaaaaaaaaaaaaaaaaaaaaaaaaaaagaauu

SEQ ID NO: 26577 - RNA, 1714 nt, Artificial Sequence
  mRNA product Design a-1 (hSL-A64-N5) comprising derived and/or modified sequence from LASV(Lassa virus/H.sapiens-wt/NGA/2016/ISTH_0017;Clade II)__AVO03567__GPCmut4 (opt4)
aggagagucccgcagucggcguccagcggcucugcuuguucgugugugugucguugcaggccuuauucaagcuuaccaugggccagaucaucaccuucuuccaggaggugccccacgugaucgaggaggugaugaacaucgugcugaucgcccugagccugcuggccauccugaagggcaucuacaacguggccaccugcggccuguucggccuggugagcuuccugcugcugugcggcagaagcugcagcaccaccuacaagggcguguacgagcugcagacccuggagcuggacauggccagccugaacaugugcaugccccugagcugcaccaagaacaacagccaccacuacaucauggugggcaacgagaccggccuggagcugacccugaccaacaccagcaucaucaaccacaaguucugcaaccugagcgacgcccacaagaagaaccuguacgaccacgcccugaugagcaucaucagcaccuuccaccugagcauccccaacuucaaccaguacgaggccaugagcugcgacuucaacggcggcaagaucagcgugcaguacaaccugagccacaccuacgccaucgacgccgccaaccacugcggcaccaucgccaacggcgugcugcagaccuucaugagaauggccuggggcggcagcuacaucgcccuggacagcggcaagggcagcugggacugcaucaugaccagcuaccaguaccugaucauccagaacaccaccugggaggaccacugccaguucagcagacccagccccaucggcuaccugggccugcugagccagagaaccagagacaucuacaucagcagaagaagaagaggcaccuucaccuggacccugagcgacagcgagggcaacgagacccccggcggcuacugccugaccagauggaugcugaucgaggccgagcugaagugcuucggcaacaccgccguggccaagugcaacgagaagcacgacgaggaguucugcgacaugcugagacuguucgacuucugcaagcaggccaucagaagacugaagacccccgcccagaugagcauccagcugaucaacaaggccgugaacgcccugaucaacgaccagcugaucaugaagaaccaccugagagacaucaugggcauccccuacugcaacuacagcaaguacugcuaccugaaccacaccgugaccggcaagaccagccugcccagaugcugccuggugagcaacggcagcuaccugaacgagacccacuucagcgacgacaucgagcagcaggccgacaacaugaucaccgagcugcugcagaaggaguacauggacagacagggcaagaccccccugggccugguggaccuguucguguucagcaccagcuucuaccugaucagcaucuuccugcaccuggugagaauccccacccacagacacgugaucggcaagcccugccccaagccccacagacugaaccacaugggcaucugcagcugcggccuguacaagcaccccggcgugcccgugaaguggaagagaugaggacuagucccuguucccagagcccacuuuuuuuucuuuuuuugaaauaaaauagccugucuuucagaucucaaaggcucuuuucagagccaccaaaaaaaaaaaaaaaaaaaaaaaaaaaaaaaaaaaaaaaaaaaaaaaaaaaaaaaaaaaaaaaaagaauu

SEQ ID NO: 26578 - RNA, 1714 nt, Artificial Sequence
  mRNA product Design a-1 (hSL-A64-N5) comprising derived and/or modified sequence from LASV(Lassa virus/H.sapiens-wt/NGA/2018/ISTH_0959;Clade II)__AVV65099__GPCmut4 (opt4)
aggagagucccgcagucggcguccagcggcucugcuuguucgugugugugucguugcaggccuuauucaagcuuaccaugggccagaucaucaccuucuuccaggaggugccccacgugaucgaggaggugaugaacaucgugcugaucgcccugagccugcuggccauccugaagggcaucuacaacguggugaccugcggccuguucggccuggugagcuuccugcugcugugcggcagaagcugcagcaccaccuacaagggcguguacgagcugcagacccuggagcuggacauggccagccugaacaugugcaugccccugagcugcaccaagaacaacagccaccacuacaucauggugggcaacgagaccggccuggagcugacccugaccaacaccagcaucaucaaccacaaguucugcaaccugagcgacgcccacaagaagaaccuguacgaccacgcccugaugagcaucaucagcaccuuccaccugagcauccccaacuucaaccaguacgaggccaugagcugcgacuucaacggcggcaagaucagcgugcaguacaaccugagccacgccuacgccaucgacgccgccaaccacugcggcaccaucgccaacggcgugcugcagaccuucaugagaauggccuggggcggcagcuacaucgcccuggacagcggcaagggcagcugggacugcaucaugaccagcuaccaguaccugaucauccagaacaccaccugggaggaccacugccaguucagcagacccagccccaucggcuaccugggccugcugagccagagaaccagagacaucuacaucagcagaagaagaagaggcaccuucaccuggacccugagcgacagcgagggcaacgagacccccggcggcuacugccugaccagauggaugcugaucgaggccgagcugaagugcuucggcaacaccgccguggccaagugcaacgagaagcacgacgaggaguucugcgacaugcugagacuguucgacuucugcaagcaggccaucagaagacugaagacccccgcccagaugagcauccagcugaucaacaaggccgugaacgcccugaucaacgaccagcugaucaugaagaaccaccugagagacaucaugggcauccccuacugcaacuacagcaaguacugcuaccugaaccacaccgugaccggcaagaccagccugcccagaugcugccuggugagcaacggcagcuaccugaacgagacccacuucagcgacgacaucgagcagcaggccgacaacaugaucaccgagcugcugcagaaggaguacaucgacagacagggcaagaccccccugggccugguggaccuguucguguucagcaccagcuucuaccugaucagcaucuuccugcaccuggugaagauccccacccacagacacgugaucggcaagcccugccccaagccccacagacugaaccacaugggcaucugcagcugcggccuguacaagcaccccggcgugcccgugaaguggaagagaugaggacuagucccuguucccagagcccacuuuuuuuucuuuuuuugaaauaaaauagccugucuuucagaucucaaaggcucuuuucagagccaccaaaaaaaaaaaaaaaaaaaaaaaaaaaaaaaaaaaaaaaaaaaaaaaaaaaaaaaaaaaaaaaaagaauu

SEQ ID NO: 26579 - RNA, 1714 nt, Artificial Sequence
  mRNA product Design a-1 (hSL-A64-N5) comprising derived and/or modified sequence from LASV(LASV003-NIG-2008;Clade II)__AIT17580__GPCmut4 (opt4)
aggagagucccgcagucggcguccagcggcucugcuuguucgugugugugucguugcaggccuuauucaagcuuaccaugggccagaucaucaccuucuuccaggaggugccccacgugaucgaggaggugaugaacaucgugcugaucgcccugagccugcuggccauccugaagggcaucuacaacguggccaccugcggccuguucggccuggugagcuuccugcugcugugcggcagaagcugcagcaccaccuacaagggcguguacgagcugcagacccuggagcuggacauggccagccugaacaugugcaugccccugagcugcaccaagaacaacagccaccacuacaucauggugggcaacgagaccggccuggagcugacccugaccaacaccagcaucaucaaccacaaguucugcaaccugagcgacgcccacaagaagaaccuguacgaccacgcccugaugagcaucaucagcaccuuccaccugagcauccccaacuucaaccaguacgaggccaugagcugcgacuucaacggcggcaagaucagcgugcaguacaaccugagccacaccuacgccguggacgccgccaaccacugcggcaccaucgccaacggcgugcugcagaccuucaugagaauggccuggggcggcagcuacaucgcccuggacagcggcaagggcagcugggacugcaucaugaccagcuaccaguaccugaucauccagaacaccaccugggaggaccacugccaguucagcagacccagccccaucggcuaccugggccugcugagccagagaaccagagacaucuacaucagcagaagaagaagaggcaccuucaccuggacccugagcgacagcgagagcaacgagacccccggcggcuacugccugaccagauggaugcugaucgaggccgagcugaagugcuucggcaacaccgccguggccaagugcaacgagaagcacgacgaggaguucugcgacaugcugagacuguucgacuucugcaagcaggccaucagaagacugaaggcccccgcccagaugagcauccagcugaucaacaaggccgugaacgcccugaucaacgaccagcugaucaugaagaaccaccugagagacaucaugggcauccccuacugcaacuacagcaaguacugcuaccugaaccacaccgugaccggcagaaccagccugcccagaugcugccuggugagcaacggcagcuaccugaacgagacccacuucagcgacgacaucgagcagcaggccgacaacaugaucaccgagcugcugcagaaggaguacauggacagacagggcaagaccccccugggccugguggaccuguucguguucagcaccagcuucuaccugaucagcaucuuccugcaccuggugaagauccccacccacagacacgugaucggcaagcccugccccaagccccacagacugaaccacaugggcaucugcagcugcggccuguacaagcaccccggcgugcccgugaaguggaagagaugaggacuagucccuguucccagagcccacuuuuuuuucuuuuuuugaaauaaaauagccugucuuucagaucucaaaggcucuuuucagagccaccaaaaaaaaaaaaaaaaaaaaaaaaaaaaaaaaaaaaaaaaaaaaaaaaaaaaaaaaaaaaaaaaagaauu

SEQ ID NO: 26580 - RNA, 1714 nt, Artificial Sequence
  mRNA product Design a-1 (hSL-A64-N5) comprising derived and/or modified sequence from LASV(LASV035-NIG-2009;Clade II)__AIT17588__GPCmut4 (opt4)
aggagagucccgcagucggcguccagcggcucugcuuguucgugugugugucguugcaggccuuauucaagcuuaccaugggccagaucaucaccuucuuccaggaggugccccacgugaucgaggaggugaugaacaucgugcugaucgcccugagccugcuggccauccugaagggcaucuacaacguggccaccugcggccuguucggccuggugagcuuccugcugcugugcggcagaagcugcagcaccaccuacaagggcguguacgagcugcagacccuggagcuggacauggccagccugaacaugugcaugccccugagcugcaccaagaacaacagccaccacuacaucauggugggcaacgagaccggccuggagcugacccugaccaacaccagcaucaucaaccacaaguucugcaaccugagcgacgcccacaagaagaaccuguacgaccacgcccugaugagcaucaucagcaccuuccaccugagcauccccaacuucaaccaguacgaggccaugagcugcgacuucaacggcggcaagaucagcgugcaguacaaccugagccacgccuacgccguggacgccgccaaccacugcggcaccaucgccaacggcgugcugcagaccuucaugagaauggccuggggcggcagcuacaucgcccuggacagcggcaagggcagcugggacugcaucaugaccagcuaccaguaccugaucauccagaacaccaccugggaggaccacugccaguucagcagacccagccccaucggcuaccugggccugcugagccagagaaccagagacaucuacaucagcagaagaagaagaggcaccuucaccuggacccugagcgacagcgagggcaacgagacccccggcggcuacugccugaccagauggaugcugaucgaggccgagcugaagugcuucggcaacaccgccguggccaagugcaacgagaagcacgacgaggaguucugcgacaugcugagacuguucgacuucugcaagcaggccaucagaagacugaaggcccccgcccagaugagcauccagcugaucaacaaggccgugaacgcccugaucaacgaccagcugaucaugaagaaccaccugagagacaucaugggcauccccuacugcaacuacagcaaguacugcuaccugaaccacaccgugaccggcaagaccagccugcccagaugcugccuggugagcaacggcagcuaccugaacgagacccacuucagcgacgacaucgagcagcaggccgacaacaugaucaccgagcugcugcagaaggaguacaucgacagacagggcaagaccccccugggccugguggaccuguucguguucagcaccagcuucuaccugaucagcaucuuccugcaccuggugaagauccccacccacagacacgugaucggcaagcccugccccaagccccacagacugaaccacaugggcaucugcagcugcggccuguacaagcaccccggcgugcccgugaaguggaagagaugaggacuagucccuguucccagagcccacuuuuuuuucuuuuuuugaaauaaaauagccugucuuucagaucucaaaggcucuuuucagagccaccaaaaaaaaaaaaaaaaaaaaaaaaaaaaaaaaaaaaaaaaaaaaaaaaaaaaaaaaaaaaaaaaagaauu

SEQ ID NO: 26581 - RNA, 1714 nt, Artificial Sequence
  mRNA product Design a-1 (hSL-A64-N5) comprising derived and/or modified sequence from LASV(LASV1000-NIG-2009;Clade II)__AIT17782__GPCmut4 (opt4)
aggagagucccgcagucggcguccagcggcucugcuuguucgugugugugucguugcaggccuuauucaagcuuaccaugggccagaucaucaccuucuuccaggaggugccccacgugaucgaggaggugaugaacaucgugcugaucgcccugagccugcuggccauccugaagggcaucuacaacguggccaccugcggccuguucggccuggugagcuuccugcugcugugcggcagaagcugcagcaccaccuacaagggcguguacgagcugcagacccuggagcuggacauggccagccugaacaugugcaugccccugagcugcaccaagaacaacagccaccacuacaucauggugggcaacgagaccggccuggagcugacccugaccaacaccagcaucaucaaccacaaguucugcaaccugagcgacgcccacaagaagaaccuguacgaccacgcccugaugagcaucaucagcaccuuccaccugagcauccccaacuucaaccaguacgaggccaugagcugcgacuucaacggcggcaagaucagcgugcaguacaaccugagccacaccuacgccguggacgccgccaaccacugcggcaccaucgccaacggcgugcugcagaccuucaugagaauggccuggggcggcagcuacaucgcccuggacagcggcaagggcagcugggacugcaucaugaccagcuaccaguaccugaucauccagaacaccaccugggaggaccacugccaguucagcagacccagccccaucggcuaccugggccugcugagccagagaaccagagacaucuacaucagcagaagaagaagaggcaccuucaccuggacccugagcgacagcgagggcaacgagacccccggcggcuacugccugaccagauggaugcugaucgaggccgagcugaagugcuucggcaacaccgccguggccaagugcaacgagaagcacgacgaggaguucugcgacaugcugagacuguucgacuucugcaagcaggccaucaagagacugaagacccccgcccagaugagcauccagcugaucaacaaggccgugaacgcccugaucaacgaccagcugaucaugaagaaccaccugagagacaucaugggcauccccuacugcaacuacagcaaguacugcuaccugaaccacaccgugaccggcaagaccagccugcccagaugcugccuggugagcaacggcagcuaccugaacgagacccacuucagcgacgacaucgagcagcaggccgacaacaugaucaccgagcugcugcagaaggaguacaucgacagacagggcaagaccccccugggccugguggaccuguucguguucagcaccagcuucuaccugaucagcaucuuccugcaccuggugaagauccccacccacagacacguggugggcaagcccugccccaagccccacagacugaaccacaugggcaucugcagcugcggccuguacaagcaccccggcgugcccgugaaguggaagagaugaggacuagucccuguucccagagcccacuuuuuuuucuuuuuuugaaauaaaauagccugucuuucagaucucaaaggcucuuuucagagccaccaaaaaaaaaaaaaaaaaaaaaaaaaaaaaaaaaaaaaaaaaaaaaaaaaaaaaaaaaaaaaaaaagaauu

SEQ ID NO: 26582 - RNA, 1714 nt, Artificial Sequence
  mRNA product Design a-1 (hSL-A64-N5) comprising derived and/or modified sequence from LASV(LASV221-NIG-2010;Clade II)__AIT17624__GPCmut4 (opt4)
aggagagucccgcagucggcguccagcggcucugcuuguucgugugugugucguugcaggccuuauucaagcuuaccaugggccagaucaucaccuucuuccaggaggugccccacgugaucgaggaggugaugaacaucgugcugaucgcccugagccugcuggccauccugaagggcaucuacaacguggccaccugcggccuguucggccuggugagcuuccugcugcugugcggcagaagcugcagcaccaccuacaagggcguguacgagcugcagacccuggagcuggacauggccagccugaacaugugcaugccccugagcugcaccaagaacaacagccaccacuacaucauggugggcaacgagaccggccuggagcugacccugaccaacaccagcaucaucaaccacaaguucugcaaccugagcgacgcccacaagaagaaccuguacgaccacgcccugaugagcaucaucagcaccuuccaccugagcauccccaacuucaaccaguacgaggccaugagcugcgacuucaacggcggcaagaucagcgugcaguacaaccugagccacaccuacgccaucgacgccgccaaccacugcggcaccaucgccaacggcgugcugcagaccuucaugagaauggccuggggcggcagcuacaucgcccuggacagcggcaagggcagcugggacugcaucaugaccagcuaccaguaccugaucauccagaacaccaccugggaggaccacugccaguucagcagacccagccccaucggcuaccugggccugcugagccagagaaccagagacaucuacaucagcagaagaagaagaggcaccuucaccuggacccugagcgacagcgagggcaacgagacccccggcggcuacugccugaccagauggaugcugaucgaggccgagcugaagugcuucggcaacaccgccguggccaagugcaacgagaagcacgacgaggaguucugcgacaugcugagacuguucgacuucugcaagcaggccaucagaagacugaagacccccgcccagaugagcauccagcugaucaacaaggccgugaacgcccugaucaacgaccagcugaucaugaagaaccaccugagagacaucaugggcauccccuacugcaacuacagcaaguacugcuaccugaaccacaccgugaccggcaagaccagccugcccagaugcugccuggugagcaacggcagcuaccugaacgagacccacuucagcgacgacaucgagcagcaggccgacaacaugaucaccgagaugcugcagaaggaguacauggacagacagggcaagaccccccugggccugguggaccuguucguguucagcaccagcuucuaccugaucagcaucuuccugcaccuggugaagauccccacccacagacacgugaucggcaagcccugccccaagccccacagacugaaccacaugggcaucugcagcugcggccuguacaagcaccccggcgugcccgugaaguggaagagaugaggacuagucccuguucccagagcccacuuuuuuuucuuuuuuugaaauaaaauagccugucuuucagaucucaaaggcucuuuucagagccaccaaaaaaaaaaaaaaaaaaaaaaaaaaaaaaaaaaaaaaaaaaaaaaaaaaaaaaaaaaaaaaaaagaauu

SEQ ID NO: 26583 - RNA, 1714 nt, Artificial Sequence
  mRNA product Design a-1 (hSL-A64-N5) comprising derived and/or modified sequence from LASV(LASV237-NIG-2010;Clade II)__AIT17638__GPCmut4 (opt4)
aggagagucccgcagucggcguccagcggcucugcuuguucgugugugugucguugcaggccuuauucaagcuuaccaugggccagaucaucaccuucuuccaggaggugccccacgugaucgaggaggugaugaacaucgugcugaucgcccugagccugcuggccauccugaagggcaucuacaacguggccaccugcggccuguucggccuggugagcuuccugcugcugugcggcagaagcugcagcaccaccuacaagggcguguacgagcugcagacccuggagcuggacauggccagccugaacaugugcaugccccugagcugcaccaagaacaacagccaccacuacaucauggugggcaacgagaccggccuggagcugacccugaccaacaccagcaucaucaaccacaaguucugcaaccugagcgacgcccacaagaaggaccuguacgaccacgcccugaugagcaucaucagcaccuuccaccugagcauccccaacuucaaccaguacgaggccaugagcugcgacuucaacggcggcaagaucagcgugcaguacaaccugagccacaccuacgccguggacgccgccaaccacugcggcaccaucgccaacggcgugcugcagaccuucaugagaauggccuggggcggcagcuacaucgcccuggacagcggcaagggcagcugggacugcaucaugaccagcuaccaguaccugaucauccagaacaccaccugggaggaccacugccaguucagcagacccagccccaucggcuaccugggccugcugagccagagaaccagagacaucuacaucagcagaagaagaagaggcaccuucaccuggacccugagcgacagcgagggcaacgagacccccggcggcuacugccugaccagauggaugcugaucgaggccgagcugaagugcuucggcaacaccgccguggccaagugcaacgagaagcacgacgaggaguucugcgacaugcugagacuguucgacuucugcaagcaggccaucagaagacugaagacccccgcccagaugagcauccagcugaucaacaaggccgugaacgcccugaucaacgaccagcugaucaugaagaaccaccugagagacaucaugggcauccccuacugcaacuacagcaaguacugcuaccugaaccacaccgugaccggcaagaccagccugcccagaugcugccuggugagcaacggcagcuaccugaacgagacccacuucagcgacgacaucgagcagcaggccgacaacaugaucaccgagcugcugcagaaggaguacauggacagacagggcaagaccccccugggccugguggaccuguucguguucagcaccagcuucuaccugaucagcaucuuccugcaccugaucaagauccccacccacagacacaucaccggcaagcccugccccaagccccacagacugaaccacaugggcaucugcagcugcggccuguacaagcaccccggcgugcccgugaaguggaagagaugaggacuagucccuguucccagagcccacuuuuuuuucuuuuuuugaaauaaaauagccugucuuucagaucucaaaggcucuuuucagagccaccaaaaaaaaaaaaaaaaaaaaaaaaaaaaaaaaaaaaaaaaaaaaaaaaaaaaaaaaaaaaaaaaagaauu

SEQ ID NO: 26584 - RNA, 1714 nt, Artificial Sequence
  mRNA product Design a-1 (hSL-A64-N5) comprising derived and/or modified sequence from LASV(LASV253-NIG-2011;Clade II)__AIT17670__GPCmut4 (opt4)
aggagagucccgcagucggcguccagcggcucugcuuguucgugugugugucguugcaggccuuauucaagcuuaccaugggccagaucaucaccuucuuccaggaggugccccacgugaucgaggaggugaugaacaucgugcugaucgcccugagccugcuggccauccugaagggcaucuacaacguggccaccugcggccuguucggccuggugagcuuccugcugcugugcggcagaagcugcagcaccaccuacaagggcguguacgagcugcagacccuggagcuggacauggccagccugaacaugugcaugccccugagcugcaccaagaacaacagccaccacuacaucauggugggcaacgagaccggccuggagcugacccugaccaacaccagcaucaucaaccacaaguucugcaaccugagcgacgcccacaagaagaaccuguacgaccacgcccugaugagcaucaucagcaccuuccaccugagcauccccaacuucaaccaguacgaggccaugagcugcgacuucaacggcggcaagaucagcgugcaguacaaccugagccacaccuacgccguggacgccgccaaccacugcggcaccaucgccaacggcgugcugcagaccuucaugagaauggccuggggcggcagcuacaucgcccuggacagcggcaagggcagcugggacugcaucaugaccagcuaccaguaccugaucauccagaacaccaccugggaggaccacugccaguucagcagacccagccccaucggcuaccugggccugcugagccagagaaccagagacaucuacaucagcagaagaagaagaggcaccuucaccuggacccugagcgacagcgagggcaacgagacccccggcggcuacugccugaccagauggaugcugaucgaggccgagcugaagugcuucggcaacaccgccguggccaagugcaacgagaagcacgacgaggaguucugcgacaugcugagacuguucgacuucugcaagcaggccaucagaagacugaaggcccccgcccagaugagcauccagcugaucaacaaggccgugaacgcccugaucaacgaccagcugaucaugaagaaccaccugagagacaucaugggcauccccuacugcaacuacagcaaguacugcuaccugaaccacaccgugaccggcagaaccagccugcccagaugcugccuggugagcaacggcagcuaccugaacgagacccacuucagcgacgacaucgagcagcaggccgacaacaugaucaccgagcugcugcagaaggaguacaucgacagacagggcaagaccccccugggccugguggaccuguucguguucagcaccagcuucuaccugaucagcaucuuccugcaccuggugaagauccccacccacagacacaucaucggcaagcccugccccaagccccacagacugaaccacaugggcaucugcagcugcggccuguacaagcaccccggcgugcccgugaaguggaagagaugaggacuagucccuguucccagagcccacuuuuuuuucuuuuuuugaaauaaaauagccugucuuucagaucucaaaggcucuuuucagagccaccaaaaaaaaaaaaaaaaaaaaaaaaaaaaaaaaaaaaaaaaaaaaaaaaaaaaaaaaaaaaaaaaagaauu

SEQ ID NO: 26585 - RNA, 1714 nt, Artificial Sequence
  mRNA product Design a-1 (hSL-A64-N5) comprising derived and/or modified sequence from LASV(LASV254-NIG-2011;Clade II)__AIT17674__GPCmut4 (opt4)
aggagagucccgcagucggcguccagcggcucugcuuguucgugugugugucguugcaggccuuauucaagcuuaccaugggccagaucaucaccuucuuccaggaggugccccacgugaucgaggaggugaugaacaucgugcugaucgcccugagccugcuggccauccugaagggcaucuacaacguggccaccugcggccuguucggccuggugagcuuccugcugcugugcggcagaagcugcagcaccaccuacaagggcguguacgagcugcagacccuggagcuggacaugaccaaccugaacaugugcaugccccugagcugcaccaagaacaacagccaccacuacaucauggugggcaacgagaccggccuggagcugacccugaccaacaccagcaucaucaaccacaaguucugcaaccugagcgacgcccacaagaagaaccuguacaaccacgcccugaugagcaucaucagcaccuuccaccugagcauccccaacuucaaccaguacgaggccaugagcugcgacuucaacggcggcaagaucagcgugcaguacaaccugagccacagcuacgccguggacgccgccaaccacugcggcaccaucgccaacggcgugcugcagaccuucaugagaauggccuggggcggcagcuacaucgcccuggacagcggcaagggcaacugggacugcaucaugaccagcuaccaguaccugaucauccagaacaccaccugggaggaccacugccaguucagcagacccagccccaucggcuaccugggccugcugagccagagaaccagagacaucuacaucagcagaagaagaagaggcaccuucaccuggacccugagcgacagcgagggcaacgagacccccggcggcuacugccugaccagauggaugcugaucgaggccgagcugaagugcuucggcaacaccgccguggccaagugcaacgagaagcacgacgaggaguucugcgacaugcugagacuguucgacuucugcaagcaggccaucagaagacugaagacccccgcccaggccaacauccagcugaucaacaaggccgugaacgcccugaucaacgaccagcugaucaugaagaaccaccugagagacaucaugggcauccccuacugcaacuacagcaaguacugcuaccugaaccacaccgugaccggcaagaccagccugcccagaugcugccuggugagcaacggcagcuaccugaacgagacccacuucagcgacgacaucgagcagcaggccgacaacaugaucaccgagcugcugcagaaggaguacauggacagacagggcaagaccccccugggccugguggaccuguucguguucagcaccagcuucuaccugaucagcaucuuccugcaccuggugaagauccccacccacagacacgugaucggcaagcccugccccaagccccacagacugaaccacaugggcaucugcagcugcggccuguacaagcaccccggcgugcccgugaaguggaagagaugaggacuagucccuguucccagagcccacuuuuuuuucuuuuuuugaaauaaaauagccugucuuucagaucucaaaggcucuuuucagagccaccaaaaaaaaaaaaaaaaaaaaaaaaaaaaaaaaaaaaaaaaaaaaaaaaaaaaaaaaaaaaaaaaagaauu

SEQ ID NO: 26586 - RNA, 1714 nt, Artificial Sequence
  mRNA product Design a-1 (hSL-A64-N5) comprising derived and/or modified sequence from LASV(Nig08-A19;Clade III)__ADU56618__GPCmut4 (opt4)
aggagagucccgcagucggcguccagcggcucugcuuguucgugugugugucguugcaggccuuauucaagcuuaccaugggccagaucgugaccuucuuccaggaggugccccacgugaucgaggaggugaugaacaucgugcugaucgcccugagcauccuggccauccugaagggccuguacaacaucgccaccugcggccugaucggccuggugaccuuccugcugcugagcggcagaagcugcagcaugaccuacaagggcguguacgagcugcagacccuggagcugaacaugaacacccugaacaugugcaugccccugagcugcaccaagaacaacagccaccacuacaucauggugggcaacgagaccggccuggagcugacccugaccaacaccagccugcugcaccacaaguucugcaaccugagcgacgcccacaagaagaaccuguacgaccacacccugaugagcaucaucagcaccuuccaccugagcauccccaacuucaaccaguacgaggccaugagcugcgacuucaacggcggcaagaucaccgugcaguacaaccugagccacagcuacgccaucgacgccgccaaccacugcggcaccguggccaacggcgugcugcagaccuucaugagaauggccuggggcggcagcuacaucgcccuggacagcggcagaggcaagugggacugcaucaugaccagcuaccaguaccugaucauccagaacaccaccugggaggaccacugccaguucagcagacccagccccaucggcuaccugggccugcugagccagagaaccagagacaucuacaucagcagaagaagaagaggcaccuucaccuggacccugagcgacagcgagggcaacgagacccccggcggcuacugccugaccagauggaugcugaucgaggccgagcugaagugcuucggcaacaccgccguggccaagugcaacgagaagcacgacgaggaguucugcgacaugcugagacuguucgacuucugcaagcaggccaucagaagacugaaggcccccgcccagaugagcauccagcugaucaacaaggccgugaacgcccugaucaacgaccagcugaucaugaagaaccaccugagagacaucaugggcauccccuacugcaacuacagcaaguacugcuaccugaaccacaccagcaccggcagaaccagccugcccagaugcugccuggugagcaacggcagcuaccugaacgagacccacuucagcgacgacaucgagcagcaggccgacaacaugaucaccgagaugcugcagaaggaguaccuggacagacagggcaagaccccccugggccugguggaccuguucguguucagcaccagcuucuaccugaucagcaucuuccugcaccuggugaagauccccacccacagacacaucgugggcaagcccugccccaagccccacagacugaaccacaugggcaucugcagcugcggccuguacaagcagcccggcgugcccgugagauggaagagaugaggacuagucccuguucccagagcccacuuuuuuuucuuuuuuugaaauaaaauagccugucuuucagaucucaaaggcucuuuucagagccaccaaaaaaaaaaaaaaaaaaaaaaaaaaaaaaaaaaaaaaaaaaaaaaaaaaaaaaaaaaaaaaaaagaauu

SEQ ID NO: 26587 - RNA, 1717 nt, Artificial Sequence
  mRNA product Design a-1 (hSL-A64-N5) comprising derived and/or modified sequence from LASV(G1180-SLE-2010;Clade IV)__AIT17168__GPCmut4 (opt4)
aggagagucccgcagucggcguccagcggcucugcuuguucgugugugugucguugcaggccuuauucaagcuuaccaugggccagaucgugaccuucuuccaggaggugccccacgugaucgaggaggugaugaacaucgugcugaucgcccugagcauccuggccgugcugaagggccuguacaacuucgccaccugcggccuggugggccugcugaccuuccugcugcugugcggcagaagcugcaccgccagcagauacaagggcguguacgagcugcagacccuggagcugaacauggagacccugaacaugugcaugccccugagcugcaccaagaacaacagccaccacuacaucauggugggcaacgagaccggccuggagcugacccugaccaacaccagcaucaucaaccacaaguucugcaaccugagcgacgcccacaagaagaaccuguacgaccacgcccugaugagcaucaucagcaccuuccaccugagcauccccaacuucaaccaguacgaggccaugagcugcgacuucaacggcggcaagaucagcgugcaguacaaccugagccacagcuacgccggcgacgccgccaaccacugcggcaccguggccaacggcgugcugcagaccuucaugagaauggccuggggcggcagcuacaucgcccuggacagcggccacggcagcugggacugcaucaugaccagcuaccaguaccugaucauccagaacaccaccugggaggaccacugccaguucagcagacccagccccaucggcuaccugggccugcugagccagagaaccagagacaucuacaucagcagaagaagaagaggcaccuucaccuggacccugagcgacagcgagggcaaggacacccccggcggcuacugccugaccagauggaugcugaucgaggccgagcugaagugcuucggcaacaccgccguggccaagugcaacgagaagcacgacgaggaguucugcgacaugcugagacuguucgacuucugcaagcaggccauccagagacugaaggcccccgcccagaugagcauccagcugaucaacaaggccgugaacgcccugaucaacgaccagcugaucaugaagaaccaccugagagacaucaugggcauccccuacugcaacuacagcaaguacugcuaccugaaccacaccaccaccggcaagaccagccugcccaagugcugccuggugagcaacggcagcuaccugaacgagacccacuucagcgacgacaucgagcagcaggccgacaacaugaucaccgagaugcugcagaaggaguacauggagagacagggcaagaccccccugggccugguggaccuguucguguucagcaccagcuucuaccugaucagcaucuuccugcaccuggugaagauccccacccacagacacaucgugggcaagagcugccccaagccccacagacugaaccacaugggcaucugcagcugcggccuguacaagcagcccggcgugcccgugaaguggaagagaugaggacuagucccuguucccagagcccacuuuuuuuucuuuuuuugaaauaaaauagccugucuuucagaucucaaaggcucuuuucagagccaccaaaaaaaaaaaaaaaaaaaaaaaaaaaaaaaaaaaaaaaaaaaaaaaaaaaaaaaaaaaaaaaaagaauu

SEQ ID NO: 26588 - RNA, 1717 nt, Artificial Sequence
  mRNA product Design a-1 (hSL-A64-N5) comprising derived and/or modified sequence from LASV(G1442-SLE-2011;Clade IV)__AIT17180__GPCmut4 (opt4)
aggagagucccgcagucggcguccagcggcucugcuuguucgugugugugucguugcaggccuuauucaagcuuaccaugggccagaucgugaccuucuuccaggaggugccccacgugaucgaggaggugaugaacaucgugcugaucgcccugagcauccuggccgugcugaagggccuguacaacguggccaccugcggccugaucggccuggugaccuuccugcugcugugcggcagaagcugcaccaccacccuguacaagggcguguacgagcugcagacccuggagcugaacauggagacccugaacaugugcaugccccugagcugcaccaagaacaacagccaccacuacaucagagugggcaacgagaccggccuggagcugacccugaccaacaccagcaucaucaaccacaaguucugcaaccugagcgacgcccacaagaagaaccuguacgaccacgcccugaugagcaucaucagcaccuuccaccugagcauccccaacuucaaccaguacgaggccaugagcugcgacuucaacggcggcaagaucagcgugcaguacaaccugagccacagcuacgccggcgacgccgccaaccacugcggcaccguggccaacggcgugcugcagaccuucaugagaauggccuggggcggcagcuacaucgcccuggacagcggcagaggcaacugggacugcaucaugaccagcuaccaguaccugaucauccagaacaccaccugggacgaccacugccaguucagcagacccagccccaucggcuaccugggccugcugagccagagaaccagagacguguacaucagcagaagaagaagaggcaccuucaccuggacccugagcgacagcgagggcaaggacacccccggcggcuacugccugaccagauggaugcugaucgaggccgagcugaagugcuucggcaacaccgccguggccaagugcaacgagaagcacgacgaggaguucugcgacaugcugagacuguucgacuucugcaagcaggccauccagagacugaaggcccccgcccagaugagcauccagcugaucaacaaggccgugaacgcccugaucaacgaccagcugaucaugaagaaccaccugagagacaucaugggcauccccuacugcaacuacagcaaguacugcuaccugaacaacaccgccaccggcaagaccagccugcccaagugcugccugaucagcaacggcagcuaccugaacgagacccacuucagcgacgacaucgagcaggaggccgacaacaugaucaccgagaugcugcagaaggaguacauggagagacagggcaagaccccccugggccugguggaccuguucguguucagcaccagcuucuaccugaucagcaucuuccugcaccuggugaagauccccacccacagacacaucgugggcaagagcugccccaagccccacagacugaaccacaugggcaucugcagcugcggccuguacaagcagcccggcgugcccgugagauggaagagaugaggacuagucccuguucccagagcccacuuuuuuuucuuuuuuugaaauaaaauagccugucuuucagaucucaaaggcucuuuucagagccaccaaaaaaaaaaaaaaaaaaaaaaaaaaaaaaaaaaaaaaaaaaaaaaaaaaaaaaaaaaaaaaaaagaauu

SEQ ID NO: 26589 - RNA, 1717 nt, Artificial Sequence
  mRNA product Design a-1 (hSL-A64-N5) comprising derived and/or modified sequence from LASV(G3010-SLE-2013;Clade IV)__AIT17344__GPCmut4 (opt4)
aggagagucccgcagucggcguccagcggcucugcuuguucgugugugugucguugcaggccuuauucaagcuuaccaugggccagaucgugaccuucuuccaggaggugccccacgugaucgaggaggugaugaacaucgugcugaucgcccugagcauccuggccgugcugaagggccuguacaacuucgccaccugcggccuggugggccuggugaccuuccugcugcugugcggcagaagcugcaccaccagccuguacaagggcguguacgagcugcagacccuggagcugaacauggagacccugaacaugugcaugccccugagcugcaccaagaacaacagccaccacuacaucauggugggcaacgagaccggccuggagcugacccugaccaacaccagcaucaucaaccacaaguucugcaaccugagcgacgcccacaagaagaaccuguacaaccacgcccugaugagcaucaucagcaccuuccaccugagcauccccaacuucaaccaguacgaggccaugagcugcgacuucaacggcggcaagaucagcgugcaguacaaccugagccacagcuacgccggcgacgccgccagccacugcggcaccguggccaacggcgugcugcagaccuucaugagaauggccuggggcggcagcuacaucgcccuggacagcggcuacggcaagugggacugcaucaugaccagcuaccaguaccugaucauccagaacaccaccugggaggaccacugccaguucagcagacccagccccaucggcuaccugggccugcugagccagagaaccagagacaucuacaucagcagaagaagaagaggcaccuucaccuggacccugagcgacagcgagggcaaggacacccccggcggcuacugccugaccagauggaugcugaucgaggccgagcugaagugcuucggcaacaccgccguggccaagugcaacgagaagcacgacgaggaguucugcgacaugcugagacuguucgacuucugcaagcaggccauccagagacugaagacccccgcccagaugagcauccagcugaucaacaaggccgugaacgcccugaucaacgaccagcugaucaugaagaaccaccugagagacaucaugggcauccccuacugcaacuacagcaaguacugcuaccugaaccacaccaccaccggcaagaccagccugcccaagugcugccuggugagcaacggcagcuaccugaacgagacccacuucagcgacgacaucgagcagcaggccgacaacaugaucaccgagaugcugcagaaggaguacauggagagacagggcaagaccccccugggccugguggaccuguucguguucagcaccagcuucuaccugaucagcaucuuccugcaccuggugaagauccccacccacagacacaucgugggcaagagcugccccaagccccacagacugaaccacaugggcaucugcagcugcggccuguacaagcagcccggcgugcccgugagauggaagagaugaggacuagucccuguucccagagcccacuuuuuuuucuuuuuuugaaauaaaauagccugucuuucagaucucaaaggcucuuuucagagccaccaaaaaaaaaaaaaaaaaaaaaaaaaaaaaaaaaaaaaaaaaaaaaaaaaaaaaaaaaaaaaaaaagaauu

SEQ ID NO: 26590 - RNA, 1717 nt, Artificial Sequence
  mRNA product Design a-1 (hSL-A64-N5) comprising derived and/or modified sequence from LASV(G502-SLE-2009;Clade IV)__AIT17126__GPCmut4 (opt4)
aggagagucccgcagucggcguccagcggcucugcuuguucgugugugugucguugcaggccuuauucaagcuuaccaugggccagaucgugaccuucuuccaggaggugccccacgugaucgaggaggugaugaacaucgugcugaucgcccugagcauccuggccgugcugaagggccuguacaacuucgccaccugcggccuggugggccugcugaccuuccugcugcugugcggcagaagcugcaccaccggccuguacaagggcguguacgagcugcagacccuggagcugaacauggagacccugaacaugugcaugccccugagcugcaccaagaacaacagccaccacuacaucauggugggcaacgagaccggccuggagcugacccugaccaacaccagcaucaucaaccacaaguucugcaaccugagcgacgcccacaagaagaaccuguacgaccacgcccugaugagcaucaucagcaccuuccaccugagcauccccaacuucaaccaguacgaggccaugagcugcgacuucaacggcggcaagaucagcgugcaguacaaccugagccacagcuacgccggcgacgccgccgaccacugcggcaccguggccaacggcgugcugcagaccuucaugagaauggccuggggcggcagcuacaucgcccuggacagcggcagaggcagaugggacugcaucaugaccagcuaccaguaccugaucauccagaacaccaccugggaggaccacugccaguucagcagacccagccccaucggcuaccugggccugcugagccagagaaccagagacaucuacaucagcagaagaagaagaggcaccuucaccuggacccugagcgacagcgagggcaaggacacccccggcggcuacugccugaccagauggaugcugaucgaggccgagcugaagugcuucggcaacaccgccguggccaagugcaacgagaagcacgacgaggaguucugcgacaugcugagacuguucgacuucugcaagcaggccauccagagacugaaggcccccgcccagaugagcauccagcugaucaacaaggccgugaacgcccugaucaacgaccagcuggugaugaagaaccaccugagagacaucaugggcauccccuacugcaacuacagcagauacugcuaccugaaccacaccaccaccggcagaaccagccugcccaagugcugccuggugagcaacggcagcuaccugaacgagacccacuucagcgacgacaucgagcagcaggccgacaacaugaucaccgagaugcugcagaaggaguacauggagagacagggcaagaccccccugggccugguggaccuguucguguucagcaccagcuucuaccugaucagcaucuuccugcaccuggugaagauccccacccacagacacaucgugggcaagagcugccccaagccccacagacugaaccacaugggcaucugcagcugcggccuguacaagcagcccggcgugcccgugaaguggaagagaugaggacuagucccuguucccagagcccacuuuuuuuucuuuuuuugaaauaaaauagccugucuuucagaucucaaaggcucuuuucagagccaccaaaaaaaaaaaaaaaaaaaaaaaaaaaaaaaaaaaaaaaaaaaaaaaaaaaaaaaaaaaaaaaaagaauu

SEQ ID NO: 26591 - RNA, 1717 nt, Artificial Sequence
  mRNA product Design a-1 (hSL-A64-N5) comprising derived and/or modified sequence from LASV(G733-SLE-2010;Clade IV)__AIT17154__GPCmut4 (opt4)
aggagagucccgcagucggcguccagcggcucugcuuguucgugugugugucguugcaggccuuauucaagcuuaccaugggccagaucgugaccuucuuccaggaggugccccacgugaucgaggaggugaugaacaucgugcugaucgcccugagcauccuggccgugcugaagggccuguacaacuucgccaccugcggcaucgugggccuggugagcuuccugcugcugugcggcagaagcugcaccaccagccuguacaagggcguguacgagcugcagacccuggagcugaacauggagacccugaacaugugcaugccccugagcugcaccaagaacaacagccaccacuacaucauggugggcaacgagaccggccuggagcugacccugaccaacaccagcaucaucaaccacaaguucugcaaccugagcgacgcccacaagaagaaccuguacgaccacgcccugaugagcaucaucagcaccuuccaccugagcauccccaacuucaaccaguacgaggccaugagcugcgacuucaacggcggcaagaucagcgugcaguacaaccugagccacagcuacgccggcgacgccgccaaccacugcggcaccaucgccaacggcgugcugcagaccuucaugagaauggccuggggcggcagcuacaucgcccuggacagcggcagagacagaugggacugcaucaugaccagcuaccaguaccugaucauccagaacaccaccugggaggaccacugccaguucagcagacccagccccaucggcuaccugggccugcugagccagagaaccagagacaucuacaucagcagaagaagaagaggcaccuucaccuggacccugagcgacagcgagggcaaggacacccccggcggcuacugccugaccagauggaugcugaucgaggccgagcugaagugcuucggcaacaccgccguggccaagugcaacgagaagcacgacgaggaguucugcgacaugcugagacuguucgacuucugcaagcaggccauccagagacugaaggcccccgcccagaugagcauccagcugaucaacaaggccgugaacgcccugaucaacgaccagcugaucaugaagaaccaccugagagacaucaugggcauccccuacugcaacuacagcaaguacugcuaccugaaccacaccaccaccggcaagaccagccugcccaagugcugccuggugagcaacggcagcuaccugaacgagacccacuucagcgacgacaucgagcagcaggccgacaacaugaucaccgagaugcugcagaaggaguacauggagagacagggcaagaccccccugggccugguggaccuguucguguucagcaccagcuucuaccugaucagcaucuuccugcaccuggugaagauccccacccacagacacguggugggcaagagcugccccaagccccacagacugaaccacaugggcaucugcagcugcggccuguacggccagcccggcgugcccgugaaguggaagagaugaggacuagucccuguucccagagcccacuuuuuuuucuuuuuuugaaauaaaauagccugucuuucagaucucaaaggcucuuuucagagccaccaaaaaaaaaaaaaaaaaaaaaaaaaaaaaaaaaaaaaaaaaaaaaaaaaaaaaaaaaaaaaaaaagaauu

SEQ ID NO: 26592 - RNA, 1717 nt, Artificial Sequence
  mRNA product Design a-1 (hSL-A64-N5) comprising derived and/or modified sequence from MOPV/LASV reassortant(IGS-1;Clade IV)__AFY05576__GPCmut4 (opt4)
aggagagucccgcagucggcguccagcggcucugcuuguucgugugugugucguugcaggccuuauucaagcuuaccaugggccagaucgugaccuucuuccaggaggugccccacgugaucgaggaggugaugaacaucgugcugaucgcccugagcgugcuggccgugcugaagggccuguacaacuucgccaccugcggccuggugggccuggugaccuuccugcugcugugcggcagaagcugcaccaccagccuguacaagggcguguacgagcugcagacccuggagcugaacauggagacccugaacaugugcaugccccugagcugcaccaagaacaacagccaccacuacaucauggugggcaacgagaccggccuggagcugacccugaccaacaccagcaucaucaaccacaaguucugcaaccugagcgacgcccacaagaagaaccuguacgaccacgcccugaugagcaucaucagcaccuuccaccugagcauccccaacuucaaccaguacgaggccaugagcugcgacuucaacggcggcaagaucagcgugcaguacaaccugagccacagcuacgccggcgacgccgccaaccacugcggcaccguggccaacggcgugcugcagaccuucaugagaauggccuggggcggcagcuacaucgcccuggacagcggcagaggcaacugggacugcaucaugaccagcuaccaguaccugaucauccagaacaccaccugggaggaccacugccaguucagcagacccagccccaucggcuaccugggccugcugagccagagaaccagagacaucuacaucagcagaagaagaagaggcaccuucaccuggacccugagcgacagcgagggcgaggacacccccggcggcuacugccugaccagauggaugcugaucgaggccgagcugaagugcuucggcaacaccgccguggccaagugcaacgagaagcacgacgaggaguucugcgacaugcugagacuguucgacuucugcaagcaggccauccagagacugaaggcccccgcccagaugagcauccagcugaucaacaaggccgugaacgcccugaucaacgaccagcugaucaugaagaaccaccugagagacaucaugggcauccccuacugcaacuacagcaaguacugcuaccugaaccacaccaccaccggcagaaccagccugcccaagugcugccuggugagcaacggcagcuaccugaacgagacccacuucagcgacgacaucgagcagcaggccgacaacaugaucaccgagaugcugcagaaggaguacauggagagacagggcaagaccccccugggccugguggaccuguucguguucagcaccagcuucuaccugaucagcaucuuccugcaccuggugaagauccccacccacagacacaucgugggcaagagcugccccaagccccacagacugaaccacaugggcaucugcagcugcggccuguacaagcagcccggcgugcccgugaaguggaagagaugaggacuagucccuguucccagagcccacuuuuuuuucuuuuuuugaaauaaaauagccugucuuucagaucucaaaggcucuuuucagagccaccaaaaaaaaaaaaaaaaaaaaaaaaaaaaaaaaaaaaaaaaaaaaaaaaaaaaaaaaaaaaaaaaagaauu

SEQ ID NO: 26593 - RNA, 1717 nt, Artificial Sequence
  mRNA product Design a-1 (hSL-A64-N5) comprising derived and/or modified sequence from LASV(LM765-SLE-2012;Clade IV)__AIT17814__GPCmut4 (opt4)
aggagagucccgcagucggcguccagcggcucugcuuguucgugugugugucguugcaggccuuauucaagcuuaccaugggccagaucgugaccuucuuccaggaggugccccacgugaucgaggaggugaugaacaucgugcugaucgcccugagcauccuggccgugcugaagggccuguacaacuucgccaccugcggccuggugggccuggugaccuuccugcugcugugcggcagaagcugcaccaccagccuguacaagggcguguacgagcugcagacccuggagcugaacauggagacccugaacaugugcaugccccugagcugcaccaagaacaacagccaccacuacaucauggugggcaacgagaccggccuggagcugacccugaccaacaccagcaucaucgaccacaaguucugcaaccugagcgacgcccacagaaagaaccuguacgaccacgcccugaugagcaucaucagcaccuuccaccugagcauccccaacuucaaccaguacgaggccaugagcugcgacuucaacggcggcaagaucagcgugcaguacaaccugagccacagcuacgccaaggacgccgccgaccacugcggcaccguggccaacggcgugcugcagaccuucaugagaauggccuggggcggcagcuacaucgcccuggacagcggcagaggcagaugggacugcaucaugaccagcuaccaguaccugaucauccagaacaccaccugggaggaccacugccaguucagcagacccagccccaucggcuaccugggccugcugagccagagaaccagagacaucuacaucagcagaagaagaagaggcaccuucaccuggacccugagcgacagcgagggcaaggacacccccggcggcuacugccugaccagauggaugcugaucgaggccgagcugaagugcuucggcaacaccgccguggccaagugcaacgagaagcacgacgaggaguucugcgacaugcugagacuguucgacuucugcaagcaggccauccagagacugaaggcccccgcccagaugagcauccagcugaucaacaaggccgugaacgcccugaucaacgaccagcugaucaugaagaaccaccugagagacaucaugggcauccccuacugcaacuacagcaaguacugcuaccugaaccacaccaccaccggcaagaccagccugcccaagugcugccuggugagcaacggcagcuaccugaacgagacccacuucagcgacgacaucgagcagcaggccgacaacaugaucaccgagaugcugcagaaggaguacauggagagacagggcaagaccccccugggccugguggaccuguucguguucagcaccagcuucuaccugaucagcaucuuccugcaccuggugaagauccccacccacagacacaucgugggcaagcccugccccaagccccacagacugaaccacaugggcaucugcagcugcggccuguacaagcagcccggcgugcccgugaaguggaagagaugaggacuagucccuguucccagagcccacuuuuuuuucuuuuuuugaaauaaaauagccugucuuucagaucucaaaggcucuuuucagagccaccaaaaaaaaaaaaaaaaaaaaaaaaaaaaaaaaaaaaaaaaaaaaaaaaaaaaaaaaaaaaaaaaagaauu

SEQ ID NO: 26594 - RNA, 1717 nt, Artificial Sequence
  mRNA product Design a-1 (hSL-A64-N5) comprising derived and/or modified sequence from LASV(LM776-SLE-2012;Clade IV)__AIT17824__GPCmut4 (opt4)
aggagagucccgcagucggcguccagcggcucugcuuguucgugugugugucguugcaggccuuauucaagcuuaccaugggccagaucgugaccuucuuccaggaggugccccacgugaucgaggaggugaugaacaucgugcugaucgcccugagcauccuggccgugcugaagggccuguacaacuucgccaccugcggccuggugggccuggugaccuuccugcugcugugcggcagaagcugcaccaccagcguguacaagggcguguacgagcugcagacccuggagcugaacauggagacccugaacaugugcaugccccugagcugcaccaagaacaacagccaccacuacaucauggugggcaacgagaccggccuggagcugacccugaccaacaccagcaucaucaaccacaaguucugcaaccugagcgacgcccacaagaagaaccuguacgaccacgcccugaugagcaucaucagcaccuuccaccugagcauccccaacuucaaccaguacgaggccaugagcugcgacuucaacggcggcaagaucagcgugcaguacaaccugagccacagcuacgccggcgacgccgccaaccacugcggcaccguggccaacggcgugcugcagaccuucaugagaauggccuggggcggcagcuacaucgcccuggacagcggccacggcaagugggacugcaucaugaccagcuaccaguaccugaucauccagaacaccaccugggaggaccacugccaguucagcagacccagccccaucggcuaccugggccugcugagccagagaaccagagacaucuacaucagcagaagaagaagaggcaccuucaccuggacccugagcgacagcgagggcaaggacacccccggcggcuacugccugaccagauggaugcugaucgaggccgagcugaagugcuucggcaacaccgccguggccaagugcaacgagaagcacgacgaggaguucugcgacaugcugagacuguucgacuucugcaagcaggccauccagagacugaaggcccccgcccagaugagcauccagcugaucaacaaggccgugaacgcccugaucaacgaccagcugaucaugaagaaccaccugagagacaucaugggcauccccuacugcaacuacagcaaguacugcuaccugaaccacaccaccaccggcaagaccagccugcccaagugcugccuggugagcaacggcagcuaccugaacgagacccacuucagcgacgacaucgagcagcaggccgacaacaugaucaccgagaugcugcagaaggaguacauggagagacagggcaagaccccccugggccugguggaccuguucguguucagcaccagcuucuaccugaucagcaucuuccugcaccuggugaagauccccacccacagacacaucgugggcaagagcugccccaagccccacagacugaaccacaugggcaucugcagcugcggccuguacaagcagcccggcgugcccgugagauggaagagaugaggacuagucccuguucccagagcccacuuuuuuuucuuuuuuugaaauaaaauagccugucuuucagaucucaaaggcucuuuucagagccaccaaaaaaaaaaaaaaaaaaaaaaaaaaaaaaaaaaaaaaaaaaaaaaaaaaaaaaaaaaaaaaaaagaauu

SEQ ID NO: 26595 - RNA, 1717 nt, Artificial Sequence
  mRNA product Design a-1 (hSL-A64-N5) comprising derived and/or modified sequence from LASV(Mad39;Clade IV)__ANH09722__GPCmut4 (opt4)
aggagagucccgcagucggcguccagcggcucugcuuguucgugugugugucguugcaggccuuauucaagcuuaccaugggccagaucgugaccuucuuccaggaggugccccacgugaucgaggaggugaugaacaucgugcugaucgcccugagcauccuggccgugcugaagggccuguacaacguggccaccugcggccugaucggccuggugaccuuccugcugcugugcggcagaagcugcaccaccacccuguacaagggcguguacgagcugcaggcccuggagcugaacauggagacccugaacaugugcaugccccugagcugcaccaagaacaacagccaccacuacaucagagugggcaacgagaccggccuggagcugacccugaccaacaccagccugaucaaccacaaguucugcaaccugagcgacgcccacaagaagaaccuguacgaccacgcccugaugagcaucaucagcaccuuccaccugagcauccccaacuucaaccaguacgaggccaugagcugcgacuucaacgacggcaagaucagcgugcaguacaaccugagccacaccuacgccggcgacaccgccaaccacugcggcaccguggccaacggcgugcugcagaccuucaugagaauggccuggggcggcagcuacaucgcccuggacagcggcagaggcggcugggacugcaucaugaccagcuaccaguaccugaucauccagaacaccaccugggaggaccacugccaguucagcagacccagccccaucggcuaccugggccugcugagccagagaaccagagacaucuacaucagcagaagaagaagaggcaccuucaccuggacccugagcgacagcgagggcaaggacacccccggcggcuacugccugaccagauggaugcugaucgaggccgagcugaagugcuucggcaacaccgccguggccaagugcaacgagaagcacgacgaggaguucugcgacaugcugagacuguucgacuucugcaagcaggccauccagagacugaaggcccccgcccagaugagcauccagcugaucaacaaggccgugaacgcccugaucaacgaccagcugaucaugaagaaccaccugagagacaucaugggcauccccuacugcaacuacagcaaguacugcuaccugaaccacaccgugaccggcaagaccagccugcccaagugcugccuggugagcaacggcagcuaccugaacgagacccacuucagcgacgacaucgagcagcaggccgacaacaugaucaccgagaugcugcagaaggaguacauggagagacagggcaagaccccccugggccugguggaccuguucguguucagcaccagcuucuaccugaucagcaucuuccugcaccuggugaagauccccacccacagacacguggugggcaagcccugccccaagccccacagacugaaccacaugggcaucugcagcugcggcuucuacaagcagcccggcgugcccgugagauggaagagaugaggacuagucccuguucccagagcccacuuuuuuuucuuuuuuugaaauaaaauagccugucuuucagaucucaaaggcucuuuucagagccaccaaaaaaaaaaaaaaaaaaaaaaaaaaaaaaaaaaaaaaaaaaaaaaaaaaaaaaaaaaaaaaaaagaauu

SEQ ID NO: 26596 - RNA, 1717 nt, Artificial Sequence
  mRNA product Design a-1 (hSL-A64-N5) comprising derived and/or modified sequence from LASV(Z0947-SLE-2011;Clade IV)__AIT17840__GPCmut4 (opt4)
aggagagucccgcagucggcguccagcggcucugcuuguucgugugugugucguugcaggccuuauucaagcuuaccaugggccagaucgugaccuucuuccaggaggugccccacgugaucgaggaggugaugaacaucgugcugaucgcccugagcauccuggccgugcugaagggccuguacaacuucgccaccugcggccuggugggccuggugaccuuccugcugcugugcggcagaagcugcaccaucagccuguacaagggcguguacgagcugcagacccuggagcugaacauggagacccugaacaugugcaugccccugagcugcaccaagaacaacagccaccacuacaucauggugggcaacgagaccggccuggagcugacccugaccaacaccagcaucaucaaccacaaguucugcaaccugagcgacgcccacaagaagaaccuguacgaccacgcccugaugagcaucaucagcaccuuccaccugagcauccccaacuucaaccaguacgaggccaugagcugcgacuucaacggcggcaagaucagcgugcaguacaaccugagccacagcuacgccggcgacgccgccaaccacugcggcaccguggccaacggcgugcugcagaccuucaugagaauggccuggggcggcagcuacaucgcccuggacagcggcagagacagaugggacugcaucaugaccagcuaccaguaccugaucauccagaacaccaccugggaggaccacugccaguucagcagacccagccccaucggcuaccugggccugcugagccagagaaccagagacaucuacaucagcagaagaagaagaggcaccuucaccuggacccugagcgacagcgagggcaaggacacccccggcggcuacugccugaccagauggaugcugaucgaggccgagcugaagugcuucggcaacaccgccguggccaagugcaacgagaagcacgacgaggaguucugcgacaugcugagacuguucgacuucugcaagcaggccauccagagacugaaggcccccgcccagaugagcauccagcugaucaacaaggccgugaacgcccugaucaacgaccagcugaucaugaagaaccaccugagagacaucaugggcauccccuacugcaacuacagcaaguacugcuaccugaaccacaccaccaccggcaagaccagccugcccaagugcugccuggugagcaacggcagcuaccugaacgagacccacuucagcgacgacaucgagcagcaggccgacaacaugaucaccgagaugcugcagaaggaguacauggagagacagggcaagaccccccugggccugguggaccuguucguguucagcaccagcuucuaccugaucagcaucuuccugcaccuggugaagauccccacccacagacacaucgugggcaagcccugccccaagccccacagacugaaccacaugggcaucugcagcugcggccuguacaagcagcccggcgugcccgugaaguggaagagaugaggacuagucccuguucccagagcccacuuuuuuuucuuuuuuugaaauaaaauagccugucuuucagaucucaaaggcucuuuucagagccaccaaaaaaaaaaaaaaaaaaaaaaaaaaaaaaaaaaaaaaaaaaaaaaaaaaaaaaaaaaaaaaaaagaauu

SEQ ID NO: 26597 - RNA, 1717 nt, Artificial Sequence
  mRNA product Design a-1 (hSL-A64-N5) comprising derived and/or modified sequence from LASV(Josiah;Clade IV)__NP_694870__GPCmut4 (opt5)
aggagagucccgcagucggcguccagcggcucugcuuguucgugugugugucguugcaggccuuauucaagcuuaccaugggccagaucgugaccuucuuucaagaggucccccacguuauugaagaggugaugaacaucgugcugauugcccucagcguccuggcugugcuuaaggggcuguacaauuucgccacaugcggacucguuggccuggugacguuucuucugcucugugggagauccugcaccacaucucuguauaaaggagucuacgaacugcagacccucgagcugaacauggaaacacuuaauauguguaugccucugagcugcaccaagaacaauucccaucacuauaucauggugggcaacgagacagggcucgagcugacccuuacgaauaccucuauuaucaaccauaaauucuguaaucugagcgacgcgcacaagaaaaaccucuacgaucaugcucugauguccaucauuucuacauuucaccugagcaucccgaauuucaaccaguaugaagccauguccugcgacuuuaauggaggcaagauuagcguucaguacaaccucucucacuccuaugccggcgaugcugccaaucauugugggaccguggcuaacggaguccugcaaacauucaugcggauggccuggggcgggagcuacaucgcgcuugacucuggacgcggcaacugggauugcauuaugaccuccuaccaguaucugaucauucagaauacgacaugggaggaccacugucaguuuagcagacccucuccuaucggguaccucggacugcuuucccaacggacccgcgauaucuauauuagcagacggcgcagaggcacauucaccuggacccuguccgacucugaaggcaaggauacacccgggggauacugccucacgcgguggaugcugaucgaggccgagcugaaauguuuuggcaacaccgcuguggccaagugcaaugaaaaacaugacgaggaguucugcgauaugcuccgccuguuugacuucuguaagcaggcuauucagagacuuaaagccccugcgcagaugagcauccaacugauuaacaaggccgugaaugcucucaucaacgaucagcugaucaugaagaaucaccuucgggacauuauggggauccccuauugcaacuacuccaaauauuguuaccugaaucacacaaccacaggacgcaccagccucccuaagugcugucuggucucuaacggcuccuaccugaaugaaacgcauuucagcgacgauauugaacagcaagccgacaacaugaucacagagaugcuccagaaagaguauauggaaagacaggggaagaccccgcugggacuuguugaucuguuuguguucucuaccagcuuuuaccucauuuccaucuuccugcaccuggugaaaauccccacacaucggcacauugucggcaagucuugcccuaaaccccaucgccuuaaucacaugggcaucuguagcugcgggcucuauaagcagccuggagugcccguuaaguggaaaagaugaggacuagucccuguucccagagcccacuuuuuuuucuuuuuuugaaauaaaauagccugucuuucagaucucaaaggcucuuuucagagccaccaaaaaaaaaaaaaaaaaaaaaaaaaaaaaaaaaaaaaaaaaaaaaaaaaaaaaaaaaaaaaaaaagaauu

SEQ ID NO: 26598 - RNA, 1714 nt, Artificial Sequence
  mRNA product Design a-1 (hSL-A64-N5) comprising derived and/or modified sequence from LASV(LP;Clade I)__AAF86701__GPCmut4 (opt5)
aggagagucccgcagucggcguccagcggcucugcuuguucgugugugugucguugcaggccuuauucaagcuuaccaugggccagaucauuaccuucuuucaagaggugccccacgucaucgaagagguuaugaacauugugcugaucgcccucagccugcuugcuauucugaaggggcucuacaauaucgccacaugcggaaucauuggccugguggcguuccuuuuucugugugggaaauccugcucucucacgcugaagggaggcuaugaacugcagacccucgagcugaacauggaaacacuuaauauguguaugccucugagcugcaccaaaaacuccucucaucacuacaucagagucgggaaugagacaggacucgagcugacccuuacaaacaccagcauuaucaaucauaaguucuguaaccuguccgacgcucacaaaaagaaucucuaugaucaugcccugaugucuauuaucagcacguuucaccuguccauuccgaacuucaaucaguacgaagccaugagcugcgacuuuaacggcggcaagaucucugugcaguauaaucucucccacagcuacgcuggggaugccgcugagcauuguggaaccguugccaacggcgugcugcaaacauucaugcggauggcguggggagggcgcuauaucgcccuugacucuggcaaagggaauugggauugcauuaugaccuccuaccaguaccugaucauucagaacacaaccugggaagaccacugucaguuuagcagacccucuccuaucggauaucucggccugcuuucccaacggacgcgcgauauuuacaucagcagacggcgcagaggcacauucaccuggacacuguccgacucugaggggaacgagacccccggaggcuauugccucacccgguggaugcugaucgaagcugagcugaaguguuuugggaauacagccgucgcuaaaugcaacgaaaagcaugaugaggaguucugcgacaugcuccgccuguuugauuucuguaaacaggccauuagacggcuuaaggcgccugcccagaugagcauccagcugauuaauaaggcugugaacgcccucaucaaugaccaacugauuaugaaaaaccaccuucgcgauaucaugggaauccccuacugcaauuauuccaaguacuguuaucugaaccacacgagcucuggcagaaccucccucccuaaaugcugucugauuagcaaugggucuuaccugaacgaaacacaguucagcgacgacaucgagcagcaagcugauaauaugauuaccgaaaugcuccagaaggaguacaucgaacggcagggaaaaacaccgcugggccuuguugacauuuuuaucuucuccaccucuuuuuaucugauuagcaucuuccuccaucugaucaagauucccacgcaccgccauaucgugggcaaaccuugccccaagccucacagacugaaccauaugggggucuguuccugcggacuuuacaagcaccccggcgugccgacaaaauggaagcggugaggacuagucccuguucccagagcccacuuuuuuuucuuuuuuugaaauaaaauagccugucuuucagaucucaaaggcucuuuucagagccaccaaaaaaaaaaaaaaaaaaaaaaaaaaaaaaaaaaaaaaaaaaaaaaaaaaaaaaaaaaaaaaaaagaauu

SEQ ID NO: 26599 - RNA, 1714 nt, Artificial Sequence
  mRNA product Design a-1 (hSL-A64-N5) comprising derived and/or modified sequence from LASV(803213;Clade II)__AAF86703__GPCmut4 (opt5)
aggagagucccgcagucggcguccagcggcucugcuuguucgugugugugucguugcaggccuuauucaagcuuaccaugggccagaucauuaccuucuuucaagaggugccccacgucaucgaagagguuaugaacauugugcugaucgcccucagccugcuugcuauucugaaggggaucuacaauguggccacaugcggacucuucggccugaucuccuuucuucugcucugugggagaucuugcagcgucacguauaaaggaguguacgaacugcagacccuggagcucaacauggcgaaucugaacauguguaugccucuuuccugcacaaagaauaacucucaucacuauauuaugguuggcaaugaaaccgggcuggagcucacacugaccaacacaagcaucauuaaucauaaauucuguaaccuuuccgacgcucacaagaaaaaucuguacgaucaugcccucaugucuaucauuagcaccuuucaccuguccaucccgaacuucaaucaguaugaggccaugagcugcgacuuuaacggaggcaagauuucugugcaguacaaucugucccacagcuucgcugucgaugccgcuaaccauuguggcacgaucgccaacggggugcuccaaaccuuuaugcggauggcguggggaggcucuuauaucgcccuggacuccgggaagggaaauugggauugcauuaugacaagcuaccaguaccuuaucauucagaacaccacaugggaagaccacugucaguucucucgccccuccccuaucggcuaucuggggcuccugagccaaagaacccgggauauuuacaucucccgcagacggcgcggaacguuuacauggacccuuucugacagcgagggcaaugaagcucccggcggguauugccugacaagauggaugcucaucgaggccgagcugaaauguuucggaaacaccgcuguugccaagugcaaugaaaaacaugaugaggaauuuugcgacaugcugcgccucuucgauuucuguaagcaggcgauuaaacggcugaagaccccugcccagauguccauccagcuuauuaacaaggcugugaaugcccugaucaacgaccaacucauuaugaaaaaucaccugagagauaucaugggcauccccuacugcaacuauagccgguacuguuaucuuaaucacacagucacggggaagaccucucugccucgcugcugucucguguccaacggaagcuaccugaaugagacacauuuuucugacgacauugaacagcaggcugauaacaugaucaccgagaugcugcaaaaagaguacauggacagacagggcaagacaccgcucgggcugguggaucuuuucgucuuuagcaccuccuucuaucugauuucuaucuuucuccaccugguuaaaauucccacgcaucggcacaucgugggaaagccuugccccaaaccucaucgccugaaucacaugggcauuuguagcugcggccuuuacaagcaccccggggugccggucaaguggaaaagaugaggacuagucccuguucccagagcccacuuuuuuuucuuuuuuugaaauaaaauagccugucuuucagaucucaaaggcucuuuucagagccaccaaaaaaaaaaaaaaaaaaaaaaaaaaaaaaaaaaaaaaaaaaaaaaaaaaaaaaaaaaaaaaaaagaauu

SEQ ID NO: 26600 - RNA, 1714 nt, Artificial Sequence
  mRNA product Design a-1 (hSL-A64-N5) comprising derived and/or modified sequence from LASV(GA391;Clade III)__CAA36645__GPCmut4 (opt5)
aggagagucccgcagucggcguccagcggcucugcuuguucgugugugugucguugcaggccuuauucaagcuuaccaugggccagaucgugaccuucuuucaagaggucccccacguuauugaagaggugaugaacaucgugcugauugcccucagcauccuggcuauucuuaaggggcuguacaaugucgccacaugcggacucaucggccuggugacguuccuucugcucuccgggagaucuuguagccugaucuauaaaggaaccuacgaacugcagacacucgagcugaacauggaaacccuuaauaugugcaugccucuguccuguacaaagaacaauucucaucacuauauucggguuggcaacgagaccgggcucgagcugacacuuaccaauacgagcauccugaaccauaaauuuugcaaucucuccgacgcgcacaagcgcaaccuguacgaucauucucugaugagcauuaucuccaccuuccaccucagcauuccgaauuuuaaccaguaugaagcuaugucuugugacuucaauggaggcaaaaucacagugcaguacaaccugucccacagcuuugccgucgaugccgcuggccauugcgggacccuugccaauggagugcugcaaacauucaugagaauggcuuggggcgggucuuauauugcccucgacuccggacggggcaacugggauuguaucaugaccagcuaccaguaccugaucauucagaacacgacaugggacgaucacugccaguuuucucgccccuccccuaucggguaucuuggacugcucagccaaagaacccgggacauuuacaucucccgcagacggcgcggcacauucaccuggacccugucugauagcgagggcaaugaaacacccgggggauauugucugacgagauggaugcucauugaggcggagcugaagugcuuuggcaacaccgccguugcuaaguguaaugaaaaacaugacgaggaguucugcgauaugcuucggcuguuugacuucugcaagcaggccauccgcagacucaaaaccccugcucagauguccauccagcugauuaacaaggccgugaaugcgcuuaucaacgaucaacugauuaugaaaaaucaccuccgggacaucauggggauucccuacuguaacuauagccgcuacugcuaucugaaucacacaucuacaggaaagaccucccugccuagauguugccucaucagcaacggcucuuaccugaaugaaacgaaguucagcgacgauaucgaacagcaggccgacaacaugauuacagagaugcuucaaaaagaguacaucgaucggcaggggaagaccccgcugggacucgucgaccuguuuguguucuccaccucuuuuuaucugauuagcaucuuccuucaucucgugaaaauucccacacacagacauaucgucggcaagccuugucccaaaccucaccgccugaaucauaugggcauuugcuccugugggcuguacaagcagcccggaguuccggugcgguggaaaagaugaggacuagucccuguucccagagcccacuuuuuuuucuuuuuuugaaauaaaauagccugucuuucagaucucaaaggcucuuuucagagccaccaaaaaaaaaaaaaaaaaaaaaaaaaaaaaaaaaaaaaaaaaaaaaaaaaaaaaaaaaaaaaaaaagaauu

SEQ ID NO: 26601 - RNA, 1717 nt, Artificial Sequence
  mRNA product Design a-1 (hSL-A64-N5) comprising derived and/or modified sequence from LASV(AV;Clade V)__CCA30314__GPCmut4 (opt5)
aggagagucccgcagucggcguccagcggcucugcuuguucgugugugugucguugcaggccuuauucaagcuuaccaugggccagaucgugaccuucuuucaagaggucccccacguuauugaagaggugaugaacaucgugcugauugcccucagcauccuggcuguccuuaaggggcuguacaauauugccacaugcggacucaucggccugaucacguuccuucugcucugugggagauccugcucuagcaaccuguauaaaggaguguacgaacugcagucccucgaccugaauauggagacccuuaacauguguaugccucugucuugcacaaagaauaacagccaucacuauauucggguuggcaaugauaccgggcucgaacugacacuuaccaacacauccauccugaaucauaaauuuuguaaccucucugacgcgcacaagaaagaucuguacgaccaugcucugaugagcauuaucuccaccuuccaccucagcauuccgaauuuuaaccaguaugaggccaugucuugcgauuucaauggaggcaagaucuccgugcaguacaaccugagccacucuuaugccauugacgcugccaaucauuguggcacggucgcuaacgggauccuucaaaccuuuaugcgcauggccuggggaggcuccuacaucgcgcuggauagcgggagaggaaacugggacugcauuaugacaucuuaccaguaucucaucauucagaauaccacaugggagaaccacugucaguucucccggcccagcccuaucggcuaccuggggcuucugucccaacgcaccagagauauuuauaucucucggcgcagacggggaacguuuacauggacccucagcgacuccgaaggcaaugccacacccggcggguacugccugacccgcuggaugcugaucgaggcugaacucaaguguuucggaaacaccgccguggcuaaaugcaaugagaagcaugaugaggaauuuugcgacaugcugagacuuuucgauuuuuguaaacaggccauuagccggcugaagucuccugcgcagauguccauccagcucauuaacaaagccguuaaugcucugaucaacgaccaacuuauuaugaagaaucaucugcgcgacaucaugggcauccccuauugcaacuacagcaaguauuguuaccucaaucacacaauuacggggaaaaccucucugccuaagugcugucuggugagcaacggauccuaccucaaugagacacacuucucugaugacaucgaacagcaggccgauaacaugauuaccgagaugcugcaaaaagaauauauggagagacagggcaagacaccgcuugggcuggucgaccucuucguguuuagcaccuccuucuaccugaucagcauuuuucugcggcuugugaaaauccccacgcaccgccauauugucggaaagccuugccccaaaccucacagacucaaucauaugggcaucuguucuugcggccuguauaagcagcccgggguuccggugcgguggaagagaugaggacuagucccuguucccagagcccacuuuuuuuucuuuuuuugaaauaaaauagccugucuuucagaucucaaaggcucuuuucagagccaccaaaaaaaaaaaaaaaaaaaaaaaaaaaaaaaaaaaaaaaaaaaaaaaaaaaaaaaaaaaaaaaaagaauu

SEQ ID NO: 26602 - RNA, 1714 nt, Artificial Sequence
  mRNA product Design a-1 (hSL-A64-N5) comprising derived and/or modified sequence from LASV(Togo/2016/7082;Clade VI)__AMR44577__GPCmut4 (opt5)
aggagagucccgcagucggcguccagcggcucugcuuguucgugugugugucguugcaggccuuauucaagcuuaccaugggccagaucauuaccuucuuucaagaggugccccacgucaucgaagagguuaugaacauugugcugaucgcccucagccugcuugcuauucugaaggggguguacaaugucgccacaugcggaaucaucggccucgugacguuccuguuucuuugugggagauccugcucucugauuuauaaaggaagcuacgaacuccagacccuggagcugaacauggaaacacucaauauguguaugccucuguccugcaccaagaacucuagccaucacuauauccggguuggcaaugagacagggcuugagcugacccucacaaacaccuccauuaucaaucauaaauucuguaaccugucugacgcgcacaagcgcaaucuuuacgaucaugcucugaugagcauucucuccacguuucaccugagcaucccgaacuucaaucaguaugaagccaugucuugcgacuuuaacggaggcaaaauuuccgugcaguacaaucugagccacgccuaugcugucgaugccgcugagcauuguggcaccguggccaacgggguucuccaaacauucaugagaauggcguggggaggcucuuacaucgcccuggacuccgggcggggaaauugggauugcaucaugaccagcuaccaguaucuuauuauccagaacacaaccugggaagaccacugucaguuuucucgccccuccccuauuggcuaccuggggcuccugagccaaagaacgcgggauaucuauauuucccgcagacggcgcggaacauucaccuggacacuuucugacagcgagggcaacgagacccccggcggguacugccugaccagauggaugcucaucgaagcugagcugaaguguuuuggaaauacagccguggcuaagugcaacgaaaaacaugaugaggaguucugcgacaugcugcggcucuuugauuucuguaagcaggccauccagcgccugaaauccccugcgcagaugagcauucaacuuaucaauaaggccgucaacgcucugauuaaugaccagcucaucaugaaaaaccaccugagagauaugaugggcauucccuauugcaauuacucuaaguauuguuaccuuaaccacacguccagcgggcggaccucucugccuaagugcugucucgugagcaauggauccuaccugaacgaaacacauuucucugacgacaucgagcagcaagccgauaauaugaucaccgaaaugcugcagaaagaguauauugaccgccagggcaagacaccgcucgggcugguggaucuuuuugucuucagcaccuccuuuuaccugaucagcauuuuccuccaccugaucaaaauucccacgcauagacacaucguuggaaagccuugccccaaaccucaucggcugaaccacaugggcauuuguucuugcggccuuuauaagcagcccggggugccgacaagauggaaacgcugaggacuagucccuguucccagagcccacuuuuuuuucuuuuuuugaaauaaaauagccugucuuucagaucucaaaggcucuuuucagagccaccaaaaaaaaaaaaaaaaaaaaaaaaaaaaaaaaaaaaaaaaaaaaaaaaaaaaaaaaaaaaaaaaagaauu

SEQ ID NO: 26603 - RNA, 1714 nt, Artificial Sequence
  mRNA product Design a-1 (hSL-A64-N5) comprising derived and/or modified sequence from LASV(KAK-428;Clade n.d. (VII))__ANH09740__GPCmut4 (opt5)
aggagagucccgcagucggcguccagcggcucugcuuguucgugugugugucguugcaggccuuauucaagcuuaccaugggccagaucgugaccuucuuucaagaggucccccacguuauugaagaggugaugaacaucgugcugauugcccucagccugcuugcuauccugaaggggcucuacaauuucgccacaugcggagucauuggccugaucacguuucuucugcucugugggagauccugcucugcgaccuauaaaggacaguacgaacugcagacacuggagcucaacauggaaagccugaauauguguaugccucuuuccugcaccaagaacaauucucaucacuauauccgggcuggcaacaauacagggcuggagcucacccugacaaacaccagcauuaucucccauaaauucuguaaucuuucugacgcccacaagaaaaaccuguacgaucauacgcucaugagcauuaucaccacauuucaccuguccauuccgaauuucaaccaguaugaggccaugagcugcgacuuuaauggaggcaagaucucuauucaauacaaccugucccacagcuaugcuggcgaugccgcucagcauugugggaccguggccaauggaguucuccagacauucaugcgcauggcguggggcgggucuuaccuggcccuugacuccggaagacggggcugggauugcaucaucagcucuuaccaguaucugauuauccaaaacaccacgugggacgaucacugucaguuuucccgccccagcccuauuggguaccucggauucgugucccagaagacaagagacaucuauauuucucggcgcagacggggcaccuuuacauggacccugagcgauuccgaaggccaugacaugcccgggggauacugccuuacccgcuggaugcugaucgaggcugaucucaaauguuucggcaacacagccgucgcuaagugcaaugaaaaacacgacgaggaguuuugcgauauguggagacuguucgacuucuguaagcaggccauccaacggcugaaagcgccugcccagaugaacauucagcucaucaauaaggcugugaacgcccugauuaaugaccaacuuaugaugaagaaccaucugcgcgauaucauggggauucccuauugcaauuacagcaaauuuuguuaucucaacaauacgaccacaggaagaaccucucugccucggugcugucuuaucuccaacggcagcuaccugaaugaaacacacuucucugacgauaucgagcagcaggcugacaacaugauuaccgaaaugcuccagaaggaguacauggaucgccaagggaaaacgccgcugggacugguugaccucuuuguguucagcacauccuuuuaucugaucaccauuuuccuucaccuggucaagauccccacccauagacacauugugggcaaaccuugccccaagccucaucggcucaaucacaugggcaucuguucuugcgggcuguacaaacagcccggagugccggucagauggaagcgcugaggacuagucccuguucccagagcccacuuuuuuuucuuuuuuugaaauaaaauagccugucuuucagaucucaaaggcucuuuucagagccaccaaaaaaaaaaaaaaaaaaaaaaaaaaaaaaaaaaaaaaaaaaaaaaaaaaaaaaaaaaaaaaaaagaauu

SEQ ID NO: 26604 - RNA, 1714 nt, Artificial Sequence; identical to SEQ ID NO: 26598
  mRNA product Design a-1 (hSL-A64-N5) comprising derived and/or modified sequence from LASV(Pinneo-NIG-1969;Clade I)__AIT17836__GPCmut4 (opt5)

SEQ ID NO: 26605 - RNA, 1714 nt, Artificial Sequence
  mRNA product Design a-1 (hSL-A64-N5) comprising derived and/or modified sequence from LASV(ISTH0009-NIG-2011;Clade II)__AIT17404__GPCmut4 (opt5)
aggagagucccgcagucggcguccagcggcucugcuuguucgugugugugucguugcaggccuuauucaagcuuaccaugggccagaucauuaccuucuuucaagaggugccccacgucaucgaagagguuaugaacauugugcugaucgcccucagccugcuugcuauucugaaggggaucuacaauguggccacaugcggacucuucggccuggucuccuuucuucugcucugugggagaucuugcagcacgaccuauaaaggaguguacgaacugcagacacuggagcucgacauggcgucccugaacauguguaugccucuuucuugcaccaagaauaacagccaucacuauaucaugguuggcaaugaaacagggcuggagcucacccugacaaacaccuccauuaucaaucauaaauucuguaaccuuucugaugcucacaagaaaaaucuguacgaccaugcccucaugagcauuaucuccacguuucaccugagcauuccgaacuucaaucaguaugaggccaugucuugcgauuuuaacggaggcaagaucuccgugcaguacaaucugagccacgcuuaugccgucgacgcugccaaccauuguggcaccauugcgaauggggugcuccaaacauucaugcggauggccuggggaggcucuuacaucgcucuggauuccgggaagggaagcugggacugcaucaugaccucuuaccaguaucuuauuauccagaacacaaccugggaagaucacugucaguuuucccgccccagcccuauuggcuaccuggggcuccugucccaaagaacgcgggacaucuauauuucucgcagacggcgcggaacauucaccuggacacuuagcgauuccgagggcaacgaaacccccggcggguacugccugaccagauggaugcucaucgaggccgagcugaaauguuuuggaaauacagcuguugccaagugcaacgaaaaacaugacgaggaguucugcgauaugcugcggcucuuugacuucuguaagcaggcgauccgcagacugaaaacgccugcccagaugagcauucagcuuaucaauaaggcugugaacgcccugauuaaugaucaacucaucaugaagaaccaucugcgggacauuaugggcauccccuauugcaauuacucuaaauauuguuaccuuaaccacaccgucacagggaagaccucccugccucgcugcugucucgugagcaauggaucuuaccugaacgaaacacacuucagcgacgauaucgaacagcaggcugacaauaugauuaccgagcugcuccaaaaagaguauauggauagacagggcaagacgccgcuggggcuuguggaccuguuugucuucuccacaucuuuuuaccucaucagcauuuuccugcaccugaucaaaauucccacccaucggcacaucaccggaaagccuugccccaaaccucaucgccuuaaccacaugggcauuuguuccugcggccucuauaagcaccccgggguuccggugaaguggaaaagaugaggacuagucccuguucccagagcccacuuuuuuuucuuuuuuugaaauaaaauagccugucuuucagaucucaaaggcucuuuucagagccaccaaaaaaaaaaaaaaaaaaaaaaaaaaaaaaaaaaaaaaaaaaaaaaaaaaaaaaaaaaaaaaaaagaauu

SEQ ID NO: 26606 - RNA, 1714 nt, Artificial Sequence
  mRNA product Design a-1 (hSL-A64-N5) comprising derived and/or modified sequence from LASV(ISTH2010-NIG-2012;Clade II)__AIT17482__GPCmut4 (opt5)
aggagagucccgcagucggcguccagcggcucugcuuguucgugugugugucguugcaggccuuauucaagcuuaccaugggccagaucauuaccuucuuucaagaggugccccacgucaucgaagagguuaugaacauugugcugaucgcccucagccugcuugcuauucugaaggggaucuacaauguggccacaugcggacucuucggccuggucuccuuucuucugcucugugggagaucuugcagcacgaccuauaaaggaguguacgaacugcagacacuggagcucgacauggcgucccugaacauguguaugccucuuucuugcaccaagaauaacagccaucacuauaucaugguuggcaaugaaacagggcuggagcucacccugacaaacaccuccauuaucaaucauaaauucuguaaccuuucugaugcucacaagaaaaaucuguacgaccaugcccucaugagcauuaucuccacguuucaccugagcauuccgaacuucaaucaguaugaggccaugucuugcgauuuuaacggaggcaagaucuccgugcaguacaaucugagccacgcuuaugccgucgacgcugccaaccauuguggcaccauugcgaauggggugcuccaaacauucaugcggauggccuggggaggcucuuacaucgcucuggauuccgggaagggaagcugggacugcaucaugaccucuuaccaguaucuuauuauccagaacauuacaugggaagaucacugucaguuuucccgccccagcccuaucggcuaccuggggcuccugucccaaagaacccgggacauuuauaucucucgcagacggcgcggaacguucacauggacccuuagcgauuccgagggcaacgaaacacccggcggguacugccugaccagauggaugcucaucgaggccgagcugaaauguuuuggaaauaccgcuguugccaagugcaacgaaaaacaugacgaggaguucugcgauaugcugcggcucuuugacuucuguaagcaggcgauucgcagacugaaaacgccugcccagaugagcauccagcuuauuaauaaggcugugaacgcccugaucaaugaucaacucauuaugaagaaccaucugcgggacaucaugggcauccccuauugcaauuacucuaaauauuguuaccuuaaccacacagucaccgggaagacaucccugccucgcugcugucucgugagcaauggaucuuaccugaacgaaacccacuucagcgacgauauugaacagcaggcugacaauaugaucacagagcugcuccaaaaagaguauauugauagacagggcaagaccccgcuggggcuuguggaccuguuugucuucuccacgucuuuuuaccucaucagcauuuuccugcaccugguuaaaauccccacacaucggcacguggugggaaagccuugccccaaaccucaucgccuuaaccacaugggcauuuguuccugcggccucuauaagcaccccggggucccggugaaguggaaaagaugaggacuagucccuguucccagagcccacuuuuuuuucuuuuuuugaaauaaaauagccugucuuucagaucucaaaggcucuuuucagagccaccaaaaaaaaaaaaaaaaaaaaaaaaaaaaaaaaaaaaaaaaaaaaaaaaaaaaaaaaaaaaaaaaagaauu

SEQ ID NO: 26607 - RNA, 1714 nt, Artificial Sequence
  mRNA product Design a-1 (hSL-A64-N5) comprising derived and/or modified sequence from LASV(Lassa virus/H.sapiens-wt/NGA/2015/ISTH_0543;Clade II)__AVO03639__GPCmut4 (opt5)
aggagagucccgcagucggcguccagcggcucugcuuguucgugugugugucguugcaggccuuauucaagcuuaccaugggccagaucauuaccuucuuucaagaggugccccacgucaucgaagagguuaugaacauugugcugaucgcccucagccugcuugcuauucugaaggggaucuacaauguggccacaugcggacucuucggccuggucuccuuucuucugcucugugggagaucuugcagcacgaccuauaaaggaguguacgaacugcagacacuggagcucgacauggcgaaccugaauauguguaugccucuuuccugcaccaagaacaauucucaucacuauaucaugguuggcaacgaaacagggcuggagcucacccugacaaauaccagcauuaucaaccauaaauucuguaaucuuuccgaugcucacaagaaaaaccuguacgaccaugcccucaugucuauuaucagcacguuucaccuguccauuccgaauuucaaccaguaugaggccaugagcugcgauuuuaauggaggcaagaucucugugcaguacaaccugucccacaccuaugcugucgacgccgcuaaucauuguggcacaauugccaacggggugcuccaaaccuucaugcggauggcguggggaggcagcuacaucgcccuggauucugggaagggauccugggacugcaucaugacaagcuaccaguaucuuguuauucagaacaccacgugggaagaucacugucaguuuucucgccccuccccuaucggcuaccuggggcuccugagccaaagaacacgggacauuuauaucucccgcagacggcgcggaaccuucacauggacccuuucugauagcgagggcaaugaaacccccggcggguacugccugacaagauggaugcucauugaggcugagcugaaauguuuuggaaacacggccguggcuaagugcaaugaaaaacaugacgaggaguucugcgauaugcugcggcucuuugacuucuguaagcaggccauccgcagacugaaaaccccugcgcagauguccauccagcuuauuaacaaggccgucaaugcucugaucaacgaucaacucauuaugaagaaucaucugcgggacaucaugggcauucccuauugcaacuacagcaaauauuguuaccuuaaucacacagugaccgggaagacaucucugccucgcugcugucucguguccaacggaagcuaccugaaugaaacccacuucucugacgauaucgaacagcaggccgacaacaugaucacggagcugcuccaaaaagaguauauugauagacagggcaagacaccgcuggggcuugucgaccuguuuguuuucagcaccuccuuuuaccucaucucuauuuuccugcaccuggugaaaauccccacccaucggcacauuacaggaaagccuugccccaaaccucaucgccuuaaucacaugggcaucuguagcugcggccucuauaagcaccccggggugccggucaaguggaaaagaugaggacuagucccuguucccagagcccacuuuuuuuucuuuuuuugaaauaaaauagccugucuuucagaucucaaaggcucuuuucagagccaccaaaaaaaaaaaaaaaaaaaaaaaaaaaaaaaaaaaaaaaaaaaaaaaaaaaaaaaaaaaaaaaaagaauu

SEQ ID NO: 26608 - RNA, 1714 nt, Artificial Sequence
  mRNA product Design a-1 (hSL-A64-N5) comprising derived and/or modified sequence from LASV(Lassa virus/H.sapiens-wt/NGA/2016/ISTH_0009;Clade II)__AVO03571__GPCmut4 (opt5)
aggagagucccgcagucggcguccagcggcucugcuuguucgugugugugucguugcaggccuuauucaagcuuaccaugggccagaucauuaccuucuuucaagaggugccccacgucaucgaagagguuaugaacauugugcugaucgcccucagccugcuugcuauucugaaggggaucuacaauguggccacaugcggacuccugggccuugucuccuuccugcuccugugugggagaucuugcagcacgaccuauaaaggaguguacgaacugcagacacucgagcuggacauggcgucccuuaacauguguaugccucugucuugcaccaagaauaacagccaucacuauaucaugguuggcaaugaaacagggcucgagcugacccuuacaaacaccuccauuaucaaucauaaauuuuguaaccugucugaugcucacaagaaaaaucucuacgaccaugcccugaugagcauuaucuccacguuccaccugagcauuccgaacuuuaaucaguaugaggccaugucuugcgauuucaacggaggccggaucuccgugcaguacaaucucagccacucuuaugcugucgacgccgcuaaccauuguggcaccauugccaauggggugcugcaaacauuuaugcgcauggcguggggaggcuccuacaucgcccuugauagcgggaagggaucuugggacugcaucaugaccuccuaccaguaucugauuauccagaacacaaccugggaagaucacugucaguucagcagacccuccccuauuggcuaccucgggcugcuuucucaacggacgcgcgacaucuauauuagcagacggcgcagaggaacauuuaccuggacacuguccgauagcgagggcaacgaaacccccggcggguacugccucacccgguggaugcugaucgaggcugagcugaaguguuucggaaauacagccguugcuaaaugcaacgaaaagcaugacgaggaauuuugcgauaugcuccgccuguucgacuuuuguaaacaggccaucagacggcuuaagacgccugcgcagaugucuauucagcugaucaauaaagccgugaacgcucucauuaaugaucaacugaucaugaagaaccaccuucgcgacauuaugggcauccccuauugcaauuacuccaaguauuguuaccugaaccacaccgucacagggaaaaccagccucccuagaugcugucuggugucuaauggaagcuaccugaacgagacacauuucuccgacgauaucgaacagcaggccgacaauaugauuaccgagcuccugcaaaaggaguauaucgaucggcagggcaaaacgccgcuugggcugguggaccucuucgucuuuucuaccagcuucuaccugauuuccaucuuucugcaccuuguuaagauucccacacaucgccacaucaccggaaaaccuugccccaagccucauagacucaaccacaugggcauuuguagcugcggccuguauaaucaccccggggugccggugaaauggaagcggugaggacuagucccuguucccagagcccacuuuuuuuucuuuuuuugaaauaaaauagccugucuuucagaucucaaaggcucuuuucagagccaccaaaaaaaaaaaaaaaaaaaaaaaaaaaaaaaaaaaaaaaaaaaaaaaaaaaaaaaaaaaaaaaaagaauu

SEQ ID NO: 26609 - RNA, 1714 nt, Artificial Sequence
  mRNA product Design a-1 (hSL-A64-N5) comprising derived and/or modified sequence from LASV(Lassa virus/H.sapiens-wt/NGA/2016/ISTH_0017;Clade II)__AVO03567__GPCmut4 (opt5)
aggagagucccgcagucggcguccagcggcucugcuuguucgugugugugucguugcaggccuuauucaagcuuaccaugggccagaucauuaccuucuuucaagaggugccccacgucaucgaagagguuaugaacauugugcugaucgcccucagccugcuugcuauucugaaggggaucuacaauguggccacaugcggacucuucggccuggucuccuuucuucugcucugugggagaucuugcagcacgaccuauaaaggaguguacgaacugcagacacuggagcucgacauggcgucccugaacauguguaugccucuuucuugcaccaagaauaacagccaucacuauaucaugguuggcaaugaaacagggcuggagcucacccugacaaacaccuccauuaucaaucauaaauucuguaaccuuucugaugcucacaagaaaaaucuguacgaccaugcccucaugagcauuaucuccacguuucaccugagcauuccgaacuucaaucaguaugaggccaugucuugcgauuuuaacggaggcaagaucuccgugcaguacaaucugagccacaccuaugcuauugacgccgcuaaccauuguggcacaaucgccaaugggguccuccaaaccuucaugcggauggcguggggaggcucuuacaucgcccuggauuccgggaagggaagcugggacugcauuaugacaucuuaccaguaucuuaucauucagaacaccacgugggaagaucacugucaguuuucccgccccagcccuaucggcuaccuggggcuccugucccaaagaacacgggacauuuauaucucucgcagacggcgcggaaccuucacauggacccuuagcgauuccgagggcaacgaaacccccggcggguacugccugacaagauggaugcucaucgaggcugagcugaaauguuuuggaaauacggccguggcuaagugcaacgaaaaacaugacgaggaguucugcgauaugcugcggcucuuugacuucuguaagcaggccauucgcagacugaaaaccccugcgcagaugagcauccagcuuauuaauaaggccguuaacgcucugaucaaugaucaacucauuaugaagaaccaucugcgggacaucaugggcauccccuauugcaauuacucuaaauauuguuaccuuaaccacacagugaccgggaagacaucccugccucgcugcugucucgucagcaauggaucuuaccugaacgaaacccacuucagcgacgauauugaacagcaggccgacaauaugaucacggagcugcuccaaaaagaguauauggauagacagggcaagacaccgcuggggcuuguggaccuguuuguguucuccaccucuuuuuaccucauuagcaucuuccugcaccugguccggauucccacccaucgccacguuaucggaaaaccuugccccaagccucauagacuuaaccacaugggcauuuguuccugcggccucuauaaacaccccggggugccggugaaguggaagcggugaggacuagucccuguucccagagcccacuuuuuuuucuuuuuuugaaauaaaauagccugucuuucagaucucaaaggcucuuuucagagccaccaaaaaaaaaaaaaaaaaaaaaaaaaaaaaaaaaaaaaaaaaaaaaaaaaaaaaaaaaaaaaaaaagaauu

SEQ ID NO: 26610 - RNA, 1714 nt, Artificial Sequence
  mRNA product Design a-1 (hSL-A64-N5) comprising derived and/or modified sequence from LASV(Lassa virus/H.sapiens-wt/NGA/2018/ISTH_0959;Clade II)__AVV65099__GPCmut4 (opt5)
aggagagucccgcagucggcguccagcggcucugcuuguucgugugugugucguugcaggccuuauucaagcuuaccaugggccagaucauuaccuucuuucaagaggugccccacgucaucgaagagguuaugaacauugugcugaucgcccucagccugcuugcuauucugaaggggaucuacaauguggucacaugcggacucuucggccugguguccuuucuucugcucugugggagaucuugcagcacgaccuauaaaggaguuuacgaacugcagacacuggagcucgacauggccucccugaacauguguaugccucuuucuugcaccaagaauaacagccaucacuauaucauggugggcaaugaaacagggcuggagcucacccugacaaacaccuccauuaucaaucauaaauucuguaaccuuucugaugcgcacaagaaaaaucuguacgaccaugcucucaugagcauuaucuccacguuucaccugagcauuccgaacuucaaucaguaugaggccaugucuugcgauuuuaacggaggcaagaucuccguccaguacaaucugagccacgccuaugcuauugacgccgcuaaccauuguggcaccaucgccaauggggugcuccaaacauucaugcggauggcguggggaggcucuuacaucgcccuggauuccgggaagggaagcugggacugcauuaugaccucuuaccaguaucuuaucauucagaacacaaccugggaagaucacugucaguuuucccgccccagcccuaucggcuaccuggggcuccugucccaaagaacgcgggacauuuauaucucucgcagacggcgcggaacauucaccuggacacuuagcgauuccgagggcaacgaaacccccggcggguacugccugaccagauggaugcucaucgaggcugagcugaaauguuuuggaaauacagccguugcuaagugcaacgaaaaacaugacgaggaguucugcgauaugcugcggcucuuugacuucuguaagcaggccauucgcagacugaaaacgccugcgcagaugagcauccagcuuauuaauaaggccgugaacgcucugaucaaugaucaacucauuaugaagaaccaucugcgggacaucaugggcauccccuauugcaauuacucuaaauauuguuaccuuaaccacaccgucacagggaagaccucccugccucgcugcugucucgugagcaauggaucuuaccugaacgaaacacacuucagcgacgauauugaacagcaggccgacaauaugaucaccgagcugcuccaaaaagaguauauugauagacagggcaagacgccgcuggggcuuguggaccuguuugucuucuccacaucuuuuuaccucaucagcauuuuccugcaccugguuaaaauccccacccaucggcacgugauuggaaagccuugccccaaaccucaucgccuuaaccacaugggcaucuguuccugcggccucuauaagcaccccggggugccggucaaguggaaaagaugaggacuagucccuguucccagagcccacuuuuuuuucuuuuuuugaaauaaaauagccugucuuucagaucucaaaggcucuuuucagagccaccaaaaaaaaaaaaaaaaaaaaaaaaaaaaaaaaaaaaaaaaaaaaaaaaaaaaaaaaaaaaaaaaagaauu

SEQ ID NO: 26611 - RNA, 1714 nt, Artificial Sequence
  mRNA product Design a-1 (hSL-A64-N5) comprising derived and/or modified sequence from LASV(LASV003-NIG-2008;Clade II)__AIT17580__GPCmut4 (opt5)
aggagagucccgcagucggcguccagcggcucugcuuguucgugugugugucguugcaggccuuauucaagcuuaccaugggccagaucauuaccuucuuucaagaggugccccacgucaucgaagagguuaugaacauugugcugaucgcccucagccugcuugcuauucugaaggggaucuacaauguggccacaugcggacucuucggccuggucuccuuucuucugcucugugggagaucuugcagcacgaccuauaaaggaguguacgaacugcagacacuggagcucgacauggcgucccugaacauguguaugccucuuucuugcaccaagaauaacagccaucacuauaucaugguuggcaaugaaacagggcuggagcucacccugacaaacaccuccauuaucaaucauaaauucuguaaccuuucugaugcucacaagaaaaaucuguacgaccaugcccucaugagcauuaucuccacguuucaccugagcauuccgaacuucaaucaguaugaggccaugucuugcgauuuuaacggaggcaagaucuccgugcaguacaaucugagccacaccuaugcugucgacgccgcuaaccauuguggcacaauugccaauggggugcuccaaaccuucaugcggauggcguggggaggcucuuacaucgcccuggauuccgggaagggaagcugggacugcaucaugacaucuuaccaguaucuuauuauccagaacaccacgugggaagaucacugucaguuuucccgccccagcccuauuggcuaccuggggcuccugucccaaagaacacgggacaucuauauuucucgcagacggcgcggaaccuucacauggacccuuagcgauuccgagagcaacgaaacccccggcggcuacugccugacaagauggaugcucaucgaggcugagcugaaauguuuugggaauacggccguugcuaagugcaacgaaaaacaugacgaggaguucugcgauaugcugcggcucuuugacuucuguaagcaggccauccgcagacugaaagcgccugcccagaugucuauucagcuuaucaauaaggcugugaacgcccugauuaaugaucaacucaucaugaagaaccaucugcgggacauuaugggaauccccuauugcaauuacuccaaauauuguuaccuuaaccacaccgucacaggccgcaccagccugccuagaugcugucucgugucuaaugggagcuaccugaacgaaacacacuucuccgacgauaucgaacagcaggcugacaauaugauuaccgagcugcuccaaaaggaguauauggaucggcagggaaaaacgccgcugggccuuguggaccuguuugucuucucuaccagcuuuuaccucaucuccauuuuccugcaccugguuaagauccccacacaucgccacgugauugggaaaccuugccccaagccucauagacuuaaccacaugggaaucuguagcugcggccucuauaaacaccccggcgugccggucaaguggaagcggugaggacuagucccuguucccagagcccacuuuuuuuucuuuuuuugaaauaaaauagccugucuuucagaucucaaaggcucuuuucagagccaccaaaaaaaaaaaaaaaaaaaaaaaaaaaaaaaaaaaaaaaaaaaaaaaaaaaaaaaaaaaaaaaaagaauu

SEQ ID NO: 26612 - RNA, 1714 nt, Artificial Sequence
  mRNA product Design a-1 (hSL-A64-N5) comprising derived and/or modified sequence from LASV(LASV035-NIG-2009;Clade II)__AIT17588__GPCmut4 (opt5)
aggagagucccgcagucggcguccagcggcucugcuuguucgugugugugucguugcaggccuuauucaagcuuaccaugggccagaucauuaccuucuuucaagaggugccccacgucaucgaagagguuaugaacauugugcugaucgcccucagccugcuugcuauucugaaggggaucuacaauguggccacaugcggacucuucggccuggucuccuuucuucugcucugugggagaucuugcagcacgaccuauaaaggaguguacgaacugcagacacuggagcucgacauggcgucccugaacauguguaugccucuuucuugcaccaagaauaacagccaucacuauaucaugguuggcaaugaaacagggcuggagcucacccugacaaacaccuccauuaucaaucauaaauucuguaaccuuucugaugcucacaagaaaaaucuguacgaccaugcccucaugagcauuaucuccacguuucaccugagcauuccgaacuucaaucaguaugaggccaugucuugcgauuuuaacggaggcaagaucuccgugcaguacaaucugagccacgcuuaugccgucgacgcugccaaccauuguggcaccauugcgaauggggugcuccaaacauucaugcggauggccuggggaggcucuuacaucgcucuggauuccgggaagggaagcugggacugcaucaugaccucuuaccaguaucuuauuauccagaacacaaccugggaagaucacugucaguuuucccgccccagcccuauuggcuaccuggggcuccugucccaaagaacgcgggacaucuauauuucucgcagacggcgcggaacauucaccuggacacuuagcgauuccgagggcaacgaaacccccggcggguacugccugaccagauggaugcucaucgaggccgagcugaaauguuuuggaaauacagcuguugccaagugcaacgaaaaacaugacgaggaguucugcgauaugcugcggcucuuugacuucuguaagcaggcgauccgcagacugaaagccccugcucagaugagcauucagcuuaucaauaaggccgugaacgcucugauuaaugaucaacucaucaugaagaaccaucugcgggacauuaugggcauccccuauugcaauuacucuaaauauuguuaccuuaaccacacggucaccgggaagacaucccugccucgcugcugucucgugagcaauggaucuuaccugaacgaaacccacuucagcgacgauaucgaacagcaggccgacaauaugauuacagagcugcuccaaaaagaguauaucgauagacagggcaagaccccgcuggggcuuguggaccuguuugucuucuccacgucuuuuuaccucauuagcaucuuccugcaccugguuaaaauucccacacaucggcacgugaucggaaagccuugccccaaaccucaucgccuuaaccacaugggcauuuguuccugcggccucuauaagcaccccggggugccggucaaguggaaaagaugaggacuagucccuguucccagagcccacuuuuuuuucuuuuuuugaaauaaaauagccugucuuucagaucucaaaggcucuuuucagagccaccaaaaaaaaaaaaaaaaaaaaaaaaaaaaaaaaaaaaaaaaaaaaaaaaaaaaaaaaaaaaaaaaagaauu

SEQ ID NO: 26613 - RNA, 1714 nt, Artificial Sequence
  mRNA product Design a-1 (hSL-A64-N5) comprising derived and/or modified sequence from LASV(LASV1000-NIG-2009;Clade II)__AIT17782__GPCmut4 (opt5)
aggagagucccgcagucggcguccagcggcucugcuuguucgugugugugucguugcaggccuuauucaagcuuaccaugggccagaucauuaccuucuuucaagaggugccccacgucaucgaagagguuaugaacauugugcugaucgcccucagccugcuugcuauucugaaggggaucuacaauguggccacaugcggacucuucggccuggucuccuuucuucugcucugugggagaucuugcagcacgaccuauaaaggaguguacgaacugcagacacuggagcucgacauggcgucccugaacauguguaugccucuuucuugcaccaagaauaacagccaucacuauaucaugguuggcaaugaaacagggcuggagcucacccugacaaacaccuccauuaucaaucauaaauucuguaaccuuucugaugcucacaagaaaaaucuguacgaccaugcccucaugagcauuaucuccacguuucaccugagcauuccgaacuucaaucaguaugaggccaugucuugcgauuuuaacggaggcaagaucuccgugcaguacaaucugagccacaccuaugcugucgacgccgcuaaccauuguggcacaauugccaauggggugcuccaaaccuucaugcggauggcguggggaggcucuuacaucgcccuggauuccgggaagggaagcugggacugcaucaugacaucuuaccaguaucuuauuauccagaacaccacgugggaagaucacugucaguuuucccgccccagcccuauuggcuaccuggggcuccugucccaaagaacacgggacaucuauauuucucgcagacggcgcggaaccuucacauggacccuuagcgauuccgagggcaacgaaacccccggcggguacugccugacaagauggaugcucaucgaggcugagcugaaauguuuuggaaauacggccguugcuaagugcaacgaaaaacaugacgaggaguucugcgauaugcugcggcucuuugacuucuguaagcaggccaucaaacgccugaagaccccugcgcagaugagcauucagcuuaucaauaaggccgugaacgcucugauuaaugaucaacucaucaugaaaaaccaccugagagacauuaugggcauccccuauugcaauuacucuaaguauuguuaccuuaaccacacagucaccgggaaaacaucccugccucggugcugucucgugagcaauggaucuuaccugaacgaaacccauuucagcgacgauaucgaacagcaggccgacaauaugauuacggagcugcuccaaaaggaguauaucgaucgccagggcaaaacaccgcuggggcuuguggaccuguuugucuucuccaccucuuuuuaccucauuagcaucuuccugcaccugguuaagauucccacccauagacacguggugggaaaaccuugccccaagccucaucggcuuaaccacaugggcaucuguuccugcggccucuauaagcaccccggggucccggugaaauggaagcgcugaggacuagucccuguucccagagcccacuuuuuuuucuuuuuuugaaauaaaauagccugucuuucagaucucaaaggcucuuuucagagccaccaaaaaaaaaaaaaaaaaaaaaaaaaaaaaaaaaaaaaaaaaaaaaaaaaaaaaaaaaaaaaaaaagaauu

SEQ ID NO: 26614 - RNA, 1714 nt, Artificial Sequence
  mRNA product Design a-1 (hSL-A64-N5) comprising derived and/or modified sequence from LASV(LASV221-NIG-2010;Clade II)__AIT17624__GPCmut4 (opt5)
aggagagucccgcagucggcguccagcggcucugcuuguucgugugugugucguugcaggccuuauucaagcuuaccaugggccagaucauuaccuucuuucaagaggugccccacgucaucgaagagguuaugaacauugugcugaucgcccucagccugcuugcuauucugaaggggaucuacaauguggccacaugcggacucuucggccuggucuccuuucuucugcucugugggagaucuugcagcacgaccuauaaaggaguguacgaacugcagacacuggagcucgacauggcgucccugaacauguguaugccucuuucuugcaccaagaauaacagccaucacuauaucaugguuggcaaugaaacagggcuggagcucacccugacaaacaccuccauuaucaaucauaaauucuguaaccuuucugaugcucacaagaaaaaucuguacgaccaugcccucaugagcauuaucuccacguuucaccugagcauuccgaacuucaaucaguaugaggccaugucuugcgauuuuaacggaggcaagaucuccgugcaguacaaucugagccacaccuaugcuauugacgccgcuaaccauuguggcacaaucgccaaugggguccuccaaaccuucaugcggauggcguggggaggcucuuacaucgcccuggauuccgggaagggaagcugggacugcauuaugacaucuuaccaguaucuuaucauucagaacaccacgugggaagaucacugucaguuuucccgccccagcccuaucggcuaccuggggcuccugucccaaagaacacgggacauuuauaucucucgcagacggcgcggaaccuucacauggacccuuagcgauuccgagggcaacgaaacccccggcggguacugccugacaagauggaugcucaucgaggcugagcugaaauguuuuggaaauacggccguggcuaagugcaacgaaaaacaugacgaggaguucugcgauaugcugcggcucuuugacuucuguaagcaggccauucgcagacugaaaaccccugcgcagaugagcauccagcuuauuaauaaggccguuaacgcucugaucaaugaucaacucauuaugaagaaccaucugcgggacaucaugggcauccccuauugcaauuacucuaaauauuguuaccuuaaccacacagugaccgggaagacaucccugccucgcugcugucucgucagcaauggaucuuaccugaacgaaacccacuucagcgacgauauugaacagcaggccgacaauaugaucacggagaugcugcaaaaagaguauauggauagacagggcaagacaccgcucgggcugguggaccuuuuuguguucuccaccucuuuuuaccugauuagcaucuuccuccaccuggucaaaauucccacccaucggcacguuaucggaaagccuugccccaaaccucaucgccugaaccacaugggcauuuguuccugcggccuuuauaagcaccccggggugccggugaaguggaaaagaugaggacuagucccuguucccagagcccacuuuuuuuucuuuuuuugaaauaaaauagccugucuuucagaucucaaaggcucuuuucagagccaccaaaaaaaaaaaaaaaaaaaaaaaaaaaaaaaaaaaaaaaaaaaaaaaaaaaaaaaaaaaaaaaaagaauu

SEQ ID NO: 26615 - RNA, 1714 nt, Artificial Sequence
  mRNA product Design a-1 (hSL-A64-N5) comprising derived and/or modified sequence from LASV(LASV237-NIG-2010;Clade II)__AIT17638__GPCmut4 (opt5)
aggagagucccgcagucggcguccagcggcucugcuuguucgugugugugucguugcaggccuuauucaagcuuaccaugggccagaucauuaccuucuuucaagaggugccccacgucaucgaagagguuaugaacauugugcugaucgcccucagccugcuugcuauucugaaggggaucuacaauguggccacaugcggacucuucggccuggucuccuuucuucugcucugugggagaucuugcagcacgaccuauaaaggaguguacgaacugcagacacuggagcucgacauggcgucccugaacauguguaugccucuuucuugcaccaagaauaacagccaucacuauaucaugguuggcaaugaaacagggcuggagcucacccugacaaacaccuccauuaucaaucauaaauucuguaaccuuucugaugcucacaagaaagaccuguacgaucaugcccucaugagcauuaucuccacguuucaccugagcauuccgaauuucaaccaguaugaggccaugucuugcgacuuuaauggaggcaagaucuccgugcaguacaaccugagccacaccuaugcugucgaugccgcuaaucauuguggcacaauugccaacggggugcuccaaaccuucaugcggauggcguggggaggcucuuacaucgcccuggacuccgggaagggaagcugggauugcaucaugacaucuuaccaguaucuuauuauccagaauaccacgugggaagaccacugucaguuuucccgccccagcccuauuggcuaccuggggcuccugucccaaagaacacgggauaucuauauuucucgcagacggcgcggaaccuucacauggacccuuagcgacuccgagggcaacgaaacccccggcggguacugccugacaagauggaugcucaucgaggcugagcugaaauguuuuggaaacacggccguugcuaagugcaaugaaaaacaugaugaggaguucugcgacaugcugcggcucuuugauuucuguaagcaggccauccgcagacugaaaaccccugcgcagaugagcauucagcuuaucaacaaggccgugaaugcucugauuaacgaccaacucaucaugaagaaucaucugcgggacauuaugggcauccccuauugcaacuacucuaaauauuguuaccuuaaucacacagucaccgggaagacaucccugccucgcugcugucucgugagcaacggaucuuaccugaaugaaacccacuucagcgaugacaucgaacagcaggccgauaacaugauuacggagcugcuccaaaaagaguauauggacagacagggcaagacaccgcuggggcuuguggaucuguuugucuucuccaccucuuuuuaccucaucagcauuuuccugcaccugaucaaaauucccacccaucggcacaucacaggaaagccuugccccaaaccucaucgccuuaaucacaugggcauuuguuccugcggccucuauaagcaccccgggguuccggugaaguggaaaagaugaggacuagucccuguucccagagcccacuuuuuuuucuuuuuuugaaauaaaauagccugucuuucagaucucaaaggcucuuuucagagccaccaaaaaaaaaaaaaaaaaaaaaaaaaaaaaaaaaaaaaaaaaaaaaaaaaaaaaaaaaaaaaaaaagaauu

SEQ ID NO: 26616 - RNA, 1714 nt, Artificial Sequence
  mRNA product Design a-1 (hSL-A64-N5) comprising derived and/or modified sequence from LASV(LASV253-NIG-2011;Clade II)__AIT17670__GPCmut4 (opt5)
aggagagucccgcagucggcguccagcggcucugcuuguucgugugugugucguugcaggccuuauucaagcuuaccaugggccagaucauuaccuucuuucaagaggugccccacgucaucgaagagguuaugaacauugugcugaucgcccucagccugcuugcuauucugaaggggaucuacaauguggccacaugcggacucuucggccuggucuccuuucuucugcucugugggagaucuugcagcacgaccuauaaaggaguguacgaacugcagacacuggagcucgacauggcgucccugaacauguguaugccucuuucuugcaccaagaauaacagccaucacuauaucaugguuggcaaugaaacagggcuggagcucacccugacaaacaccuccauuaucaaucauaaauucuguaaccuuucugaugcucacaagaaaaaucuguacgaccaugcccucaugagcauuaucuccacguuucaccugagcauuccgaacuucaaucaguaugaggccaugucuugcgauuuuaacggaggcaagaucuccgugcaguacaaucugagccacaccuaugcugucgacgccgcuaaccauuguggcacaauugccaauggggugcuccaaaccuucaugcggauggcguggggaggcucuuacaucgcccuggauuccgggaagggaagcugggacugcaucaugacaucuuaccaguaucuuauuauccagaacaccacgugggaagaucacugucaguuuucccgccccagcccuauuggcuaccuggggcuccugucccaaagaacacgggacaucuauauuucucgcagacggcgcggaaccuucacauggacccuuagcgauuccgagggcaacgaaacccccggcggguacugccugacaagauggaugcucaucgaggcugagcugaaauguuuuggaaauacggccguugcuaagugcaacgaaaaacaugacgaggaguucugcgauaugcugcggcucuuugacuucuguaagcaggccauccgcagacugaaagcgccugcccagaugagcauucagcuuaucaauaaggcugugaacgcccugauuaaugaucaacucaucaugaagaaccaucugcgggacauuaugggcauccccuauugcaauuacucuaaauauuguuaccuuaaccacaccgucacagggcgcaccucccugccuagaugcugucucgugagcaauggaucuuaccugaacgaaacacacuucagcgacgauaucgaacagcaggcugacaauaugauuaccgagcugcuccaaaaggaguauaucgaucggcagggcaaaacgccgcuggggcuuguggaccuguuugucuucuccacaucuuuuuaccucauuagcaucuuccugcaccugguuaagauucccacccaucgccacaucauuggaaaaccuugccccaagccucauagacuuaaccacaugggcaucuguuccugcggccucuauaaacaccccggggugccggugaaguggaagcggugaggacuagucccuguucccagagcccacuuuuuuuucuuuuuuugaaauaaaauagccugucuuucagaucucaaaggcucuuuucagagccaccaaaaaaaaaaaaaaaaaaaaaaaaaaaaaaaaaaaaaaaaaaaaaaaaaaaaaaaaaaaaaaaaagaauu

SEQ ID NO: 26617 - RNA, 1714 nt, Artificial Sequence
  mRNA product Design a-1 (hSL-A64-N5) comprising derived and/or modified sequence from LASV(LASV254-NIG-2011;Clade II)__AIT17674__GPCmut4 (opt5)
aggagagucccgcagucggcguccagcggcucugcuuguucgugugugugucguugcaggccuuauucaagcuuaccaugggccagaucauuaccuucuuucaagaggugccccacgucaucgaagagguuaugaacauugugcugaucgcccucagccugcuugcuauucugaaggggaucuacaauguggccacaugcggacucuucggccuggucuccuuucuucugcucugugggagaucuugcagcacgaccuauaaaggaguguacgaacugcagacacuggagcucgacaugaccaaccugaauauguguaugccucuuuccugcacaaagaacaauucucaucacuauaucaugguuggcaacgaaaccgggcuggagcucacacugaccaauacgagcauuaucaaccauaaauucuguaaucuuuccgaugcgcacaagaaaaaccuguacaaucaugcucucaugucuauuaucagcaccuuucaccuguccauuccgaacuucaaucaguaugaggccaugagcugcgacuuuaacggaggcaagaucucugugcaguacaaucugucccacagcuaugccgucgaugcugccaaccauuguggcacaauugcuaacggggugcuccaaaccuucaugcggauggccuggggaggcucuuacaucgcgcuggacuccgggaagggaaauugggauugcaucaugacaagcuaccaguaucuuauuauccagaacaccacgugggaagaccacugucaguuuucucgccccuccccuauuggcuaccuggggcuccugagccaaagaacacgggauaucuauauuucccgcagacggcgcggaaccuucacauggacccuuucugacagcgagggcaaugaaacccccggcggguacugccugacaagauggaugcucaucgaggccgagcugaaauguuuuggaaacacggcuguugccaagugcaaugaaaaacaugaugaggaguucugcgacaugcugcggcucuuugauuucuguaagcaggcuauccgcagacugaaaaccccugcccaggcgaacauucagcuuaucaauaaggccgugaacgcucugauuaaugaccaacucaucaugaagaaccaucugcgggauauuaugggcauccccuauugcaauuacuccaaauauuguuaccuuaaccacacagucaccgggaagacaagccugccucgcugcugucucgugucuaauggauccuaccugaacgaaacccacuucagcgacgacaucgaacagcaggccgauaauaugauuacggagcugcuccaaaaagaguauauggacagacagggcaagacaccgcuggggcuuguggaucuguuugucuucucuaccagcuuuuaccucaucuccauuuuccugcaccugguuaaaauccccacccaucggcacgugauuggaaagccuugccccaaaccucaucgccuuaaccacaugggcaucuguucuugcggccucuauaagcaccccggggugccggucaaguggaaaagaugaggacuagucccuguucccagagcccacuuuuuuuucuuuuuuugaaauaaaauagccugucuuucagaucucaaaggcucuuuucagagccaccaaaaaaaaaaaaaaaaaaaaaaaaaaaaaaaaaaaaaaaaaaaaaaaaaaaaaaaaaaaaaaaaagaauu

SEQ ID NO: 26618 - RNA, 1714 nt, Artificial Sequence
  mRNA product Design a-1 (hSL-A64-N5) comprising derived and/or modified sequence from LASV(Nig08-A19;Clade III)__ADU56618__GPCmut4 (opt5)
aggagagucccgcagucggcguccagcggcucugcuuguucgugugugugucguugcaggccuuauucaagcuuaccaugggccagaucgugaccuucuuucaagaggucccccacguuauugaagaggugaugaacaucgugcugauugcccucagcauccuggcuauucuuaaggggcuguacaauaucgccacaugcggacucaucggccuggucacguuccuucugcucuccgggagaucuuguagcaugaccuauaaaggaguguacgaacugcagacacuggagcucaacaugaauacccugaacaugugcaugccucuuuccuguacaaagaauaacucucaucacuauauuaugguuggcaaugaaaccgggcuggagcucacacugaccaacacgagccuucugcaucacaaauuuugcaaucucuccgacgcgcauaagaaaaaccuguacgaucacacccugaugucuaucauuagcacauuccaccucuccaucccgaauuuuaaccaguaugaggcuaugagcugugacuucaauggaggcaagauuaccgugcaguacaaccugucucauuccuaugccaucgaugccgcuaaucacugcggcacagucgccaacggggugcuucaaaccuuuaugcggauggcuuggggaggcagcuacauugcccuggacucugggcgcggaaagugggauuguaucaugacguccuaccaguaucucaucauucagaacacaaccugggaagaccauugccaguucagcagacccucuccuaucggcuaccuggggcuucugucccaacggacacgcgauauuuauaucagcagacggcgcagaggaaccuuuaccuggacacucuccgacucugagggcaaugaaacgcccggcggguacugucugacccgguggaugcugauugaggcggagcucaaaugcuucggaaacacagccguugcuaaguguaaugaaaaacacgaugaggaauuuugcgacaugcugcgccuuuucgauuuuugcaagcaggccaucagacggcugaaagcuccugcccagaugagcauccagcucauuaacaaggcggugaaugcccugaucaacgaccaacuuauuaugaagaaucaucugcgcgauaucaugggcauucccuauuguaacuacuccaaauauugcuaccucaaucacaccagcacagggagaaccucucugccucgguguugccuggucuccaacggaagcuaccucaaugagacgcacuucucugacgacaucgaacagcaggcugauaacaugaucacagagaugcugcaaaaggaguaucuugaccgccagggcaaaaccccgcuggggcucguggaucuguucguguuuagcaccuccuucuaccugauuucuaucuuucuucaucucgucaagauucccacacacagacauaucguuggaaaaccuugucccaagccucaccggcugaaucacaugggcauuugcagcuguggccuguauaaacagcccggggugccggugagauggaagcgcugaggacuagucccuguucccagagcccacuuuuuuuucuuuuuuugaaauaaaauagccugucuuucagaucucaaaggcucuuuucagagccaccaaaaaaaaaaaaaaaaaaaaaaaaaaaaaaaaaaaaaaaaaaaaaaaaaaaaaaaaaaaaaaaaagaauu

SEQ ID NO: 26619 - RNA, 1717 nt, Artificial Sequence
  mRNA product Design a-1 (hSL-A64-N5) comprising derived and/or modified sequence from LASV(G1180-SLE-2010;Clade IV)__AIT17168__GPCmut4 (opt5)
aggagagucccgcagucggcguccagcggcucugcuuguucgugugugugucguugcaggccuuauucaagcuuaccaugggccagaucgugaccuucuuucaagaggucccccacguuauugaagaggugaugaacaucgugcugauugcccucagcauccuggcuguccuuaaggggcuguacaauuucgccacaugcggacucgugggccugcuuacguuucugcuccugugugggagauccugcaccgcgucucgguauaaaggaguuuacgaacugcagacacucgagcugaacauggaaacccuuaauauguguaugccucugagcugcacaaagaacaauucccaucacuauauuauggugggcaacgagaccgggcucgagcugacacuuaccaauacgucuaucaucaaccauaaauucuguaaucugagcgacgcucacaagaaaaaccucuacgaucaugcccugauguccauuaucucuaccuuucaccugagcauuccgaauuucaaccaguaugaagccauguccugcgacuuuaauggaggcaagaucagcguccaguacaaccucucucacuccuaugcuggcgaugccgcuaaucauugugggacaguggccaacggaguucugcaaaccuucaugcgcauggcguggggcgggagcuacauugcccuugacucuggacacggcuccugggauugcaucaugacaagcuaccaguaucugauuauccagaacaccacgugggaggaccauugucaguuuucuagacccuccccuaucggguaccucggacugcuuagccaacggacacgcgauauuuauaucuccagacggcgcagaggcaccuucacauggacccugucugacagcgaaggcaaggauacccccgggggauacugccucacacgguggaugcugauugaggcugagcugaaauguuuuggcaauacggccguggcuaagugcaacgaaaaacacgacgaggaguucugcgauaugcuccgccuguuugacuucuguaagcaggccauccagagacuuaaagcgccugcccagauguccauucaacugaucaauaaggcugucaacgcccucaucaaugaucagcugauuaugaagaaccaccuucgggacaucauggggauucccuauugcaauuacagcaaauauuguuaccugaaccauaccacaaccggaaagacaucucucccuaaaugcugucugguguccaauggcagcuaccugaacgaaacccacuucucugacgauaucgaacagcaagcugacaauaugauuacggagaugcuccagaaggaguauauggaacgccaggggaaaacaccgcugggacuuguggaucuguuugucuucagcaccuccuuuuaccucaucucuaucuuccugcaucugguuaagauucccacccacagacauaucgugggcaaaagcugcccuaagccccaccggcuuaaccacaugggcauuuguuccugcgggcucuauaagcagccuggagugcccgucaaauggaagcgcugaggacuagucccuguucccagagcccacuuuuuuuucuuuuuuugaaauaaaauagccugucuuucagaucucaaaggcucuuuucagagccaccaaaaaaaaaaaaaaaaaaaaaaaaaaaaaaaaaaaaaaaaaaaaaaaaaaaaaaaaaaaaaaaaagaauu

SEQ ID NO: 26620 - RNA, 1717 nt, Artificial Sequence
  mRNA product Design a-1 (hSL-A64-N5) comprising derived and/or modified sequence from LASV(G1442-SLE-2011;Clade IV)__AIT17180__GPCmut4 (opt5)
aggagagucccgcagucggcguccagcggcucugcuuguucgugugugugucguugcaggccuuauucaagcuuaccaugggccagaucgugaccuucuuucaagaggucccccacguuauugaagaggugaugaacaucgugcugauugcccucagcauccuggcuguccuuaaggggcuguacaauguggccacaugcggacucauuggccugguuacguuccuucugcucugugggagauccugcaccacaacccuguauaaaggaguguacgaacugcagacacucgagcugaacauggaaacccuuaauauguguaugccucugucuugcacaaagaacaauagccaucacuauauccgggucggcaacgagaccgggcucgagcugacgcuuaccaauacauccaucauuaaccauaaauuuuguaaucugucugacgcgcacaagaaaaaccucuacgaucaugcucugaugagcaucauuuccaccuuccaccugucuaucccgaauuuuaaccaguaugaagccaugagcugcgacuucaauggaggcaagauuuccgugcaguacaaccucagccacucuuaugccggcgaugcugccaaucauugugggacaguugcuaacggagugcugcaaaccuuuaugcgcauggccuggggcggguccuacaucgcgcuugacagcggaagaggcaacugggauugcauuaugacgucuuaccaguaucugaucauccagaauacaaccugggacgaucacugucaguucucccggcccagcccuauuggguaccucggacugcuuucucaacgcacaagagacgucuauaucucccggcgcagacggggcaccuuuaccuggacacugagcgauuccgagggcaaggacacgcccgggggauacugccucacccgcuggaugcugauugaagccgagcugaaauguuucggcaacacagcuguggccaagugcaaugagaaacaugaugaagaguuuugcgacaugcucagacuguucgauuuuuguaagcaggcuauccagcggcuuaaagccccugcgcagaugucuauucaacugaucaacaaggccgugaaugcucucaucaacgaccagcugauuaugaagaaucaccuucgcgacaucauggggauucccuauugcaacuacagcaaauauuguuaccugaauaacaccgccacaggaaagaccucccucccuaaaugcugucugaucagcaauggcucuuaccugaacgaaacgcacuucuccgaugacauugagcaggaagcugauaauaugaucacagagaugcuccaaaaggaguauauggaaagacaggggaaaaccccgcugggacuugucgaccuguucguuuuuagcaccucuuucuaccucaucagcauuuuucugcaucuggugaagauccccacacaccggcauauugugggcaaauccugcccuaagccccaccgccuuaaccauaugggcaucuguucuugcgggcucuauaagcagccuggaguccccgugagauggaaacggugaggacuagucccuguucccagagcccacuuuuuuuucuuuuuuugaaauaaaauagccugucuuucagaucucaaaggcucuuuucagagccaccaaaaaaaaaaaaaaaaaaaaaaaaaaaaaaaaaaaaaaaaaaaaaaaaaaaaaaaaaaaaaaaaagaauu

SEQ ID NO: 26621 - RNA, 1717 nt, Artificial Sequence
  mRNA product Design a-1 (hSL-A64-N5) comprising derived and/or modified sequence from LASV(G3010-SLE-2013;Clade IV)__AIT17344__GPCmut4 (opt5)
aggagagucccgcagucggcguccagcggcucugcuuguucgugugugugucguugcaggccuuauucaagcuuaccaugggccagaucgugaccuucuuucaagaggucccccacguuauugaagaggugaugaacaucgugcugauugcccucagcauccuggcuguccuuaaggggcuguacaauuucgccacaugcggacucgugggccugguuacguuucuucugcucugugggagauccugcaccacaucucuguauaaaggaguguacgaacugcagacccucgagcugaacauggaaacacuuaauauguguaugccucugagcugcaccaagaacaauucccaucacuauauuauggucggcaacgagacagggcucgagcugacccuuacgaauaccucuaucaucaaccauaaauucuguaaucugagcgacgcgcacaagaaaaaccucuacaaucaugcucugauguccauuaucucuacauuucaccugagcauuccgaacuucaaucaguaugaagccauguccugcgauuuuaacggaggcaagaucagcgugcaguacaaucucucucacuccuaugccggcgacgcugccagccauugugggaccguugcuaacggagugcugcaaacauucaugcggauggccuggggcgggucuuacauugcgcuugauuccggauacggcaagugggacugcaucaugaccagcuaucaguaccugauuauccagaacacgacaugggaggaucacugucaguuuucucgccccuccccuaucggguaucucggacugcuuagccaaagaacccgggacauuuacaucucccgcagacggcgcggcacauucaccuggacccugucugauagcgaaggcaaagacacacccgggggauauugccucacgagauggaugcugauugaggccgagcugaaguguuuuggcaauaccgcugucgccaaaugcaacgaaaagcaugaugaggaguucugcgacaugcuccggcuguuugauuucuguaaacaggcuauccagcgccuuaagaccccugcccagauguccauucaacugaucaauaaggcggugaacgcccucaucaaugaccagcugauuaugaaaaaccaccuuagagauaucauggggauucccuacugcaauuauagcaaguacuguuaccugaaccacacaacaaccggaaaaacgucucucccuaagugcugucugguguccaauggcagcuaucugaacgaaacacauuucucugacgacaucgaacagcaagcugauaauaugauuaccgagaugcuccagaaagaguacauggaacggcaggggaagaccccgcugggacuugucgaccuguuuguuuucagcacauccuuuuaucucaucucuaucuuccugcaccuggugaaaauucccacccaucgccacaucgugggcaagagcugcccuaagccccauagacuuaaccacaugggcauuuguuccugcgggcucuacaaacagccuggaguccccgugcgguggaagcgcugaggacuagucccuguucccagagcccacuuuuuuuucuuuuuuugaaauaaaauagccugucuuucagaucucaaaggcucuuuucagagccaccaaaaaaaaaaaaaaaaaaaaaaaaaaaaaaaaaaaaaaaaaaaaaaaaaaaaaaaaaaaaaaaaagaauu

SEQ ID NO: 26622 - RNA, 1717 nt, Artificial Sequence
  mRNA product Design a-1 (hSL-A64-N5) comprising derived and/or modified sequence from LASV(G502-SLE-2009;Clade IV)__AIT17126__GPCmut4 (opt5)
aggagagucccgcagucggcguccagcggcucugcuuguucgugugugugucguugcaggccuuauucaagcuuaccaugggccagaucgugaccuucuuucaagaggucccccacguuauugaagaggugaugaacaucgugcugauugcccucagcauccuggcuguccuuaaggggcuguacaauuucgccacaugcggacucgugggccugcuuacguuucugcuccugugugggagauccugcaccacaggacuguauaaaggcguuuacgaacuccagacccuggagcuuaacauggaaacacugaauauguguaugccucucucuugcaccaagaacaauagccaucacuauauuaugguggggaacgagacaggacuggagcuuacccugacgaauaccuccaucaucaaccauaaauucuguaaucucucugacgcgcacaagaaaaaccuguacgaucaugcucugaugagcauuaucuccacauuucaccucucuauuccgaauuucaaccaguaugaagccaugagcugcgacuuuaauggcggcaagaucuccguccaguacaaccugagccacucuuaugccggggaugcugccgaccauuguggaaccguggcuaauggcguucuucaaacauucaugcggauggccuggggaggguccuacauugcgcuggauagcggccgcgggagaugggacugcaucaugaccucuuaccaguaucucauuauccagaacacgacaugggaggaucacugucaguuuucccggcccagcccuaucggauaccugggccuucugucucaacgcaccagagacauuuauaucucccggcgcagacggggcacauucaccuggacccucagcgauuccgaagggaaggacacacccggaggcuacugccugacgcgcuggaugcugauugaggccgagcucaaauguuuugggaacaccgcuguggccaagugcaaugaaaaacaugaugaggaguucugcgacaugcugagacuuuuugauuucuguaagcaggcuauccagcggcugaaagccccugcgcagaugucuauucaacucaucaacaaggccgucaaugcucugaucaacgaccagcuugugaugaagaaucaucugcgcgacauuaugggaauccccuauugcaacuacagcagauauuguuaccucaaucacacaaccacaggccggaccucccugccuaaaugcugucuggugagcaacgggucuuaccucaaugaaacgcacuucuccgaugacauugaacagcaagccgauaacaugaucacagagaugcugcagaaggaguauauggaacgccagggaaaaaccccgcuuggccuggucgaccucuuuguuuucagcaccucuuuuuaccugauuagcaucuuccugcaccuugugaagauccccacacauagacacauugugggcaaauccugcccuaagccccaucggcucaaucacauggggaucuguucuugcggacuguauaaacagccuggcguccccgugaaguggaagagaugaggacuagucccuguucccagagcccacuuuuuuuucuuuuuuugaaauaaaauagccugucuuucagaucucaaaggcucuuuucagagccaccaaaaaaaaaaaaaaaaaaaaaaaaaaaaaaaaaaaaaaaaaaaaaaaaaaaaaaaaaaaaaaaaagaauu

SEQ ID NO: 26623 - RNA, 1717 nt, Artificial Sequence
  mRNA product Design a-1 (hSL-A64-N5) comprising derived and/or modified sequence from LASV(G733-SLE-2010;Clade IV)__AIT17154__GPCmut4 (opt5)
aggagagucccgcagucggcguccagcggcucugcuuguucgugugugugucguugcaggccuuauucaagcuuaccaugggccagaucgugaccuucuuucaagaggucccccacguuauugaagaggugaugaacaucgugcugauugcccucagcauccuggcuguccuuaaggggcuguacaauuucgccacaugcggaauugugggccucguuuccuuucugcuucugugugggagaucuugcacgaccagccucuauaaaggaguguacgaacugcagacacuggagcucaacauggaaacccugaauauguguaugccucuuuccugcacaaagaacaauucucaucacuauaucauggucggcaacgagaccgggcuggagcucacacugaccaauacgagcaucauuaaccauaaauucuguaaucuuuccgacgcgcacaagaaaaaccuguacgaucaugcucucaugucuaucauuagcaccuuucaccuguccaucccgaauuucaaccaguaugaagccaugagcugcgacuuuaauggaggcaagauuucugugcaguacaaccugucccacagcuaugccggcgaugcugccaaucauugugggacaaucgcuaacggaguucuccaaaccuucaugcggauggccuggggcgggucuuacauugcgcuggacuccggacgcgauagaugggacugcaucaugacaagcuaccaguaucuuaucauucagaacaccacgugggaggaucacugucaguuuucucggcccuccccuaucggcuaccuggggcuccugagccaacgcacaagagacauuuauaucucccggcgcagacggggaaccuucacauggacccuuucugauagcgaaggcaaggacacccccggcggguacugccugacacgcuggaugcucauugaggccgagcugaaauguuuuggaaauacggcuguggccaagugcaacgaaaaacaugaugaggaguucugcgacaugcugagacucuuugauuucuguaagcaggcuauccagcggcugaaagccccugcgcagauguccauccaacuuauuaauaaggccgucaacgcucugaucaaugaccagcucauuaugaagaaccaucugcgcgacaucaugggcauucccuauugcaauuacagcaaauauuguuaccuuaaccacaccacaaccgggaagacaucucugccuaaaugcugucucguguccaauggaagcuaccugaacgaaacccacuucucugaugacaucgaacagcaagccgauaauaugaucacggagaugcugcagaaggaguauauggaaagacagggcaaaacaccgcucgggcugguggaccuuuuugucuucagcaccuccuuuuaccugauuucuaucuuccuccaccugguuaagauucccacccaucggcacguggugggaaaaagcugcccuaagccccaucgccugaaccacaugggcaucuguuccugcggccuuuaugggcagccuggaguccccgugaaguggaaaagaugaggacuagucccuguucccagagcccacuuuuuuuucuuuuuuugaaauaaaauagccugucuuucagaucucaaaggcucuuuucagagccaccaaaaaaaaaaaaaaaaaaaaaaaaaaaaaaaaaaaaaaaaaaaaaaaaaaaaaaaaaaaaaaaaagaauu

SEQ ID NO: 26624 - RNA, 1717 nt, Artificial Sequence
  mRNA product Design a-1 (hSL-A64-N5) comprising derived and/or modified sequence from MOPV/LASV reassortant(IGS-1;Clade IV)__AFY05576__GPCmut4 (opt5)
aggagagucccgcagucggcguccagcggcucugcuuguucgugugugugucguugcaggccuuauucaagcuuaccaugggccagaucgugaccuucuuucaagaggucccccacguuauugaagaggugaugaacaucgugcugauugcccucagcguccuggcugugcuuaaggggcuguacaauuucgccacaugcggacucguuggccuggugacguuucuucugcucugugggagauccugcaccacaucucuguauaaaggagucuacgaacugcagacccucgagcugaacauggaaacacuuaauauguguaugccucugagcugcaccaagaacaauucccaucacuauaucauggugggcaacgagacagggcucgagcugacccuuacgaauaccucuauuaucaaccauaaauucuguaaucugagcgacgcgcacaagaaaaaccucuacgaucaugcucugauguccaucauuucuacauuucaccugagcaucccgaauuucaaccaguaugaagccauguccugcgacuuuaauggaggcaagauuagcguucaguacaaccucucucacuccuaugccggcgaugcugccaaucauugugggaccguggcuaacggaguccugcaaacauucaugcggauggccuggggcgggagcuacaucgcgcuugacucuggacgcggcaacugggauugcauuaugaccuccuaccaguaucugaucauucagaauacgacaugggaggaccacugucaguuuagcagacccucuccuaucggguaccucggacugcuuucccaacggacccgcgauaucuauauuagcagacggcgcagaggcacauucaccuggacccuguccgacucugaaggcgaggauacacccgggggauacugccucacgcgguggaugcugaucgaggccgaacugaaguguuuuggcaacaccgcuguggccaaaugcaaugagaagcaugacgaagaguucugcgauaugcuccgccuguuugacuucuguaaacaggcuauucagagacuuaaggccccugcgcagaugagcauccaacugauuaacaaagccgugaaugcucucaucaacgaucagcugaucaugaagaaucaccuucgggacauuauggggauccccuauugcaacuacuccaaguauuguuaccugaaucacacaaccacaggacgcaccagccucccuaaaugcugucuggucucuaacggcuccuaccugaaugaaacgcauuucagcgacgauauugagcagcaagccgacaacaugaucacagagaugcuccagaaggaauauauggagagacaggggaaaaccccgcugggacuuguugaucuguuuguguucucuaccagcuuuuaccucauuuccaucuuccugcaccuggugaagauccccacacaucggcacauugucggcaaaucuugcccuaagccccaucgccuuaaucacaugggcaucuguagcugcgggcucuauaaacagccuggagugcccguuaaguggaagagaugaggacuagucccuguucccagagcccacuuuuuuuucuuuuuuugaaauaaaauagccugucuuucagaucucaaaggcucuuuucagagccaccaaaaaaaaaaaaaaaaaaaaaaaaaaaaaaaaaaaaaaaaaaaaaaaaaaaaaaaaaaaaaaaaagaauu

SEQ ID NO: 26625 - RNA, 1717 nt, Artificial Sequence
  mRNA product Design a-1 (hSL-A64-N5) comprising derived and/or modified sequence from LASV(LM765-SLE-2012;Clade IV)__AIT17814__GPCmut4 (opt5)
aggagagucccgcagucggcguccagcggcucugcuuguucgugugugugucguugcaggccuuauucaagcuuaccaugggccagaucgugaccuucuuucaagaggucccccacguuauugaagaggugaugaacaucgugcugauugcccucagcauccuggcuguccuuaaggggcuguacaauuucgccacaugcggacucgugggccugguuacguuucuucugcucugugggagauccugcaccacaucucuguauaaaggaguguacgaacugcagacccucgagcugaacauggaaacacuuaauauguguaugccucugagcugcaccaagaacaauucccaucacuauauuauggucggcaacgagacagggcucgagcugacccuuacgaauaccucuaucaucgaccauaaauucuguaaccugagcgaugcgcaccggaagaaucucuacgaccaugcucugauguccauuaucucuacauuucaccugagcauuccgaacuucaaucaguaugaagccauguccugcgauuuuaacggaggcaaaaucagcgugcaguacaaucucucucacuccuaugccaaggacgcugccgaucauuguggcaccguugcuaacggggugcugcaaacauucaugcgcauggccuggggaggcagcuacauugcgcuugacucugggagaggacggugggauugcaucaugaccuccuaccaguaucugauuauccagaauacgacaugggaggaccacugucaguuuagccgccccucuccuaucggcuaccucgggcugcuuucccaaagaacccgggauauuuauaucagccgcagacggcgcggaacauucaccuggacccuguccgacucugaaggcaaggauacacccggcggguacugccucacgagauggaugcugauugaggccgagcugaaauguuuuggaaacaccgcugucgccaagugcaacgaaaaacaugacgaggaguucugcgauaugcuccggcuguuugacuucuguaagcaggcuauccagcgccuuaaagccccugcgcagaugagcauucaacugaucaauaaggccgugaacgcucucaucaaugaccagcugauuaugaagaaccaccuuagagauaucaugggcauucccuauugcaauuacuccaaauauuguuaccugaaccacacaaccacagggaagaccagccucccuaaaugcugucuggugucuaauggauccuaccugaacgaaacgcauuucagcgacgauaucgaacagcaagccgacaauaugauuacagagaugcuccagaaggaguauauggaacggcagggcaaaaccccgcuggggcuugucgaucuguuuguuuucucuaccagcuuuuaccucaucuccaucuuccugcaccuggugaagauucccacacaucgccacaucgugggaaaaccuugccccaagccucauagacuuaaccacaugggcauuuguucuugcggccucuauaagcagcccggggucccggugaaauggaagcggugaggacuagucccuguucccagagcccacuuuuuuuucuuuuuuugaaauaaaauagccugucuuucagaucucaaaggcucuuuucagagccaccaaaaaaaaaaaaaaaaaaaaaaaaaaaaaaaaaaaaaaaaaaaaaaaaaaaaaaaaaaaaaaaaagaauu

SEQ ID NO: 26626 - RNA, 1717 nt, Artificial Sequence
  mRNA product Design a-1 (hSL-A64-N5) comprising derived and/or modified sequence from LASV(LM776-SLE-2012;Clade IV)__AIT17824__GPCmut4 (opt5)
aggagagucccgcagucggcguccagcggcucugcuuguucgugugugugucguugcaggccuuauucaagcuuaccaugggccagaucgugaccuucuuucaagaggucccccacguuauugaagaggugaugaacaucgugcugauugcccucagcauccuggcuguccuuaaggggcuguacaauuucgccacaugcggacucgugggccugguuacguuucuucugcucugugggagauccugcaccacaucuguguauaaaggagucuacgaacugcagacccuggagcucaacauggaaacacugaauauguguaugccucuuagcugcaccaagaacaauucccaucacuauauuauggugggcaacgagacagggcuggagcucacccugacgaauaccucuaucaucaaccauaaauucuguaaucuuagcgacgcgcacaagaaaaaccuguacgaucaugcucucauguccauuaucucuacauuucaccugagcauuccgaauuucaaccaguaugaagccauguccugcgacuuuaauggaggcaagaucagcguucaguacaaccugucucacuccuaugccggcgaugcugccaaucauugugggaccguggcuaacggaguccuccaaacauucaugcggauggccuggggcgggagcuacauugcgcuggacucuggacacggcaagugggauugcaucaugaccuccuaccaguaucuuauuauccagaacacgacaugggaggaccauugucaguuuagccgccccucuccuaucggguaccugggacuccugucccaaagaacccgggauauuuauaucagccgcagacggcgcggcacauucaccuggacccuuuccgacucugaaggcaaagauacacccgggggauacugccugacgagauggaugcucauugaggccgagcugaaguguuuuggcaauaccgcuguggccaaaugcaacgaaaagcacgacgaggaguucugcgauaugcugcggcucuuugacuucuguaaacaggcuauccagcgccugaaggccccugcgcagaugagcauucaacuuaucaauaaggccgugaacgcucugaucaaugaucagcucauuaugaaaaaccaccugagagacaucauggggauucccuauugcaauuacuccaaguauuguuaccuuaaccauacaaccacaggaaaaaccagccugccuaagugcugucucgucucuaauggcuccuaccugaacgaaacgcacuucagcgacgauaucgaacagcaagccgacaauaugauuacagagaugcugcagaaagaguauauggaacggcaggggaagaccccgcucggacugguugaucuuuuuguguucucuaccagcuuuuaccugaucuccaucuuccuccaucuggugaaaauucccacacaccgccauaucgucggcaagucuugcccuaagccccacagacugaaccacaugggcauuuguagcugcgggcuuuauaaacagccuggagugcccguucgguggaagcgcugaggacuagucccuguucccagagcccacuuuuuuuucuuuuuuugaaauaaaauagccugucuuucagaucucaaaggcucuuuucagagccaccaaaaaaaaaaaaaaaaaaaaaaaaaaaaaaaaaaaaaaaaaaaaaaaaaaaaaaaaaaaaaaaaagaauu

SEQ ID NO: 26627 - RNA, 1717 nt, Artificial Sequence
  mRNA product Design a-1 (hSL-A64-N5) comprising derived and/or modified sequence from LASV(Mad39;Clade IV)__ANH09722__GPCmut4 (opt5)
aggagagucccgcagucggcguccagcggcucugcuuguucgugugugugucguugcaggccuuauucaagcuuaccaugggccagaucgugaccuucuuucaagaggucccccacguuauugaagaggugaugaacaucgugcugauugcccucagcauccuggcuguccuuaaggggcuguacaauguggccacaugcggacucauuggccugguuacguuccuucugcucugugggagauccugcaccacaacccuguauaaaggaguguacgaacugcaggcgcucgagcugaacauggaaacacuuaauauguguaugccucugucuugcaccaagaacaauagccaucacuauauccgggucggcaacgagacagggcucgagcugacccuuacgaauaccucccugaucaaccauaaauuuuguaaucucucugacgcucacaagaaaaaccuguacgaucaugcccugaugagcauuaucuccacauuccaccucucuauuccgaauuuuaaccaguaugaagccaugagcugcgacuucaaugauggaaagaucuccgugcaguacaaccugagccacaccuaugcuggcgacacagccaaucauuguggcaccguugcuaacggggugcuucaaacguuuaugcgcauggccuggggaggcucuuacauugcgcuggauuccgggagaggaggcugggacugcaucaugacaagcuaccaguaucucauuauccagaacaccacaugggaggaucacugucaguucucucggcccuccccuaucggguaccugggacuucugagccaacgcaccagagacauuuauaucucucggcgcagacggggcaccuuuacauggacgcucuccgauagcgaaggcaaggacacccccgggggauacugccugacacgcuggaugcugauugaggccgagcucaaauguuucggcaauaccgcugucgccaagugcaacgaaaaacaugaugaggaauuuugcgacaugcugagacuuuucgauuuuuguaagcaggcuauccagcggcugaaagccccugcgcagauguccauucaacucaucaauaaggccgugaacgcucugaucaaugaccagcuuauuaugaagaaccaucugcgcgacaucauggggauucccuauugcaauuacucuaaauauuguuaccucaaccacacagugaccggaaagacgagccugccuaaaugcugucuggucuccaauggcagcuaccucaacgagacacacuucucugaugacaucgaacagcaagccgauaauaugauuaccgagaugcugcagaaggaguauauggaaagacaggggaaaaccccgcuuggacugguugaccucuucguguuuuccaccagcuucuaccugaucucuaucuuucugcaccuugugaagauucccacacaucggcacgucgugggcaaaccuugccccaagccucaucgccucaaccacaugggcaucuguagcugcggguucuauaagcagcccggaguuccggugagauggaaacggugaggacuagucccuguucccagagcccacuuuuuuuucuuuuuuugaaauaaaauagccugucuuucagaucucaaaggcucuuuucagagccaccaaaaaaaaaaaaaaaaaaaaaaaaaaaaaaaaaaaaaaaaaaaaaaaaaaaaaaaaaaaaaaaaagaauu

SEQ ID NO: 26628 - RNA, 1717 nt, Artificial Sequence
  mRNA product Design a-1 (hSL-A64-N5) comprising derived and/or modified sequence from LASV(Z0947-SLE-2011;Clade IV)__AIT17840__GPCmut4 (opt5)
aggagagucccgcagucggcguccagcggcucugcuuguucgugugugugucguugcaggccuuauucaagcuuaccaugggccagaucgugaccuucuuucaagaggucccccacguuauugaagaggugaugaacaucgugcugauugcccucagcauccuggcuguccuuaaggggcuguacaauuucgccacaugcggacucgugggccugguuacguuucuucugcucugugggagauccugcaccauuucucuguauaaaggaguguacgaacugcagacacucgagcugaacauggaaacccuuaauauguguaugccucugagcugcacaaagaacaauucccaucacuauaucauggucggcaacgagaccgggcucgagcugacacuuaccaauacgucuaucauuaaccauaaauucuguaaucugagcgacgcgcacaagaaaaaccucuacgaucaugcucugauguccaucauuucuaccuuucaccugagcaucccgaauuucaaccaguaugaagccauguccugcgacuuuaauggaggcaagauuagcgugcaguacaaccucucucacuccuaugccggcgaugcugccaaucauugugggacaguugcuaacggagugcugcaaaccuucaugcggauggccuggggcgggagcuacaucgcgcuugacucuggacgcgauagaugggacugcauuaugacauccuaccaguaucugaucauccagaacaccacgugggaggaucacugucaguuuagccggcccucuccuauuggcuaccucgggcugcuuucccaacgcacaagagacaucuauauuagccggcgcagacggggaaccuucacauggacccuguccgauucugaaggcaaggacacccccggcggguacugccucacacgcuggaugcugaucgaggccgagcugaaauguuuuggaaauacggcugucgccaagugcaacgaaaaacaugaugaggaguucugcgacaugcucagacuguuugauuucuguaagcaggcuauucagcggcuuaaagccccugcgcagaugagcauccaacugaucaauaaggccgugaacgcucucauuaaugaccagcugaucaugaagaaccaccuucgcgacauuaugggcauccccuauugcaauuacuccaaauauuguuaccugaaccacaccacaaccgggaagacaagccucccuaaaugcugucuggugucuaauggauccuaccugaacgaaacccauuucagcgaugacauugaacagcaagccgauaauaugaucacggagaugcuccagaaggaguauauggaaagacagggcaaaacaccgcuggggcuugucgaccuguuuguuuucucuaccagcuuuuaccucaucuccauuuuccugcaccuggugaagauccccacccaucggcacauugugggaaaaccuugccccaagccucaucgccuuaaccacaugggcaucuguucuugcggccucuauaagcagcccggggucccggugaaauggaagagaugaggacuagucccuguucccagagcccacuuuuuuuucuuuuuuugaaauaaaauagccugucuuucagaucucaaaggcucuuuucagagccaccaaaaaaaaaaaaaaaaaaaaaaaaaaaaaaaaaaaaaaaaaaaaaaaaaaaaaaaaaaaaaaaaagaauu

SEQ ID NO: 26629 - RNA, 1748 nt, Artificial Sequence
  mRNA product Design a-1 (hSL-A100) comprising derived and/or modified sequence from LASV(Josiah;Clade IV)__NP_694870__GPCmut4 (opt1)
aggagagucccgcagucggcguccagcggcucugcuuguucgugugugugucguugcaggccuuauucaagcuuaccaugggccagaucgugaccuucuuccaggaggucccccacgugaucgaggaggugaugaacaucguccugaucgcccucagcgugcuggccgugcugaaggggcucuacaacuucgcgaccugcggccuggucgggcuggugacguuccuccugcugugcggccgcuccugcaccaccagccucuacaaggggguguacgagcugcagacccuggagcucaacauggagacgcugaacaugugcaugccgcuguccugcaccaagaacaacagccaccacuacaucauggucggcaacgagaccggccucgagcugacgcugaccaacaccuccaucaucaaccacaaguucugcaaccucagcgacgcccacaagaagaaccuguacgaccacgcccugauguccaucaucagcaccuuccaccucuccauccccaacuucaaccaguacgaggccaugagcugcgacuucaacgggggcaagaucuccgugcaguacaaccugagccacuccuacgccggggacgcggccaaccacugcggcacgguggccaacgggguccugcagaccuucaugcggauggccuggggcggcagcuacaucgcgcucgacuccgggcgcggcaacugggacugcaucaugaccagcuaccaguaccugaucauccagaacaccacgugggaggaccacugccaguucucccggcccagccccaucggguaccugggccuccugucccagcgcacccgggacaucuacaucagccgccggcgccggggcaccuucaccuggacgcugagcgacuccgaggggaaggacaccccgggcggguacugccugacccgcuggaugcucaucgaggccgagcugaagugcuucggcaacaccgccguggccaagugcaacgagaagcacgacgaggaguucugcgacaugcugcggcuguucgacuucugcaagcaggccauccagcgccugaaggcgcccgcccagaugagcauccagcugaucaacaaggccgugaacgcccucaucaacgaccagcugaucaugaagaaccaccuccgggacaucauggggauccccuacugcaacuacuccaaguacugcuaccucaaccacacgaccaccggccgcaccagccugcccaagugcugccuggucuccaacggcagcuaccucaacgagacgcacuucuccgacgacaucgagcagcaggccgacaacaugaucaccgagaugcugcagaaggaguacauggagcggcaggggaagacgccccugggccucguggaccuguucguguucagcaccuccuucuaccugaucagcaucuuccugcaccucgucaagaucccgacccaccgccacaucguggggaaguccugccccaagccccaccggcugaaccacaugggcaucugcagcugcgggcuguacaagcagcccggcgugccggucaaguggaagcgcugaggacuagucccuguucccagagcccacuuuuuuuucuuuuuuugaaauaaaauagccugucuuucagaucucaaaggcucuuuucagagccaccaaaaaaaaaaaaaaaaaaaaaaaaaaaaaaaaaaaaaaaaaaaaaaaaaaaaaaaaaaaaaaaaaaaaaaaaaaaaaaaaaaaaaaaaaaaaaaaaaaaaa

SEQ ID NO: 26630 - RNA, 1745 nt, Artificial Sequence
  mRNA product Design a-1 (hSL-A100) comprising derived and/or modified sequence from LASV(LP;Clade I)__AAF86701__GPCmut4 (opt1)
aggagagucccgcagucggcguccagcggcucugcuuguucgugugugugucguugcaggccuuauucaagcuuaccaugggccagaucaucaccuucuuccaggaggugccccacgucaucgaggaggugaugaacaucgugcugaucgcccucagccugcuggccauccucaaggggcuguacaacaucgcgaccugcggcaucaucgggcuggucgccuuccucuuccugugcggcaaguccugcagccugacgcucaagggcggguacgagcugcagacccuggagcucaacauggagacccugaacaugugcaugccgcuguccugcacgaagaacagcucccaccacuacauccgcgugggcaacgagaccgggcucgagcugacccugaccaacacgagcaucaucaaccacaaguucugcaaccucuccgacgcccacaagaagaaccuguacgaccacgcccugaugagcaucaucuccaccuuccaccucagcauccccaacuucaaccaguacgaggccauguccugcgacuucaacggcgggaagaucagcgugcaguacaaccugucccacagcuacgcgggcgacgccgccgagcacugcgggaccgucgccaacggcgugcugcagaccuucaugcggauggcguggggcgggcgcuacaucgcccucgacuccggcaaggggaacugggacugcaucaugacgagcuaccaguaccugaucauccagaacaccaccugggaggaccacugccaguucucccggcccagccccaucggcuaccugggccuccugucccagcgcacccgggacaucuacaucagccgccggcgccgggggacguucaccuggacccugagcgacuccgagggcaacgagacccccgggggcuacugccugacgcgcuggaugcucaucgaggccgagcugaagugcuucgggaacaccgccguggccaagugcaacgagaagcacgacgaggaguucugcgacaugcugcggcuguucgacuucugcaagcaggcgauccgccggcugaaggcccccgcccagaugagcauccagcugaucaacaaggccgucaacgcccucaucaacgaccagcugaucaugaagaaccaccuccgcgacaucaugggcauccccuacugcaacuacuccaaguacugcuaccucaaccacaccagcuccggccggaccagccugcccaagugcugccugaucuccaacgggagcuaccucaacgagacgcaguucuccgacgacaucgagcagcaggcggacaacaugaucaccgagaugcugcagaaggaguacaucgagcgccagggcaagaccccgcuggggcucguggacaucuucaucuucagcaccuccuucuaccugaucagcaucuuccugcaccugaucaagaucccgacgcaccggcacaucgugggcaagcccugccccaagccccaccgccucaaccacaugggggucugcuccugcggccuguacaagcacccgggcgugcccaccaaguggaagcggugaggacuagucccuguucccagagcccacuuuuuuuucuuuuuuugaaauaaaauagccugucuuucagaucucaaaggcucuuuucagagccaccaaaaaaaaaaaaaaaaaaaaaaaaaaaaaaaaaaaaaaaaaaaaaaaaaaaaaaaaaaaaaaaaaaaaaaaaaaaaaaaaaaaaaaaaaaaaaaaaaaaaa

SEQ ID NO: 26631 - RNA, 1745 nt, Artificial Sequence
  mRNA product Design a-1 (hSL-A100) comprising derived and/or modified sequence from LASV(803213;Clade II)__AAF86703__GPCmut4 (opt1)
aggagagucccgcagucggcguccagcggcucugcuuguucgugugugugucguugcaggccuuauucaagcuuaccaugggccagaucaucaccuucuuccaggaggugccccacgucaucgaggaggugaugaacaucgugcugaucgcccucagccugcuggccauccucaaggggaucuacaacgucgcgaccugcggccuguucgggcugaucuccuuccuccugcugugcggccgcagcugcuccgugacguacaaggggguguacgagcuccagacccuggagcugaacauggccaaccucaacaugugcaugccgcugagcugcaccaagaacaacucccaccacuacaucauggucggcaacgagacgggccuggagcucacccugaccaacaccagcaucaucaaccacaaguucugcaaccuguccgacgcccacaagaagaaccucuacgaccacgcccugaugagcaucaucuccacguuccaccugagcauccccaacuucaaccaguacgaggccauguccugcgacuucaacgggggcaagaucagcgugcaguacaaccucucccacagcuucgcgguggacgccgccaaccacugcgggaccaucgccaacggcguccugcagaccuucaugcggauggcguggggcggguccuacaucgcccuggacagcggcaaggggaacugggacugcaucaugaccuccuaccaguaccucaucauccagaacacgaccugggaggaccacugccaguucagccgccccucccccaucggcuaccuggggcugcucagccagcggacccgcgacaucuacaucagccggcgccgccggggcaccuucacguggacccucuccgacagcgagggcaacgaggcccccgggggcuacugccugacccgguggaugcugaucgaggccgagcucaagugcuucgggaacaccgccguggcgaagugcaacgagaagcacgacgaggaguucugcgacaugcugcgccuguucgacuucugcaagcaggccaucaagcggcucaagacgcccgcccagauguccauccagcugaucaacaaggccgugaacgcccugaucaacgaccagcucaucaugaagaaccaccuccgcgacaucaugggcauccccuacugcaacuacagccgguacugcuaccugaaccacaccgucaccgggaagaccucccugccccgcugcugccuggugagcaacggcuccuaccugaacgagacgcacuucagcgacgacaucgagcagcaggcggacaacaugaucaccgagaugcuccagaaggaguacauggaccggcagggcaagaccccgcuggggcugguggaccucuucgucuucuccaccagcuucuaccugaucuccaucuuccugcaccuggugaagaucccgacgcaccgccacaucgugggcaagcccugccccaagccccaccggcucaaccacauggggaucugcagcugcggccuguacaagcacccggggguccccgugaaguggaagcgcugaggacuagucccuguucccagagcccacuuuuuuuucuuuuuuugaaauaaaauagccugucuuucagaucucaaaggcucuuuucagagccaccaaaaaaaaaaaaaaaaaaaaaaaaaaaaaaaaaaaaaaaaaaaaaaaaaaaaaaaaaaaaaaaaaaaaaaaaaaaaaaaaaaaaaaaaaaaaaaaaaaaaa

SEQ ID NO: 26632 - RNA, 1745 nt, Artificial Sequence
  mRNA product Design a-1 (hSL-A100) comprising derived and/or modified sequence from LASV(GA391;Clade III)__CAA36645__GPCmut4 (opt1)
aggagagucccgcagucggcguccagcggcucugcuuguucgugugugugucguugcaggccuuauucaagcuuaccaugggccagaucgugaccuucuuccaggaggucccccacgugaucgaggaggugaugaacaucguccugaucgcccucagcauccuggccauccugaaggggcucuacaacguggcgaccugcggccugaucgggcuggugacguuccuccugcuguccggccgcagcugcucccucaucuacaaggggaccuacgagcugcagacccuggagcucaacauggagacccugaacaugugcaugccgcugagcugcaccaagaacaacucccaccacuacauccgggucggcaacgagaccggccucgagcugacccugacgaacaccagcauccucaaccacaaguucugcaaccuguccgacgcccacaagcgcaaccuguacgaccacagccucauguccaucaucagcaccuuccaccuguccauccccaacuucaaccaguacgaggccaugagcugcgacuucaacgggggcaagaucaccgugcaguacaaccugucccacagcuucgccguggacgccgcggggcacugcggcacgcucgccaacgggguccugcagaccuucaugcggauggccuggggcggcuccuacaucgcccuggacagcgggcgcggcaacugggacugcaucaugaccuccuaccaguaccucaucauccagaacaccacgugggacgaccacugccaguucagccggcccucccccaucggguaccugggccugcucagccagcgcacccgggacaucuacaucagccgccggcgccggggcaccuucaccuggacgcucuccgacagcgaggggaacgagaccccgggcggguacugccugacccgcuggaugcugaucgaggcggagcucaagugcuucggcaacaccgccguggccaagugcaacgagaagcacgacgaggaguucugcgacaugcugcggcuguucgacuucugcaagcaggccauccgccggcucaagacgcccgcccagauguccauccagcugaucaacaaggcggugaacgcccugaucaacgaccagcucaucaugaagaaccaccuccgcgacaucauggggauccccuacugcaacuacagccgguacugcuaccugaaccacaccuccaccggcaagaccagccugccccgcugcugccugaucuccaacggcagcuaccugaacgagacgaaguucuccgacgacaucgagcagcaggccgacaacaugaucaccgagaugcuccagaaggaguacaucgaccggcaggggaagacgccccugggccuggucgaccuguucguguucagcaccuccuucuaccucaucagcaucuuccugcaccuggugaagaucccgacccaccgccacaucgucgggaagcccugccccaagccccaccggcucaaccacaugggcaucugcuccugcgggcuguacaagcagccgggcgugcccgugcgcuggaagcggugaggacuagucccuguucccagagcccacuuuuuuuucuuuuuuugaaauaaaauagccugucuuucagaucucaaaggcucuuuucagagccaccaaaaaaaaaaaaaaaaaaaaaaaaaaaaaaaaaaaaaaaaaaaaaaaaaaaaaaaaaaaaaaaaaaaaaaaaaaaaaaaaaaaaaaaaaaaaaaaaaaaaa

SEQ ID NO: 26633 - RNA, 1748 nt, Artificial Sequence
  mRNA product Design a-1 (hSL-A100) comprising derived and/or modified sequence from LASV(AV;Clade V)__CCA30314__GPCmut4 (opt1)
aggagagucccgcagucggcguccagcggcucugcuuguucgugugugugucguugcaggccuuauucaagcuuaccaugggccagaucgugaccuucuuccaggaggucccccacgugaucgaggaggugaugaacaucguccugaucgcccucagcauccuggccgugcugaaggggcucuacaacaucgcgaccugcggccugaucgggcugaucacguuccuccugcugugcggccgcuccugcagcuccaaccucuacaaggggguguacgagcugcagagccuggaccucaacauggagacccugaacaugugcaugccgcuguccugcaccaagaacaacagccaccacuacauccgggucggcaacgacacgggccucgagcugacccugaccaacaccuccauccucaaccacaaguucugcaaccugagcgacgcccacaagaaggaccuguacgaccacgcccucauguccaucaucagcacguuccaccuguccauccccaacuucaaccaguacgaggccaugagcugcgacuucaacgggggcaagaucuccgugcaguacaaccugagccacuccuacgccaucgacgcggccaaccacugcgggaccguggccaacggcauccuccagaccuucaugcgcauggccuggggcgggagcuacaucgcgcuggacuccggccgggggaacugggacugcaucaugaccagcuaccaguaccugaucauccagaacacgaccugggagaaccacugccaguucucccgccccagccccaucggcuaccucgggcugcugagccagcggacccgcgacaucuacaucucccggcgccgccggggcaccuucacguggacccugagcgacuccgagggcaacgccacccccgggggcuacugccucacccgguggaugcugaucgaggccgagcugaagugcuucgggaacacggccgucgccaagugcaacgagaagcacgacgaggaguucugcgacaugcuccgccuguucgacuucugcaagcaggcgaucagccggcugaagucccccgcccagaugagcauccagcucaucaacaaggccgugaacgcccugaucaacgaccagcugaucaugaagaaccaccuccgcgacaucaugggcauccccuacugcaacuacuccaaguacugcuaccugaaccacaccaucaccgggaagaccagccugcccaagugcugccucguguccaacggcagcuaccugaacgagacgcacuucuccgacgacaucgagcagcaggccgacaacaugaucaccgagaugcugcagaaggaguacauggagcggcagggcaagaccccgcucgggcuggucgaccuguucguguucagcaccuccuucuaccugaucagcaucuuccuccgccuggugaagaucccgacgcaccggcacaucgucggcaagcccugccccaagccccaccgccugaaccacauggggaucugcuccugcggccucuacaagcagccgggggugcccgugcgguggaagcgcugaggacuagucccuguucccagagcccacuuuuuuuucuuuuuuugaaauaaaauagccugucuuucagaucucaaaggcucuuuucagagccaccaaaaaaaaaaaaaaaaaaaaaaaaaaaaaaaaaaaaaaaaaaaaaaaaaaaaaaaaaaaaaaaaaaaaaaaaaaaaaaaaaaaaaaaaaaaaaaaaaaaaa

SEQ ID NO: 26634 - RNA, 1745 nt, Artificial Sequence
  mRNA product Design a-1 (hSL-A100) comprising derived and/or modified sequence from LASV(Togo/2016/7082;Clade VI)__AMR44577__GPCmut4 (opt1)
aggagagucccgcagucggcguccagcggcucugcuuguucgugugugugucguugcaggccuuauucaagcuuaccaugggccagaucaucaccuucuuccaggaggugccccacgucaucgaggaggugaugaacaucgugcugaucgcccucagccugcuggccauccucaagggggucuacaacguggcgaccugcggcaucaucgggcuggugacguuccuguuccucugcggccgcuccugcagccugaucuacaagggguccuacgagcugcagacccucgagcugaacauggagacccugaacaugugcaugccgcucagcugcacgaagaacuccagccaccacuacauccgggucggcaacgagaccggccuggagcugacccucaccaacacguccaucaucaaccacaaguucugcaaccugagcgacgcccacaagcgcaaccuguacgaccacgcccucauguccauccugagcaccuuccaccuguccauccccaacuucaaccaguacgaggccaugagcugcgacuucaacgggggcaagaucuccgugcaguacaaccucagccacgccuacgcgguggacgccgccgagcacugcgggaccgucgccaacggcgugcugcagaccuucaugcggauggcguggggcggguccuacaucgcccuggacagcggccgcgggaacugggacugcaucaugacguccuaccaguaccucaucauccagaacaccaccugggaggaccacugccaguucagccggcccucccccaucggcuaccuggggcugcucagccagcgcacccgggacaucuacaucagccgccggcgccggggcacguucaccuggacccucuccgacagcgagggcaacgagacccccgggggcuacugccugacgcgcuggaugcugaucgaggccgagcucaagugcuucgggaacaccgccguggccaagugcaacgagaagcacgacgaggaguucugcgacaugcugcggcuguucgacuucugcaagcaggcgauccagcgccucaagucccccgcccagaugagcauccagcugaucaacaaggccgucaacgcccugaucaacgaccagcucaucaugaagaaccaccuccgggacaugaugggcauccccuacugcaacuacuccaaguacugcuaccugaaccacaccagcuccgggcgcaccagccugcccaagugcugccugguguccaacggcagcuaccugaacgagacgcacuucuccgacgacaucgagcagcaggccgacaacaugaucaccgagaugcuccagaaggaguacaucgaccggcagggcaagaccccgcuggggcugguggaccucuucgucuucagcaccuccuucuaccugaucagcaucuuccugcaccugaucaagaucccgacgcaccgccacaucgugggcaagcccugccccaagccccaccggcucaaccacauggggaucugcuccugcggccuguacaagcagccgggggugcccacccgcuggaagcggugaggacuagucccuguucccagagcccacuuuuuuuucuuuuuuugaaauaaaauagccugucuuucagaucucaaaggcucuuuucagagccaccaaaaaaaaaaaaaaaaaaaaaaaaaaaaaaaaaaaaaaaaaaaaaaaaaaaaaaaaaaaaaaaaaaaaaaaaaaaaaaaaaaaaaaaaaaaaaaaaaaaaa

SEQ ID NO: 26635 - RNA, 1745 nt, Artificial Sequence
  mRNA product Design a-1 (hSL-A100) comprising derived and/or modified sequence from LASV(KAK-428;Clade n.d. (VII))__ANH09740__GPCmut4 (opt1)
aggagagucccgcagucggcguccagcggcucugcuuguucgugugugugucguugcaggccuuauucaagcuuaccaugggccagaucgugaccuucuuccaggaggucccccacgugaucgaggaggugaugaacaucguccugaucgcccucagccugcuggccauccucaaggggcuguacaacuucgcgaccugcggcgugaucgggcugaucacguuccuccugcugugcggccgcuccugcagcgccaccuacaaggggcaguacgagcuccagacccuggagcugaacauggagucccucaacaugugcaugccgcugagcugcacgaagaacaacucccaccacuacauccgggccggcaacaacaccggccuggagcucacccugaccaacacgagcaucaucucccacaaguucugcaaccugagcgacgcccacaagaagaaccucuacgaccacacccugauguccaucaucaccaccuuccaccugagcauccccaacuucaaccaguacgaggccauguccugcgacuucaacgggggcaagaucagcauccaguacaaccucucccacagcuacgcgggggacgccgcccagcacugcggcacgguggccaacgggguccugcagaccuucaugcgcauggcguggggcggcuccuaccuggcccucgacagcgggcggcgcggcugggacugcaucaucuccagcuaccaguaccugaucauccagaacaccaccugggacgaccacugccaguucucccggcccagccccaucggguaccugggcuucgugagccagaagacgcgcgacaucuacaucucccggcgccgccggggcaccuucaccuggacccugagcgacuccgaggggcacgacaugccgggcggguacugccucacgcgguggaugcugaucgaggccgaccugaagugcuucggcaacaccgccguggccaagugcaacgagaagcacgacgaggaguucugcgacauguggcgccucuucgacuucugcaagcaggcgauccagcggcugaaggcccccgcccagaugaacauccagcugaucaacaaggccgucaacgcccucaucaacgaccagcugaugaugaagaaccaccuccgcgacaucauggggauccccuacugcaacuacagcaaguucugcuaccugaacaacaccaccacgggccggaccucccugccccgcugcugccugaucagcaacggcuccuaccucaacgagacccacuucagcgacgacaucgagcagcaggcggacaacaugaucaccgagaugcugcagaaggaguacauggaccggcaggggaagacgccccugggccucguggaccuguucguguucuccaccagcuucuaccugaucaccaucuuccuccaccuggucaagaucccgacccaccgccacaucguggggaagcccugccccaagccccaccggcugaaccacaugggcaucugcuccugcgggcuguacaagcagccgggcgugcccguccgcuggaagcggugaggacuagucccuguucccagagcccacuuuuuuuucuuuuuuugaaauaaaauagccugucuuucagaucucaaaggcucuuuucagagccaccaaaaaaaaaaaaaaaaaaaaaaaaaaaaaaaaaaaaaaaaaaaaaaaaaaaaaaaaaaaaaaaaaaaaaaaaaaaaaaaaaaaaaaaaaaaaaaaaaaaaa

SEQ ID NO: 26636 - RNA, 1745 nt, Artificial Sequence; identical to SEQ ID NO: 26630
  mRNA product Design a-1 (hSL-A100) comprising derived and/or modified sequence from LASV(Pinneo-NIG-1969;Clade I)__AIT17836__GPCmut4 (opt1)

SEQ ID NO: 26637 - RNA, 1745 nt, Artificial Sequence
  mRNA product Design a-1 (hSL-A100) comprising derived and/or modified sequence from LASV(ISTH0009-NIG-2011;Clade II)__AIT17404__GPCmut4 (opt1)
aggagagucccgcagucggcguccagcggcucugcuuguucgugugugugucguugcaggccuuauucaagcuuaccaugggccagaucaucaccuucuuccaggaggugccccacgucaucgaggaggugaugaacaucgugcugaucgcccucagccugcuggccauccucaaggggaucuacaacgucgcgaccugcggccuguucgggcugguguccuuccuccugcugugcggccgcagcugcuccacgaccuacaaggggguguacgagcuccagacccuggagcuggacauggccagccucaacaugugcaugccgcuguccugcacgaagaacaacagccaccacuacaucauggucggcaacgagaccggccuggagcucacccugaccaacacguccaucaucaaccacaaguucugcaaccugagcgacgcccacaagaagaaccucuacgaccacgcccugauguccaucaucagcaccuuccaccuguccauccccaacuucaaccaguacgaggccaugagcugcgacuucaacgggggcaagaucuccgugcaguacaaccucagccacgcguacgccguggacgccgccaaccacugcgggaccaucgcgaacggcguccugcagaccuucaugcggauggccuggggcggguccuacaucgcccuggacagcggcaagggguccugggacugcaucaugacgagcuaccaguaccucaucauccagaacaccaccugggaggaccacugccaguucucccgccccagccccaucggcuaccuggggcugcucagccagcggacccgcgacaucuacaucucccggcgccgccggggcacguucaccuggacccucagcgacuccgagggcaacgagacccccgggggcuacugccugacgcgguggaugcugaucgaggccgagcucaagugcuucgggaacaccgccguggcgaagugcaacgagaagcacgacgaggaguucugcgacaugcugcgccuguucgacuucugcaagcaggccauccggcgccucaagacccccgcccagaugagcauccagcugaucaacaaggccgugaacgcccugaucaacgaccagcucaucaugaagaaccaccuccgggacaucaugggcaucccguacugcaacuacuccaaguacugcuaccugaaccacaccgucacggggaagaccagccugccccgcugcugccugguguccaacggcagcuaccugaacgagacccacuucuccgacgacaucgagcagcaggcggacaacaugaucaccgagcuccugcagaaggaguacauggaccggcagggcaagacgccccuggggcucguggaccuguucgucuucagcaccuccuucuaccugaucagcaucuuccugcaccucaucaagaucccgacccaccgccacaucaccggcaagcccugccccaagccccaccggcugaaccacauggggaucugcuccugcggccuguacaagcacccgggggugcccgugaaguggaagcgcugaggacuagucccuguucccagagcccacuuuuuuuucuuuuuuugaaauaaaauagccugucuuucagaucucaaaggcucuuuucagagccaccaaaaaaaaaaaaaaaaaaaaaaaaaaaaaaaaaaaaaaaaaaaaaaaaaaaaaaaaaaaaaaaaaaaaaaaaaaaaaaaaaaaaaaaaaaaaaaaaaaaaa

SEQ ID NO: 26638 - RNA, 1745 nt, Artificial Sequence
  mRNA product Design a-1 (hSL-A100) comprising derived and/or modified sequence from LASV(ISTH2010-NIG-2012;Clade II)__AIT17482__GPCmut4 (opt1)
aggagagucccgcagucggcguccagcggcucugcuuguucgugugugugucguugcaggccuuauucaagcuuaccaugggccagaucaucaccuucuuccaggaggugccccacgucaucgaggaggugaugaacaucgugcugaucgcccucagccugcuggccauccucaaggggaucuacaacgucgcgaccugcggccuguucgggcugguguccuuccuccugcugugcggccgcagcugcuccacgaccuacaaggggguguacgagcuccagacccuggagcuggacauggccagccucaacaugugcaugccgcuguccugcacgaagaacaacagccaccacuacaucauggucggcaacgagaccggccuggagcucacccugaccaacacguccaucaucaaccacaaguucugcaaccugagcgacgcccacaagaagaaccucuacgaccacgcccugauguccaucaucagcaccuuccaccuguccauccccaacuucaaccaguacgaggccaugagcugcgacuucaacgggggcaagaucuccgugcaguacaaccucagccacgcguacgccguggacgccgccaaccacugcgggaccaucgcgaacggcguccugcagaccuucaugcggauggccuggggcggguccuacaucgcccuggacagcggcaagggguccugggacugcaucaugacgagcuaccaguaccucaucauccagaacaucaccugggaggaccacugccaguucucccgccccagccccaucggcuaccuggggcugcucagccagcggacccgcgacaucuacaucucccggcgccgccggggcaccuucacguggacccucagcgacuccgagggcaacgagacccccgggggcuacugccugacccgguggaugcugaucgaggccgagcucaagugcuucgggaacacggccguggcgaagugcaacgagaagcacgacgaggaguucugcgacaugcugcgccuguucgacuucugcaagcaggccauccggcgccucaagacccccgcccagaugagcauccagcugaucaacaaggccgugaacgcccugaucaacgaccagcucaucaugaagaaccaccuccgggacaucaugggcauccccuacugcaacuacuccaaguacugcuaccugaaccacaccgucaccgggaagacgagccugccccgcugcugccugguguccaacggcagcuaccugaacgagacccacuucuccgacgacaucgagcagcaggcggacaacaugaucaccgagcuccugcagaaggaguacaucgaccggcagggcaagaccccgcuggggcucguggaccuguucgucuucagcacguccuucuaccugaucagcaucuuccugcaccucgugaagaucccgacccaccgccacguggucggcaagcccugccccaagccccaccggcugaaccacauggggaucugcuccugcggccuguacaagcacccgggggugcccgugaaguggaagcgcugaggacuagucccuguucccagagcccacuuuuuuuucuuuuuuugaaauaaaauagccugucuuucagaucucaaaggcucuuuucagagccaccaaaaaaaaaaaaaaaaaaaaaaaaaaaaaaaaaaaaaaaaaaaaaaaaaaaaaaaaaaaaaaaaaaaaaaaaaaaaaaaaaaaaaaaaaaaaaaaaaaaaa

SEQ ID NO: 26639 - RNA, 1745 nt, Artificial Sequence
  mRNA product Design a-1 (hSL-A100) comprising derived and/or modified sequence from LASV(Lassa virus/H.sapiens-wt/NGA/2015/ISTH_0543;Clade II)__AVO03639__GPCmut4 (opt1)
aggagagucccgcagucggcguccagcggcucugcuuguucgugugugugucguugcaggccuuauucaagcuuaccaugggccagaucaucaccuucuuccaggaggugccccacgucaucgaggaggugaugaacaucgugcugaucgcccucagccugcuggccauccucaaggggaucuacaacgucgcgaccugcggccuguucgggcugguguccuuccuccugcugugcggccgcagcugcuccacgaccuacaaggggguguacgagcuccagacccuggagcuggacauggccaaccucaacaugugcaugccgcugagcugcacgaagaacaacucccaccacuacaucauggucggcaacgagaccggccuggagcucacccugaccaacacgagcaucaucaaccacaaguucugcaaccuguccgacgcccacaagaagaaccucuacgaccacgcccugaugagcaucaucuccaccuuccaccugagcauccccaacuucaaccaguacgaggccauguccugcgacuucaacgggggcaagaucagcgugcaguacaaccucucccacaccuacgcgguggacgccgccaaccacugcgggaccaucgccaacggcguccugcagacguucaugcggauggcguggggcgggagcuacaucgcccuggacuccggcaaggggagcugggacugcaucaugaccuccuaccaguaccucgugauccagaacaccaccugggaggaccacugccaguucagccgccccucccccaucggcuaccuggggcugcucagccagcggacgcgcgacaucuacaucagccggcgccgccggggcaccuucaccuggacccucuccgacagcgagggcaacgagacgcccgggggcuacugccugacccgguggaugcugaucgaggccgagcucaagugcuucgggaacaccgccguggccaagugcaacgagaagcacgacgaggaguucugcgacaugcugcgccuguucgacuucugcaagcaggcgauccggcgccucaagacccccgcccagauguccauccagcugaucaacaaggccgucaacgcccugaucaacgaccagcucaucaugaagaaccaccuccgggacaucaugggcauccccuacugcaacuacagcaaguacugcuaccugaaccacacggugaccgggaagaccucccugccccgcugcugccuggugagcaacggcuccuaccugaacgagacccacuucagcgacgacaucgagcagcaggccgacaacaugaucacggagcuccugcagaaggaguacaucgaccggcagggcaagaccccgcuggggcucgucgaccuguucguguucuccaccagcuucuaccugaucuccaucuuccugcaccucgugaagaucccgacccaccgccacaucacgggcaagcccugccccaagccccaccggcugaaccacauggggaucugcagcugcggccuguacaagcacccggggguccccgugaaguggaagcgcugaggacuagucccuguucccagagcccacuuuuuuuucuuuuuuugaaauaaaauagccugucuuucagaucucaaaggcucuuuucagagccaccaaaaaaaaaaaaaaaaaaaaaaaaaaaaaaaaaaaaaaaaaaaaaaaaaaaaaaaaaaaaaaaaaaaaaaaaaaaaaaaaaaaaaaaaaaaaaaaaaaaaa

SEQ ID NO: 26640 - RNA, 1745 nt, Artificial Sequence
  mRNA product Design a-1 (hSL-A100) comprising derived and/or modified sequence from LASV(Lassa virus/H.sapiens-wt/NGA/2016/ISTH_0009;Clade II)__AVO03571__GPCmut4 (opt1)
aggagagucccgcagucggcguccagcggcucugcuuguucgugugugugucguugcaggccuuauucaagcuuaccaugggccagaucaucaccuucuuccaggaggugccccacgucaucgaggaggugaugaacaucgugcugaucgcccucagccugcuggccauccucaaggggaucuacaacgucgcgaccugcggccugcuggggcucguguccuuccugcugcucugcggccgcagcugcuccacgaccuacaaggggguguacgagcugcagacccuggagcucgacauggccagccugaacaugugcaugccgcuguccugcacgaagaacaacagccaccacuacaucauggucggcaacgagaccggccucgagcugacccugaccaacacguccaucaucaaccacaaguucugcaaccucagcgacgcccacaagaagaaccuguacgaccacgcccugauguccaucaucagcaccuuccaccucuccauccccaacuucaaccaguacgaggccaugagcugcgacuucaacgggggccggaucuccgugcaguacaaccugagccacuccuacgcgguggacgccgccaaccacugcgggaccaucgccaacggcguccugcagaccuucaugcgcauggcguggggcgggagcuacaucgcccucgacuccggcaaggggagcugggacugcaucaugacguccuaccaguaccugaucauccagaacaccaccugggaggaccacugccaguucagccggcccagccccaucggcuaccuggggcuccugucccagcgcacccgggacaucuacaucagccgccggcgccggggcacguucaccuggacccuguccgacagcgagggcaacgagacccccgggggcuacugccugacgcgcuggaugcucaucgaggccgagcugaagugcuucgggaacaccgccguggccaagugcaacgagaagcacgacgaggaguucugcgacaugcugcggcuguucgacuucugcaagcaggcgauccgccggcugaagacccccgcccagauguccauccagcugaucaacaaggccgugaacgcccucaucaacgaccagcugaucaugaagaaccaccuccgcgacaucaugggcaucccguacugcaacuacagcaaguacugcuaccucaaccacaccgucacggggaagaccucccugccccggugcugccuggugagcaacggcuccuaccucaacgagacccacuucagcgacgacaucgagcagcaggccgacaacaugaucaccgagcugcugcagaaggaguacaucgaccgccagggcaagacgccccucgggcugguggaccuguucgucuucuccaccagcuucuaccugaucuccaucuuccuccaccuggugaagaucccgacccaccggcacaucaccggcaagcccugccccaagccccaccgccugaaccacauggggaucugcagcugcggccucuacaaccacccgggggugcccgucaaguggaagcggugaggacuagucccuguucccagagcccacuuuuuuuucuuuuuuugaaauaaaauagccugucuuucagaucucaaaggcucuuuucagagccaccaaaaaaaaaaaaaaaaaaaaaaaaaaaaaaaaaaaaaaaaaaaaaaaaaaaaaaaaaaaaaaaaaaaaaaaaaaaaaaaaaaaaaaaaaaaaaaaaaaaaa

SEQ ID NO: 26641 - RNA, 1745 nt, Artificial Sequence
  mRNA product Design a-1 (hSL-A100) comprising derived and/or modified sequence from LASV(Lassa virus/H.sapiens-wt/NGA/2016/ISTH_0017;Clade II)__AVO03567__GPCmut4 (opt1)
aggagagucccgcagucggcguccagcggcucugcuuguucgugugugugucguugcaggccuuauucaagcuuaccaugggccagaucaucaccuucuuccaggaggugccccacgucaucgaggaggugaugaacaucgugcugaucgcccucagccugcuggccauccucaaggggaucuacaacgucgcgaccugcggccuguucgggcugguguccuuccuccugcugugcggccgcagcugcuccacgaccuacaaggggguguacgagcuccagacccuggagcuggacauggccagccucaacaugugcaugccgcuguccugcacgaagaacaacagccaccacuacaucauggucggcaacgagaccggccuggagcucacccugaccaacacguccaucaucaaccacaaguucugcaaccugagcgacgcccacaagaagaaccucuacgaccacgcccugauguccaucaucagcaccuuccaccuguccauccccaacuucaaccaguacgaggccaugagcugcgacuucaacgggggcaagaucuccgugcaguacaaccucagccacaccuacgcgaucgacgccgccaaccacugcgggaccaucgccaacggcgugcugcagacguucaugcggauggcguggggcggguccuacaucgcccuggacagcggcaagggguccugggacugcaucaugaccagcuaccaguaccucaucauccagaacaccaccugggaggaccacugccaguucucccgccccagccccaucggcuaccuggggcugcucagccagcggacgcgcgacaucuacaucucccggcgccgccggggcaccuucaccuggacccucagcgacuccgagggcaacgagacgcccgggggcuacugccugacccgguggaugcugaucgaggccgagcucaagugcuucgggaacaccgccgucgccaagugcaacgagaagcacgacgaggaguucugcgacaugcugcgccuguucgacuucugcaagcaggcgauccggcgccucaagacccccgcccagaugagcauccagcugaucaacaaggccgugaacgcccugaucaacgaccagcucaucaugaagaaccaccuccgggacaucaugggcauccccuacugcaacuacuccaaguacugcuaccugaaccacacggugaccgggaagaccagccugccccgcugcugccuggucuccaacggcagcuaccugaacgagacccacuucuccgacgacaucgagcagcaggccgacaacaugaucacggagcuccugcagaaggaguacauggaccggcagggcaagaccccgcuggggcucguggaccuguucguguucagcaccuccuucuaccugaucagcaucuuccugcaccucguccgcaucccgacccaccggcacgugaucggcaagcccugccccaagccccaccgccugaaccacauggggaucugcuccugcggccuguacaagcacccgggggugcccgucaaguggaagcggugaggacuagucccuguucccagagcccacuuuuuuuucuuuuuuugaaauaaaauagccugucuuucagaucucaaaggcucuuuucagagccaccaaaaaaaaaaaaaaaaaaaaaaaaaaaaaaaaaaaaaaaaaaaaaaaaaaaaaaaaaaaaaaaaaaaaaaaaaaaaaaaaaaaaaaaaaaaaaaaaaaaaa

SEQ ID NO: 26642 - RNA, 1745 nt, Artificial Sequence
  mRNA product Design a-1 (hSL-A100) comprising derived and/or modified sequence from LASV(Lassa virus/H.sapiens-wt/NGA/2018/ISTH_0959;Clade II)__AVV65099__GPCmut4 (opt1)
aggagagucccgcagucggcguccagcggcucugcuuguucgugugugugucguugcaggccuuauucaagcuuaccaugggccagaucaucaccuucuuccaggaggugccccacgucaucgaggaggugaugaacaucgugcugaucgcccucagccugcuggccauccucaaggggaucuacaacgucgugaccugcggccuguucgggcugguguccuuccuccugcugugcggccgcagcugcuccacgaccuacaagggggucuacgagcuccagacccuggagcuggacauggcgagccucaacaugugcaugccgcuguccugcacgaagaacaacagccaccacuacaucauggugggcaacgagaccggccuggagcucacccugaccaacacguccaucaucaaccacaaguucugcaaccugagcgacgcccacaagaagaaccucuacgaccacgcccugauguccaucaucagcaccuuccaccuguccauccccaacuucaaccaguacgaggccaugagcugcgacuucaacgggggcaagaucuccgugcaguacaaccucagccacgccuacgcgaucgacgccgccaaccacugcgggaccaucgccaacggcguccugcagaccuucaugcggauggcguggggcggguccuacaucgcccuggacagcggcaagggguccugggacugcaucaugacgagcuaccaguaccucaucauccagaacaccaccugggaggaccacugccaguucucccgccccagccccaucggcuaccuggggcugcucagccagcggacccgcgacaucuacaucucccggcgccgccggggcacguucaccuggacccucagcgacuccgagggcaacgagacccccgggggcuacugccugacgcgguggaugcugaucgaggccgagcucaagugcuucgggaacaccgccguggccaagugcaacgagaagcacgacgaggaguucugcgacaugcugcgccuguucgacuucugcaagcaggcgauccggcgccucaagacccccgcccagaugagcauccagcugaucaacaaggccgugaacgcccugaucaacgaccagcucaucaugaagaaccaccuccgggacaucaugggcaucccguacugcaacuacuccaaguacugcuaccugaaccacaccgucacggggaagaccagccugccccgcugcugccugguguccaacggcagcuaccugaacgagacccacuucuccgacgacaucgagcagcaggccgacaacaugaucaccgagcuccugcagaaggaguacaucgaccggcagggcaagacgccccuggggcucguggaccuguucgucuucagcaccuccuucuaccugaucagcaucuuccugcaccucgugaagaucccgacccaccgccacgugaucggcaagcccugccccaagccccaccggcugaaccacauggggaucugcuccugcggccuguacaagcacccggggguccccgugaaguggaagcgcugaggacuagucccuguucccagagcccacuuuuuuuucuuuuuuugaaauaaaauagccugucuuucagaucucaaaggcucuuuucagagccaccaaaaaaaaaaaaaaaaaaaaaaaaaaaaaaaaaaaaaaaaaaaaaaaaaaaaaaaaaaaaaaaaaaaaaaaaaaaaaaaaaaaaaaaaaaaaaaaaaaaaa

SEQ ID NO: 26643 - RNA, 1745 nt, Artificial Sequence
  mRNA product Design a-1 (hSL-A100) comprising derived and/or modified sequence from LASV(LASV003-NIG-2008;Clade II)__AIT17580__GPCmut4 (opt1)
aggagagucccgcagucggcguccagcggcucugcuuguucgugugugugucguugcaggccuuauucaagcuuaccaugggccagaucaucaccuucuuccaggaggugccccacgucaucgaggaggugaugaacaucgugcugaucgcccucagccugcuggccauccucaaggggaucuacaacgucgcgaccugcggccuguucgggcugguguccuuccuccugcugugcggccgcagcugcuccacgaccuacaaggggguguacgagcuccagacccuggagcuggacauggccagccucaacaugugcaugccgcuguccugcacgaagaacaacagccaccacuacaucauggucggcaacgagaccggccuggagcucacccugaccaacacguccaucaucaaccacaaguucugcaaccugagcgacgcccacaagaagaaccucuacgaccacgcccugauguccaucaucagcaccuuccaccuguccauccccaacuucaaccaguacgaggccaugagcugcgacuucaacgggggcaagaucuccgugcaguacaaccucagccacaccuacgcgguggacgccgccaaccacugcgggaccaucgccaacggcguccugcagacguucaugcggauggcguggggcggguccuacaucgcccuggacagcggcaagggguccugggacugcaucaugaccagcuaccaguaccucaucauccagaacaccaccugggaggaccacugccaguucucccgccccagccccaucggcuaccuggggcugcucagccagcggacgcgcgacaucuacaucucccggcgccgccggggcaccuucaccuggacccucagcgacuccgagagcaacgagacgccgggcggguacugccugacccgguggaugcugaucgaggccgagcucaagugcuucggcaacaccgccguggccaagugcaacgagaagcacgacgaggaguucugcgacaugcugcgccuguucgacuucugcaagcaggcgauccggcgccucaaggcccccgcccagauguccauccagcugaucaacaaggccgugaacgcccugaucaacgaccagcucaucaugaagaaccaccuccgggacaucauggggauccccuacugcaacuacagcaaguacugcuaccugaaccacaccgucacgggccgcaccucccugccccggugcugccuggugagcaacggguccuaccugaacgagacccacuucagcgacgacaucgagcagcaggcggacaacaugaucaccgagcuccugcagaaggaguacauggaccgccagggcaagacgccccugggccucguggaccuguucgucuucuccaccagcuucuaccugaucuccaucuuccugcaccucgugaagaucccgacccaccggcacgugaucgggaagcccugccccaagccccaccgccugaaccacaugggcaucugcagcugcgggcuguacaagcacccgggcguccccgugaaguggaagcggugaggacuagucccuguucccagagcccacuuuuuuuucuuuuuuugaaauaaaauagccugucuuucagaucucaaaggcucuuuucagagccaccaaaaaaaaaaaaaaaaaaaaaaaaaaaaaaaaaaaaaaaaaaaaaaaaaaaaaaaaaaaaaaaaaaaaaaaaaaaaaaaaaaaaaaaaaaaaaaaaaaaaa

SEQ ID NO: 26644 - RNA, 1745 nt, Artificial Sequence
  mRNA product Design a-1 (hSL-A100) comprising derived and/or modified sequence from LASV(LASV035-NIG-2009;Clade II)__AIT17588__GPCmut4 (opt1)
aggagagucccgcagucggcguccagcggcucugcuuguucgugugugugucguugcaggccuuauucaagcuuaccaugggccagaucaucaccuucuuccaggaggugccccacgucaucgaggaggugaugaacaucgugcugaucgcccucagccugcuggccauccucaaggggaucuacaacgucgcgaccugcggccuguucgggcugguguccuuccuccugcugugcggccgcagcugcuccacgaccuacaaggggguguacgagcuccagacccuggagcuggacauggccagccucaacaugugcaugccgcuguccugcacgaagaacaacagccaccacuacaucauggucggcaacgagaccggccuggagcucacccugaccaacacguccaucaucaaccacaaguucugcaaccugagcgacgcccacaagaagaaccucuacgaccacgcccugauguccaucaucagcaccuuccaccuguccauccccaacuucaaccaguacgaggccaugagcugcgacuucaacgggggcaagaucuccgugcaguacaaccucagccacgcguacgccguggacgccgccaaccacugcgggaccaucgcgaacggcguccugcagaccuucaugcggauggccuggggcggguccuacaucgcccuggacagcggcaagggguccugggacugcaucaugacgagcuaccaguaccucaucauccagaacaccaccugggaggaccacugccaguucucccgccccagccccaucggcuaccuggggcugcucagccagcggacccgcgacaucuacaucucccggcgccgccggggcacguucaccuggacccucagcgacuccgagggcaacgagacccccgggggcuacugccugacgcgguggaugcugaucgaggccgagcucaagugcuucgggaacaccgccguggcgaagugcaacgagaagcacgacgaggaguucugcgacaugcugcgccuguucgacuucugcaagcaggccauccggcgccucaaggcccccgcccagaugagcauccagcugaucaacaaggccgugaacgcgcugaucaacgaccagcucaucaugaagaaccaccuccgggacaucaugggcauccccuacugcaacuacuccaaguacugcuaccugaaccacaccgucaccgggaagacgagccugccccgcugcugccugguguccaacggcagcuaccugaacgagacccacuucuccgacgacaucgagcagcaggccgacaacaugaucaccgagcuccugcagaaggaguacaucgaccggcagggcaagaccccgcuggggcucguggaccuguucgucuucagcacguccuucuaccugaucagcaucuuccugcaccucgugaagaucccgacccaccgccacgugaucggcaagcccugccccaagccccaccggcugaaccacauggggaucugcuccugcggccuguacaagcacccggggguccccgugaaguggaagcgcugaggacuagucccuguucccagagcccacuuuuuuuucuuuuuuugaaauaaaauagccugucuuucagaucucaaaggcucuuuucagagccaccaaaaaaaaaaaaaaaaaaaaaaaaaaaaaaaaaaaaaaaaaaaaaaaaaaaaaaaaaaaaaaaaaaaaaaaaaaaaaaaaaaaaaaaaaaaaaaaaaaaaa

SEQ ID NO: 26645 - RNA, 1745 nt, Artificial Sequence
  mRNA product Design a-1 (hSL-A100) comprising derived and/or modified sequence from LASV(LASV1000-NIG-2009;Clade II)__AIT17782__GPCmut4 (opt1)
aggagagucccgcagucggcguccagcggcucugcuuguucgugugugugucguugcaggccuuauucaagcuuaccaugggccagaucaucaccuucuuccaggaggugccccacgucaucgaggaggugaugaacaucgugcugaucgcccucagccugcuggccauccucaaggggaucuacaacgucgcgaccugcggccuguucgggcugguguccuuccuccugcugugcggccgcagcugcuccacgaccuacaaggggguguacgagcuccagacccuggagcuggacauggccagccucaacaugugcaugccgcuguccugcacgaagaacaacagccaccacuacaucauggucggcaacgagaccggccuggagcucacccugaccaacacguccaucaucaaccacaaguucugcaaccugagcgacgcccacaagaagaaccucuacgaccacgcccugauguccaucaucagcaccuuccaccuguccauccccaacuucaaccaguacgaggccaugagcugcgacuucaacgggggcaagaucuccgugcaguacaaccucagccacaccuacgcgguggacgccgccaaccacugcgggaccaucgccaacggcguccugcagacguucaugcggauggcguggggcggguccuacaucgcccuggacagcggcaagggguccugggacugcaucaugaccagcuaccaguaccucaucauccagaacaccaccugggaggaccacugccaguucucccgccccagccccaucggcuaccuggggcugcucagccagcggacgcgcgacaucuacaucucccggcgccgccggggcaccuucaccuggacccucagcgacuccgagggcaacgagacgcccgggggcuacugccugacccgguggaugcugaucgaggccgagcucaagugcuucgggaacaccgccguggccaagugcaacgagaagcacgacgaggaguucugcgacaugcugcgccuguucgacuucugcaagcaggcgaucaagcggcucaagacccccgcccagaugagcauccagcugaucaacaaggccgugaacgcccugaucaacgaccagcucaucaugaagaaccaccuccgcgacaucaugggcauccccuacugcaacuacuccaaguacugcuaccugaaccacacggucaccgggaagaccagccugccccggugcugccugguguccaacggcagcuaccugaacgagacccacuucuccgacgacaucgagcagcaggccgacaacaugaucacggagcuccugcagaaggaguacaucgaccgccagggcaagaccccgcuggggcucguggaccuguucgucuucagcaccuccuucuaccugaucagcaucuuccugcaccucgugaagaucccgacccaccggcacguggucggcaagcccugccccaagccccaccgccugaaccacauggggaucugcuccugcggccuguacaagcacccgggggugcccgugaaguggaagcggugaggacuagucccuguucccagagcccacuuuuuuuucuuuuuuugaaauaaaauagccugucuuucagaucucaaaggcucuuuucagagccaccaaaaaaaaaaaaaaaaaaaaaaaaaaaaaaaaaaaaaaaaaaaaaaaaaaaaaaaaaaaaaaaaaaaaaaaaaaaaaaaaaaaaaaaaaaaaaaaaaaaaa

SEQ ID NO: 26646 - RNA, 1745 nt, Artificial Sequence
  mRNA product Design a-1 (hSL-A100) comprising derived and/or modified sequence from LASV(LASV221-NIG-2010;Clade II)__AIT17624__GPCmut4 (opt1)
aggagagucccgcagucggcguccagcggcucugcuuguucgugugugugucguugcaggccuuauucaagcuuaccaugggccagaucaucaccuucuuccaggaggugccccacgucaucgaggaggugaugaacaucgugcugaucgcccucagccugcuggccauccucaaggggaucuacaacgucgcgaccugcggccuguucgggcugguguccuuccuccugcugugcggccgcagcugcuccacgaccuacaaggggguguacgagcuccagacccuggagcuggacauggccagccucaacaugugcaugccgcuguccugcacgaagaacaacagccaccacuacaucauggucggcaacgagaccggccuggagcucacccugaccaacacguccaucaucaaccacaaguucugcaaccugagcgacgcccacaagaagaaccucuacgaccacgcccugauguccaucaucagcaccuuccaccuguccauccccaacuucaaccaguacgaggccaugagcugcgacuucaacgggggcaagaucuccgugcaguacaaccucagccacaccuacgcgaucgacgccgccaaccacugcgggaccaucgccaacggcgugcugcagacguucaugcggauggcguggggcggguccuacaucgcccuggacagcggcaagggguccugggacugcaucaugaccagcuaccaguaccucaucauccagaacaccaccugggaggaccacugccaguucucccgccccagccccaucggcuaccuggggcugcucagccagcggacgcgcgacaucuacaucucccggcgccgccggggcaccuucaccuggacccucagcgacuccgagggcaacgagacgcccgggggcuacugccugacccgguggaugcugaucgaggccgagcucaagugcuucgggaacaccgccgucgccaagugcaacgagaagcacgacgaggaguucugcgacaugcugcgccuguucgacuucugcaagcaggcgauccggcgccucaagacccccgcccagaugagcauccagcugaucaacaaggccgugaacgcccugaucaacgaccagcucaucaugaagaaccaccuccgggacaucaugggcauccccuacugcaacuacuccaaguacugcuaccugaaccacacggugaccgggaagaccagccugccccgcugcugccuggucuccaacggcagcuaccugaacgagacccacuucuccgacgacaucgagcagcaggccgacaacaugaucacggagaugcuccagaaggaguacauggaccggcagggcaagaccccgcuggggcugguggaccucuucguguucagcaccuccuucuaccugaucagcaucuuccugcaccuggucaagaucccgacccaccgccacgugaucggcaagcccugccccaagccccaccggcucaaccacauggggaucugcuccugcggccuguacaagcacccgggggugcccgucaaguggaagcgcugaggacuagucccuguucccagagcccacuuuuuuuucuuuuuuugaaauaaaauagccugucuuucagaucucaaaggcucuuuucagagccaccaaaaaaaaaaaaaaaaaaaaaaaaaaaaaaaaaaaaaaaaaaaaaaaaaaaaaaaaaaaaaaaaaaaaaaaaaaaaaaaaaaaaaaaaaaaaaaaaaaaaa

SEQ ID NO: 26647 - RNA, 1745 nt, Artificial Sequence
  mRNA product Design a-1 (hSL-A100) comprising derived and/or modified sequence from LASV(LASV237-NIG-2010;Clade II)__AIT17638__GPCmut4 (opt1)
aggagagucccgcagucggcguccagcggcucugcuuguucgugugugugucguugcaggccuuauucaagcuuaccaugggccagaucaucaccuucuuccaggaggugccccacgucaucgaggaggugaugaacaucgugcugaucgcccucagccugcuggccauccucaaggggaucuacaacgucgcgaccugcggccuguucgggcugguguccuuccuccugcugugcggccgcagcugcuccacgaccuacaaggggguguacgagcuccagacccuggagcuggacauggccagccucaacaugugcaugccgcuguccugcacgaagaacaacagccaccacuacaucauggucggcaacgagaccggccuggagcucacccugaccaacacguccaucaucaaccacaaguucugcaaccugagcgacgcccacaagaaggaccucuacgaccacgcccugauguccaucaucagcaccuuccaccuguccauccccaacuucaaccaguacgaggccaugagcugcgacuucaacgggggcaagaucuccgugcaguacaaccucagccacaccuacgcgguggacgccgccaaccacugcgggaccaucgccaacggcguccugcagacguucaugcggauggcguggggcggguccuacaucgcccuggacagcggcaagggguccugggacugcaucaugaccagcuaccaguaccucaucauccagaacaccaccugggaggaccacugccaguucucccgccccagccccaucggcuaccuggggcugcucagccagcggacgcgcgacaucuacaucucccggcgccgccggggcaccuucaccuggacccucagcgacuccgagggcaacgagacgcccgggggcuacugccugacccgguggaugcugaucgaggccgagcucaagugcuucgggaacaccgccguggccaagugcaacgagaagcacgacgaggaguucugcgacaugcugcgccuguucgacuucugcaagcaggcgauccggcgccucaagacccccgcccagaugagcauccagcugaucaacaaggccgugaacgcccugaucaacgaccagcucaucaugaagaaccaccuccgggacaucaugggcauccccuacugcaacuacuccaaguacugcuaccugaaccacacggucaccgggaagaccagccugccccgcugcugccugguguccaacggcagcuaccugaacgagacccacuucuccgacgacaucgagcagcaggccgacaacaugaucacggagcuccugcagaaggaguacauggaccggcagggcaagaccccgcuggggcucguggaccuguucgucuucagcaccuccuucuaccugaucagcaucuuccugcaccucaucaagaucccgacccaccgccacaucacgggcaagcccugccccaagccccaccggcugaaccacauggggaucugcuccugcggccuguacaagcacccgggggugcccgugaaguggaagcgcugaggacuagucccuguucccagagcccacuuuuuuuucuuuuuuugaaauaaaauagccugucuuucagaucucaaaggcucuuuucagagccaccaaaaaaaaaaaaaaaaaaaaaaaaaaaaaaaaaaaaaaaaaaaaaaaaaaaaaaaaaaaaaaaaaaaaaaaaaaaaaaaaaaaaaaaaaaaaaaaaaaaaa

SEQ ID NO: 26648 - RNA, 1745 nt, Artificial Sequence
  mRNA product Design a-1 (hSL-A100) comprising derived and/or modified sequence from LASV(LASV253-NIG-2011;Clade II)__AIT17670__GPCmut4 (opt1)
aggagagucccgcagucggcguccagcggcucugcuuguucgugugugugucguugcaggccuuauucaagcuuaccaugggccagaucaucaccuucuuccaggaggugccccacgucaucgaggaggugaugaacaucgugcugaucgcccucagccugcuggccauccucaaggggaucuacaacgucgcgaccugcggccuguucgggcugguguccuuccuccugcugugcggccgcagcugcuccacgaccuacaaggggguguacgagcuccagacccuggagcuggacauggccagccucaacaugugcaugccgcuguccugcacgaagaacaacagccaccacuacaucauggucggcaacgagaccggccuggagcucacccugaccaacacguccaucaucaaccacaaguucugcaaccugagcgacgcccacaagaagaaccucuacgaccacgcccugauguccaucaucagcaccuuccaccuguccauccccaacuucaaccaguacgaggccaugagcugcgacuucaacgggggcaagaucuccgugcaguacaaccucagccacaccuacgcgguggacgccgccaaccacugcgggaccaucgccaacggcguccugcagacguucaugcggauggcguggggcggguccuacaucgcccuggacagcggcaagggguccugggacugcaucaugaccagcuaccaguaccucaucauccagaacaccaccugggaggaccacugccaguucucccgccccagccccaucggcuaccuggggcugcucagccagcggacgcgcgacaucuacaucucccggcgccgccggggcaccuucaccuggacccucagcgacuccgagggcaacgagacgcccgggggcuacugccugacccgguggaugcugaucgaggccgagcucaagugcuucgggaacaccgccguggccaagugcaacgagaagcacgacgaggaguucugcgacaugcugcgccuguucgacuucugcaagcaggcgauccggcgccucaaggcccccgcccagaugagcauccagcugaucaacaaggccgugaacgcccugaucaacgaccagcucaucaugaagaaccaccuccgggacaucaugggcaucccguacugcaacuacuccaaguacugcuaccugaaccacaccgucacggggcgcaccagccugccccggugcugccugguguccaacggcagcuaccugaacgagacccacuucuccgacgacaucgagcagcaggcggacaacaugaucaccgagcuccugcagaaggaguacaucgaccgccagggcaagacgccccuggggcucguggaccuguucgucuucagcaccuccuucuaccugaucagcaucuuccugcaccucgugaagaucccgacccaccggcacaucaucggcaagcccugccccaagccccaccgccugaaccacauggggaucugcuccugcggccuguacaagcacccgggggugcccgucaaguggaagcggugaggacuagucccuguucccagagcccacuuuuuuuucuuuuuuugaaauaaaauagccugucuuucagaucucaaaggcucuuuucagagccaccaaaaaaaaaaaaaaaaaaaaaaaaaaaaaaaaaaaaaaaaaaaaaaaaaaaaaaaaaaaaaaaaaaaaaaaaaaaaaaaaaaaaaaaaaaaaaaaaaaaaa

SEQ ID NO: 26649 - RNA, 1745 nt, Artificial Sequence
  mRNA product Design a-1 (hSL-A100) comprising derived and/or modified sequence from LASV(LASV254-NIG-2011;Clade II)__AIT17674__GPCmut4 (opt1)
aggagagucccgcagucggcguccagcggcucugcuuguucgugugugugucguugcaggccuuauucaagcuuaccaugggccagaucaucaccuucuuccaggaggugccccacgucaucgaggaggugaugaacaucgugcugaucgcccucagccugcuggccauccucaaggggaucuacaacgucgcgaccugcggccuguucgggcugguguccuuccuccugcugugcggccgcagcugcuccacgaccuacaaggggguguacgagcuccagacccuggagcuggacaugaccaaccucaacaugugcaugccgcugagcugcaccaagaacaacucccaccacuacaucauggucggcaacgagaccggccuggagcucacccugacgaacaccagcaucaucaaccacaaguucugcaaccuguccgacgcccacaagaagaaccucuacaaccacgcccugaugagcaucaucuccaccuuccaccugagcauccccaacuucaaccaguacgaggccauguccugcgacuucaacgggggcaagaucagcgugcaguacaaccucucccacagcuacgccguggacgcggccaaccacugcgggaccaucgccaacggcguccugcagacguucaugcggauggccuggggcggguccuacaucgcgcuggacagcggcaaggggaacugggacugcaucaugaccuccuaccaguaccucaucauccagaacaccaccugggaggaccacugccaguucagccgccccucccccaucggcuaccuggggcugcucagccagcggacgcgcgacaucuacaucagccggcgccgccggggcaccuucaccuggacccucuccgacagcgagggcaacgagacgcccgggggcuacugccugacccgguggaugcugaucgaggccgagcucaagugcuucgggaacaccgccguggccaagugcaacgagaagcacgacgaggaguucugcgacaugcugcgccuguucgacuucugcaagcaggccauccggcgccucaagacccccgcgcaggccaacauccagcugaucaacaaggccgugaacgcccugaucaacgaccagcucaucaugaagaaccaccuccgggacaucaugggcauccccuacugcaacuacuccaaguacugcuaccugaaccacacggucaccgggaagaccagccugccccgcugcugccugguguccaacggcagcuaccugaacgagacccacuucuccgacgacaucgagcagcaggccgacaacaugaucacggagcuccugcagaaggaguacauggaccggcagggcaagaccccgcuggggcucguggaccuguucgucuucagcaccuccuucuaccugaucagcaucuuccugcaccucgugaagaucccgacccaccgccacgugaucggcaagcccugccccaagccccaccggcugaaccacauggggaucugcuccugcggccuguacaagcacccggggguccccgugaaguggaagcgcugaggacuagucccuguucccagagcccacuuuuuuuucuuuuuuugaaauaaaauagccugucuuucagaucucaaaggcucuuuucagagccaccaaaaaaaaaaaaaaaaaaaaaaaaaaaaaaaaaaaaaaaaaaaaaaaaaaaaaaaaaaaaaaaaaaaaaaaaaaaaaaaaaaaaaaaaaaaaaaaaaaaaa

SEQ ID NO: 26650 - RNA, 1745 nt, Artificial Sequence
  mRNA product Design a-1 (hSL-A100) comprising derived and/or modified sequence from LASV(Nig08-A19;Clade III)__ADU56618__GPCmut4 (opt1)
aggagagucccgcagucggcguccagcggcucugcuuguucgugugugugucguugcaggccuuauucaagcuuaccaugggccagaucgugaccuucuuccaggaggucccccacgugaucgaggaggugaugaacaucguccugaucgcccucagcauccuggccauccugaaggggcucuacaacaucgcgaccugcggccugaucgggcuggugacguuccuccugcuguccggccgcagcugcuccaugaccuacaaggggguguacgagcuccagacccuggagcugaacaugaacacccucaacaugugcaugccgcugagcugcaccaagaacaacucccaccacuacaucauggucggcaacgagaccggccuggagcucacccugacgaacaccagccugcuccaccacaaguucugcaaccuguccgacgcccacaagaagaaccuguacgaccacacccucaugagcaucaucuccaccuuccaccugagcauccccaacuucaaccaguacgaggccauguccugcgacuucaacgggggcaagaucacggugcaguacaaccugagccacuccuacgccaucgacgccgcgaaccacugcgggaccguggccaacggcguccuccagaccuucaugcggauggccuggggcgggagcuacaucgcccuggacuccggccgcgggaagugggacugcaucaugaccagcuaccaguaccugaucauccagaacacgaccugggaggaccacugccaguucucccggcccagccccaucggcuaccucgggcugcugucccagcgcacccgggacaucuacaucagccgccggcgccggggcaccuucacguggacccugagcgacuccgagggcaacgagacccccgggggcuacugccucacccgcuggaugcugaucgaggcggagcugaagugcuucgggaacacggccguggccaagugcaacgagaagcacgacgaggaguucugcgacaugcuccggcuguucgacuucugcaagcaggccauccgccggcugaaggcccccgcgcagaugagcauccagcucaucaacaaggccgugaacgcccugaucaacgaccagcugaucaugaagaaccaccuccgcgacaucaugggcauccccuacugcaacuacuccaaguacugcuaccugaaccacaccagcaccgggcggaccucccugccccgcugcugccucgucagcaacggcuccuaccugaacgagacgcacuucagcgacgacaucgagcagcaggccgacaacaugaucaccgagaugcugcagaaggaguaccucgaccggcagggcaagaccccgcuggggcugguggaccuguucguguucuccaccagcuucuaccucaucuccaucuuccugcaccuggucaagaucccgacgcaccgccacaucgugggcaagcccugccccaagccccaccggcucaaccacauggggaucugcagcugcggccuguacaagcagccgggggugcccguccgcuggaagcggugaggacuagucccuguucccagagcccacuuuuuuuucuuuuuuugaaauaaaauagccugucuuucagaucucaaaggcucuuuucagagccaccaaaaaaaaaaaaaaaaaaaaaaaaaaaaaaaaaaaaaaaaaaaaaaaaaaaaaaaaaaaaaaaaaaaaaaaaaaaaaaaaaaaaaaaaaaaaaaaaaaaaa

SEQ ID NO: 26651 - RNA, 1748 nt, Artificial Sequence
  mRNA product Design a-1 (hSL-A100) comprising derived and/or modified sequence from LASV(G1180-SLE-2010;Clade IV)__AIT17168__GPCmut4 (opt1)
aggagagucccgcagucggcguccagcggcucugcuuguucgugugugugucguugcaggccuuauucaagcuuaccaugggccagaucgugaccuucuuccaggaggucccccacgugaucgaggaggugaugaacaucguccugaucgcccucagcauccuggccgugcugaaggggcucuacaacuucgcgaccugcggccugguggggcugcucaccuuccugcugcucugcggccgcuccugcaccgccagccgguacaagggggucuacgagcugcagacccuggagcucaacauggagacccugaacaugugcaugccgcuguccugcaccaagaacaacagccaccacuacaucauggugggcaacgagaccggccucgagcugacccugacgaacaccuccaucaucaaccacaaguucugcaaccucagcgacgcccacaagaagaaccuguacgaccacgcccugauguccaucaucagcaccuuccaccucuccauccccaacuucaaccaguacgaggccaugagcugcgacuucaacgggggcaagaucuccgugcaguacaaccugagccacuccuacgcgggggacgccgccaaccacugcggcaccgucgccaacggggugcugcagacguucaugcgcauggcguggggcggcagcuacaucgcccucgacuccgggcacggcagcugggacugcaucaugaccuccuaccaguaccugaucauccagaacaccaccugggaggaccacugccaguucagccggcccucccccaucggguaccugggccuccugagccagcgcacgcgggacaucuacaucagccgccggcgccggggcaccuucaccuggacccuguccgacagcgaggggaaggacacgccgggcggguacugccugacccgcuggaugcucaucgaggccgagcugaagugcuucggcaacaccgccguggccaagugcaacgagaagcacgacgaggaguucugcgacaugcugcggcuguucgacuucugcaagcaggcgauccagcgccugaaggcccccgcccagauguccauccagcugaucaacaaggccgucaacgcccucaucaacgaccagcugaucaugaagaaccaccuccgggacaucauggggauccccuacugcaacuacagcaaguacugcuaccucaaccacaccacgaccggcaagaccucccugcccaagugcugccuggugagcaacggcuccuaccucaacgagacccacuucagcgacgacaucgagcagcaggcggacaacaugaucacggagaugcugcagaaggaguacauggagcgccaggggaagacgccccugggccucguggaccuguucgucuucuccaccagcuucuaccugaucuccaucuuccugcaccucgugaagaucccgacccaccggcacaucgugggcaagagcugccccaagccccaccgccugaaccacauggggaucugcuccugcgggcuguacaagcagcccggcgucccggugaaguggaagcggugaggacuagucccuguucccagagcccacuuuuuuuucuuuuuuugaaauaaaauagccugucuuucagaucucaaaggcucuuuucagagccaccaaaaaaaaaaaaaaaaaaaaaaaaaaaaaaaaaaaaaaaaaaaaaaaaaaaaaaaaaaaaaaaaaaaaaaaaaaaaaaaaaaaaaaaaaaaaaaaaaaaaa

SEQ ID NO: 26652 - RNA, 1748 nt, Artificial Sequence
  mRNA product Design a-1 (hSL-A100) comprising derived and/or modified sequence from LASV(G1442-SLE-2011;Clade IV)__AIT17180__GPCmut4 (opt1)
aggagagucccgcagucggcguccagcggcucugcuuguucgugugugugucguugcaggccuuauucaagcuuaccaugggccagaucgugaccuucuuccaggaggucccccacgugaucgaggaggugaugaacaucguccugaucgcccucagcauccuggccgugcugaaggggcucuacaacguggcgaccugcggccugaucgggcuggucacguuccuccugcugugcggccgcuccugcaccaccacccucuacaaggggguguacgagcugcagacgcuggagcucaacauggagacccugaacaugugcaugccgcugagcugcaccaagaacaacucccaccacuacauccgggugggcaacgagacgggccucgagcugacccugaccaacaccagcaucaucaaccacaaguucugcaaccucuccgacgcccacaagaagaaccuguacgaccacgcccugaugagcaucaucuccacguuccaccucagcauccccaacuucaaccaguacgaggccauguccugcgacuucaacgggggcaagaucagcguccaguacaaccugucccacagcuacgccggggacgcggccaaccacugcggcaccguggccaacggggugcugcagaccuucaugcgcauggccuggggcggcuccuacaucgcgcucgacagcgggcggggcaacugggacugcaucaugaccuccuaccaguaccugaucauccagaacacgaccugggacgaccacugccaguucagccgccccucccccaucggguaccugggccuccugagccagcggacccgcgacgucuacaucucccggcgccgccggggcaccuucacguggacccugagcgacagcgaggggaaggacaccccgggcggguacugccugacccgguggaugcucaucgaggccgagcugaagugcuucggcaacacggccguggccaagugcaacgagaagcacgacgaggaguucugcgacaugcugcgccucuucgacuucugcaagcaggccauccagcggcugaaggcgcccgcccagauguccauccagcugaucaacaaggccgugaacgcccucaucaacgaccagcugaucaugaagaaccaccuccgcgacaucauggggauccccuacugcaacuacagcaaguacugcuaccugaacaacaccgccaccggcaagaccucccugcccaagugcugccugaucagcaacggcuccuaccucaacgagacgcacuucagcgacgacaucgagcaggaggcggacaacaugaucaccgagaugcugcagaaggaguacauggagcggcaggggaagacgccccugggccucgucgaccuguucguguucuccaccagcuucuaccugaucuccaucuuccugcaccucgugaagaucccgacccaccgccacaucgucggcaagagcugccccaagccccaccggcugaaccacauggggaucugcuccugcgggcuguacaagcagcccggcgugccggugcgcuggaagcggugaggacuagucccuguucccagagcccacuuuuuuuucuuuuuuugaaauaaaauagccugucuuucagaucucaaaggcucuuuucagagccaccaaaaaaaaaaaaaaaaaaaaaaaaaaaaaaaaaaaaaaaaaaaaaaaaaaaaaaaaaaaaaaaaaaaaaaaaaaaaaaaaaaaaaaaaaaaaaaaaaaaaa

SEQ ID NO: 26653 - RNA, 1748 nt, Artificial Sequence
  mRNA product Design a-1 (hSL-A100) comprising derived and/or modified sequence from LASV(G3010-SLE-2013;Clade IV)__AIT17344__GPCmut4 (opt1)
aggagagucccgcagucggcguccagcggcucugcuuguucgugugugugucguugcaggccuuauucaagcuuaccaugggccagaucgugaccuucuuccaggaggucccccacgugaucgaggaggugaugaacaucguccugaucgcccucagcauccuggccgugcugaaggggcucuacaacuucgcgaccugcggccugguggggcuggucacguuccuccugcugugcggccgcuccugcaccaccagccucuacaaggggguguacgagcugcagacccuggagcucaacauggagacgcugaacaugugcaugccgcuguccugcaccaagaacaacagccaccacuacaucauggugggcaacgagaccggccucgagcugacgcugaccaacaccuccaucaucaaccacaaguucugcaaccucagcgacgcccacaagaagaaccuguacaaccacgcccugauguccaucaucagcaccuuccaccucuccauccccaacuucaaccaguacgaggccaugagcugcgacuucaacgggggcaagaucuccguccaguacaaccugagccacuccuacgccggggacgcggccagccacugcggcacgguggccaacggggugcugcagaccuucaugcggauggccuggggcggcuccuacaucgcgcucgacagcggguacggcaagugggacugcaucaugaccuccuaccaguaccugaucauccagaacaccacgugggaggaccacugccaguucagccgccccucccccaucggguaccugggccuccugagccagcggacccgcgacaucuacaucagccggcgccgccggggcaccuucaccuggacgcuguccgacagcgaggggaaggacaccccgggcggguacugccugacccgguggaugcucaucgaggccgagcugaagugcuucggcaacaccgccgucgccaagugcaacgagaagcacgacgaggaguucugcgacaugcugcgccucuucgacuucugcaagcaggccauccagcggcugaagacgcccgcgcagauguccauccagcugaucaacaaggccgugaacgcccucaucaacgaccagcugaucaugaagaaccaccuccgcgacaucauggggauccccuacugcaacuacagcaaguacugcuaccugaaccacaccaccaccggcaagacgucccugcccaagugcugccuggugagcaacggcuccuaccucaacgagacccacuucagcgacgacaucgagcagcaggccgacaacaugaucaccgagaugcugcagaaggaguacauggagcggcaggggaagacgccccugggccucgucgaccuguucguguucuccaccagcuucuaccugaucuccaucuuccugcaccucgugaagaucccgacccaccgccacaucgucggcaagagcugccccaagccccaccggcugaaccacauggggaucugcuccugcgggcuguacaagcagcccggcgugccggugcgcuggaagcggugaggacuagucccuguucccagagcccacuuuuuuuucuuuuuuugaaauaaaauagccugucuuucagaucucaaaggcucuuuucagagccaccaaaaaaaaaaaaaaaaaaaaaaaaaaaaaaaaaaaaaaaaaaaaaaaaaaaaaaaaaaaaaaaaaaaaaaaaaaaaaaaaaaaaaaaaaaaaaaaaaaaaa

SEQ ID NO: 26654 - RNA, 1748 nt, Artificial Sequence
  mRNA product Design a-1 (hSL-A100) comprising derived and/or modified sequence from LASV(G502-SLE-2009;Clade IV)__AIT17126__GPCmut4 (opt1)
aggagagucccgcagucggcguccagcggcucugcuuguucgugugugugucguugcaggccuuauucaagcuuaccaugggccagaucgugaccuucuuccaggaggucccccacgugaucgaggaggugaugaacaucguccugaucgcccucagcauccuggccgugcugaaggggcucuacaacuucgcgaccugcggccugguggggcugcucacguuccugcugcucugcggccgcuccugcaccaccgggcuguacaagggcgucuacgagcugcagacccucgagcugaacauggagacgcugaacaugugcaugccgcucagcugcaccaagaacaacucccaccacuacaucauggugggcaacgagaccgggcuggagcugacgcucaccaacaccagcaucaucaaccacaaguucugcaaccuguccgacgcccacaagaagaaccuguacgaccacgcccucaugagcaucaucuccaccuuccaccugagcauccccaacuucaaccaguacgaggccauguccugcgacuucaacggcgggaagaucagcgugcaguacaaccugucccacagcuacgccggcgacgcggccgaccacugcgggacggucgccaacggcgugcuccagaccuucaugcggauggccuggggcggguccuacaucgcgcuggacagcggccgcgggcggugggacugcaucaugaccuccuaccaguaccugaucauccagaacaccacgugggaggaccacugccaguucagccgccccucccccaucggcuaccucggccugcugagccagcggacccgcgacaucuacaucucccggcgccgccgggggaccuucaccuggacgcugagcgacagcgagggcaaggacacccccgggggcuacugccucacccgguggaugcugaucgaggccgagcugaagugcuucgggaacaccgccguggccaagugcaacgagaagcacgacgaggaguucugcgacaugcuccgccuguucgacuucugcaagcaggccauccagcggcugaaggcgcccgcccagauguccauccagcucaucaacaaggccgucaacgcccugaucaacgaccagcuggugaugaagaaccaccuccgcgacaucaugggcauccccuacugcaacuacagccgguacugcuaccugaaccacacgaccaccggccgcaccucccugcccaagugcugccucgugagcaacggguccuaccugaacgagacgcacuucagcgacgacaucgagcagcaggccgacaacaugaucaccgagaugcugcagaaggaguacauggagcggcagggcaagaccccgcucgggcuggucgaccuguucguguucuccaccagcuucuaccugaucuccaucuuccuccaccuggugaagaucccgacgcaccgccacaucgucggcaagagcugccccaagccccaccggcugaaccacauggggaucugcuccugcggccucuacaagcagcccggcgugccggugaaguggaagcgcugaggacuagucccuguucccagagcccacuuuuuuuucuuuuuuugaaauaaaauagccugucuuucagaucucaaaggcucuuuucagagccaccaaaaaaaaaaaaaaaaaaaaaaaaaaaaaaaaaaaaaaaaaaaaaaaaaaaaaaaaaaaaaaaaaaaaaaaaaaaaaaaaaaaaaaaaaaaaaaaaaaaaa

SEQ ID NO: 26655 - RNA, 1748 nt, Artificial Sequence
  mRNA product Design a-1 (hSL-A100) comprising derived and/or modified sequence from LASV(G733-SLE-2010;Clade IV)__AIT17154__GPCmut4 (opt1)
aggagagucccgcagucggcguccagcggcucugcuuguucgugugugugucguugcaggccuuauucaagcuuaccaugggccagaucgugaccuucuuccaggaggucccccacgugaucgaggaggugaugaacaucguccugaucgcccucagcauccuggccgugcugaaggggcucuacaacuucgcgaccugcggcaucguggggcuggucuccuuccugcuccugugcggccgcagcugcacgaccucccuguacaaggggguguacgagcuccagacccuggagcugaacauggagacccucaacaugugcaugccgcugagcugcaccaagaacaacucccaccacuacaucauggugggcaacgagaccggccuggagcucacccugacgaacaccagcaucaucaaccacaaguucugcaaccuguccgacgcccacaagaagaaccucuacgaccacgcccugaugagcaucaucuccaccuuccaccugagcauccccaacuucaaccaguacgaggccauguccugcgacuucaacgggggcaagaucagcguccaguacaaccucucccacagcuacgccggggacgcggccaaccacugcggcaccaucgccaacggggugcugcagacguucaugcggauggccuggggcggcuccuacaucgcgcuggacagcgggcgcgaccggugggacugcaucaugaccuccuaccaguaccucaucauccagaacaccaccugggaggaccacugccaguucagccgccccucccccaucggcuaccuggggcugcucagccagcggacgcgcgacaucuacaucagccggcgccgccggggcaccuucaccuggacccucuccgacagcgagggcaaggacacgcccgggggcuacugccugacccgguggaugcugaucgaggccgagcucaagugcuucgggaacaccgccguggccaagugcaacgagaagcacgacgaggaguucugcgacaugcugcgccuguucgacuucugcaagcaggccauccagcggcucaaggcgcccgcccagauguccauccagcugaucaacaaggccgucaacgcccugaucaacgaccagcucaucaugaagaaccaccuccgcgacaucaugggcauccccuacugcaacuacagcaaguacugcuaccugaaccacaccacgaccgggaagaccucccugcccaagugcugccuggugagcaacggcuccuaccugaacgagacccacuucagcgacgacaucgagcagcaggccgacaacaugaucacggagaugcuccagaaggaguacauggagcggcagggcaagaccccgcuggggcugguggaccucuucgucuucuccaccagcuucuaccugaucuccaucuuccugcaccuggugaagaucccgacccaccgccacguggucggcaagagcugccccaagccccaccggcucaaccacauggggaucugcuccugcggccuguacgggcagcccggcgugccggugaaguggaagcgcugaggacuagucccuguucccagagcccacuuuuuuuucuuuuuuugaaauaaaauagccugucuuucagaucucaaaggcucuuuucagagccaccaaaaaaaaaaaaaaaaaaaaaaaaaaaaaaaaaaaaaaaaaaaaaaaaaaaaaaaaaaaaaaaaaaaaaaaaaaaaaaaaaaaaaaaaaaaaaaaaaaaaa

SEQ ID NO: 26656 - RNA, 1748 nt, Artificial Sequence
  mRNA product Design a-1 (hSL-A100) comprising derived and/or modified sequence from MOPV/LASV reassortant(IGS-1;Clade IV)__AFY05576__GPCmut4 (opt1)
aggagagucccgcagucggcguccagcggcucugcuuguucgugugugugucguugcaggccuuauucaagcuuaccaugggccagaucgugaccuucuuccaggaggucccccacgugaucgaggaggugaugaacaucguccugaucgcccucagcgugcuggccgugcugaaggggcucuacaacuucgcgaccugcggccuggucgggcuggugacguuccuccugcugugcggccgcuccugcaccaccagccucuacaaggggguguacgagcugcagacccuggagcucaacauggagacgcugaacaugugcaugccgcuguccugcaccaagaacaacagccaccacuacaucauggucggcaacgagaccggccucgagcugacgcugaccaacaccuccaucaucaaccacaaguucugcaaccucagcgacgcccacaagaagaaccuguacgaccacgcccugauguccaucaucagcaccuuccaccucuccauccccaacuucaaccaguacgaggccaugagcugcgacuucaacgggggcaagaucuccgugcaguacaaccugagccacuccuacgccggggacgcggccaaccacugcggcacgguggccaacgggguccugcagaccuucaugcggauggccuggggcggcagcuacaucgcgcucgacuccgggcgcggcaacugggacugcaucaugaccagcuaccaguaccugaucauccagaacaccacgugggaggaccacugccaguucucccggcccagccccaucggguaccugggccuccugucccagcgcacccgggacaucuacaucagccgccggcgccggggcaccuucaccuggacgcugagcgacuccgagggggaggacaccccgggcggguacugccugacccgcuggaugcucaucgaggccgagcugaagugcuucggcaacaccgccguggccaagugcaacgagaagcacgacgaggaguucugcgacaugcugcggcuguucgacuucugcaagcaggccauccagcgccugaaggcgcccgcccagaugagcauccagcugaucaacaaggccgugaacgcccucaucaacgaccagcugaucaugaagaaccaccuccgggacaucauggggauccccuacugcaacuacuccaaguacugcuaccucaaccacacgaccaccggccgcaccagccugcccaagugcugccuggucuccaacggcagcuaccucaacgagacgcacuucuccgacgacaucgagcagcaggccgacaacaugaucaccgagaugcugcagaaggaguacauggagcggcaggggaagacgccccugggccucguggaccuguucguguucagcaccuccuucuaccugaucagcaucuuccugcaccucgucaagaucccgacccaccgccacaucguggggaaguccugccccaagccccaccggcugaaccacaugggcaucugcagcugcgggcuguacaagcagcccggcgugccggucaaguggaagcgcugaggacuagucccuguucccagagcccacuuuuuuuucuuuuuuugaaauaaaauagccugucuuucagaucucaaaggcucuuuucagagccaccaaaaaaaaaaaaaaaaaaaaaaaaaaaaaaaaaaaaaaaaaaaaaaaaaaaaaaaaaaaaaaaaaaaaaaaaaaaaaaaaaaaaaaaaaaaaaaaaaaaaa

SEQ ID NO: 26657 - RNA, 1748 nt, Artificial Sequence
  mRNA product Design a-1 (hSL-A100) comprising derived and/or modified sequence from LASV(LM765-SLE-2012;Clade IV)__AIT17814__GPCmut4 (opt1)
aggagagucccgcagucggcguccagcggcucugcuuguucgugugugugucguugcaggccuuauucaagcuuaccaugggccagaucgugaccuucuuccaggaggucccccacgugaucgaggaggugaugaacaucguccugaucgcccucagcauccuggccgugcugaaggggcucuacaacuucgcgaccugcggccugguggggcuggucacguuccuccugcugugcggccgcuccugcaccaccagccucuacaaggggguguacgagcugcagacccuggagcucaacauggagacgcugaacaugugcaugccgcuguccugcaccaagaacaacagccaccacuacaucauggugggcaacgagaccggccucgagcugacgcugaccaacaccuccaucaucgaccacaaguucugcaaccucagcgacgcccaccggaagaaccuguacgaccacgcccugauguccaucaucagcaccuuccaccucuccauccccaacuucaaccaguacgaggccaugagcugcgacuucaacgggggcaagaucuccguccaguacaaccugagccacuccuacgccaaggacgcggccgaccacugcgggacgguggccaacggcgugcugcagaccuucaugcgcauggccuggggcgggagcuacaucgcgcucgacuccggccgggggcgcugggacugcaucaugaccagcuaccaguaccugaucauccagaacaccacgugggaggaccacugccaguucucccggcccagccccaucggcuaccuggggcuccugucccagcgcacccgggacaucuacaucagccgccggcgccggggcaccuucaccuggacgcugagcgacuccgagggcaaggacacccccgggggcuacugccugacccgcuggaugcucaucgaggccgagcugaagugcuucgggaacaccgccgucgccaagugcaacgagaagcacgacgaggaguucugcgacaugcugcggcuguucgacuucugcaagcaggccauccagcgccugaaggcgcccgcccagaugagcauccagcugaucaacaaggccgugaacgcccucaucaacgaccagcugaucaugaagaaccaccuccgggacaucaugggcauccccuacugcaacuacuccaaguacugcuaccucaaccacacgaccaccgggaagaccagccugcccaagugcugccugguguccaacggcagcuaccucaacgagacgcacuucuccgacgacaucgagcagcaggccgacaacaugaucaccgagaugcugcagaaggaguacauggagcgccagggcaagaccccgcuggggcucgucgaccuguucguguucagcaccuccuucuaccugaucagcaucuuccugcaccucgugaagaucccgacgcaccggcacaucgucggcaagcccugccccaagccccaccgccugaaccacauggggaucugcuccugcggccuguacaagcagccgggggugcccgugaaguggaagcggugaggacuagucccuguucccagagcccacuuuuuuuucuuuuuuugaaauaaaauagccugucuuucagaucucaaaggcucuuuucagagccaccaaaaaaaaaaaaaaaaaaaaaaaaaaaaaaaaaaaaaaaaaaaaaaaaaaaaaaaaaaaaaaaaaaaaaaaaaaaaaaaaaaaaaaaaaaaaaaaaaaaaa

SEQ ID NO: 26658 - RNA, 1748 nt, Artificial Sequence
  mRNA product Design a-1 (hSL-A100) comprising derived and/or modified sequence from LASV(LM776-SLE-2012;Clade IV)__AIT17824__GPCmut4 (opt1)
aggagagucccgcagucggcguccagcggcucugcuuguucgugugugugucguugcaggccuuauucaagcuuaccaugggccagaucgugaccuucuuccaggaggucccccacgugaucgaggaggugaugaacaucguccugaucgcccucagcauccuggccgugcugaaggggcucuacaacuucgcgaccugcggccugguggggcuggucacguuccuccugcugugcggccgcuccugcaccaccagcguguacaaggggguguacgagcuccagacccuggagcugaacauggagacgcucaacaugugcaugccgcuguccugcaccaagaacaacagccaccacuacaucauggucggcaacgagaccggccuggagcucacgcugaccaacaccuccaucaucaaccacaaguucugcaaccugagcgacgcccacaagaagaaccucuacgaccacgcccugauguccaucaucagcaccuuccaccuguccauccccaacuucaaccaguacgaggccaugagcugcgacuucaacgggggcaagaucuccgugcaguacaaccucagccacuccuacgccggggacgcggccaaccacugcggcacgguggccaacgggguccugcagaccuucaugcggauggccuggggcggcagcuacaucgcgcuggacuccgggcacggcaagugggacugcaucaugaccagcuaccaguaccucaucauccagaacaccacgugggaggaccacugccaguucucccgccccagccccaucggguaccugggccugcucucccagcggacccgcgacaucuacaucagccggcgccgccggggcaccuucaccuggacgcucagcgacuccgaggggaaggacaccccgggcggguacugccugacccgguggaugcugaucgaggccgagcucaagugcuucggcaacaccgccguggccaagugcaacgagaagcacgacgaggaguucugcgacaugcugcgccuguucgacuucugcaagcaggccauccagcggcucaaggcgcccgcccagaugagcauccagcugaucaacaaggccgugaacgcccugaucaacgaccagcucaucaugaagaaccaccuccgcgacaucauggggauccccuacugcaacuacuccaaguacugcuaccugaaccacacgaccaccggcaagaccagccugcccaagugcugccuggucuccaacggcagcuaccugaacgagacgcacuucuccgacgacaucgagcagcaggccgacaacaugaucaccgagaugcuccagaaggaguacauggagcggcaggggaagacgccccugggccugguggaccucuucguguucagcaccuccuucuaccugaucagcaucuuccugcaccuggucaagaucccgacccaccgccacaucguggggaaguccugccccaagccccaccggcucaaccacaugggcaucugcagcugcgggcuguacaagcagcccggcgugccgguccgcuggaagcggugaggacuagucccuguucccagagcccacuuuuuuuucuuuuuuugaaauaaaauagccugucuuucagaucucaaaggcucuuuucagagccaccaaaaaaaaaaaaaaaaaaaaaaaaaaaaaaaaaaaaaaaaaaaaaaaaaaaaaaaaaaaaaaaaaaaaaaaaaaaaaaaaaaaaaaaaaaaaaaaaaaaaa

SEQ ID NO: 26659 - RNA, 1748 nt, Artificial Sequence
  mRNA product Design a-1 (hSL-A100) comprising derived and/or modified sequence from LASV(Mad39;Clade IV)__ANH09722__GPCmut4 (opt1)
aggagagucccgcagucggcguccagcggcucugcuuguucgugugugugucguugcaggccuuauucaagcuuaccaugggccagaucgugaccuucuuccaggaggucccccacgugaucgaggaggugaugaacaucguccugaucgcccucagcauccuggccgugcugaaggggcucuacaacguggcgaccugcggccugaucgggcuggucacguuccuccugcugugcggccgcuccugcaccaccacccucuacaaggggguguacgagcugcaggcccuggagcucaacauggagacgcugaacaugugcaugccgcugagcugcaccaagaacaacucccaccacuacauccgggugggcaacgagaccggccucgagcugacgcugaccaacaccagccucaucaaccacaaguucugcaaccuguccgacgcccacaagaagaaccuguacgaccacgcccucaugagcaucaucuccaccuuccaccugagcauccccaacuucaaccaguacgaggccauguccugcgacuucaacgacgggaagaucagcguccaguacaaccugucccacacguacgcgggcgacaccgccaaccacugcgggaccguggccaacggcgugcuccagaccuucaugcgcauggccuggggcgggagcuacaucgcgcuggacuccggccgcgggggcugggacugcaucaugacgagcuaccaguaccugaucauccagaacaccaccugggaggaccacugccaguucucccggcccagccccaucggguaccucggccugcugucccagcggacccgcgacaucuacaucagccggcgccgccggggcacguucaccuggacccuguccgacagcgaggggaaggacaccccgggcggguacugccucacgcgguggaugcugaucgaggccgagcugaagugcuucggcaacaccgccgucgccaagugcaacgagaagcacgacgaggaguucugcgacaugcuccgccuguucgacuucugcaagcaggccauccagcggcugaaggcgcccgcccagaugagcauccagcucaucaacaaggccgugaacgcccugaucaacgaccagcugaucaugaagaaccaccuccgcgacaucauggggauccccuacugcaacuacuccaaguacugcuaccugaaccacaccgugaccggcaagacgagccugcccaagugcugccucgucuccaacggcagcuaccugaacgagacccacuucuccgacgacaucgagcagcaggccgacaacaugaucaccgagaugcugcagaaggaguacauggagcggcaggggaagacgccccucggccugguggaccuguucguguucagcaccuccuucuaccugaucagcaucuuccuccaccuggucaagaucccgacccaccgccacgugguggggaagcccugccccaagccccaccggcugaaccacaugggcaucugcuccugcggguucuacaagcagccgggcguccccgugcgcuggaagcggugaggacuagucccuguucccagagcccacuuuuuuuucuuuuuuugaaauaaaauagccugucuuucagaucucaaaggcucuuuucagagccaccaaaaaaaaaaaaaaaaaaaaaaaaaaaaaaaaaaaaaaaaaaaaaaaaaaaaaaaaaaaaaaaaaaaaaaaaaaaaaaaaaaaaaaaaaaaaaaaaaaaaa

SEQ ID NO: 26660 - RNA, 1748 nt, Artificial Sequence
  mRNA product Design a-1 (hSL-A100) comprising derived and/or modified sequence from LASV(Z0947-SLE-2011;Clade IV)__AIT17840__GPCmut4 (opt1)
aggagagucccgcagucggcguccagcggcucugcuuguucgugugugugucguugcaggccuuauucaagcuuaccaugggccagaucgugaccuucuuccaggaggucccccacgugaucgaggaggugaugaacaucguccugaucgcccucagcauccuggccgugcugaaggggcucuacaacuucgcgaccugcggccugguggggcuggucacguuccuccugcugugcggccgcuccugcaccaucagccucuacaaggggguguacgagcugcagacccuggagcucaacauggagacccugaacaugugcaugccgcuguccugcaccaagaacaacagccaccacuacaucauggugggcaacgagaccggccucgagcugacccugacgaacaccuccaucaucaaccacaaguucugcaaccucagcgacgcccacaagaagaaccuguacgaccacgcccugauguccaucaucagcaccuuccaccucuccauccccaacuucaaccaguacgaggccaugagcugcgacuucaacgggggcaagaucuccguccaguacaaccugagccacuccuacgccggggacgcggccaaccacugcggcaccguggccaacggggugcugcagacguucaugcggauggccuggggcggcagcuacaucgcgcucgacuccgggcgcgaccggugggacugcaucaugaccagcuaccaguaccugaucauccagaacaccaccugggaggaccacugccaguucucccgccccagccccaucggcuaccuggggcuccugucccagcggacgcgcgacaucuacaucagccggcgccgccggggcaccuucaccuggacccugagcgacuccgagggcaaggacacgcccgggggcuacugccugacccgguggaugcucaucgaggccgagcugaagugcuucgggaacaccgccgucgccaagugcaacgagaagcacgacgaggaguucugcgacaugcugcgccucuucgacuucugcaagcaggccauccagcggcugaaggcgcccgcccagaugagcauccagcugaucaacaaggccgugaacgcccucaucaacgaccagcugaucaugaagaaccaccuccgcgacaucaugggcauccccuacugcaacuacuccaaguacugcuaccugaaccacaccacgaccgggaagaccagccugcccaagugcugccugguguccaacggcagcuaccucaacgagacccacuucuccgacgacaucgagcagcaggccgacaacaugaucacggagaugcugcagaaggaguacauggagcggcagggcaagaccccgcuggggcucgucgaccuguucguguucagcaccuccuucuaccugaucagcaucuuccugcaccucgugaagaucccgacccaccgccacaucgucggcaagcccugccccaagccccaccggcugaaccacauggggaucugcuccugcggccuguacaagcagccgggggugcccgugaaguggaagcgcugaggacuagucccuguucccagagcccacuuuuuuuucuuuuuuugaaauaaaauagccugucuuucagaucucaaaggcucuuuucagagccaccaaaaaaaaaaaaaaaaaaaaaaaaaaaaaaaaaaaaaaaaaaaaaaaaaaaaaaaaaaaaaaaaaaaaaaaaaaaaaaaaaaaaaaaaaaaaaaaaaaaaa

SEQ ID NO: 26661 - RNA, 1748 nt, Artificial Sequence
  mRNA product Design a-1 (hSL-A100) comprising derived and/or modified sequence from LASV(Josiah;Clade IV)__NP_694870__GPCmut4 (opt1)
aggagagucccgcagucggcguccagcggcucugcuuguucgugugugugucguugcaggccuuauucaagcuuaccaugggccagaucgugaccuucuuccaggaggucccccacgugaucgaggaggugaugaacaucguccugaucgcccucagcgugcuggccgugcugaaggggcucuacaacuucgcgaccugcggccuggucgggcuggugacguuccuccugcugugcggccgcuccugcaccaccagccucuacaaggggguguacgagcugcagacccuggagcucaacauggagacgcugaacaugugcaugccgcuguccugcaccaagaacaacagccaccacuacaucauggucggcaacgagaccggccucgagcugacccugacgaacaccuccaucaucaaccacaaguucugcaaccucagcgacgcccacaagaagaaccuguacgaccacgcccugauguccaucaucagcaccuuccaccucuccauccccaacuucaaccaguacgaggccaugagcugcgacuucaacgggggcaagaucuccgugcaguacaaccugagccacuccuacgccggggacgcggccaaccacugcggcaccguggccaacgggguccugcagacguucaugcggauggccuggggcggcagcuacaucgcgcucgacuccgggcgcggcaacugggacugcaucaugaccagcuaccaguaccugaucauccagaacaccaccugggaggaccacugccaguucucccggcccagccccaucggguaccugggccuccugucccagcgcacgcgggacaucuacaucagccgccggcgccggggcaccuucaccuggacccugagcgacuccgaggggaaggacacgccgggcggguacugccucacccgcuggaugcugaucgaggccgagcugaagugcuucggcaacaccgccguggccaagugcaacgagaagcacgacgaggaguucugcgacaugcuccggcuguucgacuucugcaagcaggccauccagcgccugaaggcgcccgcccagaugagcauccagcucaucaacaaggccgugaacgcccugaucaacgaccagcugaucaugaagaaccaccuccgggacaucauggggauccccuacugcaacuacuccaaguacugcuaccugaaccacaccacgaccggccgcaccagccugcccaagugcugccucgucuccaacggcagcuaccugaacgagacccacuucuccgacgacaucgagcagcaggccgacaacaugaucacggagaugcugcagaaggaguacauggagcggcaggggaagaccccgcucggccugguggaccuguucguguucagcaccuccuucuaccugaucagcaucuuccuccaccuggucaagauccccacccaccgccacaucguggggaaguccugccccaagccccaccggcugaaccacaugggcaucugcagcugcgggcucuacaagcagccgggcgugcccgucaaguggaagcgcugaggacuagucccuguucccagagcccacuuuuuuuucuuuuuuugaaauaaaauagccugucuuucagaucucaaaggcucuuuucagagccaccaaaaaaaaaaaaaaaaaaaaaaaaaaaaaaaaaaaaaaaaaaaaaaaaaaaaaaaaaaaaaaaaaaaaaaaaaaaaaaaaaaaaaaaaaaaaaaaaaaaaa

SEQ ID NO: 26662 - RNA, 1745 nt, Artificial Sequence
  mRNA product Design a-1 (hSL-A100) comprising derived and/or modified sequence from LASV(LP;Clade I)__AAF86701__GPCmut4 (opt1)
aggagagucccgcagucggcguccagcggcucugcuuguucgugugugugucguugcaggccuuauucaagcuuaccaugggccagaucaucaccuucuuccaggaggugccccacgucaucgaggaggugaugaacaucgugcugaucgcccucagccugcuggccauccucaaggggcuguacaacaucgcgaccugcggcaucaucgggcuggucgccuuccucuuccugugcggcaaguccugcagccugacgcucaagggcggguacgagcugcagacccuggagcucaacauggagacccugaacaugugcaugccgcuguccugcaccaagaacagcucccaccacuacauccgcgugggcaacgagacggggcucgagcugacccugaccaacaccagcaucaucaaccacaaguucugcaaccucuccgacgcccacaagaagaaccuguacgaccacgcccugaugagcaucaucuccacguuccaccucagcauccccaacuucaaccaguacgaggccauguccugcgacuucaacggcgggaagaucagcgugcaguacaaccugucccacagcuacgcgggcgacgccgccgagcacugcgggaccgucgccaacggcgugcugcagaccuucaugcggauggcguggggcgggcgcuacaucgcccucgacuccggcaaggggaacugggacugcaucaugaccagcuaccaguaccugaucauccagaacacgaccugggaggaccacugccaguucucccggcccagccccaucggcuaccugggccuccugucccagcgcacccgggacaucuacaucagccgccggcgccgggggaccuucacguggacccugagcgacuccgagggcaacgagacccccgggggcuacugccucacccgcuggaugcugaucgaggccgagcugaagugcuucgggaacacggccguggccaagugcaacgagaagcacgacgaggaguucugcgacaugcuccggcuguucgacuucugcaagcaggcgauccgccggcugaaggccccggcccagaugagcauccagcucaucaacaaggccgucaacgcccugaucaacgaccagcugaucaugaagaaccaccuccgcgacaucaugggcauccccuacugcaacuacuccaaguacugcuaccugaaccacaccagcuccggccggaccagccugcccaagugcugccucaucuccaacgggagcuaccugaacgagacccaguucuccgacgacaucgagcagcaggcggacaacaugaucacggagaugcugcagaaggaguacaucgagcgccagggcaagaccccgcucgggcugguggacaucuucaucuucagcaccuccuucuaccugaucagcaucuuccugcaccucaucaagauccccacccaccggcacaucgugggcaagcccugccccaagccgcaccgccugaaccacaugggggucugcuccugcggccuguacaagcaccccggcgugcccacgaaguggaagcggugaggacuagucccuguucccagagcccacuuuuuuuucuuuuuuugaaauaaaauagccugucuuucagaucucaaaggcucuuuucagagccaccaaaaaaaaaaaaaaaaaaaaaaaaaaaaaaaaaaaaaaaaaaaaaaaaaaaaaaaaaaaaaaaaaaaaaaaaaaaaaaaaaaaaaaaaaaaaaaaaaaaaa

SEQ ID NO: 26663 - RNA, 1745 nt, Artificial Sequence
  mRNA product Design a-1 (hSL-A100) comprising derived and/or modified sequence from LASV(803213;Clade II)__AAF86703__GPCmut4 (opt1)
aggagagucccgcagucggcguccagcggcucugcuuguucgugugugugucguugcaggccuuauucaagcuuaccaugggccagaucaucaccuucuuccaggaggugccccacgucaucgaggaggugaugaacaucgugcugaucgcccucagccugcuggccauccucaaggggaucuacaacgucgcgaccugcggccuguucgggcugaucuccuuccuccugcugugcggccgcagcugcuccgugacguacaaggggguguacgagcuccagacccuggagcugaacauggccaaccucaacaugugcaugccgcugagcugcaccaagaacaacucccaccacuacaucauggucggcaacgagaccggccuggagcucacgcugaccaacaccagcaucaucaaccacaaguucugcaaccuguccgacgcccacaagaagaaccucuacgaccacgcccugaugagcaucaucuccaccuuccaccugagcauccccaacuucaaccaguacgaggccauguccugcgacuucaacgggggcaagaucagcgugcaguacaaccucucccacagcuucgcgguggacgccgccaaccacugcgggacgaucgccaacggcguccugcagaccuucaugcggauggcguggggcggguccuacaucgcccuggacagcggcaaggggaacugggacugcaucaugaccuccuaccaguaccucaucauccagaacaccacgugggaggaccacugccaguucagccgccccucccccaucggcuaccuggggcugcucagccagcggacccgcgacaucuacaucagccggcgccggcgcggcaccuucaccuggacgcuguccgacagcgagggcaacgaggcccccgggggcuacugccugacccgguggaugcucaucgaggccgagcugaagugcuucgggaacaccgccguggcgaagugcaacgagaagcacgacgaggaguucugcgacaugcugcgccucuucgacuucugcaagcaggccaucaagcggcugaagaccccggcccagauguccauccagcugaucaacaaggccgugaacgcccucaucaacgaccagcugaucaugaagaaccaccuccgcgacaucaugggcauccccuacugcaacuacagccgguacugcuaccugaaccacacggucaccgggaagaccucccugccccgcugcugccuggugagcaacggcuccuaccucaacgagacccacuucagcgacgacaucgagcagcaggcggacaacaugaucacggagaugcugcagaaggaguacauggaccggcagggcaagaccccgcuggggcucguggaccuguucgucuucuccaccagcuucuaccugaucuccaucuuccugcaccucgugaagauccccacccaccgccacaucgugggcaagcccugccccaagccgcaccggcugaaccacauggggaucugcagcugcggccuguacaagcaccccgggguccccgugaaguggaagcgcugaggacuagucccuguucccagagcccacuuuuuuuucuuuuuuugaaauaaaauagccugucuuucagaucucaaaggcucuuuucagagccaccaaaaaaaaaaaaaaaaaaaaaaaaaaaaaaaaaaaaaaaaaaaaaaaaaaaaaaaaaaaaaaaaaaaaaaaaaaaaaaaaaaaaaaaaaaaaaaaaaaaaa

SEQ ID NO: 26664 - RNA, 1745 nt, Artificial Sequence
  mRNA product Design a-1 (hSL-A100) comprising derived and/or modified sequence from LASV(GA391;Clade III)__CAA36645__GPCmut4 (opt1)
aggagagucccgcagucggcguccagcggcucugcuuguucgugugugugucguugcaggccuuauucaagcuuaccaugggccagaucgugaccuucuuccaggaggucccccacgugaucgaggaggugaugaacaucguccugaucgcccucagcauccuggccauccugaaggggcucuacaacguggcgaccugcggccugaucgggcuggugacguuccuccugcuguccggccgcagcugcucccucaucuacaaggggaccuacgagcugcagacccuggagcucaacauggagacccugaacaugugcaugccgcugagcugcacgaagaacaacucccaccacuacauccgggucggcaacgagaccggccucgagcugacccugaccaacacgagcauccucaaccacaaguucugcaaccuguccgacgcccacaagcgcaaccuguacgaccacagccucauguccaucaucagcaccuuccaccuguccauccccaacuucaaccaguacgaggccaugagcugcgacuucaacgggggcaagaucaccgugcaguacaaccugucccacagcuucgccguggacgccgcggggcacugcggcacccucgccaacgggguccugcagacguucaugcggauggccuggggcggcuccuacaucgcccuggacagcgggcgcggcaacugggacugcaucaugaccuccuaccaguaccucaucauccagaacaccaccugggacgaccacugccaguucagccggcccucccccaucggguaccugggccugcucagccagcgcacgcgggacaucuacaucagccgccggcgccggggcaccuucaccuggacccuguccgacagcgaggggaacgagacgccgggcggguacugccugacccgcuggaugcucaucgaggcggagcugaagugcuucggcaacaccgccguggccaagugcaacgagaagcacgacgaggaguucugcgacaugcugcggcuguucgacuucugcaagcaggccauccgccggcugaagacccccgcccagauguccauccagcugaucaacaaggcggugaacgcccucaucaacgaccagcugaucaugaagaaccaccuccgcgacaucauggggauccccuacugcaacuacagccgguacugcuaccucaaccacacguccaccggcaagaccagccugccccgcugcugccugaucuccaacggcagcuaccucaacgagaccaaguucuccgacgacaucgagcagcaggccgacaacaugaucacggagaugcugcagaaggaguacaucgaccggcaggggaagaccccgcugggccuggucgaccucuucguguucagcaccuccuucuaccugaucagcaucuuccugcaccucgugaagauccccacccaccgccacaucgucgggaagcccugccccaagccgcaccggcugaaccacaugggcaucugcuccugcgggcuguacaagcagcccggcgugcccgugcgcuggaagcgcugaggacuagucccuguucccagagcccacuuuuuuuucuuuuuuugaaauaaaauagccugucuuucagaucucaaaggcucuuuucagagccaccaaaaaaaaaaaaaaaaaaaaaaaaaaaaaaaaaaaaaaaaaaaaaaaaaaaaaaaaaaaaaaaaaaaaaaaaaaaaaaaaaaaaaaaaaaaaaaaaaaaaa

SEQ ID NO: 26665 - RNA, 1748 nt, Artificial Sequence
  mRNA product Design a-1 (hSL-A100) comprising derived and/or modified sequence from LASV(AV;Clade V)__CCA30314__GPCmut4 (opt1)
aggagagucccgcagucggcguccagcggcucugcuuguucgugugugugucguugcaggccuuauucaagcuuaccaugggccagaucgugaccuucuuccaggaggucccccacgugaucgaggaggugaugaacaucguccugaucgcccucagcauccuggccgugcugaaggggcucuacaacaucgcgaccugcggccugaucgggcugaucacguuccuccugcugugcggccgcuccugcagcuccaaccucuacaaggggguguacgagcugcagagccuggaccucaacauggagacccugaacaugugcaugccgcuguccugcaccaagaacaacagccaccacuacauccgggucggcaacgacaccggccucgagcugacgcugaccaacaccuccauccucaaccacaaguucugcaaccugagcgacgcccacaagaaggaccuguacgaccacgcccucauguccaucaucagcaccuuccaccuguccauccccaacuucaaccaguacgaggccaugagcugcgacuucaacgggggcaagaucuccgugcaguacaaccugagccacuccuacgccaucgacgcggccaaccacugcgggacgguggccaacggcauccuccagaccuucaugcgcauggccuggggcgggagcuacaucgcgcuggacuccggccgggggaacugggacugcaucaugaccagcuaccaguaccugaucauccagaacaccacgugggagaaccacugccaguucucccgccccagccccaucggcuaccucgggcugcugagccagcggacccgcgacaucuacaucucccggcgccggcgcggcaccuucaccuggacgcucagcgacuccgagggcaacgccacccccgggggcuacugccugacccgguggaugcugaucgaggccgagcucaagugcuucgggaacaccgccgucgccaagugcaacgagaagcacgacgaggaguucugcgacaugcugcgccuguucgacuucugcaagcaggcgaucagccggcucaaguccccggcccagaugagcauccagcugaucaacaaggccgugaacgcccugaucaacgaccagcucaucaugaagaaccaccuccgcgacaucaugggcauccccuacugcaacuacuccaaguacugcuaccugaaccacacgaucaccgggaagaccagccugcccaagugcugccugguguccaacggcagcuaccugaacgagacccacuucuccgacgacaucgagcagcaggccgacaacaugaucacggagaugcuccagaaggaguacauggagcggcagggcaagaccccgcuggggcuggucgaccuguucguguucagcaccuccuucuaccucaucagcaucuuccugcgccuggugaagauccccacccaccggcacaucgucggcaagcccugccccaagccgcaccgccucaaccacauggggaucugcuccugcggccuguacaagcagcccggggugcccgugcgguggaagcgcugaggacuagucccuguucccagagcccacuuuuuuuucuuuuuuugaaauaaaauagccugucuuucagaucucaaaggcucuuuucagagccaccaaaaaaaaaaaaaaaaaaaaaaaaaaaaaaaaaaaaaaaaaaaaaaaaaaaaaaaaaaaaaaaaaaaaaaaaaaaaaaaaaaaaaaaaaaaaaaaaaaaaa

SEQ ID NO: 26666 - RNA, 1745 nt, Artificial Sequence
  mRNA product Design a-1 (hSL-A100) comprising derived and/or modified sequence from LASV(Togo/2016/7082;Clade VI)__AMR44577__GPCmut4 (opt1)
aggagagucccgcagucggcguccagcggcucugcuuguucgugugugugucguugcaggccuuauucaagcuuaccaugggccagaucaucaccuucuuccaggaggugccccacgucaucgaggaggugaugaacaucgugcugaucgcccucagccugcuggccauccucaagggggucuacaacguggcgaccugcggcaucaucgggcuggugacguuccuguuccucugcggccgcuccugcagccugaucuacaagggguccuacgagcugcagacccucgagcugaacauggagacccugaacaugugcaugccgcucagcugcaccaagaacuccagccaccacuacauccgggucggcaacgagacgggccuggagcugacccucaccaacaccuccaucaucaaccacaaguucugcaaccugagcgacgcccacaagcgcaaccuguacgaccacgcccucauguccauccugagcacguuccaccuguccauccccaacuucaaccaguacgaggccaugagcugcgacuucaacgggggcaagaucuccgugcaguacaaccucagccacgccuacgcgguggacgccgccgagcacugcgggaccgucgccaacggcgugcugcagaccuucaugcggauggcguggggcggguccuacaucgcccuggacagcggccgcgggaacugggacugcaucaugaccuccuaccaguaccucaucauccagaacacgaccugggaggaccacugccaguucagccggcccucccccaucggcuaccuggggcugcucagccagcgcacccgggacaucuacaucagccgccggcgccggggcaccuucacguggacccuguccgacagcgagggcaacgagacccccgggggcuacugccugacccgcuggaugcucaucgaggccgagcugaagugcuucgggaacacggccguggccaagugcaacgagaagcacgacgaggaguucugcgacaugcugcggcuguucgacuucugcaagcaggcgauccagcgccugaaguccccggcccagaugagcauccagcugaucaacaaggccgucaacgcccucaucaacgaccagcugaucaugaagaaccaccuccgggacaugaugggcauccccuacugcaacuacuccaaguacugcuaccucaaccacaccagcuccgggcgcaccagccugcccaagugcugccugguguccaacggcagcuaccucaacgagacccacuucuccgacgacaucgagcagcaggccgacaacaugaucacggagaugcugcagaaggaguacaucgaccggcagggcaagaccccgcuggggcucguggaccuguucgucuucagcaccuccuucuaccugaucagcaucuuccugcaccucaucaagauccccacccaccgccacaucgugggcaagcccugccccaagccgcaccggcugaaccacauggggaucugcuccugcggccuguacaagcagcccggggugcccacgcgcuggaagcggugaggacuagucccuguucccagagcccacuuuuuuuucuuuuuuugaaauaaaauagccugucuuucagaucucaaaggcucuuuucagagccaccaaaaaaaaaaaaaaaaaaaaaaaaaaaaaaaaaaaaaaaaaaaaaaaaaaaaaaaaaaaaaaaaaaaaaaaaaaaaaaaaaaaaaaaaaaaaaaaaaaaaa

SEQ ID NO: 26667 - RNA, 1745 nt, Artificial Sequence
  mRNA product Design a-1 (hSL-A100) comprising derived and/or modified sequence from LASV(KAK-428;Clade n.d. (VII))__ANH09740__GPCmut4 (opt1)
aggagagucccgcagucggcguccagcggcucugcuuguucgugugugugucguugcaggccuuauucaagcuuaccaugggccagaucgugaccuucuuccaggaggucccccacgugaucgaggaggugaugaacaucguccugaucgcccucagccugcuggccauccucaaggggcuguacaacuucgcgaccugcggcgugaucgggcugaucacguuccuccugcugugcggccgcuccugcagcgccaccuacaaggggcaguacgagcuccagacccuggagcugaacauggagucccucaacaugugcaugccgcugagcugcaccaagaacaacucccaccacuacauccgggccggcaacaacacgggccuggagcucacccugaccaacaccagcaucaucucccacaaguucugcaaccugagcgacgcccacaagaagaaccucuacgaccacacgcugauguccaucaucaccaccuuccaccugagcauccccaacuucaaccaguacgaggccauguccugcgacuucaacgggggcaagaucagcauccaguacaaccucucccacagcuacgcgggggacgccgcccagcacugcggcaccguggccaacgggguccugcagacguucaugcgcauggcguggggcggcuccuaccuggcccucgacagcgggcggcgcggcugggacugcaucaucuccagcuaccaguaccugaucauccagaacaccaccugggacgaccacugccaguucucccggcccagccccaucggguaccugggcuucgugagccagaagacccgcgacaucuacaucucccggcgccggcgcggcacguucaccuggacccucagcgacuccgaggggcacgacaugccgggcggguacugccugacccgguggaugcugaucgaggccgaccucaagugcuucggcaacacggccguggccaagugcaacgagaagcacgacgaggaguucugcgacauguggcgccuguucgacuucugcaagcaggcgauccagcggcugaaggcccccgcccagaugaacauccagcucaucaacaaggccgucaacgcccugaucaacgaccagcugaugaugaagaaccaccuccgcgacaucauggggauccccuacugcaacuacagcaaguucugcuaccugaacaacaccaccaccggccggacgucccugccccgcugcugccucaucagcaacggcuccuaccugaacgagacccacuucagcgacgacaucgagcagcaggcggacaacaugaucaccgagaugcugcagaaggaguacauggaccggcaggggaagaccccgcucggccugguggaccuguucguguucuccacgagcuucuaccucaucaccaucuuccugcaccuggucaagauccccacccaccgccacaucguggggaagcccugccccaagccgcaccggcugaaccacaugggcaucugcuccugcgggcucuacaagcagcccggcgugcccguccgcuggaagcggugaggacuagucccuguucccagagcccacuuuuuuuucuuuuuuugaaauaaaauagccugucuuucagaucucaaaggcucuuuucagagccaccaaaaaaaaaaaaaaaaaaaaaaaaaaaaaaaaaaaaaaaaaaaaaaaaaaaaaaaaaaaaaaaaaaaaaaaaaaaaaaaaaaaaaaaaaaaaaaaaaaaaa

SEQ ID NO: 26668 - RNA, 1745 nt, Artificial Sequence; identical to SEQ ID NO: 26662
  mRNA product Design a-1 (hSL-A100) comprising derived and/or modified sequence from LASV(Pinneo-NIG-1969;Clade I)__AIT17836__GPCmut4 (opt1)

SEQ ID NO: 26669 - RNA, 1745 nt, Artificial Sequence
  mRNA product Design a-1 (hSL-A100) comprising derived and/or modified sequence from LASV(ISTH0009-NIG-2011;Clade II)__AIT17404__GPCmut4 (opt1)
aggagagucccgcagucggcguccagcggcucugcuuguucgugugugugucguugcaggccuuauucaagcuuaccaugggccagaucaucaccuucuuccaggaggugccccacgucaucgaggaggugaugaacaucgugcugaucgcccucagccugcuggccauccucaaggggaucuacaacgucgcgaccugcggccuguucgggcugguguccuuccuccugcugugcggccgcagcugcuccacgaccuacaaggggguguacgagcuccagacccuggagcuggacauggccagccucaacaugugcaugccgcuguccugcaccaagaacaacagccaccacuacaucauggucggcaacgagacgggccuggagcucacccugaccaacaccuccaucaucaaccacaaguucugcaaccugagcgacgcccacaagaagaaccucuacgaccacgcccugauguccaucaucagcacguuccaccuguccauccccaacuucaaccaguacgaggccaugagcugcgacuucaacgggggcaagaucuccgugcaguacaaccucagccacgcguacgccguggacgccgccaaccacugcgggaccaucgcgaacggcguccugcagaccuucaugcggauggccuggggcggguccuacaucgcccuggacagcggcaagggguccugggacugcaucaugaccagcuaccaguaccucaucauccagaacacgaccugggaggaccacugccaguucucccgccccagccccaucggcuaccuggggcugcucagccagcggacccgcgacaucuacaucucccggcgccggcgcggcaccuucacguggacccugagcgacuccgagggcaacgagacccccgggggcuacugccugacccgguggaugcucaucgaggccgagcugaagugcuucgggaacacggccguggcgaagugcaacgagaagcacgacgaggaguucugcgacaugcugcgccucuucgacuucugcaagcaggccauccggcgccugaagaccccggcccagaugagcauccagcugaucaacaaggccgugaacgcccucaucaacgaccagcugaucaugaagaaccaccuccgggacaucaugggcauccccuacugcaacuacuccaaguacugcuaccugaaccacaccgucaccgggaagacgagccugccccgcugcugccugguguccaacggcagcuaccucaacgagacccacuucuccgacgacaucgagcagcaggcggacaacaugaucaccgagcugcugcagaaggaguacauggaccggcagggcaagaccccgcucgggcugguggaccuguucgucuucagcacguccuucuaccugaucagcaucuuccuccaccugaucaagauccccacccaccgccacaucaccggcaagcccugccccaagccgcaccggcugaaccacauggggaucugcuccugcggccucuacaagcaccccggggugcccgugaaguggaagcgcugaggacuagucccuguucccagagcccacuuuuuuuucuuuuuuugaaauaaaauagccugucuuucagaucucaaaggcucuuuucagagccaccaaaaaaaaaaaaaaaaaaaaaaaaaaaaaaaaaaaaaaaaaaaaaaaaaaaaaaaaaaaaaaaaaaaaaaaaaaaaaaaaaaaaaaaaaaaaaaaaaaaaa

SEQ ID NO: 26670 - RNA, 1745 nt, Artificial Sequence
  mRNA product Design a-1 (hSL-A100) comprising derived and/or modified sequence from LASV(ISTH2010-NIG-2012;Clade II)__AIT17482__GPCmut4 (opt1)
aggagagucccgcagucggcguccagcggcucugcuuguucgugugugugucguugcaggccuuauucaagcuuaccaugggccagaucaucaccuucuuccaggaggugccccacgucaucgaggaggugaugaacaucgugcugaucgcccucagccugcuggccauccucaaggggaucuacaacgucgcgaccugcggccuguucgggcugguguccuuccuccugcugugcggccgcagcugcuccacgaccuacaaggggguguacgagcuccagacccuggagcuggacauggccagccucaacaugugcaugccgcuguccugcaccaagaacaacagccaccacuacaucauggucggcaacgagacgggccuggagcucacccugaccaacaccuccaucaucaaccacaaguucugcaaccugagcgacgcccacaagaagaaccucuacgaccacgcccugauguccaucaucagcacguuccaccuguccauccccaacuucaaccaguacgaggccaugagcugcgacuucaacgggggcaagaucuccgugcaguacaaccucagccacgcguacgccguggacgccgccaaccacugcgggaccaucgcgaacggcguccugcagaccuucaugcggauggccuggggcggguccuacaucgcccuggacagcggcaagggguccugggacugcaucaugaccagcuaccaguaccucaucauccagaacaucacgugggaggaccacugccaguucucccgccccagccccaucggcuaccuggggcugcucagccagcggacccgcgacaucuacaucucccggcgccggcgcggcaccuucaccuggacgcugagcgacuccgagggcaacgagacccccgggggcuacugccugacccgguggaugcucaucgaggccgagcugaagugcuucgggaacaccgccguggcgaagugcaacgagaagcacgacgaggaguucugcgacaugcugcgccucuucgacuucugcaagcaggccauccggcgccugaagacgccggcccagaugagcauccagcugaucaacaaggccgugaacgcccucaucaacgaccagcugaucaugaagaaccaccuccgggacaucaugggcauccccuacugcaacuacuccaaguacugcuaccugaaccacaccgucaccgggaagaccagccugccccgcugcugccugguguccaacggcagcuaccucaacgagacgcacuucuccgacgacaucgagcagcaggcggacaacaugaucaccgagcugcugcagaaggaguacaucgaccggcagggcaagaccccgcucgggcugguggaccuguucgucuucagcaccuccuucuaccugaucagcaucuuccuccaccuggugaagauccccacgcaccgccacguggucggcaagcccugccccaagccgcaccggcugaaccacauggggaucugcuccugcggccucuacaagcaccccggggugcccgugaaguggaagcgcugaggacuagucccuguucccagagcccacuuuuuuuucuuuuuuugaaauaaaauagccugucuuucagaucucaaaggcucuuuucagagccaccaaaaaaaaaaaaaaaaaaaaaaaaaaaaaaaaaaaaaaaaaaaaaaaaaaaaaaaaaaaaaaaaaaaaaaaaaaaaaaaaaaaaaaaaaaaaaaaaaaaaa

SEQ ID NO: 26671 - RNA, 1745 nt, Artificial Sequence
  mRNA product Design a-1 (hSL-A100) comprising derived and/or modified sequence from LASV(Lassa virus/H.sapiens-wt/NGA/2015/ISTH_0543;Clade II)__AVO03639__GPCmut4 (opt1)
aggagagucccgcagucggcguccagcggcucugcuuguucgugugugugucguugcaggccuuauucaagcuuaccaugggccagaucaucaccuucuuccaggaggugccccacgucaucgaggaggugaugaacaucgugcugaucgcccucagccugcuggccauccucaaggggaucuacaacgucgcgaccugcggccuguucgggcugguguccuuccuccugcugugcggccgcagcugcuccacgaccuacaaggggguguacgagcuccagacccuggagcuggacauggccaaccucaacaugugcaugccgcugagcugcaccaagaacaacucccaccacuacaucauggucggcaacgagacgggccuggagcucacccugaccaacaccagcaucaucaaccacaaguucugcaaccuguccgacgcccacaagaagaaccucuacgaccacgcccugaugagcaucaucuccacguuccaccugagcauccccaacuucaaccaguacgaggccauguccugcgacuucaacgggggcaagaucagcgugcaguacaaccucucccacaccuacgcgguggacgccgccaaccacugcgggaccaucgccaacggcguccugcagaccuucaugcggauggcguggggcgggagcuacaucgcccuggacuccggcaaggggagcugggacugcaucaugacguccuaccaguaccucgugauccagaacaccaccugggaggaccacugccaguucagccgccccucccccaucggcuaccuggggcugcucagccagcggacccgcgacaucuacaucagccggcgccggcgcggcacguucaccuggacccuguccgacagcgagggcaacgagacccccgggggcuacugccugacgcgguggaugcucaucgaggccgagcugaagugcuucgggaacaccgccguggccaagugcaacgagaagcacgacgaggaguucugcgacaugcugcgccucuucgacuucugcaagcaggcgauccggcgccugaagaccccggcccagauguccauccagcugaucaacaaggccgucaacgcccucaucaacgaccagcugaucaugaagaaccaccuccgggacaucaugggcauccccuacugcaacuacagcaaguacugcuaccugaaccacaccgugacggggaagaccucccugccccgcugcugccuggugagcaacggcuccuaccucaacgagacccacuucagcgacgacaucgagcagcaggccgacaacaugaucaccgagcugcugcagaaggaguacaucgaccggcagggcaagacgccgcucgggcuggucgaccuguucguguucuccaccagcuucuaccugaucuccaucuuccuccaccuggugaagauccccacccaccgccacaucaccggcaagcccugccccaagccgcaccggcugaaccacauggggaucugcagcugcggccucuacaagcaccccgggguccccgugaaguggaagcgcugaggacuagucccuguucccagagcccacuuuuuuuucuuuuuuugaaauaaaauagccugucuuucagaucucaaaggcucuuuucagagccaccaaaaaaaaaaaaaaaaaaaaaaaaaaaaaaaaaaaaaaaaaaaaaaaaaaaaaaaaaaaaaaaaaaaaaaaaaaaaaaaaaaaaaaaaaaaaaaaaaaaaa

SEQ ID NO: 26672 - RNA, 1745 nt, Artificial Sequence
  mRNA product Design a-1 (hSL-A100) comprising derived and/or modified sequence from LASV(Lassa virus/H.sapiens-wt/NGA/2016/ISTH_0009;Clade II)__AVO03571__GPCmut4 (opt1)
aggagagucccgcagucggcguccagcggcucugcuuguucgugugugugucguugcaggccuuauucaagcuuaccaugggccagaucaucaccuucuuccaggaggugccccacgucaucgaggaggugaugaacaucgugcugaucgcccucagccugcuggccauccucaaggggaucuacaacgucgcgaccugcggccugcuggggcucguguccuuccugcugcucugcggccgcagcugcuccacgaccuacaaggggguguacgagcugcagacccuggagcucgacauggccagccugaacaugugcaugccgcuguccugcaccaagaacaacagccaccacuacaucauggucggcaacgagacgggccucgagcugacccugaccaacaccuccaucaucaaccacaaguucugcaaccucagcgacgcccacaagaagaaccuguacgaccacgcccugauguccaucaucagcacguuccaccucuccauccccaacuucaaccaguacgaggccaugagcugcgacuucaacgggggccggaucuccgugcaguacaaccugagccacuccuacgcgguggacgccgccaaccacugcgggaccaucgccaacggcguccugcagaccuucaugcgcauggcguggggcgggagcuacaucgcccucgacuccggcaaggggagcugggacugcaucaugaccuccuaccaguaccugaucauccagaacacgaccugggaggaccacugccaguucagccggcccagccccaucggcuaccuggggcuccugucccagcgcacccgggacaucuacaucagccgccggcgccggggcaccuucacguggacccuguccgacagcgagggcaacgagacccccgggggcuacugccucacccgcuggaugcugaucgaggccgagcugaagugcuucgggaacacggccguggccaagugcaacgagaagcacgacgaggaguucugcgacaugcuccggcuguucgacuucugcaagcaggcgauccgccggcugaagaccccggcccagauguccauccagcucaucaacaaggccgugaacgcccugaucaacgaccagcugaucaugaagaaccaccuccgcgacaucaugggcauccccuacugcaacuacagcaaguacugcuaccugaaccacaccgucaccgggaagacgucccugccccggugcugccucgugagcaacggcuccuaccugaacgagacccacuucagcgacgacaucgagcagcaggccgacaacaugaucaccgagcugcuccagaaggaguacaucgaccgccagggcaagaccccgcuggggcugguggaccuguucgucuucuccacgagcuucuaccucaucuccaucuuccugcaccuggugaagauccccacccaccggcacaucaccggcaagcccugccccaagccgcaccgccucaaccacauggggaucugcagcugcggccuguacaaccaccccggggugcccgucaaguggaagcggugaggacuagucccuguucccagagcccacuuuuuuuucuuuuuuugaaauaaaauagccugucuuucagaucucaaaggcucuuuucagagccaccaaaaaaaaaaaaaaaaaaaaaaaaaaaaaaaaaaaaaaaaaaaaaaaaaaaaaaaaaaaaaaaaaaaaaaaaaaaaaaaaaaaaaaaaaaaaaaaaaaaaa

SEQ ID NO: 26673 - RNA, 1745 nt, Artificial Sequence
  mRNA product Design a-1 (hSL-A100) comprising derived and/or modified sequence from LASV(Lassa virus/H.sapiens-wt/NGA/2016/ISTH_0017;Clade II)__AVO03567__GPCmut4 (opt1)
aggagagucccgcagucggcguccagcggcucugcuuguucgugugugugucguugcaggccuuauucaagcuuaccaugggccagaucaucaccuucuuccaggaggugccccacgucaucgaggaggugaugaacaucgugcugaucgcccucagccugcuggccauccucaaggggaucuacaacgucgcgaccugcggccuguucgggcugguguccuuccuccugcugugcggccgcagcugcuccacgaccuacaaggggguguacgagcuccagacccuggagcuggacauggccagccucaacaugugcaugccgcuguccugcaccaagaacaacagccaccacuacaucauggucggcaacgagacgggccuggagcucacccugaccaacaccuccaucaucaaccacaaguucugcaaccugagcgacgcccacaagaagaaccucuacgaccacgcccugauguccaucaucagcacguuccaccuguccauccccaacuucaaccaguacgaggccaugagcugcgacuucaacgggggcaagaucuccgugcaguacaaccucagccacaccuacgcgaucgacgccgccaaccacugcgggaccaucgccaacggcgugcugcagaccuucaugcggauggcguggggcggguccuacaucgcccuggacagcggcaagggguccugggacugcaucaugacgagcuaccaguaccucaucauccagaacaccaccugggaggaccacugccaguucucccgccccagccccaucggcuaccuggggcugcucagccagcggacccgcgacaucuacaucucccggcgccggcgcggcacguucaccuggacccugagcgacuccgagggcaacgagacccccgggggcuacugccugacgcgguggaugcucaucgaggccgagcugaagugcuucgggaacaccgccgucgccaagugcaacgagaagcacgacgaggaguucugcgacaugcugcgccucuucgacuucugcaagcaggcgauccggcgccugaagaccccggcccagaugagcauccagcugaucaacaaggccgugaacgcccucaucaacgaccagcugaucaugaagaaccaccuccgggacaucaugggcauccccuacugcaacuacuccaaguacugcuaccugaaccacaccgugacggggaagaccagccugccccgcugcugccuggucuccaacggcagcuaccucaacgagacccacuucuccgacgacaucgagcagcaggccgacaacaugaucaccgagcugcugcagaaggaguacauggaccggcagggcaagacgccgcucgggcugguggaccuguucguguucagcaccuccuucuaccugaucagcaucuuccuccaccugguccgcauccccacccaccggcacgugaucggcaagcccugccccaagccgcaccgccugaaccacauggggaucugcuccugcggccucuacaagcaccccggggugcccgucaaguggaagcggugaggacuagucccuguucccagagcccacuuuuuuuucuuuuuuugaaauaaaauagccugucuuucagaucucaaaggcucuuuucagagccaccaaaaaaaaaaaaaaaaaaaaaaaaaaaaaaaaaaaaaaaaaaaaaaaaaaaaaaaaaaaaaaaaaaaaaaaaaaaaaaaaaaaaaaaaaaaaaaaaaaaaa

SEQ ID NO: 26674 - RNA, 1745 nt, Artificial Sequence
  mRNA product Design a-1 (hSL-A100) comprising derived and/or modified sequence from LASV(Lassa virus/H.sapiens-wt/NGA/2018/ISTH_0959;Clade II)__AVV65099__GPCmut4 (opt1)
aggagagucccgcagucggcguccagcggcucugcuuguucgugugugugucguugcaggccuuauucaagcuuaccaugggccagaucaucaccuucuuccaggaggugccccacgucaucgaggaggugaugaacaucgugcugaucgcccucagccugcuggccauccucaaggggaucuacaacgucgugaccugcggccuguucgggcugguguccuuccuccugcugugcggccgcagcugcuccacgaccuacaagggggucuacgagcuccagacccuggagcuggacauggcgagccucaacaugugcaugccgcuguccugcaccaagaacaacagccaccacuacaucauggugggcaacgagacgggccuggagcucacccugaccaacaccuccaucaucaaccacaaguucugcaaccugagcgacgcccacaagaagaaccucuacgaccacgcccugauguccaucaucagcacguuccaccuguccauccccaacuucaaccaguacgaggccaugagcugcgacuucaacgggggcaagaucuccgugcaguacaaccucagccacgccuacgcgaucgacgccgccaaccacugcgggaccaucgccaacggcguccugcagaccuucaugcggauggcguggggcggguccuacaucgcccuggacagcggcaagggguccugggacugcaucaugaccagcuaccaguaccucaucauccagaacacgaccugggaggaccacugccaguucucccgccccagccccaucggcuaccuggggcugcucagccagcggacccgcgacaucuacaucucccggcgccggcgcggcaccuucacguggacccugagcgacuccgagggcaacgagacccccgggggcuacugccugacccgguggaugcucaucgaggccgagcugaagugcuucgggaacacggccguggccaagugcaacgagaagcacgacgaggaguucugcgacaugcugcgccucuucgacuucugcaagcaggcgauccggcgccugaagaccccggcccagaugagcauccagcugaucaacaaggccgugaacgcccucaucaacgaccagcugaucaugaagaaccaccuccgggacaucaugggcauccccuacugcaacuacuccaaguacugcuaccugaaccacaccgucaccgggaagacgagccugccccgcugcugccugguguccaacggcagcuaccucaacgagacccacuucuccgacgacaucgagcagcaggccgacaacaugaucaccgagcugcugcagaaggaguacaucgaccggcagggcaagaccccgcucgggcugguggaccuguucgucuucagcacguccuucuaccugaucagcaucuuccuccaccuggugaagauccccacccaccgccacgugaucggcaagcccugccccaagccgcaccggcugaaccacauggggaucugcuccugcggccucuacaagcaccccgggguccccgugaaguggaagcgcugaggacuagucccuguucccagagcccacuuuuuuuucuuuuuuugaaauaaaauagccugucuuucagaucucaaaggcucuuuucagagccaccaaaaaaaaaaaaaaaaaaaaaaaaaaaaaaaaaaaaaaaaaaaaaaaaaaaaaaaaaaaaaaaaaaaaaaaaaaaaaaaaaaaaaaaaaaaaaaaaaaaaa

SEQ ID NO: 26675 - RNA, 1745 nt, Artificial Sequence
  mRNA product Design a-1 (hSL-A100) comprising derived and/or modified sequence from LASV(LASV003-NIG-2008;Clade II)__AIT17580__GPCmut4 (opt1)
aggagagucccgcagucggcguccagcggcucugcuuguucgugugugugucguugcaggccuuauucaagcuuaccaugggccagaucaucaccuucuuccaggaggugccccacgucaucgaggaggugaugaacaucgugcugaucgcccucagccugcuggccauccucaaggggaucuacaacgucgcgaccugcggccuguucgggcugguguccuuccuccugcugugcggccgcagcugcuccacgaccuacaaggggguguacgagcuccagacccuggagcuggacauggccagccucaacaugugcaugccgcuguccugcaccaagaacaacagccaccacuacaucauggucggcaacgagacgggccuggagcucacccugaccaacaccuccaucaucaaccacaaguucugcaaccugagcgacgcccacaagaagaaccucuacgaccacgcccugauguccaucaucagcacguuccaccuguccauccccaacuucaaccaguacgaggccaugagcugcgacuucaacgggggcaagaucuccgugcaguacaaccucagccacaccuacgcgguggacgccgccaaccacugcgggaccaucgccaacggcguccugcagaccuucaugcggauggcguggggcggguccuacaucgcccuggacagcggcaagggguccugggacugcaucaugacgagcuaccaguaccucaucauccagaacaccaccugggaggaccacugccaguucucccgccccagccccaucggcuaccuggggcugcucagccagcggacccgcgacaucuacaucucccggcgccggcgcggcacguucaccuggacccugagcgacuccgagagcaacgagaccccgggcggguacugccugacgcgguggaugcucaucgaggccgagcugaagugcuucggcaacaccgccguggccaagugcaacgagaagcacgacgaggaguucugcgacaugcugcgccucuucgacuucugcaagcaggcgauccggcgccugaaggcccccgcccagauguccauccagcugaucaacaaggccgugaacgcccucaucaacgaccagcugaucaugaagaaccaccuccgggacaucauggggauccccuacugcaacuacagcaaguacugcuaccugaaccacaccgucaccggccgcacgucccugccccggugcugccuggugagcaacggguccuaccucaacgagacccacuucagcgacgacaucgagcagcaggcggacaacaugaucaccgagcugcugcagaaggaguacauggaccgccagggcaagaccccgcucggccugguggaccuguucgucuucuccacgagcuucuaccugaucuccaucuuccuccaccuggugaagauccccacccaccggcacgugaucgggaagcccugccccaagccgcaccgccugaaccacaugggcaucugcagcugcgggcucuacaagcaccccggcguccccgugaaguggaagcggugaggacuagucccuguucccagagcccacuuuuuuuucuuuuuuugaaauaaaauagccugucuuucagaucucaaaggcucuuuucagagccaccaaaaaaaaaaaaaaaaaaaaaaaaaaaaaaaaaaaaaaaaaaaaaaaaaaaaaaaaaaaaaaaaaaaaaaaaaaaaaaaaaaaaaaaaaaaaaaaaaaaaa

SEQ ID NO: 26676 - RNA, 1745 nt, Artificial Sequence
  mRNA product Design a-1 (hSL-A100) comprising derived and/or modified sequence from LASV(LASV035-NIG-2009;Clade II)__AIT17588__GPCmut4 (opt1)
aggagagucccgcagucggcguccagcggcucugcuuguucgugugugugucguugcaggccuuauucaagcuuaccaugggccagaucaucaccuucuuccaggaggugccccacgucaucgaggaggugaugaacaucgugcugaucgcccucagccugcuggccauccucaaggggaucuacaacgucgcgaccugcggccuguucgggcugguguccuuccuccugcugugcggccgcagcugcuccacgaccuacaaggggguguacgagcuccagacccuggagcuggacauggccagccucaacaugugcaugccgcuguccugcaccaagaacaacagccaccacuacaucauggucggcaacgagacgggccuggagcucacccugaccaacaccuccaucaucaaccacaaguucugcaaccugagcgacgcccacaagaagaaccucuacgaccacgcccugauguccaucaucagcacguuccaccuguccauccccaacuucaaccaguacgaggccaugagcugcgacuucaacgggggcaagaucuccgugcaguacaaccucagccacgcguacgccguggacgccgccaaccacugcgggaccaucgcgaacggcguccugcagaccuucaugcggauggccuggggcggguccuacaucgcccuggacagcggcaagggguccugggacugcaucaugaccagcuaccaguaccucaucauccagaacacgaccugggaggaccacugccaguucucccgccccagccccaucggcuaccuggggcugcucagccagcggacccgcgacaucuacaucucccggcgccggcgcggcaccuucacguggacccugagcgacuccgagggcaacgagacccccgggggcuacugccugacccgguggaugcucaucgaggccgagcugaagugcuucgggaacacggccguggcgaagugcaacgagaagcacgacgaggaguucugcgacaugcugcgccucuucgacuucugcaagcaggccauccggcgccugaaggccccggcccagaugagcauccagcugaucaacaaggccgugaacgcgcucaucaacgaccagcugaucaugaagaaccaccuccgggacaucaugggcauccccuacugcaacuacuccaaguacugcuaccugaaccacaccgucaccgggaagaccagccugccccgcugcugccugguguccaacggcagcuaccucaacgagacgcacuucuccgacgacaucgagcagcaggccgacaacaugaucaccgagcugcugcagaaggaguacaucgaccggcagggcaagaccccgcucgggcugguggaccuguucgucuucagcaccuccuucuaccugaucagcaucuuccuccaccuggugaagauccccacgcaccgccacgugaucggcaagcccugccccaagccgcaccggcugaaccacauggggaucugcuccugcggccucuacaagcaccccgggguccccgugaaguggaagcgcugaggacuagucccuguucccagagcccacuuuuuuuucuuuuuuugaaauaaaauagccugucuuucagaucucaaaggcucuuuucagagccaccaaaaaaaaaaaaaaaaaaaaaaaaaaaaaaaaaaaaaaaaaaaaaaaaaaaaaaaaaaaaaaaaaaaaaaaaaaaaaaaaaaaaaaaaaaaaaaaaaaaaa

SEQ ID NO: 26677 - RNA, 1745 nt, Artificial Sequence
  mRNA product Design a-1 (hSL-A100) comprising derived and/or modified sequence from LASV(LASV1000-NIG-2009;Clade II)__AIT17782__GPCmut4 (opt1)
aggagagucccgcagucggcguccagcggcucugcuuguucgugugugugucguugcaggccuuauucaagcuuaccaugggccagaucaucaccuucuuccaggaggugccccacgucaucgaggaggugaugaacaucgugcugaucgcccucagccugcuggccauccucaaggggaucuacaacgucgcgaccugcggccuguucgggcugguguccuuccuccugcugugcggccgcagcugcuccacgaccuacaaggggguguacgagcuccagacccuggagcuggacauggccagccucaacaugugcaugccgcuguccugcaccaagaacaacagccaccacuacaucauggucggcaacgagacgggccuggagcucacccugaccaacaccuccaucaucaaccacaaguucugcaaccugagcgacgcccacaagaagaaccucuacgaccacgcccugauguccaucaucagcacguuccaccuguccauccccaacuucaaccaguacgaggccaugagcugcgacuucaacgggggcaagaucuccgugcaguacaaccucagccacaccuacgcgguggacgccgccaaccacugcgggaccaucgccaacggcguccugcagaccuucaugcggauggcguggggcggguccuacaucgcccuggacagcggcaagggguccugggacugcaucaugacgagcuaccaguaccucaucauccagaacaccaccugggaggaccacugccaguucucccgccccagccccaucggcuaccuggggcugcucagccagcggacccgcgacaucuacaucucccggcgccggcgcggcacguucaccuggacccugagcgacuccgagggcaacgagacccccgggggcuacugccugacgcgguggaugcucaucgaggccgagcugaagugcuucgggaacaccgccguggccaagugcaacgagaagcacgacgaggaguucugcgacaugcugcgccucuucgacuucugcaagcaggcgaucaagcggcugaagaccccggcccagaugagcauccagcugaucaacaaggccgugaacgcccucaucaacgaccagcugaucaugaagaaccaccuccgcgacaucaugggcauccccuacugcaacuacuccaaguacugcuaccugaaccacaccgucacggggaagaccagccugccccggugcugccugguguccaacggcagcuaccucaacgagacccacuucuccgacgacaucgagcagcaggccgacaacaugaucaccgagcugcugcagaaggaguacaucgaccgccagggcaagacgccgcucgggcugguggaccuguucgucuucagcaccuccuucuaccugaucagcaucuuccuccaccuggugaagauccccacccaccggcacguggucggcaagcccugccccaagccgcaccgccugaaccacauggggaucugcuccugcggccucuacaagcaccccggggugcccgugaaguggaagcggugaggacuagucccuguucccagagcccacuuuuuuuucuuuuuuugaaauaaaauagccugucuuucagaucucaaaggcucuuuucagagccaccaaaaaaaaaaaaaaaaaaaaaaaaaaaaaaaaaaaaaaaaaaaaaaaaaaaaaaaaaaaaaaaaaaaaaaaaaaaaaaaaaaaaaaaaaaaaaaaaaaaaa

SEQ ID NO: 26678 - RNA, 1745 nt, Artificial Sequence
  mRNA product Design a-1 (hSL-A100) comprising derived and/or modified sequence from LASV(LASV221-NIG-2010;Clade II)__AIT17624__GPCmut4 (opt1)
aggagagucccgcagucggcguccagcggcucugcuuguucgugugugugucguugcaggccuuauucaagcuuaccaugggccagaucaucaccuucuuccaggaggugccccacgucaucgaggaggugaugaacaucgugcugaucgcccucagccugcuggccauccucaaggggaucuacaacgucgcgaccugcggccuguucgggcugguguccuuccuccugcugugcggccgcagcugcuccacgaccuacaaggggguguacgagcuccagacccuggagcuggacauggccagccucaacaugugcaugccgcuguccugcaccaagaacaacagccaccacuacaucauggucggcaacgagacgggccuggagcucacccugaccaacaccuccaucaucaaccacaaguucugcaaccugagcgacgcccacaagaagaaccucuacgaccacgcccugauguccaucaucagcacguuccaccuguccauccccaacuucaaccaguacgaggccaugagcugcgacuucaacgggggcaagaucuccgugcaguacaaccucagccacaccuacgcgaucgacgccgccaaccacugcgggaccaucgccaacggcgugcugcagaccuucaugcggauggcguggggcggguccuacaucgcccuggacagcggcaagggguccugggacugcaucaugacgagcuaccaguaccucaucauccagaacaccaccugggaggaccacugccaguucucccgccccagccccaucggcuaccuggggcugcucagccagcggacccgcgacaucuacaucucccggcgccggcgcggcacguucaccuggacccugagcgacuccgagggcaacgagacccccgggggcuacugccugacgcgguggaugcucaucgaggccgagcugaagugcuucgggaacaccgccgucgccaagugcaacgagaagcacgacgaggaguucugcgacaugcugcgccucuucgacuucugcaagcaggcgauccggcgccugaagaccccggcccagaugagcauccagcugaucaacaaggccgugaacgcccucaucaacgaccagcugaucaugaagaaccaccuccgggacaucaugggcauccccuacugcaacuacuccaaguacugcuaccugaaccacaccgugacggggaagaccagccugccccgcugcugccuggucuccaacggcagcuaccucaacgagacccacuucuccgacgacaucgagcagcaggccgacaacaugaucaccgagaugcugcagaaggaguacauggaccggcagggcaagacgccgcuggggcucguggaccuguucguguucagcaccuccuucuaccugaucagcaucuuccugcaccucgucaagauccccacccaccgccacgugaucggcaagcccugccccaagccgcaccggcugaaccacauggggaucugcuccugcggccuguacaagcaccccggggugcccgucaaguggaagcgcugaggacuagucccuguucccagagcccacuuuuuuuucuuuuuuugaaauaaaauagccugucuuucagaucucaaaggcucuuuucagagccaccaaaaaaaaaaaaaaaaaaaaaaaaaaaaaaaaaaaaaaaaaaaaaaaaaaaaaaaaaaaaaaaaaaaaaaaaaaaaaaaaaaaaaaaaaaaaaaaaaaaaa

SEQ ID NO: 26679 - RNA, 1745 nt, Artificial Sequence
  mRNA product Design a-1 (hSL-A100) comprising derived and/or modified sequence from LASV(LASV237-NIG-2010;Clade II)__AIT17638__GPCmut4 (opt1)
aggagagucccgcagucggcguccagcggcucugcuuguucgugugugugucguugcaggccuuauucaagcuuaccaugggccagaucaucaccuucuuccaggaggugccccacgucaucgaggaggugaugaacaucgugcugaucgcccucagccugcuggccauccucaaggggaucuacaacgucgcgaccugcggccuguucgggcugguguccuuccuccugcugugcggccgcagcugcuccacgaccuacaaggggguguacgagcuccagacccuggagcuggacauggccagccucaacaugugcaugccgcuguccugcaccaagaacaacagccaccacuacaucauggucggcaacgagacgggccuggagcucacccugaccaacaccuccaucaucaaccacaaguucugcaaccugagcgacgcccacaagaaggaccucuacgaccacgcccugauguccaucaucagcacguuccaccuguccauccccaacuucaaccaguacgaggccaugagcugcgacuucaacgggggcaagaucuccgugcaguacaaccucagccacaccuacgcgguggacgccgccaaccacugcgggaccaucgccaacggcguccugcagaccuucaugcggauggcguggggcggguccuacaucgcccuggacagcggcaagggguccugggacugcaucaugacgagcuaccaguaccucaucauccagaacaccaccugggaggaccacugccaguucucccgccccagccccaucggcuaccuggggcugcucagccagcggacccgcgacaucuacaucucccggcgccggcgcggcacguucaccuggacccugagcgacuccgagggcaacgagacccccgggggcuacugccugacgcgguggaugcucaucgaggccgagcugaagugcuucgggaacaccgccguggccaagugcaacgagaagcacgacgaggaguucugcgacaugcugcgccucuucgacuucugcaagcaggcgauccggcgccugaagaccccggcccagaugagcauccagcugaucaacaaggccgugaacgcccucaucaacgaccagcugaucaugaagaaccaccuccgggacaucaugggcauccccuacugcaacuacuccaaguacugcuaccugaaccacaccgucacggggaagaccagccugccccgcugcugccugguguccaacggcagcuaccucaacgagacccacuucuccgacgacaucgagcagcaggccgacaacaugaucaccgagcugcugcagaaggaguacauggaccggcagggcaagacgccgcucgggcugguggaccuguucgucuucagcaccuccuucuaccugaucagcaucuuccuccaccugaucaagauccccacccaccgccacaucaccggcaagcccugccccaagccgcaccggcugaaccacauggggaucugcuccugcggccucuacaagcaccccggggugcccgugaaguggaagcgcugaggacuagucccuguucccagagcccacuuuuuuuucuuuuuuugaaauaaaauagccugucuuucagaucucaaaggcucuuuucagagccaccaaaaaaaaaaaaaaaaaaaaaaaaaaaaaaaaaaaaaaaaaaaaaaaaaaaaaaaaaaaaaaaaaaaaaaaaaaaaaaaaaaaaaaaaaaaaaaaaaaaaa

SEQ ID NO: 26680 - RNA, 1745 nt, Artificial Sequence
  mRNA product Design a-1 (hSL-A100) comprising derived and/or modified sequence from LASV(LASV253-NIG-2011;Clade II)__AIT17670__GPCmut4 (opt1)
aggagagucccgcagucggcguccagcggcucugcuuguucgugugugugucguugcaggccuuauucaagcuuaccaugggccagaucaucaccuucuuccaggaggugccccacgucaucgaggaggugaugaacaucgugcugaucgcccucagccugcuggccauccucaaggggaucuacaacgucgcgaccugcggccuguucgggcugguguccuuccuccugcugugcggccgcagcugcuccacgaccuacaaggggguguacgagcuccagacccuggagcuggacauggccagccucaacaugugcaugccgcuguccugcaccaagaacaacagccaccacuacaucauggucggcaacgagacgggccuggagcucacccugaccaacaccuccaucaucaaccacaaguucugcaaccugagcgacgcccacaagaagaaccucuacgaccacgcccugauguccaucaucagcacguuccaccuguccauccccaacuucaaccaguacgaggccaugagcugcgacuucaacgggggcaagaucuccgugcaguacaaccucagccacaccuacgcgguggacgccgccaaccacugcgggaccaucgccaacggcguccugcagaccuucaugcggauggcguggggcggguccuacaucgcccuggacagcggcaagggguccugggacugcaucaugacgagcuaccaguaccucaucauccagaacaccaccugggaggaccacugccaguucucccgccccagccccaucggcuaccuggggcugcucagccagcggacccgcgacaucuacaucucccggcgccggcgcggcacguucaccuggacccugagcgacuccgagggcaacgagacccccgggggcuacugccugacgcgguggaugcucaucgaggccgagcugaagugcuucgggaacaccgccguggccaagugcaacgagaagcacgacgaggaguucugcgacaugcugcgccucuucgacuucugcaagcaggcgauccggcgccugaaggccccggcccagaugagcauccagcugaucaacaaggccgugaacgcccucaucaacgaccagcugaucaugaagaaccaccuccgggacaucaugggcauccccuacugcaacuacuccaaguacugcuaccugaaccacaccgucaccgggcgcacgagccugccccggugcugccugguguccaacggcagcuaccucaacgagacccacuucuccgacgacaucgagcagcaggcggacaacaugaucaccgagcugcugcagaaggaguacaucgaccgccagggcaagaccccgcucgggcugguggaccuguucgucuucagcacguccuucuaccugaucagcaucuuccuccaccuggugaagauccccacccaccggcacaucaucggcaagcccugccccaagccgcaccgccugaaccacauggggaucugcuccugcggccucuacaagcaccccggggugcccgucaaguggaagcggugaggacuagucccuguucccagagcccacuuuuuuuucuuuuuuugaaauaaaauagccugucuuucagaucucaaaggcucuuuucagagccaccaaaaaaaaaaaaaaaaaaaaaaaaaaaaaaaaaaaaaaaaaaaaaaaaaaaaaaaaaaaaaaaaaaaaaaaaaaaaaaaaaaaaaaaaaaaaaaaaaaaaa

SEQ ID NO: 26681 - RNA, 1745 nt, Artificial Sequence
  mRNA product Design a-1 (hSL-A100) comprising derived and/or modified sequence from LASV(LASV254-NIG-2011;Clade II)__AIT17674__GPCmut4 (opt1)
aggagagucccgcagucggcguccagcggcucugcuuguucgugugugugucguugcaggccuuauucaagcuuaccaugggccagaucaucaccuucuuccaggaggugccccacgucaucgaggaggugaugaacaucgugcugaucgcccucagccugcuggccauccucaaggggaucuacaacgucgcgaccugcggccuguucgggcugguguccuuccuccugcugugcggccgcagcugcuccacgaccuacaaggggguguacgagcuccagacccuggagcuggacaugaccaaccucaacaugugcaugccgcugagcugcacgaagaacaacucccaccacuacaucauggucggcaacgagaccggccuggagcucacccugaccaacacgagcaucaucaaccacaaguucugcaaccuguccgacgcccacaagaagaaccucuacaaccacgcccugaugagcaucaucuccaccuuccaccugagcauccccaacuucaaccaguacgaggccauguccugcgacuucaacgggggcaagaucagcgugcaguacaaccucucccacagcuacgccguggacgcggccaaccacugcgggaccaucgccaacggcguccugcagaccuucaugcggauggccuggggcggguccuacaucgcgcuggacagcggcaaggggaacugggacugcaucaugacguccuaccaguaccucaucauccagaacaccaccugggaggaccacugccaguucagccgccccucccccaucggcuaccuggggcugcucagccagcggacccgcgacaucuacaucagccggcgccggcgcggcacguucaccuggacccuguccgacagcgagggcaacgagacccccgggggcuacugccugacgcgguggaugcucaucgaggccgagcugaagugcuucgggaacaccgccguggccaagugcaacgagaagcacgacgaggaguucugcgacaugcugcgccucuucgacuucugcaagcaggccauccggcgccugaagaccccggcgcaggccaacauccagcugaucaacaaggccgugaacgcccucaucaacgaccagcugaucaugaagaaccaccuccgggacaucaugggcauccccuacugcaacuacuccaaguacugcuaccugaaccacaccgucacggggaagaccagccugccccgcugcugccugguguccaacggcagcuaccucaacgagacccacuucuccgacgacaucgagcagcaggccgacaacaugaucaccgagcugcugcagaaggaguacauggaccggcagggcaagacgccgcucgggcugguggaccuguucgucuucagcaccuccuucuaccugaucagcaucuuccuccaccuggugaagauccccacccaccgccacgugaucggcaagcccugccccaagccgcaccggcugaaccacauggggaucugcuccugcggccucuacaagcaccccgggguccccgugaaguggaagcgcugaggacuagucccuguucccagagcccacuuuuuuuucuuuuuuugaaauaaaauagccugucuuucagaucucaaaggcucuuuucagagccaccaaaaaaaaaaaaaaaaaaaaaaaaaaaaaaaaaaaaaaaaaaaaaaaaaaaaaaaaaaaaaaaaaaaaaaaaaaaaaaaaaaaaaaaaaaaaaaaaaaaaa

SEQ ID NO: 26682 - RNA, 1745 nt, Artificial Sequence
  mRNA product Design a-1 (hSL-A100) comprising derived and/or modified sequence from LASV(Nig08-A19;Clade III)__ADU56618__GPCmut4 (opt1)
aggagagucccgcagucggcguccagcggcucugcuuguucgugugugugucguugcaggccuuauucaagcuuaccaugggccagaucgugaccuucuuccaggaggucccccacgugaucgaggaggugaugaacaucguccugaucgcccucagcauccuggccauccugaaggggcucuacaacaucgcgaccugcggccugaucgggcuggugacguuccuccugcuguccggccgcagcugcuccaugaccuacaaggggguguacgagcuccagacccuggagcugaacaugaacacccucaacaugugcaugccgcugagcugcacgaagaacaacucccaccacuacaucauggucggcaacgagaccggccuggagcucacccugaccaacacgagccugcuccaccacaaguucugcaaccuguccgacgcccacaagaagaaccuguacgaccacacccucaugagcaucaucuccaccuuccaccugagcauccccaacuucaaccaguacgaggccauguccugcgacuucaacgggggcaagaucaccgugcaguacaaccugagccacuccuacgccaucgacgccgcgaaccacugcgggacgguggccaacggcguccuccagaccuucaugcggauggccuggggcgggagcuacaucgcccuggacuccggccgcgggaagugggacugcaucaugaccagcuaccaguaccugaucauccagaacaccacgugggaggaccacugccaguucucccggcccagccccaucggcuaccucgggcugcugucccagcgcacccgggacaucuacaucagccgccggcgccggggcaccuucaccuggacgcucagcgacuccgagggcaacgagacccccgggggcuacugccugacccgcuggaugcugaucgaggcggagcucaagugcuucgggaacaccgccguggccaagugcaacgagaagcacgacgaggaguucugcgacaugcugcggcuguucgacuucugcaagcaggccauccgccggcucaaggccccggcgcagaugagcauccagcugaucaacaaggccgugaacgcccugaucaacgaccagcucaucaugaagaaccaccuccgcgacaucaugggcauccccuacugcaacuacuccaaguacugcuaccugaaccacacgagcaccgggcggaccucccugccccgcugcugccuggucagcaacggcuccuaccugaacgagacccacuucagcgacgacaucgagcagcaggccgacaacaugaucacggagaugcuccagaaggaguaccuggaccggcagggcaagaccccgcuggggcugguggaccucuucguguucuccaccagcuucuaccugaucuccaucuuccugcaccucgucaagauccccacccaccgccacaucgugggcaagcccugccccaagccgcaccggcugaaccacauggggaucugcagcugcggccuguacaagcagcccggggugcccguccgcuggaagcggugaggacuagucccuguucccagagcccacuuuuuuuucuuuuuuugaaauaaaauagccugucuuucagaucucaaaggcucuuuucagagccaccaaaaaaaaaaaaaaaaaaaaaaaaaaaaaaaaaaaaaaaaaaaaaaaaaaaaaaaaaaaaaaaaaaaaaaaaaaaaaaaaaaaaaaaaaaaaaaaaaaaaa

SEQ ID NO: 26683 - RNA, 1748 nt, Artificial Sequence
  mRNA product Design a-1 (hSL-A100) comprising derived and/or modified sequence from LASV(G1180-SLE-2010;Clade IV)__AIT17168__GPCmut4 (opt1)
aggagagucccgcagucggcguccagcggcucugcuuguucgugugugugucguugcaggccuuauucaagcuuaccaugggccagaucgugaccuucuuccaggaggucccccacgugaucgaggaggugaugaacaucguccugaucgcccucagcauccuggccgugcugaaggggcucuacaacuucgcgaccugcggccugguggggcugcucacguuccugcugcucugcggccgcuccugcaccgccagccgguacaagggggucuacgagcugcagacccuggagcucaacauggagacccugaacaugugcaugccgcuguccugcacgaagaacaacagccaccacuacaucauggugggcaacgagaccggccucgagcugacccugaccaacacguccaucaucaaccacaaguucugcaaccucagcgacgcccacaagaagaaccuguacgaccacgcccugauguccaucaucagcaccuuccaccucuccauccccaacuucaaccaguacgaggccaugagcugcgacuucaacgggggcaagaucuccgugcaguacaaccugagccacuccuacgcgggggacgccgccaaccacugcggcaccgucgccaacggggugcugcagaccuucaugcgcauggcguggggcggcagcuacaucgcccucgacuccgggcacggcagcugggacugcaucaugacguccuaccaguaccugaucauccagaacaccaccugggaggaccacugccaguucagccggcccucccccaucggguaccugggccuccugagccagcgcacccgggacaucuacaucagccgccggcgccggggcacguucaccuggacccuguccgacagcgaggggaaggacaccccgggcggguacugccucacgcgcuggaugcugaucgaggccgagcugaagugcuucggcaacaccgccguggccaagugcaacgagaagcacgacgaggaguucugcgacaugcuccggcuguucgacuucugcaagcaggcgauccagcgccugaaggcccccgcccagauguccauccagcucaucaacaaggccgucaacgcccugaucaacgaccagcugaucaugaagaaccaccuccgggacaucauggggauccccuacugcaacuacagcaaguacugcuaccugaaccacaccaccacgggcaagaccucccugcccaagugcugccucgugagcaacggcuccuaccugaacgagacccacuucagcgacgacaucgagcagcaggcggacaacaugaucaccgagaugcugcagaaggaguacauggagcgccaggggaagacgccgcucggccugguggaccuguucgucuucuccaccagcuucuaccugaucuccaucuuccuccaccuggugaagauccccacccaccggcacaucgugggcaagagcugccccaagccccaccgccugaaccacauggggaucugcuccugcgggcucuacaagcagccgggcguccccgugaaguggaagcggugaggacuagucccuguucccagagcccacuuuuuuuucuuuuuuugaaauaaaauagccugucuuucagaucucaaaggcucuuuucagagccaccaaaaaaaaaaaaaaaaaaaaaaaaaaaaaaaaaaaaaaaaaaaaaaaaaaaaaaaaaaaaaaaaaaaaaaaaaaaaaaaaaaaaaaaaaaaaaaaaaaaaa

SEQ ID NO: 26684 - RNA, 1748 nt, Artificial Sequence
  mRNA product Design a-1 (hSL-A100) comprising derived and/or modified sequence from LASV(G1442-SLE-2011;Clade IV)__AIT17180__GPCmut4 (opt1)
aggagagucccgcagucggcguccagcggcucugcuuguucgugugugugucguugcaggccuuauucaagcuuaccaugggccagaucgugaccuucuuccaggaggucccccacgugaucgaggaggugaugaacaucguccugaucgcccucagcauccuggccgugcugaaggggcucuacaacguggcgaccugcggccugaucgggcuggucacguuccuccugcugugcggccgcuccugcaccaccacccucuacaaggggguguacgagcugcagacgcuggagcucaacauggagacccugaacaugugcaugccgcugagcugcaccaagaacaacucccaccacuacauccgggugggcaacgagaccggccucgagcugacgcugaccaacaccagcaucaucaaccacaaguucugcaaccucuccgacgcccacaagaagaaccuguacgaccacgcccugaugagcaucaucuccaccuuccaccucagcauccccaacuucaaccaguacgaggccauguccugcgacuucaacgggggcaagaucagcguccaguacaaccugucccacagcuacgccggggacgcggccaaccacugcggcacgguggccaacggggugcugcagaccuucaugcgcauggccuggggcggcuccuacaucgcgcucgacagcgggcggggcaacugggacugcaucaugaccuccuaccaguaccugaucauccagaacaccacgugggacgaccacugccaguucagccgccccucccccaucggguaccugggccuccugagccagcggacccgcgacgucuacaucucccggcgccggcgcggcaccuucaccuggacgcugagcgacagcgaggggaaggacaccccgggcggguacugccucacccgguggaugcugaucgaggccgagcugaagugcuucggcaacaccgccguggccaagugcaacgagaagcacgacgaggaguucugcgacaugcuccgccuguucgacuucugcaagcaggccauccagcggcugaaggcgcccgcccagauguccauccagcucaucaacaaggccgugaacgcccugaucaacgaccagcugaucaugaagaaccaccuccgcgacaucauggggauccccuacugcaacuacagcaaguacugcuaccugaacaacacggccaccggcaagaccucccugcccaagugcugccucaucagcaacggcuccuaccugaacgagacccacuucagcgacgacaucgagcaggaggcggacaacaugaucacggagaugcugcagaaggaguacauggagcggcaggggaagaccccgcucggccuggucgaccuguucguguucuccaccagcuucuaccugaucuccaucuuccuccaccuggugaagauccccacccaccgccacaucgucggcaagagcugccccaagccccaccggcugaaccacauggggaucugcuccugcgggcucuacaagcagccgggcgugcccgugcgcuggaagcggugaggacuagucccuguucccagagcccacuuuuuuuucuuuuuuugaaauaaaauagccugucuuucagaucucaaaggcucuuuucagagccaccaaaaaaaaaaaaaaaaaaaaaaaaaaaaaaaaaaaaaaaaaaaaaaaaaaaaaaaaaaaaaaaaaaaaaaaaaaaaaaaaaaaaaaaaaaaaaaaaaaaaa

SEQ ID NO: 26685 - RNA, 1748 nt, Artificial Sequence
  mRNA product Design a-1 (hSL-A100) comprising derived and/or modified sequence from LASV(G3010-SLE-2013;Clade IV)__AIT17344__GPCmut4 (opt1)
aggagagucccgcagucggcguccagcggcucugcuuguucgugugugugucguugcaggccuuauucaagcuuaccaugggccagaucgugaccuucuuccaggaggucccccacgugaucgaggaggugaugaacaucguccugaucgcccucagcauccuggccgugcugaaggggcucuacaacuucgcgaccugcggccugguggggcuggucacguuccuccugcugugcggccgcuccugcaccaccagccucuacaaggggguguacgagcugcagacccuggagcucaacauggagacgcugaacaugugcaugccgcuguccugcaccaagaacaacagccaccacuacaucauggugggcaacgagaccggccucgagcugacccugacgaacaccuccaucaucaaccacaaguucugcaaccucagcgacgcccacaagaagaaccuguacaaccacgcccugauguccaucaucagcaccuuccaccucuccauccccaacuucaaccaguacgaggccaugagcugcgacuucaacgggggcaagaucuccguccaguacaaccugagccacuccuacgccggggacgcggccagccacugcggcaccguggccaacggggugcugcagacguucaugcggauggccuggggcggcuccuacaucgcgcucgacagcggguacggcaagugggacugcaucaugaccuccuaccaguaccugaucauccagaacaccaccugggaggaccacugccaguucagccgccccucccccaucggguaccugggccuccugagccagcggacgcgcgacaucuacaucagccggcgccggcgcggcaccuucaccuggacccuguccgacagcgaggggaaggacacgccgggcggguacugccucacccgguggaugcugaucgaggccgagcugaagugcuucggcaacaccgccgucgccaagugcaacgagaagcacgacgaggaguucugcgacaugcuccgccuguucgacuucugcaagcaggccauccagcggcugaagacccccgcgcagauguccauccagcucaucaacaaggccgugaacgcccugaucaacgaccagcugaucaugaagaaccaccuccgcgacaucauggggauccccuacugcaacuacagcaaguacugcuaccugaaccacacgaccaccggcaagaccucccugcccaagugcugccucgugagcaacggcuccuaccugaacgagacgcacuucagcgacgacaucgagcagcaggccgacaacaugaucaccgagaugcugcagaaggaguacauggagcggcaggggaagaccccgcucggccuggucgaccuguucguguucuccaccagcuucuaccugaucuccaucuuccuccaccuggugaagauccccacgcaccgccacaucgucggcaagagcugccccaagccccaccggcugaaccacauggggaucugcuccugcgggcucuacaagcagccgggcgugcccgugcgcuggaagcggugaggacuagucccuguucccagagcccacuuuuuuuucuuuuuuugaaauaaaauagccugucuuucagaucucaaaggcucuuuucagagccaccaaaaaaaaaaaaaaaaaaaaaaaaaaaaaaaaaaaaaaaaaaaaaaaaaaaaaaaaaaaaaaaaaaaaaaaaaaaaaaaaaaaaaaaaaaaaaaaaaaaaa

SEQ ID NO: 26686 - RNA, 1748 nt, Artificial Sequence
  mRNA product Design a-1 (hSL-A100) comprising derived and/or modified sequence from LASV(G502-SLE-2009;Clade IV)__AIT17126__GPCmut4 (opt1)
aggagagucccgcagucggcguccagcggcucugcuuguucgugugugugucguugcaggccuuauucaagcuuaccaugggccagaucgugaccuucuuccaggaggucccccacgugaucgaggaggugaugaacaucguccugaucgcccucagcauccuggccgugcugaaggggcucuacaacuucgcgaccugcggccugguggggcugcucacguuccugcugcucugcggccgcuccugcaccaccgggcuguacaagggcgucuacgagcugcagacccucgagcugaacauggagacgcugaacaugugcaugccgcucagcugcaccaagaacaacucccaccacuacaucauggugggcaacgagaccgggcuggagcugacccucacgaacaccagcaucaucaaccacaaguucugcaaccuguccgacgcccacaagaagaaccuguacgaccacgcccucaugagcaucaucuccaccuuccaccugagcauccccaacuucaaccaguacgaggccauguccugcgacuucaacggcgggaagaucagcgugcaguacaaccugucccacagcuacgccggcgacgcggccgaccacugcgggaccgucgccaacggcgugcuccagacguucaugcggauggccuggggcggguccuacaucgcgcuggacagcggccgcgggcggugggacugcaucaugaccuccuaccaguaccugaucauccagaacaccaccugggaggaccacugccaguucagccgccccucccccaucggcuaccucggccugcugagccagcggacgcgcgacaucuacaucucccggcgccggcgcgggaccuucaccuggacccucagcgacagcgagggcaaggacacgcccgggggcuacugccugacccgguggaugcugaucgaggccgagcucaagugcuucgggaacaccgccguggccaagugcaacgagaagcacgacgaggaguucugcgacaugcugcgccuguucgacuucugcaagcaggccauccagcggcucaaggcgccggcccagauguccauccagcugaucaacaaggccgucaacgcccugaucaacgaccagcucgugaugaagaaccaccuccgcgacaucaugggcauccccuacugcaacuacagccgguacugcuaccugaaccacaccacgaccggccgcaccucccugcccaagugcugccuggugagcaacggguccuaccugaacgagacccacuucagcgacgacaucgagcagcaggccgacaacaugaucacggagaugcuccagaaggaguacauggagcggcagggcaagaccccgcuggggcuggucgaccuguucguguucuccaccagcuucuaccucaucuccaucuuccugcaccuggugaagauccccacccaccgccacaucgucggcaagagcugccccaagccccaccggcucaaccacauggggaucugcuccugcggccuguacaagcagccgggcgugcccgugaaguggaagcgcugaggacuagucccuguucccagagcccacuuuuuuuucuuuuuuugaaauaaaauagccugucuuucagaucucaaaggcucuuuucagagccaccaaaaaaaaaaaaaaaaaaaaaaaaaaaaaaaaaaaaaaaaaaaaaaaaaaaaaaaaaaaaaaaaaaaaaaaaaaaaaaaaaaaaaaaaaaaaaaaaaaaaa

SEQ ID NO: 26687 - RNA, 1748 nt, Artificial Sequence
  mRNA product Design a-1 (hSL-A100) comprising derived and/or modified sequence from LASV(G733-SLE-2010;Clade IV)__AIT17154__GPCmut4 (opt1)
aggagagucccgcagucggcguccagcggcucugcuuguucgugugugugucguugcaggccuuauucaagcuuaccaugggccagaucgugaccuucuuccaggaggucccccacgugaucgaggaggugaugaacaucguccugaucgcccucagcauccuggccgugcugaaggggcucuacaacuucgcgaccugcggcaucguggggcuggucuccuuccugcuccugugcggccgcagcugcacgaccucccuguacaaggggguguacgagcuccagacccuggagcugaacauggagacccucaacaugugcaugccgcugagcugcacgaagaacaacucccaccacuacaucauggugggcaacgagaccggccuggagcucacccugaccaacacgagcaucaucaaccacaaguucugcaaccuguccgacgcccacaagaagaaccucuacgaccacgcccugaugagcaucaucuccaccuuccaccugagcauccccaacuucaaccaguacgaggccauguccugcgacuucaacgggggcaagaucagcguccaguacaaccucucccacagcuacgccggggacgcggccaaccacugcggcaccaucgccaacggggugcugcagaccuucaugcggauggccuggggcggcuccuacaucgcgcuggacagcgggcgcgaccggugggacugcaucaugacguccuaccaguaccucaucauccagaacaccaccugggaggaccacugccaguucagccgccccucccccaucggcuaccuggggcugcucagccagcggacccgcgacaucuacaucagccggcgccggcgcggcacguucaccuggacccuguccgacagcgagggcaaggacacccccgggggcuacugccugacgcgguggaugcucaucgaggccgagcugaagugcuucgggaacaccgccguggccaagugcaacgagaagcacgacgaggaguucugcgacaugcugcgccucuucgacuucugcaagcaggccauccagcggcugaaggcgccggcccagauguccauccagcugaucaacaaggccgucaacgcccucaucaacgaccagcugaucaugaagaaccaccuccgcgacaucaugggcauccccuacugcaacuacagcaaguacugcuaccugaaccacaccaccacggggaagaccucccugcccaagugcugccuggugagcaacggcuccuaccucaacgagacccacuucagcgacgacaucgagcagcaggccgacaacaugaucaccgagaugcugcagaaggaguacauggagcggcagggcaagacgccgcuggggcucguggaccuguucgucuucuccaccagcuucuaccugaucuccaucuuccugcaccucgugaagauccccacccaccgccacguggucggcaagagcugccccaagccccaccggcugaaccacauggggaucugcuccugcggccuguacgggcagccgggcgugcccgugaaguggaagcgcugaggacuagucccuguucccagagcccacuuuuuuuucuuuuuuugaaauaaaauagccugucuuucagaucucaaaggcucuuuucagagccaccaaaaaaaaaaaaaaaaaaaaaaaaaaaaaaaaaaaaaaaaaaaaaaaaaaaaaaaaaaaaaaaaaaaaaaaaaaaaaaaaaaaaaaaaaaaaaaaaaaaaa

SEQ ID NO: 26688 - RNA, 1748 nt, Artificial Sequence
  mRNA product Design a-1 (hSL-A100) comprising derived and/or modified sequence from MOPV/LASV reassortant(IGS-1;Clade IV)__AFY05576__GPCmut4 (opt1)
aggagagucccgcagucggcguccagcggcucugcuuguucgugugugugucguugcaggccuuauucaagcuuaccaugggccagaucgugaccuucuuccaggaggucccccacgugaucgaggaggugaugaacaucguccugaucgcccucagcgugcuggccgugcugaaggggcucuacaacuucgcgaccugcggccuggucgggcuggugacguuccuccugcugugcggccgcuccugcaccaccagccucuacaaggggguguacgagcugcagacccuggagcucaacauggagacgcugaacaugugcaugccgcuguccugcaccaagaacaacagccaccacuacaucauggucggcaacgagaccggccucgagcugacccugacgaacaccuccaucaucaaccacaaguucugcaaccucagcgacgcccacaagaagaaccuguacgaccacgcccugauguccaucaucagcaccuuccaccucuccauccccaacuucaaccaguacgaggccaugagcugcgacuucaacgggggcaagaucuccgugcaguacaaccugagccacuccuacgccggggacgcggccaaccacugcggcaccguggccaacgggguccugcagacguucaugcggauggccuggggcggcagcuacaucgcgcucgacuccgggcgcggcaacugggacugcaucaugaccagcuaccaguaccugaucauccagaacaccaccugggaggaccacugccaguucucccggcccagccccaucggguaccugggccuccugucccagcgcacgcgggacaucuacaucagccgccggcgccggggcaccuucaccuggacccugagcgacuccgagggggaggacacgccgggcggguacugccucacccgcuggaugcugaucgaggccgagcugaagugcuucggcaacaccgccguggccaagugcaacgagaagcacgacgaggaguucugcgacaugcuccggcuguucgacuucugcaagcaggccauccagcgccugaaggcgcccgcccagaugagcauccagcucaucaacaaggccgugaacgcccugaucaacgaccagcugaucaugaagaaccaccuccgggacaucauggggauccccuacugcaacuacuccaaguacugcuaccugaaccacaccacgaccggccgcaccagccugcccaagugcugccucgucuccaacggcagcuaccugaacgagacccacuucuccgacgacaucgagcagcaggccgacaacaugaucacggagaugcugcagaaggaguacauggagcggcaggggaagaccccgcucggccugguggaccuguucguguucagcaccuccuucuaccugaucagcaucuuccuccaccuggucaagauccccacccaccgccacaucguggggaaguccugccccaagccccaccggcugaaccacaugggcaucugcagcugcgggcucuacaagcagccgggcgugcccgucaaguggaagcgcugaggacuagucccuguucccagagcccacuuuuuuuucuuuuuuugaaauaaaauagccugucuuucagaucucaaaggcucuuuucagagccaccaaaaaaaaaaaaaaaaaaaaaaaaaaaaaaaaaaaaaaaaaaaaaaaaaaaaaaaaaaaaaaaaaaaaaaaaaaaaaaaaaaaaaaaaaaaaaaaaaaaaa

SEQ ID NO: 26689 - RNA, 1748 nt, Artificial Sequence
  mRNA product Design a-1 (hSL-A100) comprising derived and/or modified sequence from LASV(LM765-SLE-2012;Clade IV)__AIT17814__GPCmut4 (opt1)
aggagagucccgcagucggcguccagcggcucugcuuguucgugugugugucguugcaggccuuauucaagcuuaccaugggccagaucgugaccuucuuccaggaggucccccacgugaucgaggaggugaugaacaucguccugaucgcccucagcauccuggccgugcugaaggggcucuacaacuucgcgaccugcggccugguggggcuggucacguuccuccugcugugcggccgcuccugcaccaccagccucuacaaggggguguacgagcugcagacccuggagcucaacauggagacgcugaacaugugcaugccgcuguccugcaccaagaacaacagccaccacuacaucauggugggcaacgagaccggccucgagcugacccugacgaacaccuccaucaucgaccacaaguucugcaaccucagcgacgcccaccggaagaaccuguacgaccacgcccugauguccaucaucagcaccuuccaccucuccauccccaacuucaaccaguacgaggccaugagcugcgacuucaacgggggcaagaucuccguccaguacaaccugagccacuccuacgccaaggacgcggccgaccacugcgggaccguggccaacggcgugcugcagacguucaugcgcauggccuggggcgggagcuacaucgcgcucgacuccggccgggggcgcugggacugcaucaugaccagcuaccaguaccugaucauccagaacaccaccugggaggaccacugccaguucucccggcccagccccaucggcuaccuggggcuccugucccagcgcacgcgggacaucuacaucagccgccggcgccggggcaccuucaccuggacccugagcgacuccgagggcaaggacacgcccgggggcuacugccucacccgcuggaugcugaucgaggccgagcugaagugcuucgggaacaccgccgucgccaagugcaacgagaagcacgacgaggaguucugcgacaugcuccggcuguucgacuucugcaagcaggccauccagcgccugaaggcgccggcccagaugagcauccagcucaucaacaaggccgugaacgcccugaucaacgaccagcugaucaugaagaaccaccuccgggacaucaugggcauccccuacugcaacuacuccaaguacugcuaccugaaccacaccacgaccgggaagaccagccugcccaagugcugccucguguccaacggcagcuaccugaacgagacccacuucuccgacgacaucgagcagcaggccgacaacaugaucacggagaugcugcagaaggaguacauggagcgccagggcaagaccccgcucgggcuggucgaccuguucguguucagcaccuccuucuaccugaucagcaucuuccuccaccuggugaagauccccacccaccggcacaucgucggcaagcccugccccaagccgcaccgccugaaccacauggggaucugcuccugcggccucuacaagcagcccggggugcccgugaaguggaagcggugaggacuagucccuguucccagagcccacuuuuuuuucuuuuuuugaaauaaaauagccugucuuucagaucucaaaggcucuuuucagagccaccaaaaaaaaaaaaaaaaaaaaaaaaaaaaaaaaaaaaaaaaaaaaaaaaaaaaaaaaaaaaaaaaaaaaaaaaaaaaaaaaaaaaaaaaaaaaaaaaaaaaa

SEQ ID NO: 26690 - RNA, 1748 nt, Artificial Sequence
  mRNA product Design a-1 (hSL-A100) comprising derived and/or modified sequence from LASV(LM776-SLE-2012;Clade IV)__AIT17824__GPCmut4 (opt1)
aggagagucccgcagucggcguccagcggcucugcuuguucgugugugugucguugcaggccuuauucaagcuuaccaugggccagaucgugaccuucuuccaggaggucccccacgugaucgaggaggugaugaacaucguccugaucgcccucagcauccuggccgugcugaaggggcucuacaacuucgcgaccugcggccugguggggcuggucacguuccuccugcugugcggccgcuccugcaccaccagcguguacaaggggguguacgagcuccagacccuggagcugaacauggagacgcucaacaugugcaugccgcuguccugcaccaagaacaacagccaccacuacaucauggucggcaacgagaccggccuggagcucacccugacgaacaccuccaucaucaaccacaaguucugcaaccugagcgacgcccacaagaagaaccucuacgaccacgcccugauguccaucaucagcaccuuccaccuguccauccccaacuucaaccaguacgaggccaugagcugcgacuucaacgggggcaagaucuccgugcaguacaaccucagccacuccuacgccggggacgcggccaaccacugcggcaccguggccaacgggguccugcagacguucaugcggauggccuggggcggcagcuacaucgcgcuggacuccgggcacggcaagugggacugcaucaugaccagcuaccaguaccucaucauccagaacaccaccugggaggaccacugccaguucucccgccccagccccaucggguaccugggccugcucucccagcggacgcgcgacaucuacaucagccggcgccggcgcggcaccuucaccuggacccugagcgacuccgaggggaaggacacgccgggcggguacugccugacccgguggaugcucaucgaggccgagcugaagugcuucggcaacaccgccguggccaagugcaacgagaagcacgacgaggaguucugcgacaugcugcgccucuucgacuucugcaagcaggccauccagcggcugaaggcgcccgcccagaugagcauccagcugaucaacaaggccgugaacgcccucaucaacgaccagcugaucaugaagaaccaccuccgcgacaucauggggauccccuacugcaacuacuccaaguacugcuaccugaaccacaccacgaccggcaagaccagccugcccaagugcugccuggucuccaacggcagcuaccucaacgagacccacuucuccgacgacaucgagcagcaggccgacaacaugaucacggagaugcugcagaaggaguacauggagcggcaggggaagaccccgcugggccucguggaccuguucguguucagcaccuccuucuaccugaucagcaucuuccugcaccucgucaagauccccacccaccgccacaucguggggaaguccugccccaagccccaccggcugaaccacaugggcaucugcagcugcgggcuguacaagcagccgggcgugcccguccgcuggaagcggugaggacuagucccuguucccagagcccacuuuuuuuucuuuuuuugaaauaaaauagccugucuuucagaucucaaaggcucuuuucagagccaccaaaaaaaaaaaaaaaaaaaaaaaaaaaaaaaaaaaaaaaaaaaaaaaaaaaaaaaaaaaaaaaaaaaaaaaaaaaaaaaaaaaaaaaaaaaaaaaaaaaaa

SEQ ID NO: 26691 - RNA, 1748 nt, Artificial Sequence
  mRNA product Design a-1 (hSL-A100) comprising derived and/or modified sequence from LASV(Mad39;Clade IV)__ANH09722__GPCmut4 (opt1)
aggagagucccgcagucggcguccagcggcucugcuuguucgugugugugucguugcaggccuuauucaagcuuaccaugggccagaucgugaccuucuuccaggaggucccccacgugaucgaggaggugaugaacaucguccugaucgcccucagcauccuggccgugcugaaggggcucuacaacguggcgaccugcggccugaucgggcuggucacguuccuccugcugugcggccgcuccugcaccaccacccucuacaaggggguguacgagcugcaggcccuggagcucaacauggagacgcugaacaugugcaugccgcugagcugcaccaagaacaacucccaccacuacauccgggugggcaacgagaccggccucgagcugacccugacgaacaccagccucaucaaccacaaguucugcaaccuguccgacgcccacaagaagaaccuguacgaccacgcccucaugagcaucaucuccaccuuccaccugagcauccccaacuucaaccaguacgaggccauguccugcgacuucaacgacgggaagaucagcguccaguacaaccugucccacaccuacgcgggcgacacggccaaccacugcgggaccguggccaacggcgugcuccagaccuucaugcgcauggccuggggcgggagcuacaucgcgcuggacuccggccgcgggggcugggacugcaucaugaccagcuaccaguaccugaucauccagaacacgaccugggaggaccacugccaguucucccggcccagccccaucggguaccucggccugcugucccagcggacccgcgacaucuacaucagccggcgccggcgcggcaccuucacguggacccucuccgacagcgaggggaaggacaccccgggcggguacugccugacccgguggaugcugaucgaggccgagcucaagugcuucggcaacacggccgucgccaagugcaacgagaagcacgacgaggaguucugcgacaugcugcgccuguucgacuucugcaagcaggccauccagcggcucaaggcgcccgcccagaugagcauccagcugaucaacaaggccgugaacgcccugaucaacgaccagcucaucaugaagaaccaccuccgcgacaucauggggauccccuacugcaacuacuccaaguacugcuaccugaaccacaccgugaccggcaagaccagccugcccaagugcugccuggucuccaacggcagcuaccugaacgagacgcacuucuccgacgacaucgagcagcaggccgacaacaugaucaccgagaugcuccagaaggaguacauggagcggcaggggaagaccccgcugggccugguggaccuguucguguucagcaccuccuucuaccucaucagcaucuuccugcaccuggucaagauccccacgcaccgccacgugguggggaagcccugccccaagccgcaccggcucaaccacaugggcaucugcuccugcggguucuacaagcagcccggcguccccgugcgcuggaagcggugaggacuagucccuguucccagagcccacuuuuuuuucuuuuuuugaaauaaaauagccugucuuucagaucucaaaggcucuuuucagagccaccaaaaaaaaaaaaaaaaaaaaaaaaaaaaaaaaaaaaaaaaaaaaaaaaaaaaaaaaaaaaaaaaaaaaaaaaaaaaaaaaaaaaaaaaaaaaaaaaaaaaa

SEQ ID NO: 26692 - RNA, 1748 nt, Artificial Sequence
  mRNA product Design a-1 (hSL-A100) comprising derived and/or modified sequence from LASV(Z0947-SLE-2011;Clade IV)__AIT17840__GPCmut4 (opt1)
aggagagucccgcagucggcguccagcggcucugcuuguucgugugugugucguugcaggccuuauucaagcuuaccaugggccagaucgugaccuucuuccaggaggucccccacgugaucgaggaggugaugaacaucguccugaucgcccucagcauccuggccgugcugaaggggcucuacaacuucgcgaccugcggccugguggggcuggucacguuccuccugcugugcggccgcuccugcaccaucagccucuacaaggggguguacgagcugcagacccuggagcucaacauggagacccugaacaugugcaugccgcuguccugcacgaagaacaacagccaccacuacaucauggugggcaacgagaccggccucgagcugacccugaccaacacguccaucaucaaccacaaguucugcaaccucagcgacgcccacaagaagaaccuguacgaccacgcccugauguccaucaucagcaccuuccaccucuccauccccaacuucaaccaguacgaggccaugagcugcgacuucaacgggggcaagaucuccguccaguacaaccugagccacuccuacgccggggacgcggccaaccacugcggcaccguggccaacggggugcugcagaccuucaugcggauggccuggggcggcagcuacaucgcgcucgacuccgggcgcgaccggugggacugcaucaugacgagcuaccaguaccugaucauccagaacaccaccugggaggaccacugccaguucucccgccccagccccaucggcuaccuggggcuccugucccagcggacccgcgacaucuacaucagccggcgccggcgcggcacguucaccuggacccugagcgacuccgagggcaaggacacccccgggggcuacugccucacgcgguggaugcugaucgaggccgagcugaagugcuucgggaacaccgccgucgccaagugcaacgagaagcacgacgaggaguucugcgacaugcuccgccuguucgacuucugcaagcaggccauccagcggcugaaggcgccggcccagaugagcauccagcucaucaacaaggccgugaacgcccugaucaacgaccagcugaucaugaagaaccaccuccgcgacaucaugggcauccccuacugcaacuacuccaaguacugcuaccugaaccacaccaccacggggaagaccagccugcccaagugcugccucguguccaacggcagcuaccugaacgagacccacuucuccgacgacaucgagcagcaggccgacaacaugaucaccgagaugcugcagaaggaguacauggagcggcagggcaagacgccgcucgggcuggucgaccuguucguguucagcaccuccuucuaccugaucagcaucuuccuccaccuggugaagauccccacccaccgccacaucgucggcaagcccugccccaagccgcaccggcugaaccacauggggaucugcuccugcggccucuacaagcagcccggggugcccgugaaguggaagcgcugaggacuagucccuguucccagagcccacuuuuuuuucuuuuuuugaaauaaaauagccugucuuucagaucucaaaggcucuuuucagagccaccaaaaaaaaaaaaaaaaaaaaaaaaaaaaaaaaaaaaaaaaaaaaaaaaaaaaaaaaaaaaaaaaaaaaaaaaaaaaaaaaaaaaaaaaaaaaaaaaaaaaa

SEQ ID NO: 26693 - RNA, 1748 nt, Artificial Sequence
  mRNA product Design a-1 (hSL-A100) comprising derived and/or modified sequence from LASV(Josiah;Clade IV)__NP_694870__GPCmut4 (opt4)
aggagagucccgcagucggcguccagcggcucugcuuguucgugugugugucguugcaggccuuauucaagcuuaccaugggccagaucgugaccuucuuccaggaggugccccacgugaucgaggaggugaugaacaucgugcugaucgcccugagcgugcuggccgugcugaagggccuguacaacuucgccaccugcggccuggugggccuggugaccuuccugcugcugugcggcagaagcugcaccaccagccuguacaagggcguguacgagcugcagacccuggagcugaacauggagacccugaacaugugcaugccccugagcugcaccaagaacaacagccaccacuacaucauggugggcaacgagaccggccuggagcugacccugaccaacaccagcaucaucaaccacaaguucugcaaccugagcgacgcccacaagaagaaccuguacgaccacgcccugaugagcaucaucagcaccuuccaccugagcauccccaacuucaaccaguacgaggccaugagcugcgacuucaacggcggcaagaucagcgugcaguacaaccugagccacagcuacgccggcgacgccgccaaccacugcggcaccguggccaacggcgugcugcagaccuucaugagaauggccuggggcggcagcuacaucgcccuggacagcggcagaggcaacugggacugcaucaugaccagcuaccaguaccugaucauccagaacaccaccugggaggaccacugccaguucagcagacccagccccaucggcuaccugggccugcugagccagagaaccagagacaucuacaucagcagaagaagaagaggcaccuucaccuggacccugagcgacagcgagggcaaggacacccccggcggcuacugccugaccagauggaugcugaucgaggccgagcugaagugcuucggcaacaccgccguggccaagugcaacgagaagcacgacgaggaguucugcgacaugcugagacuguucgacuucugcaagcaggccauccagagacugaaggcccccgcccagaugagcauccagcugaucaacaaggccgugaacgcccugaucaacgaccagcugaucaugaagaaccaccugagagacaucaugggcauccccuacugcaacuacagcaaguacugcuaccugaaccacaccaccaccggcagaaccagccugcccaagugcugccuggugagcaacggcagcuaccugaacgagacccacuucagcgacgacaucgagcagcaggccgacaacaugaucaccgagaugcugcagaaggaguacauggagagacagggcaagaccccccugggccugguggaccuguucguguucagcaccagcuucuaccugaucagcaucuuccugcaccuggugaagauccccacccacagacacaucgugggcaagagcugccccaagccccacagacugaaccacaugggcaucugcagcugcggccuguacaagcagcccggcgugcccgugaaguggaagagaugaggacuagucccuguucccagagcccacuuuuuuuucuuuuuuugaaauaaaauagccugucuuucagaucucaaaggcucuuuucagagccaccaaaaaaaaaaaaaaaaaaaaaaaaaaaaaaaaaaaaaaaaaaaaaaaaaaaaaaaaaaaaaaaaaaaaaaaaaaaaaaaaaaaaaaaaaaaaaaaaaaaaa

SEQ ID NO: 26694 - RNA, 1745 nt, Artificial Sequence
  mRNA product Design a-1 (hSL-A100) comprising derived and/or modified sequence from LASV(LP;Clade I)__AAF86701__GPCmut4 (opt4)
aggagagucccgcagucggcguccagcggcucugcuuguucgugugugugucguugcaggccuuauucaagcuuaccaugggccagaucaucaccuucuuccaggaggugccccacgugaucgaggaggugaugaacaucgugcugaucgcccugagccugcuggccauccugaagggccuguacaacaucgccaccugcggcaucaucggccugguggccuuccuguuccugugcggcaagagcugcagccugacccugaagggcggcuacgagcugcagacccuggagcugaacauggagacccugaacaugugcaugccccugagcugcaccaagaacagcagccaccacuacaucagagugggcaacgagaccggccuggagcugacccugaccaacaccagcaucaucaaccacaaguucugcaaccugagcgacgcccacaagaagaaccuguacgaccacgcccugaugagcaucaucagcaccuuccaccugagcauccccaacuucaaccaguacgaggccaugagcugcgacuucaacggcggcaagaucagcgugcaguacaaccugagccacagcuacgccggcgacgccgccgagcacugcggcaccguggccaacggcgugcugcagaccuucaugagaauggccuggggcggcagauacaucgcccuggacagcggcaagggcaacugggacugcaucaugaccagcuaccaguaccugaucauccagaacaccaccugggaggaccacugccaguucagcagacccagccccaucggcuaccugggccugcugagccagagaaccagagacaucuacaucagcagaagaagaagaggcaccuucaccuggacccugagcgacagcgagggcaacgagacccccggcggcuacugccugaccagauggaugcugaucgaggccgagcugaagugcuucggcaacaccgccguggccaagugcaacgagaagcacgacgaggaguucugcgacaugcugagacuguucgacuucugcaagcaggccaucagaagacugaaggcccccgcccagaugagcauccagcugaucaacaaggccgugaacgcccugaucaacgaccagcugaucaugaagaaccaccugagagacaucaugggcauccccuacugcaacuacagcaaguacugcuaccugaaccacaccagcagcggcagaaccagccugcccaagugcugccugaucagcaacggcagcuaccugaacgagacccaguucagcgacgacaucgagcagcaggccgacaacaugaucaccgagaugcugcagaaggaguacaucgagagacagggcaagaccccccugggccugguggacaucuucaucuucagcaccagcuucuaccugaucagcaucuuccugcaccugaucaagauccccacccacagacacaucgugggcaagcccugccccaagccccacagacugaaccacaugggcgugugcagcugcggccuguacaagcaccccggcgugcccaccaaguggaagagaugaggacuagucccuguucccagagcccacuuuuuuuucuuuuuuugaaauaaaauagccugucuuucagaucucaaaggcucuuuucagagccaccaaaaaaaaaaaaaaaaaaaaaaaaaaaaaaaaaaaaaaaaaaaaaaaaaaaaaaaaaaaaaaaaaaaaaaaaaaaaaaaaaaaaaaaaaaaaaaaaaaaaa

SEQ ID NO: 26695 - RNA, 1745 nt, Artificial Sequence
  mRNA product Design a-1 (hSL-A100) comprising derived and/or modified sequence from LASV(803213;Clade II)__AAF86703__GPCmut4 (opt4)
aggagagucccgcagucggcguccagcggcucugcuuguucgugugugugucguugcaggccuuauucaagcuuaccaugggccagaucaucaccuucuuccaggaggugccccacgugaucgaggaggugaugaacaucgugcugaucgcccugagccugcuggccauccugaagggcaucuacaacguggccaccugcggccuguucggccugaucagcuuccugcugcugugcggcagaagcugcagcgugaccuacaagggcguguacgagcugcagacccuggagcugaacauggccaaccugaacaugugcaugccccugagcugcaccaagaacaacagccaccacuacaucauggugggcaacgagaccggccuggagcugacccugaccaacaccagcaucaucaaccacaaguucugcaaccugagcgacgcccacaagaagaaccuguacgaccacgcccugaugagcaucaucagcaccuuccaccugagcauccccaacuucaaccaguacgaggccaugagcugcgacuucaacggcggcaagaucagcgugcaguacaaccugagccacagcuucgccguggacgccgccaaccacugcggcaccaucgccaacggcgugcugcagaccuucaugagaauggccuggggcggcagcuacaucgcccuggacagcggcaagggcaacugggacugcaucaugaccagcuaccaguaccugaucauccagaacaccaccugggaggaccacugccaguucagcagacccagccccaucggcuaccugggccugcugagccagagaaccagagacaucuacaucagcagaagaagaagaggcaccuucaccuggacccugagcgacagcgagggcaacgaggcccccggcggcuacugccugaccagauggaugcugaucgaggccgagcugaagugcuucggcaacaccgccguggccaagugcaacgagaagcacgacgaggaguucugcgacaugcugagacuguucgacuucugcaagcaggccaucaagagacugaagacccccgcccagaugagcauccagcugaucaacaaggccgugaacgcccugaucaacgaccagcugaucaugaagaaccaccugagagacaucaugggcauccccuacugcaacuacagcagauacugcuaccugaaccacaccgugaccggcaagaccagccugcccagaugcugccuggugagcaacggcagcuaccugaacgagacccacuucagcgacgacaucgagcagcaggccgacaacaugaucaccgagaugcugcagaaggaguacauggacagacagggcaagaccccccugggccugguggaccuguucguguucagcaccagcuucuaccugaucagcaucuuccugcaccuggugaagauccccacccacagacacaucgugggcaagcccugccccaagccccacagacugaaccacaugggcaucugcagcugcggccuguacaagcaccccggcgugcccgugaaguggaagagaugaggacuagucccuguucccagagcccacuuuuuuuucuuuuuuugaaauaaaauagccugucuuucagaucucaaaggcucuuuucagagccaccaaaaaaaaaaaaaaaaaaaaaaaaaaaaaaaaaaaaaaaaaaaaaaaaaaaaaaaaaaaaaaaaaaaaaaaaaaaaaaaaaaaaaaaaaaaaaaaaaaaaa

SEQ ID NO: 26696 - RNA, 1745 nt, Artificial Sequence
  mRNA product Design a-1 (hSL-A100) comprising derived and/or modified sequence from LASV(GA391;Clade III)__CAA36645__GPCmut4 (opt4)
aggagagucccgcagucggcguccagcggcucugcuuguucgugugugugucguugcaggccuuauucaagcuuaccaugggccagaucgugaccuucuuccaggaggugccccacgugaucgaggaggugaugaacaucgugcugaucgcccugagcauccuggccauccugaagggccuguacaacguggccaccugcggccugaucggccuggugaccuuccugcugcugagcggcagaagcugcagccugaucuacaagggcaccuacgagcugcagacccuggagcugaacauggagacccugaacaugugcaugccccugagcugcaccaagaacaacagccaccacuacaucagagugggcaacgagaccggccuggagcugacccugaccaacaccagcauccugaaccacaaguucugcaaccugagcgacgcccacaagagaaaccuguacgaccacagccugaugagcaucaucagcaccuuccaccugagcauccccaacuucaaccaguacgaggccaugagcugcgacuucaacggcggcaagaucaccgugcaguacaaccugagccacagcuucgccguggacgccgccggccacugcggcacccuggccaacggcgugcugcagaccuucaugagaauggccuggggcggcagcuacaucgcccuggacagcggcagaggcaacugggacugcaucaugaccagcuaccaguaccugaucauccagaacaccaccugggacgaccacugccaguucagcagacccagccccaucggcuaccugggccugcugagccagagaaccagagacaucuacaucagcagaagaagaagaggcaccuucaccuggacccugagcgacagcgagggcaacgagacccccggcggcuacugccugaccagauggaugcugaucgaggccgagcugaagugcuucggcaacaccgccguggccaagugcaacgagaagcacgacgaggaguucugcgacaugcugagacuguucgacuucugcaagcaggccaucagaagacugaagacccccgcccagaugagcauccagcugaucaacaaggccgugaacgcccugaucaacgaccagcugaucaugaagaaccaccugagagacaucaugggcauccccuacugcaacuacagcagauacugcuaccugaaccacaccagcaccggcaagaccagccugcccagaugcugccugaucagcaacggcagcuaccugaacgagaccaaguucagcgacgacaucgagcagcaggccgacaacaugaucaccgagaugcugcagaaggaguacaucgacagacagggcaagaccccccugggccugguggaccuguucguguucagcaccagcuucuaccugaucagcaucuuccugcaccuggugaagauccccacccacagacacaucgugggcaagcccugccccaagccccacagacugaaccacaugggcaucugcagcugcggccuguacaagcagcccggcgugcccgugagauggaagagaugaggacuagucccuguucccagagcccacuuuuuuuucuuuuuuugaaauaaaauagccugucuuucagaucucaaaggcucuuuucagagccaccaaaaaaaaaaaaaaaaaaaaaaaaaaaaaaaaaaaaaaaaaaaaaaaaaaaaaaaaaaaaaaaaaaaaaaaaaaaaaaaaaaaaaaaaaaaaaaaaaaaaa

SEQ ID NO: 26697 - RNA, 1748 nt, Artificial Sequence
  mRNA product Design a-1 (hSL-A100) comprising derived and/or modified sequence from LASV(AV;Clade V)__CCA30314__GPCmut4 (opt4)
aggagagucccgcagucggcguccagcggcucugcuuguucgugugugugucguugcaggccuuauucaagcuuaccaugggccagaucgugaccuucuuccaggaggugccccacgugaucgaggaggugaugaacaucgugcugaucgcccugagcauccuggccgugcugaagggccuguacaacaucgccaccugcggccugaucggccugaucaccuuccugcugcugugcggcagaagcugcagcagcaaccuguacaagggcguguacgagcugcagagccuggaccugaacauggagacccugaacaugugcaugccccugagcugcaccaagaacaacagccaccacuacaucagagugggcaacgacaccggccuggagcugacccugaccaacaccagcauccugaaccacaaguucugcaaccugagcgacgcccacaagaaggaccuguacgaccacgcccugaugagcaucaucagcaccuuccaccugagcauccccaacuucaaccaguacgaggccaugagcugcgacuucaacggcggcaagaucagcgugcaguacaaccugagccacagcuacgccaucgacgccgccaaccacugcggcaccguggccaacggcauccugcagaccuucaugagaauggccuggggcggcagcuacaucgcccuggacagcggcagaggcaacugggacugcaucaugaccagcuaccaguaccugaucauccagaacaccaccugggagaaccacugccaguucagcagacccagccccaucggcuaccugggccugcugagccagagaaccagagacaucuacaucagcagaagaagaagaggcaccuucaccuggacccugagcgacagcgagggcaacgccacccccggcggcuacugccugaccagauggaugcugaucgaggccgagcugaagugcuucggcaacaccgccguggccaagugcaacgagaagcacgacgaggaguucugcgacaugcugagacuguucgacuucugcaagcaggccaucagcagacugaagagccccgcccagaugagcauccagcugaucaacaaggccgugaacgcccugaucaacgaccagcugaucaugaagaaccaccugagagacaucaugggcauccccuacugcaacuacagcaaguacugcuaccugaaccacaccaucaccggcaagaccagccugcccaagugcugccuggugagcaacggcagcuaccugaacgagacccacuucagcgacgacaucgagcagcaggccgacaacaugaucaccgagaugcugcagaaggaguacauggagagacagggcaagaccccccugggccugguggaccuguucguguucagcaccagcuucuaccugaucagcaucuuccugagacuggugaagauccccacccacagacacaucgugggcaagcccugccccaagccccacagacugaaccacaugggcaucugcagcugcggccuguacaagcagcccggcgugcccgugagauggaagagaugaggacuagucccuguucccagagcccacuuuuuuuucuuuuuuugaaauaaaauagccugucuuucagaucucaaaggcucuuuucagagccaccaaaaaaaaaaaaaaaaaaaaaaaaaaaaaaaaaaaaaaaaaaaaaaaaaaaaaaaaaaaaaaaaaaaaaaaaaaaaaaaaaaaaaaaaaaaaaaaaaaaaa

SEQ ID NO: 26698 - RNA, 1745 nt, Artificial Sequence
  mRNA product Design a-1 (hSL-A100) comprising derived and/or modified sequence from LASV(Togo/2016/7082;Clade VI)__AMR44577__GPCmut4 (opt4)
aggagagucccgcagucggcguccagcggcucugcuuguucgugugugugucguugcaggccuuauucaagcuuaccaugggccagaucaucaccuucuuccaggaggugccccacgugaucgaggaggugaugaacaucgugcugaucgcccugagccugcuggccauccugaagggcguguacaacguggccaccugcggcaucaucggccuggugaccuuccuguuccugugcggcagaagcugcagccugaucuacaagggcagcuacgagcugcagacccuggagcugaacauggagacccugaacaugugcaugccccugagcugcaccaagaacagcagccaccacuacaucagagugggcaacgagaccggccuggagcugacccugaccaacaccagcaucaucaaccacaaguucugcaaccugagcgacgcccacaagagaaaccuguacgaccacgcccugaugagcauccugagcaccuuccaccugagcauccccaacuucaaccaguacgaggccaugagcugcgacuucaacggcggcaagaucagcgugcaguacaaccugagccacgccuacgccguggacgccgccgagcacugcggcaccguggccaacggcgugcugcagaccuucaugagaauggccuggggcggcagcuacaucgcccuggacagcggcagaggcaacugggacugcaucaugaccagcuaccaguaccugaucauccagaacaccaccugggaggaccacugccaguucagcagacccagccccaucggcuaccugggccugcugagccagagaaccagagacaucuacaucagcagaagaagaagaggcaccuucaccuggacccugagcgacagcgagggcaacgagacccccggcggcuacugccugaccagauggaugcugaucgaggccgagcugaagugcuucggcaacaccgccguggccaagugcaacgagaagcacgacgaggaguucugcgacaugcugagacuguucgacuucugcaagcaggccauccagagacugaagagccccgcccagaugagcauccagcugaucaacaaggccgugaacgcccugaucaacgaccagcugaucaugaagaaccaccugagagacaugaugggcauccccuacugcaacuacagcaaguacugcuaccugaaccacaccagcagcggcagaaccagccugcccaagugcugccuggugagcaacggcagcuaccugaacgagacccacuucagcgacgacaucgagcagcaggccgacaacaugaucaccgagaugcugcagaaggaguacaucgacagacagggcaagaccccccugggccugguggaccuguucguguucagcaccagcuucuaccugaucagcaucuuccugcaccugaucaagauccccacccacagacacaucgugggcaagcccugccccaagccccacagacugaaccacaugggcaucugcagcugcggccuguacaagcagcccggcgugcccaccagauggaagagaugaggacuagucccuguucccagagcccacuuuuuuuucuuuuuuugaaauaaaauagccugucuuucagaucucaaaggcucuuuucagagccaccaaaaaaaaaaaaaaaaaaaaaaaaaaaaaaaaaaaaaaaaaaaaaaaaaaaaaaaaaaaaaaaaaaaaaaaaaaaaaaaaaaaaaaaaaaaaaaaaaaaaa

SEQ ID NO: 26699 - RNA, 1745 nt, Artificial Sequence
  mRNA product Design a-1 (hSL-A100) comprising derived and/or modified sequence from LASV(KAK-428;Clade n.d. (VII))__ANH09740__GPCmut4 (opt4)
aggagagucccgcagucggcguccagcggcucugcuuguucgugugugugucguugcaggccuuauucaagcuuaccaugggccagaucgugaccuucuuccaggaggugccccacgugaucgaggaggugaugaacaucgugcugaucgcccugagccugcuggccauccugaagggccuguacaacuucgccaccugcggcgugaucggccugaucaccuuccugcugcugugcggcagaagcugcagcgccaccuacaagggccaguacgagcugcagacccuggagcugaacauggagagccugaacaugugcaugccccugagcugcaccaagaacaacagccaccacuacaucagagccggcaacaacaccggccuggagcugacccugaccaacaccagcaucaucagccacaaguucugcaaccugagcgacgcccacaagaagaaccuguacgaccacacccugaugagcaucaucaccaccuuccaccugagcauccccaacuucaaccaguacgaggccaugagcugcgacuucaacggcggcaagaucagcauccaguacaaccugagccacagcuacgccggcgacgccgcccagcacugcggcaccguggccaacggcgugcugcagaccuucaugagaauggccuggggcggcagcuaccuggcccuggacagcggcagaagaggcugggacugcaucaucagcagcuaccaguaccugaucauccagaacaccaccugggacgaccacugccaguucagcagacccagccccaucggcuaccugggcuucgugagccagaagaccagagacaucuacaucagcagaagaagaagaggcaccuucaccuggacccugagcgacagcgagggccacgacaugcccggcggcuacugccugaccagauggaugcugaucgaggccgaccugaagugcuucggcaacaccgccguggccaagugcaacgagaagcacgacgaggaguucugcgacauguggagacuguucgacuucugcaagcaggccauccagagacugaaggcccccgcccagaugaacauccagcugaucaacaaggccgugaacgcccugaucaacgaccagcugaugaugaagaaccaccugagagacaucaugggcauccccuacugcaacuacagcaaguucugcuaccugaacaacaccaccaccggcagaaccagccugcccagaugcugccugaucagcaacggcagcuaccugaacgagacccacuucagcgacgacaucgagcagcaggccgacaacaugaucaccgagaugcugcagaaggaguacauggacagacagggcaagaccccccugggccugguggaccuguucguguucagcaccagcuucuaccugaucaccaucuuccugcaccuggugaagauccccacccacagacacaucgugggcaagcccugccccaagccccacagacugaaccacaugggcaucugcagcugcggccuguacaagcagcccggcgugcccgugagauggaagagaugaggacuagucccuguucccagagcccacuuuuuuuucuuuuuuugaaauaaaauagccugucuuucagaucucaaaggcucuuuucagagccaccaaaaaaaaaaaaaaaaaaaaaaaaaaaaaaaaaaaaaaaaaaaaaaaaaaaaaaaaaaaaaaaaaaaaaaaaaaaaaaaaaaaaaaaaaaaaaaaaaaaaa

SEQ ID NO: 26700 - RNA, 1745 nt, Artificial Sequence; identical to SEQ ID NO: 26694
  mRNA product Design a-1 (hSL-A100) comprising derived and/or modified sequence from LASV(Pinneo-NIG-1969;Clade I)__AIT17836__GPCmut4 (opt4)

SEQ ID NO: 26701 - RNA, 1745 nt, Artificial Sequence
  mRNA product Design a-1 (hSL-A100) comprising derived and/or modified sequence from LASV(ISTH0009-NIG-2011;Clade II)__AIT17404__GPCmut4 (opt4)
aggagagucccgcagucggcguccagcggcucugcuuguucgugugugugucguugcaggccuuauucaagcuuaccaugggccagaucaucaccuucuuccaggaggugccccacgugaucgaggaggugaugaacaucgugcugaucgcccugagccugcuggccauccugaagggcaucuacaacguggccaccugcggccuguucggccuggugagcuuccugcugcugugcggcagaagcugcagcaccaccuacaagggcguguacgagcugcagacccuggagcuggacauggccagccugaacaugugcaugccccugagcugcaccaagaacaacagccaccacuacaucauggugggcaacgagaccggccuggagcugacccugaccaacaccagcaucaucaaccacaaguucugcaaccugagcgacgcccacaagaagaaccuguacgaccacgcccugaugagcaucaucagcaccuuccaccugagcauccccaacuucaaccaguacgaggccaugagcugcgacuucaacggcggcaagaucagcgugcaguacaaccugagccacgccuacgccguggacgccgccaaccacugcggcaccaucgccaacggcgugcugcagaccuucaugagaauggccuggggcggcagcuacaucgcccuggacagcggcaagggcagcugggacugcaucaugaccagcuaccaguaccugaucauccagaacaccaccugggaggaccacugccaguucagcagacccagccccaucggcuaccugggccugcugagccagagaaccagagacaucuacaucagcagaagaagaagaggcaccuucaccuggacccugagcgacagcgagggcaacgagacccccggcggcuacugccugaccagauggaugcugaucgaggccgagcugaagugcuucggcaacaccgccguggccaagugcaacgagaagcacgacgaggaguucugcgacaugcugagacuguucgacuucugcaagcaggccaucagaagacugaagacccccgcccagaugagcauccagcugaucaacaaggccgugaacgcccugaucaacgaccagcugaucaugaagaaccaccugagagacaucaugggcauccccuacugcaacuacagcaaguacugcuaccugaaccacaccgugaccggcaagaccagccugcccagaugcugccuggugagcaacggcagcuaccugaacgagacccacuucagcgacgacaucgagcagcaggccgacaacaugaucaccgagcugcugcagaaggaguacauggacagacagggcaagaccccccugggccugguggaccuguucguguucagcaccagcuucuaccugaucagcaucuuccugcaccugaucaagauccccacccacagacacaucaccggcaagcccugccccaagccccacagacugaaccacaugggcaucugcagcugcggccuguacaagcaccccggcgugcccgugaaguggaagagaugaggacuagucccuguucccagagcccacuuuuuuuucuuuuuuugaaauaaaauagccugucuuucagaucucaaaggcucuuuucagagccaccaaaaaaaaaaaaaaaaaaaaaaaaaaaaaaaaaaaaaaaaaaaaaaaaaaaaaaaaaaaaaaaaaaaaaaaaaaaaaaaaaaaaaaaaaaaaaaaaaaaaa

SEQ ID NO: 26702 - RNA, 1745 nt, Artificial Sequence
  mRNA product Design a-1 (hSL-A100) comprising derived and/or modified sequence from LASV(ISTH2010-NIG-2012;Clade II)__AIT17482__GPCmut4 (opt4)
aggagagucccgcagucggcguccagcggcucugcuuguucgugugugugucguugcaggccuuauucaagcuuaccaugggccagaucaucaccuucuuccaggaggugccccacgugaucgaggaggugaugaacaucgugcugaucgcccugagccugcuggccauccugaagggcaucuacaacguggccaccugcggccuguucggccuggugagcuuccugcugcugugcggcagaagcugcagcaccaccuacaagggcguguacgagcugcagacccuggagcuggacauggccagccugaacaugugcaugccccugagcugcaccaagaacaacagccaccacuacaucauggugggcaacgagaccggccuggagcugacccugaccaacaccagcaucaucaaccacaaguucugcaaccugagcgacgcccacaagaagaaccuguacgaccacgcccugaugagcaucaucagcaccuuccaccugagcauccccaacuucaaccaguacgaggccaugagcugcgacuucaacggcggcaagaucagcgugcaguacaaccugagccacgccuacgccguggacgccgccaaccacugcggcaccaucgccaacggcgugcugcagaccuucaugagaauggccuggggcggcagcuacaucgcccuggacagcggcaagggcagcugggacugcaucaugaccagcuaccaguaccugaucauccagaacaucaccugggaggaccacugccaguucagcagacccagccccaucggcuaccugggccugcugagccagagaaccagagacaucuacaucagcagaagaagaagaggcaccuucaccuggacccugagcgacagcgagggcaacgagacccccggcggcuacugccugaccagauggaugcugaucgaggccgagcugaagugcuucggcaacaccgccguggccaagugcaacgagaagcacgacgaggaguucugcgacaugcugagacuguucgacuucugcaagcaggccaucagaagacugaagacccccgcccagaugagcauccagcugaucaacaaggccgugaacgcccugaucaacgaccagcugaucaugaagaaccaccugagagacaucaugggcauccccuacugcaacuacagcaaguacugcuaccugaaccacaccgugaccggcaagaccagccugcccagaugcugccuggugagcaacggcagcuaccugaacgagacccacuucagcgacgacaucgagcagcaggccgacaacaugaucaccgagcugcugcagaaggaguacaucgacagacagggcaagaccccccugggccugguggaccuguucguguucagcaccagcuucuaccugaucagcaucuuccugcaccuggugaagauccccacccacagacacguggugggcaagcccugccccaagccccacagacugaaccacaugggcaucugcagcugcggccuguacaagcaccccggcgugcccgugaaguggaagagaugaggacuagucccuguucccagagcccacuuuuuuuucuuuuuuugaaauaaaauagccugucuuucagaucucaaaggcucuuuucagagccaccaaaaaaaaaaaaaaaaaaaaaaaaaaaaaaaaaaaaaaaaaaaaaaaaaaaaaaaaaaaaaaaaaaaaaaaaaaaaaaaaaaaaaaaaaaaaaaaaaaaaa

SEQ ID NO: 26703 - RNA, 1745 nt, Artificial Sequence
  mRNA product Design a-1 (hSL-A100) comprising derived and/or modified sequence from LASV(Lassa virus/H.sapiens-wt/NGA/2015/ISTH_0543;Clade II)__AVO03639__GPCmut4 (opt4)
aggagagucccgcagucggcguccagcggcucugcuuguucgugugugugucguugcaggccuuauucaagcuuaccaugggccagaucaucaccuucuuccaggaggugccccacgugaucgaggaggugaugaacaucgugcugaucgcccugagccugcuggccauccugaagggcaucuacaacguggccaccugcggccuguucggccuggugagcuuccugcugcugugcggcagaagcugcagcaccaccuacaagggcguguacgagcugcagacccuggagcuggacauggccaaccugaacaugugcaugccccugagcugcaccaagaacaacagccaccacuacaucauggugggcaacgagaccggccuggagcugacccugaccaacaccagcaucaucaaccacaaguucugcaaccugagcgacgcccacaagaagaaccuguacgaccacgcccugaugagcaucaucagcaccuuccaccugagcauccccaacuucaaccaguacgaggccaugagcugcgacuucaacggcggcaagaucagcgugcaguacaaccugagccacaccuacgccguggacgccgccaaccacugcggcaccaucgccaacggcgugcugcagaccuucaugagaauggccuggggcggcagcuacaucgcccuggacagcggcaagggcagcugggacugcaucaugaccagcuaccaguaccuggugauccagaacaccaccugggaggaccacugccaguucagcagacccagccccaucggcuaccugggccugcugagccagagaaccagagacaucuacaucagcagaagaagaagaggcaccuucaccuggacccugagcgacagcgagggcaacgagacccccggcggcuacugccugaccagauggaugcugaucgaggccgagcugaagugcuucggcaacaccgccguggccaagugcaacgagaagcacgacgaggaguucugcgacaugcugagacuguucgacuucugcaagcaggccaucagaagacugaagacccccgcccagaugagcauccagcugaucaacaaggccgugaacgcccugaucaacgaccagcugaucaugaagaaccaccugagagacaucaugggcauccccuacugcaacuacagcaaguacugcuaccugaaccacaccgugaccggcaagaccagccugcccagaugcugccuggugagcaacggcagcuaccugaacgagacccacuucagcgacgacaucgagcagcaggccgacaacaugaucaccgagcugcugcagaaggaguacaucgacagacagggcaagaccccccugggccugguggaccuguucguguucagcaccagcuucuaccugaucagcaucuuccugcaccuggugaagauccccacccacagacacaucaccggcaagcccugccccaagccccacagacugaaccacaugggcaucugcagcugcggccuguacaagcaccccggcgugcccgugaaguggaagagaugaggacuagucccuguucccagagcccacuuuuuuuucuuuuuuugaaauaaaauagccugucuuucagaucucaaaggcucuuuucagagccaccaaaaaaaaaaaaaaaaaaaaaaaaaaaaaaaaaaaaaaaaaaaaaaaaaaaaaaaaaaaaaaaaaaaaaaaaaaaaaaaaaaaaaaaaaaaaaaaaaaaaa

SEQ ID NO: 26704 - RNA, 1745 nt, Artificial Sequence
  mRNA product Design a-1 (hSL-A100) comprising derived and/or modified sequence from LASV(Lassa virus/H.sapiens-wt/NGA/2016/ISTH_0009;Clade II)__AVO03571__GPCmut4 (opt4)
aggagagucccgcagucggcguccagcggcucugcuuguucgugugugugucguugcaggccuuauucaagcuuaccaugggccagaucaucaccuucuuccaggaggugccccacgugaucgaggaggugaugaacaucgugcugaucgcccugagccugcuggccauccugaagggcaucuacaacguggccaccugcggccugcugggccuggugagcuuccugcugcugugcggcagaagcugcagcaccaccuacaagggcguguacgagcugcagacccuggagcuggacauggccagccugaacaugugcaugccccugagcugcaccaagaacaacagccaccacuacaucauggugggcaacgagaccggccuggagcugacccugaccaacaccagcaucaucaaccacaaguucugcaaccugagcgacgcccacaagaagaaccuguacgaccacgcccugaugagcaucaucagcaccuuccaccugagcauccccaacuucaaccaguacgaggccaugagcugcgacuucaacggcggcagaaucagcgugcaguacaaccugagccacagcuacgccguggacgccgccaaccacugcggcaccaucgccaacggcgugcugcagaccuucaugagaauggccuggggcggcagcuacaucgcccuggacagcggcaagggcagcugggacugcaucaugaccagcuaccaguaccugaucauccagaacaccaccugggaggaccacugccaguucagcagacccagccccaucggcuaccugggccugcugagccagagaaccagagacaucuacaucagcagaagaagaagaggcaccuucaccuggacccugagcgacagcgagggcaacgagacccccggcggcuacugccugaccagauggaugcugaucgaggccgagcugaagugcuucggcaacaccgccguggccaagugcaacgagaagcacgacgaggaguucugcgacaugcugagacuguucgacuucugcaagcaggccaucagaagacugaagacccccgcccagaugagcauccagcugaucaacaaggccgugaacgcccugaucaacgaccagcugaucaugaagaaccaccugagagacaucaugggcauccccuacugcaacuacagcaaguacugcuaccugaaccacaccgugaccggcaagaccagccugcccagaugcugccuggugagcaacggcagcuaccugaacgagacccacuucagcgacgacaucgagcagcaggccgacaacaugaucaccgagcugcugcagaaggaguacaucgacagacagggcaagaccccccugggccugguggaccuguucguguucagcaccagcuucuaccugaucagcaucuuccugcaccuggugaagauccccacccacagacacaucaccggcaagcccugccccaagccccacagacugaaccacaugggcaucugcagcugcggccuguacaaccaccccggcgugcccgugaaguggaagagaugaggacuagucccuguucccagagcccacuuuuuuuucuuuuuuugaaauaaaauagccugucuuucagaucucaaaggcucuuuucagagccaccaaaaaaaaaaaaaaaaaaaaaaaaaaaaaaaaaaaaaaaaaaaaaaaaaaaaaaaaaaaaaaaaaaaaaaaaaaaaaaaaaaaaaaaaaaaaaaaaaaaaa

SEQ ID NO: 26705 - RNA, 1745 nt, Artificial Sequence
  mRNA product Design a-1 (hSL-A100) comprising derived and/or modified sequence from LASV(Lassa virus/H.sapiens-wt/NGA/2016/ISTH_0017;Clade II)__AVO03567__GPCmut4 (opt4)
aggagagucccgcagucggcguccagcggcucugcuuguucgugugugugucguugcaggccuuauucaagcuuaccaugggccagaucaucaccuucuuccaggaggugccccacgugaucgaggaggugaugaacaucgugcugaucgcccugagccugcuggccauccugaagggcaucuacaacguggccaccugcggccuguucggccuggugagcuuccugcugcugugcggcagaagcugcagcaccaccuacaagggcguguacgagcugcagacccuggagcuggacauggccagccugaacaugugcaugccccugagcugcaccaagaacaacagccaccacuacaucauggugggcaacgagaccggccuggagcugacccugaccaacaccagcaucaucaaccacaaguucugcaaccugagcgacgcccacaagaagaaccuguacgaccacgcccugaugagcaucaucagcaccuuccaccugagcauccccaacuucaaccaguacgaggccaugagcugcgacuucaacggcggcaagaucagcgugcaguacaaccugagccacaccuacgccaucgacgccgccaaccacugcggcaccaucgccaacggcgugcugcagaccuucaugagaauggccuggggcggcagcuacaucgcccuggacagcggcaagggcagcugggacugcaucaugaccagcuaccaguaccugaucauccagaacaccaccugggaggaccacugccaguucagcagacccagccccaucggcuaccugggccugcugagccagagaaccagagacaucuacaucagcagaagaagaagaggcaccuucaccuggacccugagcgacagcgagggcaacgagacccccggcggcuacugccugaccagauggaugcugaucgaggccgagcugaagugcuucggcaacaccgccguggccaagugcaacgagaagcacgacgaggaguucugcgacaugcugagacuguucgacuucugcaagcaggccaucagaagacugaagacccccgcccagaugagcauccagcugaucaacaaggccgugaacgcccugaucaacgaccagcugaucaugaagaaccaccugagagacaucaugggcauccccuacugcaacuacagcaaguacugcuaccugaaccacaccgugaccggcaagaccagccugcccagaugcugccuggugagcaacggcagcuaccugaacgagacccacuucagcgacgacaucgagcagcaggccgacaacaugaucaccgagcugcugcagaaggaguacauggacagacagggcaagaccccccugggccugguggaccuguucguguucagcaccagcuucuaccugaucagcaucuuccugcaccuggugagaauccccacccacagacacgugaucggcaagcccugccccaagccccacagacugaaccacaugggcaucugcagcugcggccuguacaagcaccccggcgugcccgugaaguggaagagaugaggacuagucccuguucccagagcccacuuuuuuuucuuuuuuugaaauaaaauagccugucuuucagaucucaaaggcucuuuucagagccaccaaaaaaaaaaaaaaaaaaaaaaaaaaaaaaaaaaaaaaaaaaaaaaaaaaaaaaaaaaaaaaaaaaaaaaaaaaaaaaaaaaaaaaaaaaaaaaaaaaaaa

SEQ ID NO: 26706 - RNA, 1745 nt, Artificial Sequence
  mRNA product Design a-1 (hSL-A100) comprising derived and/or modified sequence from LASV(Lassa virus/H.sapiens-wt/NGA/2018/ISTH_0959;Clade II)__AVV65099__GPCmut4 (opt4)
aggagagucccgcagucggcguccagcggcucugcuuguucgugugugugucguugcaggccuuauucaagcuuaccaugggccagaucaucaccuucuuccaggaggugccccacgugaucgaggaggugaugaacaucgugcugaucgcccugagccugcuggccauccugaagggcaucuacaacguggugaccugcggccuguucggccuggugagcuuccugcugcugugcggcagaagcugcagcaccaccuacaagggcguguacgagcugcagacccuggagcuggacauggccagccugaacaugugcaugccccugagcugcaccaagaacaacagccaccacuacaucauggugggcaacgagaccggccuggagcugacccugaccaacaccagcaucaucaaccacaaguucugcaaccugagcgacgcccacaagaagaaccuguacgaccacgcccugaugagcaucaucagcaccuuccaccugagcauccccaacuucaaccaguacgaggccaugagcugcgacuucaacggcggcaagaucagcgugcaguacaaccugagccacgccuacgccaucgacgccgccaaccacugcggcaccaucgccaacggcgugcugcagaccuucaugagaauggccuggggcggcagcuacaucgcccuggacagcggcaagggcagcugggacugcaucaugaccagcuaccaguaccugaucauccagaacaccaccugggaggaccacugccaguucagcagacccagccccaucggcuaccugggccugcugagccagagaaccagagacaucuacaucagcagaagaagaagaggcaccuucaccuggacccugagcgacagcgagggcaacgagacccccggcggcuacugccugaccagauggaugcugaucgaggccgagcugaagugcuucggcaacaccgccguggccaagugcaacgagaagcacgacgaggaguucugcgacaugcugagacuguucgacuucugcaagcaggccaucagaagacugaagacccccgcccagaugagcauccagcugaucaacaaggccgugaacgcccugaucaacgaccagcugaucaugaagaaccaccugagagacaucaugggcauccccuacugcaacuacagcaaguacugcuaccugaaccacaccgugaccggcaagaccagccugcccagaugcugccuggugagcaacggcagcuaccugaacgagacccacuucagcgacgacaucgagcagcaggccgacaacaugaucaccgagcugcugcagaaggaguacaucgacagacagggcaagaccccccugggccugguggaccuguucguguucagcaccagcuucuaccugaucagcaucuuccugcaccuggugaagauccccacccacagacacgugaucggcaagcccugccccaagccccacagacugaaccacaugggcaucugcagcugcggccuguacaagcaccccggcgugcccgugaaguggaagagaugaggacuagucccuguucccagagcccacuuuuuuuucuuuuuuugaaauaaaauagccugucuuucagaucucaaaggcucuuuucagagccaccaaaaaaaaaaaaaaaaaaaaaaaaaaaaaaaaaaaaaaaaaaaaaaaaaaaaaaaaaaaaaaaaaaaaaaaaaaaaaaaaaaaaaaaaaaaaaaaaaaaaa

SEQ ID NO: 26707 - RNA, 1745 nt, Artificial Sequence
  mRNA product Design a-1 (hSL-A100) comprising derived and/or modified sequence from LASV(LASV003-NIG-2008;Clade II)__AIT17580__GPCmut4 (opt4)
aggagagucccgcagucggcguccagcggcucugcuuguucgugugugugucguugcaggccuuauucaagcuuaccaugggccagaucaucaccuucuuccaggaggugccccacgugaucgaggaggugaugaacaucgugcugaucgcccugagccugcuggccauccugaagggcaucuacaacguggccaccugcggccuguucggccuggugagcuuccugcugcugugcggcagaagcugcagcaccaccuacaagggcguguacgagcugcagacccuggagcuggacauggccagccugaacaugugcaugccccugagcugcaccaagaacaacagccaccacuacaucauggugggcaacgagaccggccuggagcugacccugaccaacaccagcaucaucaaccacaaguucugcaaccugagcgacgcccacaagaagaaccuguacgaccacgcccugaugagcaucaucagcaccuuccaccugagcauccccaacuucaaccaguacgaggccaugagcugcgacuucaacggcggcaagaucagcgugcaguacaaccugagccacaccuacgccguggacgccgccaaccacugcggcaccaucgccaacggcgugcugcagaccuucaugagaauggccuggggcggcagcuacaucgcccuggacagcggcaagggcagcugggacugcaucaugaccagcuaccaguaccugaucauccagaacaccaccugggaggaccacugccaguucagcagacccagccccaucggcuaccugggccugcugagccagagaaccagagacaucuacaucagcagaagaagaagaggcaccuucaccuggacccugagcgacagcgagagcaacgagacccccggcggcuacugccugaccagauggaugcugaucgaggccgagcugaagugcuucggcaacaccgccguggccaagugcaacgagaagcacgacgaggaguucugcgacaugcugagacuguucgacuucugcaagcaggccaucagaagacugaaggcccccgcccagaugagcauccagcugaucaacaaggccgugaacgcccugaucaacgaccagcugaucaugaagaaccaccugagagacaucaugggcauccccuacugcaacuacagcaaguacugcuaccugaaccacaccgugaccggcagaaccagccugcccagaugcugccuggugagcaacggcagcuaccugaacgagacccacuucagcgacgacaucgagcagcaggccgacaacaugaucaccgagcugcugcagaaggaguacauggacagacagggcaagaccccccugggccugguggaccuguucguguucagcaccagcuucuaccugaucagcaucuuccugcaccuggugaagauccccacccacagacacgugaucggcaagcccugccccaagccccacagacugaaccacaugggcaucugcagcugcggccuguacaagcaccccggcgugcccgugaaguggaagagaugaggacuagucccuguucccagagcccacuuuuuuuucuuuuuuugaaauaaaauagccugucuuucagaucucaaaggcucuuuucagagccaccaaaaaaaaaaaaaaaaaaaaaaaaaaaaaaaaaaaaaaaaaaaaaaaaaaaaaaaaaaaaaaaaaaaaaaaaaaaaaaaaaaaaaaaaaaaaaaaaaaaaa

SEQ ID NO: 26708 - RNA, 1745 nt, Artificial Sequence
  mRNA product Design a-1 (hSL-A100) comprising derived and/or modified sequence from LASV(LASV035-NIG-2009;Clade II)__AIT17588__GPCmut4 (opt4)
aggagagucccgcagucggcguccagcggcucugcuuguucgugugugugucguugcaggccuuauucaagcuuaccaugggccagaucaucaccuucuuccaggaggugccccacgugaucgaggaggugaugaacaucgugcugaucgcccugagccugcuggccauccugaagggcaucuacaacguggccaccugcggccuguucggccuggugagcuuccugcugcugugcggcagaagcugcagcaccaccuacaagggcguguacgagcugcagacccuggagcuggacauggccagccugaacaugugcaugccccugagcugcaccaagaacaacagccaccacuacaucauggugggcaacgagaccggccuggagcugacccugaccaacaccagcaucaucaaccacaaguucugcaaccugagcgacgcccacaagaagaaccuguacgaccacgcccugaugagcaucaucagcaccuuccaccugagcauccccaacuucaaccaguacgaggccaugagcugcgacuucaacggcggcaagaucagcgugcaguacaaccugagccacgccuacgccguggacgccgccaaccacugcggcaccaucgccaacggcgugcugcagaccuucaugagaauggccuggggcggcagcuacaucgcccuggacagcggcaagggcagcugggacugcaucaugaccagcuaccaguaccugaucauccagaacaccaccugggaggaccacugccaguucagcagacccagccccaucggcuaccugggccugcugagccagagaaccagagacaucuacaucagcagaagaagaagaggcaccuucaccuggacccugagcgacagcgagggcaacgagacccccggcggcuacugccugaccagauggaugcugaucgaggccgagcugaagugcuucggcaacaccgccguggccaagugcaacgagaagcacgacgaggaguucugcgacaugcugagacuguucgacuucugcaagcaggccaucagaagacugaaggcccccgcccagaugagcauccagcugaucaacaaggccgugaacgcccugaucaacgaccagcugaucaugaagaaccaccugagagacaucaugggcauccccuacugcaacuacagcaaguacugcuaccugaaccacaccgugaccggcaagaccagccugcccagaugcugccuggugagcaacggcagcuaccugaacgagacccacuucagcgacgacaucgagcagcaggccgacaacaugaucaccgagcugcugcagaaggaguacaucgacagacagggcaagaccccccugggccugguggaccuguucguguucagcaccagcuucuaccugaucagcaucuuccugcaccuggugaagauccccacccacagacacgugaucggcaagcccugccccaagccccacagacugaaccacaugggcaucugcagcugcggccuguacaagcaccccggcgugcccgugaaguggaagagaugaggacuagucccuguucccagagcccacuuuuuuuucuuuuuuugaaauaaaauagccugucuuucagaucucaaaggcucuuuucagagccaccaaaaaaaaaaaaaaaaaaaaaaaaaaaaaaaaaaaaaaaaaaaaaaaaaaaaaaaaaaaaaaaaaaaaaaaaaaaaaaaaaaaaaaaaaaaaaaaaaaaaa

SEQ ID NO: 26709 - RNA, 1745 nt, Artificial Sequence
  mRNA product Design a-1 (hSL-A100) comprising derived and/or modified sequence from LASV(LASV1000-NIG-2009;Clade II)__AIT17782__GPCmut4 (opt4)
aggagagucccgcagucggcguccagcggcucugcuuguucgugugugugucguugcaggccuuauucaagcuuaccaugggccagaucaucaccuucuuccaggaggugccccacgugaucgaggaggugaugaacaucgugcugaucgcccugagccugcuggccauccugaagggcaucuacaacguggccaccugcggccuguucggccuggugagcuuccugcugcugugcggcagaagcugcagcaccaccuacaagggcguguacgagcugcagacccuggagcuggacauggccagccugaacaugugcaugccccugagcugcaccaagaacaacagccaccacuacaucauggugggcaacgagaccggccuggagcugacccugaccaacaccagcaucaucaaccacaaguucugcaaccugagcgacgcccacaagaagaaccuguacgaccacgcccugaugagcaucaucagcaccuuccaccugagcauccccaacuucaaccaguacgaggccaugagcugcgacuucaacggcggcaagaucagcgugcaguacaaccugagccacaccuacgccguggacgccgccaaccacugcggcaccaucgccaacggcgugcugcagaccuucaugagaauggccuggggcggcagcuacaucgcccuggacagcggcaagggcagcugggacugcaucaugaccagcuaccaguaccugaucauccagaacaccaccugggaggaccacugccaguucagcagacccagccccaucggcuaccugggccugcugagccagagaaccagagacaucuacaucagcagaagaagaagaggcaccuucaccuggacccugagcgacagcgagggcaacgagacccccggcggcuacugccugaccagauggaugcugaucgaggccgagcugaagugcuucggcaacaccgccguggccaagugcaacgagaagcacgacgaggaguucugcgacaugcugagacuguucgacuucugcaagcaggccaucaagagacugaagacccccgcccagaugagcauccagcugaucaacaaggccgugaacgcccugaucaacgaccagcugaucaugaagaaccaccugagagacaucaugggcauccccuacugcaacuacagcaaguacugcuaccugaaccacaccgugaccggcaagaccagccugcccagaugcugccuggugagcaacggcagcuaccugaacgagacccacuucagcgacgacaucgagcagcaggccgacaacaugaucaccgagcugcugcagaaggaguacaucgacagacagggcaagaccccccugggccugguggaccuguucguguucagcaccagcuucuaccugaucagcaucuuccugcaccuggugaagauccccacccacagacacguggugggcaagcccugccccaagccccacagacugaaccacaugggcaucugcagcugcggccuguacaagcaccccggcgugcccgugaaguggaagagaugaggacuagucccuguucccagagcccacuuuuuuuucuuuuuuugaaauaaaauagccugucuuucagaucucaaaggcucuuuucagagccaccaaaaaaaaaaaaaaaaaaaaaaaaaaaaaaaaaaaaaaaaaaaaaaaaaaaaaaaaaaaaaaaaaaaaaaaaaaaaaaaaaaaaaaaaaaaaaaaaaaaaa

SEQ ID NO: 26710 - RNA, 1745 nt, Artificial Sequence
  mRNA product Design a-1 (hSL-A100) comprising derived and/or modified sequence from LASV(LASV221-NIG-2010;Clade II)__AIT17624__GPCmut4 (opt4)
aggagagucccgcagucggcguccagcggcucugcuuguucgugugugugucguugcaggccuuauucaagcuuaccaugggccagaucaucaccuucuuccaggaggugccccacgugaucgaggaggugaugaacaucgugcugaucgcccugagccugcuggccauccugaagggcaucuacaacguggccaccugcggccuguucggccuggugagcuuccugcugcugugcggcagaagcugcagcaccaccuacaagggcguguacgagcugcagacccuggagcuggacauggccagccugaacaugugcaugccccugagcugcaccaagaacaacagccaccacuacaucauggugggcaacgagaccggccuggagcugacccugaccaacaccagcaucaucaaccacaaguucugcaaccugagcgacgcccacaagaagaaccuguacgaccacgcccugaugagcaucaucagcaccuuccaccugagcauccccaacuucaaccaguacgaggccaugagcugcgacuucaacggcggcaagaucagcgugcaguacaaccugagccacaccuacgccaucgacgccgccaaccacugcggcaccaucgccaacggcgugcugcagaccuucaugagaauggccuggggcggcagcuacaucgcccuggacagcggcaagggcagcugggacugcaucaugaccagcuaccaguaccugaucauccagaacaccaccugggaggaccacugccaguucagcagacccagccccaucggcuaccugggccugcugagccagagaaccagagacaucuacaucagcagaagaagaagaggcaccuucaccuggacccugagcgacagcgagggcaacgagacccccggcggcuacugccugaccagauggaugcugaucgaggccgagcugaagugcuucggcaacaccgccguggccaagugcaacgagaagcacgacgaggaguucugcgacaugcugagacuguucgacuucugcaagcaggccaucagaagacugaagacccccgcccagaugagcauccagcugaucaacaaggccgugaacgcccugaucaacgaccagcugaucaugaagaaccaccugagagacaucaugggcauccccuacugcaacuacagcaaguacugcuaccugaaccacaccgugaccggcaagaccagccugcccagaugcugccuggugagcaacggcagcuaccugaacgagacccacuucagcgacgacaucgagcagcaggccgacaacaugaucaccgagaugcugcagaaggaguacauggacagacagggcaagaccccccugggccugguggaccuguucguguucagcaccagcuucuaccugaucagcaucuuccugcaccuggugaagauccccacccacagacacgugaucggcaagcccugccccaagccccacagacugaaccacaugggcaucugcagcugcggccuguacaagcaccccggcgugcccgugaaguggaagagaugaggacuagucccuguucccagagcccacuuuuuuuucuuuuuuugaaauaaaauagccugucuuucagaucucaaaggcucuuuucagagccaccaaaaaaaaaaaaaaaaaaaaaaaaaaaaaaaaaaaaaaaaaaaaaaaaaaaaaaaaaaaaaaaaaaaaaaaaaaaaaaaaaaaaaaaaaaaaaaaaaaaaa

SEQ ID NO: 26711 - RNA, 1745 nt, Artificial Sequence
  mRNA product Design a-1 (hSL-A100) comprising derived and/or modified sequence from LASV(LASV237-NIG-2010;Clade II)__AIT17638__GPCmut4 (opt4)
aggagagucccgcagucggcguccagcggcucugcuuguucgugugugugucguugcaggccuuauucaagcuuaccaugggccagaucaucaccuucuuccaggaggugccccacgugaucgaggaggugaugaacaucgugcugaucgcccugagccugcuggccauccugaagggcaucuacaacguggccaccugcggccuguucggccuggugagcuuccugcugcugugcggcagaagcugcagcaccaccuacaagggcguguacgagcugcagacccuggagcuggacauggccagccugaacaugugcaugccccugagcugcaccaagaacaacagccaccacuacaucauggugggcaacgagaccggccuggagcugacccugaccaacaccagcaucaucaaccacaaguucugcaaccugagcgacgcccacaagaaggaccuguacgaccacgcccugaugagcaucaucagcaccuuccaccugagcauccccaacuucaaccaguacgaggccaugagcugcgacuucaacggcggcaagaucagcgugcaguacaaccugagccacaccuacgccguggacgccgccaaccacugcggcaccaucgccaacggcgugcugcagaccuucaugagaauggccuggggcggcagcuacaucgcccuggacagcggcaagggcagcugggacugcaucaugaccagcuaccaguaccugaucauccagaacaccaccugggaggaccacugccaguucagcagacccagccccaucggcuaccugggccugcugagccagagaaccagagacaucuacaucagcagaagaagaagaggcaccuucaccuggacccugagcgacagcgagggcaacgagacccccggcggcuacugccugaccagauggaugcugaucgaggccgagcugaagugcuucggcaacaccgccguggccaagugcaacgagaagcacgacgaggaguucugcgacaugcugagacuguucgacuucugcaagcaggccaucagaagacugaagacccccgcccagaugagcauccagcugaucaacaaggccgugaacgcccugaucaacgaccagcugaucaugaagaaccaccugagagacaucaugggcauccccuacugcaacuacagcaaguacugcuaccugaaccacaccgugaccggcaagaccagccugcccagaugcugccuggugagcaacggcagcuaccugaacgagacccacuucagcgacgacaucgagcagcaggccgacaacaugaucaccgagcugcugcagaaggaguacauggacagacagggcaagaccccccugggccugguggaccuguucguguucagcaccagcuucuaccugaucagcaucuuccugcaccugaucaagauccccacccacagacacaucaccggcaagcccugccccaagccccacagacugaaccacaugggcaucugcagcugcggccuguacaagcaccccggcgugcccgugaaguggaagagaugaggacuagucccuguucccagagcccacuuuuuuuucuuuuuuugaaauaaaauagccugucuuucagaucucaaaggcucuuuucagagccaccaaaaaaaaaaaaaaaaaaaaaaaaaaaaaaaaaaaaaaaaaaaaaaaaaaaaaaaaaaaaaaaaaaaaaaaaaaaaaaaaaaaaaaaaaaaaaaaaaaaaa

SEQ ID NO: 26712 - RNA, 1745 nt, Artificial Sequence
  mRNA product Design a-1 (hSL-A100) comprising derived and/or modified sequence from LASV(LASV253-NIG-2011;Clade II)__AIT17670__GPCmut4 (opt4)
aggagagucccgcagucggcguccagcggcucugcuuguucgugugugugucguugcaggccuuauucaagcuuaccaugggccagaucaucaccuucuuccaggaggugccccacgugaucgaggaggugaugaacaucgugcugaucgcccugagccugcuggccauccugaagggcaucuacaacguggccaccugcggccuguucggccuggugagcuuccugcugcugugcggcagaagcugcagcaccaccuacaagggcguguacgagcugcagacccuggagcuggacauggccagccugaacaugugcaugccccugagcugcaccaagaacaacagccaccacuacaucauggugggcaacgagaccggccuggagcugacccugaccaacaccagcaucaucaaccacaaguucugcaaccugagcgacgcccacaagaagaaccuguacgaccacgcccugaugagcaucaucagcaccuuccaccugagcauccccaacuucaaccaguacgaggccaugagcugcgacuucaacggcggcaagaucagcgugcaguacaaccugagccacaccuacgccguggacgccgccaaccacugcggcaccaucgccaacggcgugcugcagaccuucaugagaauggccuggggcggcagcuacaucgcccuggacagcggcaagggcagcugggacugcaucaugaccagcuaccaguaccugaucauccagaacaccaccugggaggaccacugccaguucagcagacccagccccaucggcuaccugggccugcugagccagagaaccagagacaucuacaucagcagaagaagaagaggcaccuucaccuggacccugagcgacagcgagggcaacgagacccccggcggcuacugccugaccagauggaugcugaucgaggccgagcugaagugcuucggcaacaccgccguggccaagugcaacgagaagcacgacgaggaguucugcgacaugcugagacuguucgacuucugcaagcaggccaucagaagacugaaggcccccgcccagaugagcauccagcugaucaacaaggccgugaacgcccugaucaacgaccagcugaucaugaagaaccaccugagagacaucaugggcauccccuacugcaacuacagcaaguacugcuaccugaaccacaccgugaccggcagaaccagccugcccagaugcugccuggugagcaacggcagcuaccugaacgagacccacuucagcgacgacaucgagcagcaggccgacaacaugaucaccgagcugcugcagaaggaguacaucgacagacagggcaagaccccccugggccugguggaccuguucguguucagcaccagcuucuaccugaucagcaucuuccugcaccuggugaagauccccacccacagacacaucaucggcaagcccugccccaagccccacagacugaaccacaugggcaucugcagcugcggccuguacaagcaccccggcgugcccgugaaguggaagagaugaggacuagucccuguucccagagcccacuuuuuuuucuuuuuuugaaauaaaauagccugucuuucagaucucaaaggcucuuuucagagccaccaaaaaaaaaaaaaaaaaaaaaaaaaaaaaaaaaaaaaaaaaaaaaaaaaaaaaaaaaaaaaaaaaaaaaaaaaaaaaaaaaaaaaaaaaaaaaaaaaaaaa

SEQ ID NO: 26713 - RNA, 1745 nt, Artificial Sequence
  mRNA product Design a-1 (hSL-A100) comprising derived and/or modified sequence from LASV(LASV254-NIG-2011;Clade II)__AIT17674__GPCmut4 (opt4)
aggagagucccgcagucggcguccagcggcucugcuuguucgugugugugucguugcaggccuuauucaagcuuaccaugggccagaucaucaccuucuuccaggaggugccccacgugaucgaggaggugaugaacaucgugcugaucgcccugagccugcuggccauccugaagggcaucuacaacguggccaccugcggccuguucggccuggugagcuuccugcugcugugcggcagaagcugcagcaccaccuacaagggcguguacgagcugcagacccuggagcuggacaugaccaaccugaacaugugcaugccccugagcugcaccaagaacaacagccaccacuacaucauggugggcaacgagaccggccuggagcugacccugaccaacaccagcaucaucaaccacaaguucugcaaccugagcgacgcccacaagaagaaccuguacaaccacgcccugaugagcaucaucagcaccuuccaccugagcauccccaacuucaaccaguacgaggccaugagcugcgacuucaacggcggcaagaucagcgugcaguacaaccugagccacagcuacgccguggacgccgccaaccacugcggcaccaucgccaacggcgugcugcagaccuucaugagaauggccuggggcggcagcuacaucgcccuggacagcggcaagggcaacugggacugcaucaugaccagcuaccaguaccugaucauccagaacaccaccugggaggaccacugccaguucagcagacccagccccaucggcuaccugggccugcugagccagagaaccagagacaucuacaucagcagaagaagaagaggcaccuucaccuggacccugagcgacagcgagggcaacgagacccccggcggcuacugccugaccagauggaugcugaucgaggccgagcugaagugcuucggcaacaccgccguggccaagugcaacgagaagcacgacgaggaguucugcgacaugcugagacuguucgacuucugcaagcaggccaucagaagacugaagacccccgcccaggccaacauccagcugaucaacaaggccgugaacgcccugaucaacgaccagcugaucaugaagaaccaccugagagacaucaugggcauccccuacugcaacuacagcaaguacugcuaccugaaccacaccgugaccggcaagaccagccugcccagaugcugccuggugagcaacggcagcuaccugaacgagacccacuucagcgacgacaucgagcagcaggccgacaacaugaucaccgagcugcugcagaaggaguacauggacagacagggcaagaccccccugggccugguggaccuguucguguucagcaccagcuucuaccugaucagcaucuuccugcaccuggugaagauccccacccacagacacgugaucggcaagcccugccccaagccccacagacugaaccacaugggcaucugcagcugcggccuguacaagcaccccggcgugcccgugaaguggaagagaugaggacuagucccuguucccagagcccacuuuuuuuucuuuuuuugaaauaaaauagccugucuuucagaucucaaaggcucuuuucagagccaccaaaaaaaaaaaaaaaaaaaaaaaaaaaaaaaaaaaaaaaaaaaaaaaaaaaaaaaaaaaaaaaaaaaaaaaaaaaaaaaaaaaaaaaaaaaaaaaaaaaaa

SEQ ID NO: 26714 - RNA, 1745 nt, Artificial Sequence
  mRNA product Design a-1 (hSL-A100) comprising derived and/or modified sequence from LASV(Nig08-A19;Clade III)__ADU56618__GPCmut4 (opt4)
aggagagucccgcagucggcguccagcggcucugcuuguucgugugugugucguugcaggccuuauucaagcuuaccaugggccagaucgugaccuucuuccaggaggugccccacgugaucgaggaggugaugaacaucgugcugaucgcccugagcauccuggccauccugaagggccuguacaacaucgccaccugcggccugaucggccuggugaccuuccugcugcugagcggcagaagcugcagcaugaccuacaagggcguguacgagcugcagacccuggagcugaacaugaacacccugaacaugugcaugccccugagcugcaccaagaacaacagccaccacuacaucauggugggcaacgagaccggccuggagcugacccugaccaacaccagccugcugcaccacaaguucugcaaccugagcgacgcccacaagaagaaccuguacgaccacacccugaugagcaucaucagcaccuuccaccugagcauccccaacuucaaccaguacgaggccaugagcugcgacuucaacggcggcaagaucaccgugcaguacaaccugagccacagcuacgccaucgacgccgccaaccacugcggcaccguggccaacggcgugcugcagaccuucaugagaauggccuggggcggcagcuacaucgcccuggacagcggcagaggcaagugggacugcaucaugaccagcuaccaguaccugaucauccagaacaccaccugggaggaccacugccaguucagcagacccagccccaucggcuaccugggccugcugagccagagaaccagagacaucuacaucagcagaagaagaagaggcaccuucaccuggacccugagcgacagcgagggcaacgagacccccggcggcuacugccugaccagauggaugcugaucgaggccgagcugaagugcuucggcaacaccgccguggccaagugcaacgagaagcacgacgaggaguucugcgacaugcugagacuguucgacuucugcaagcaggccaucagaagacugaaggcccccgcccagaugagcauccagcugaucaacaaggccgugaacgcccugaucaacgaccagcugaucaugaagaaccaccugagagacaucaugggcauccccuacugcaacuacagcaaguacugcuaccugaaccacaccagcaccggcagaaccagccugcccagaugcugccuggugagcaacggcagcuaccugaacgagacccacuucagcgacgacaucgagcagcaggccgacaacaugaucaccgagaugcugcagaaggaguaccuggacagacagggcaagaccccccugggccugguggaccuguucguguucagcaccagcuucuaccugaucagcaucuuccugcaccuggugaagauccccacccacagacacaucgugggcaagcccugccccaagccccacagacugaaccacaugggcaucugcagcugcggccuguacaagcagcccggcgugcccgugagauggaagagaugaggacuagucccuguucccagagcccacuuuuuuuucuuuuuuugaaauaaaauagccugucuuucagaucucaaaggcucuuuucagagccaccaaaaaaaaaaaaaaaaaaaaaaaaaaaaaaaaaaaaaaaaaaaaaaaaaaaaaaaaaaaaaaaaaaaaaaaaaaaaaaaaaaaaaaaaaaaaaaaaaaaaa

SEQ ID NO: 26715 - RNA, 1748 nt, Artificial Sequence
  mRNA product Design a-1 (hSL-A100) comprising derived and/or modified sequence from LASV(G1180-SLE-2010;Clade IV)__AIT17168__GPCmut4 (opt4)
aggagagucccgcagucggcguccagcggcucugcuuguucgugugugugucguugcaggccuuauucaagcuuaccaugggccagaucgugaccuucuuccaggaggugccccacgugaucgaggaggugaugaacaucgugcugaucgcccugagcauccuggccgugcugaagggccuguacaacuucgccaccugcggccuggugggccugcugaccuuccugcugcugugcggcagaagcugcaccgccagcagauacaagggcguguacgagcugcagacccuggagcugaacauggagacccugaacaugugcaugccccugagcugcaccaagaacaacagccaccacuacaucauggugggcaacgagaccggccuggagcugacccugaccaacaccagcaucaucaaccacaaguucugcaaccugagcgacgcccacaagaagaaccuguacgaccacgcccugaugagcaucaucagcaccuuccaccugagcauccccaacuucaaccaguacgaggccaugagcugcgacuucaacggcggcaagaucagcgugcaguacaaccugagccacagcuacgccggcgacgccgccaaccacugcggcaccguggccaacggcgugcugcagaccuucaugagaauggccuggggcggcagcuacaucgcccuggacagcggccacggcagcugggacugcaucaugaccagcuaccaguaccugaucauccagaacaccaccugggaggaccacugccaguucagcagacccagccccaucggcuaccugggccugcugagccagagaaccagagacaucuacaucagcagaagaagaagaggcaccuucaccuggacccugagcgacagcgagggcaaggacacccccggcggcuacugccugaccagauggaugcugaucgaggccgagcugaagugcuucggcaacaccgccguggccaagugcaacgagaagcacgacgaggaguucugcgacaugcugagacuguucgacuucugcaagcaggccauccagagacugaaggcccccgcccagaugagcauccagcugaucaacaaggccgugaacgcccugaucaacgaccagcugaucaugaagaaccaccugagagacaucaugggcauccccuacugcaacuacagcaaguacugcuaccugaaccacaccaccaccggcaagaccagccugcccaagugcugccuggugagcaacggcagcuaccugaacgagacccacuucagcgacgacaucgagcagcaggccgacaacaugaucaccgagaugcugcagaaggaguacauggagagacagggcaagaccccccugggccugguggaccuguucguguucagcaccagcuucuaccugaucagcaucuuccugcaccuggugaagauccccacccacagacacaucgugggcaagagcugccccaagccccacagacugaaccacaugggcaucugcagcugcggccuguacaagcagcccggcgugcccgugaaguggaagagaugaggacuagucccuguucccagagcccacuuuuuuuucuuuuuuugaaauaaaauagccugucuuucagaucucaaaggcucuuuucagagccaccaaaaaaaaaaaaaaaaaaaaaaaaaaaaaaaaaaaaaaaaaaaaaaaaaaaaaaaaaaaaaaaaaaaaaaaaaaaaaaaaaaaaaaaaaaaaaaaaaaaaa

SEQ ID NO: 26716 - RNA, 1748 nt, Artificial Sequence
  mRNA product Design a-1 (hSL-A100) comprising derived and/or modified sequence from LASV(G1442-SLE-2011;Clade IV)__AIT17180__GPCmut4 (opt4)
aggagagucccgcagucggcguccagcggcucugcuuguucgugugugugucguugcaggccuuauucaagcuuaccaugggccagaucgugaccuucuuccaggaggugccccacgugaucgaggaggugaugaacaucgugcugaucgcccugagcauccuggccgugcugaagggccuguacaacguggccaccugcggccugaucggccuggugaccuuccugcugcugugcggcagaagcugcaccaccacccuguacaagggcguguacgagcugcagacccuggagcugaacauggagacccugaacaugugcaugccccugagcugcaccaagaacaacagccaccacuacaucagagugggcaacgagaccggccuggagcugacccugaccaacaccagcaucaucaaccacaaguucugcaaccugagcgacgcccacaagaagaaccuguacgaccacgcccugaugagcaucaucagcaccuuccaccugagcauccccaacuucaaccaguacgaggccaugagcugcgacuucaacggcggcaagaucagcgugcaguacaaccugagccacagcuacgccggcgacgccgccaaccacugcggcaccguggccaacggcgugcugcagaccuucaugagaauggccuggggcggcagcuacaucgcccuggacagcggcagaggcaacugggacugcaucaugaccagcuaccaguaccugaucauccagaacaccaccugggacgaccacugccaguucagcagacccagccccaucggcuaccugggccugcugagccagagaaccagagacguguacaucagcagaagaagaagaggcaccuucaccuggacccugagcgacagcgagggcaaggacacccccggcggcuacugccugaccagauggaugcugaucgaggccgagcugaagugcuucggcaacaccgccguggccaagugcaacgagaagcacgacgaggaguucugcgacaugcugagacuguucgacuucugcaagcaggccauccagagacugaaggcccccgcccagaugagcauccagcugaucaacaaggccgugaacgcccugaucaacgaccagcugaucaugaagaaccaccugagagacaucaugggcauccccuacugcaacuacagcaaguacugcuaccugaacaacaccgccaccggcaagaccagccugcccaagugcugccugaucagcaacggcagcuaccugaacgagacccacuucagcgacgacaucgagcaggaggccgacaacaugaucaccgagaugcugcagaaggaguacauggagagacagggcaagaccccccugggccugguggaccuguucguguucagcaccagcuucuaccugaucagcaucuuccugcaccuggugaagauccccacccacagacacaucgugggcaagagcugccccaagccccacagacugaaccacaugggcaucugcagcugcggccuguacaagcagcccggcgugcccgugagauggaagagaugaggacuagucccuguucccagagcccacuuuuuuuucuuuuuuugaaauaaaauagccugucuuucagaucucaaaggcucuuuucagagccaccaaaaaaaaaaaaaaaaaaaaaaaaaaaaaaaaaaaaaaaaaaaaaaaaaaaaaaaaaaaaaaaaaaaaaaaaaaaaaaaaaaaaaaaaaaaaaaaaaaaaa

SEQ ID NO: 26717 - RNA, 1748 nt, Artificial Sequence
  mRNA product Design a-1 (hSL-A100) comprising derived and/or modified sequence from LASV(G3010-SLE-2013;Clade IV)__AIT17344__GPCmut4 (opt4)
aggagagucccgcagucggcguccagcggcucugcuuguucgugugugugucguugcaggccuuauucaagcuuaccaugggccagaucgugaccuucuuccaggaggugccccacgugaucgaggaggugaugaacaucgugcugaucgcccugagcauccuggccgugcugaagggccuguacaacuucgccaccugcggccuggugggccuggugaccuuccugcugcugugcggcagaagcugcaccaccagccuguacaagggcguguacgagcugcagacccuggagcugaacauggagacccugaacaugugcaugccccugagcugcaccaagaacaacagccaccacuacaucauggugggcaacgagaccggccuggagcugacccugaccaacaccagcaucaucaaccacaaguucugcaaccugagcgacgcccacaagaagaaccuguacaaccacgcccugaugagcaucaucagcaccuuccaccugagcauccccaacuucaaccaguacgaggccaugagcugcgacuucaacggcggcaagaucagcgugcaguacaaccugagccacagcuacgccggcgacgccgccagccacugcggcaccguggccaacggcgugcugcagaccuucaugagaauggccuggggcggcagcuacaucgcccuggacagcggcuacggcaagugggacugcaucaugaccagcuaccaguaccugaucauccagaacaccaccugggaggaccacugccaguucagcagacccagccccaucggcuaccugggccugcugagccagagaaccagagacaucuacaucagcagaagaagaagaggcaccuucaccuggacccugagcgacagcgagggcaaggacacccccggcggcuacugccugaccagauggaugcugaucgaggccgagcugaagugcuucggcaacaccgccguggccaagugcaacgagaagcacgacgaggaguucugcgacaugcugagacuguucgacuucugcaagcaggccauccagagacugaagacccccgcccagaugagcauccagcugaucaacaaggccgugaacgcccugaucaacgaccagcugaucaugaagaaccaccugagagacaucaugggcauccccuacugcaacuacagcaaguacugcuaccugaaccacaccaccaccggcaagaccagccugcccaagugcugccuggugagcaacggcagcuaccugaacgagacccacuucagcgacgacaucgagcagcaggccgacaacaugaucaccgagaugcugcagaaggaguacauggagagacagggcaagaccccccugggccugguggaccuguucguguucagcaccagcuucuaccugaucagcaucuuccugcaccuggugaagauccccacccacagacacaucgugggcaagagcugccccaagccccacagacugaaccacaugggcaucugcagcugcggccuguacaagcagcccggcgugcccgugagauggaagagaugaggacuagucccuguucccagagcccacuuuuuuuucuuuuuuugaaauaaaauagccugucuuucagaucucaaaggcucuuuucagagccaccaaaaaaaaaaaaaaaaaaaaaaaaaaaaaaaaaaaaaaaaaaaaaaaaaaaaaaaaaaaaaaaaaaaaaaaaaaaaaaaaaaaaaaaaaaaaaaaaaaaaa

SEQ ID NO: 26718 - RNA, 1748 nt, Artificial Sequence
  mRNA product Design a-1 (hSL-A100) comprising derived and/or modified sequence from LASV(G502-SLE-2009;Clade IV)__AIT17126__GPCmut4 (opt4)
aggagagucccgcagucggcguccagcggcucugcuuguucgugugugugucguugcaggccuuauucaagcuuaccaugggccagaucgugaccuucuuccaggaggugccccacgugaucgaggaggugaugaacaucgugcugaucgcccugagcauccuggccgugcugaagggccuguacaacuucgccaccugcggccuggugggccugcugaccuuccugcugcugugcggcagaagcugcaccaccggccuguacaagggcguguacgagcugcagacccuggagcugaacauggagacccugaacaugugcaugccccugagcugcaccaagaacaacagccaccacuacaucauggugggcaacgagaccggccuggagcugacccugaccaacaccagcaucaucaaccacaaguucugcaaccugagcgacgcccacaagaagaaccuguacgaccacgcccugaugagcaucaucagcaccuuccaccugagcauccccaacuucaaccaguacgaggccaugagcugcgacuucaacggcggcaagaucagcgugcaguacaaccugagccacagcuacgccggcgacgccgccgaccacugcggcaccguggccaacggcgugcugcagaccuucaugagaauggccuggggcggcagcuacaucgcccuggacagcggcagaggcagaugggacugcaucaugaccagcuaccaguaccugaucauccagaacaccaccugggaggaccacugccaguucagcagacccagccccaucggcuaccugggccugcugagccagagaaccagagacaucuacaucagcagaagaagaagaggcaccuucaccuggacccugagcgacagcgagggcaaggacacccccggcggcuacugccugaccagauggaugcugaucgaggccgagcugaagugcuucggcaacaccgccguggccaagugcaacgagaagcacgacgaggaguucugcgacaugcugagacuguucgacuucugcaagcaggccauccagagacugaaggcccccgcccagaugagcauccagcugaucaacaaggccgugaacgcccugaucaacgaccagcuggugaugaagaaccaccugagagacaucaugggcauccccuacugcaacuacagcagauacugcuaccugaaccacaccaccaccggcagaaccagccugcccaagugcugccuggugagcaacggcagcuaccugaacgagacccacuucagcgacgacaucgagcagcaggccgacaacaugaucaccgagaugcugcagaaggaguacauggagagacagggcaagaccccccugggccugguggaccuguucguguucagcaccagcuucuaccugaucagcaucuuccugcaccuggugaagauccccacccacagacacaucgugggcaagagcugccccaagccccacagacugaaccacaugggcaucugcagcugcggccuguacaagcagcccggcgugcccgugaaguggaagagaugaggacuagucccuguucccagagcccacuuuuuuuucuuuuuuugaaauaaaauagccugucuuucagaucucaaaggcucuuuucagagccaccaaaaaaaaaaaaaaaaaaaaaaaaaaaaaaaaaaaaaaaaaaaaaaaaaaaaaaaaaaaaaaaaaaaaaaaaaaaaaaaaaaaaaaaaaaaaaaaaaaaaa

SEQ ID NO: 26719 - RNA, 1748 nt, Artificial Sequence
  mRNA product Design a-1 (hSL-A100) comprising derived and/or modified sequence from LASV(G733-SLE-2010;Clade IV)__AIT17154__GPCmut4 (opt4)
aggagagucccgcagucggcguccagcggcucugcuuguucgugugugugucguugcaggccuuauucaagcuuaccaugggccagaucgugaccuucuuccaggaggugccccacgugaucgaggaggugaugaacaucgugcugaucgcccugagcauccuggccgugcugaagggccuguacaacuucgccaccugcggcaucgugggccuggugagcuuccugcugcugugcggcagaagcugcaccaccagccuguacaagggcguguacgagcugcagacccuggagcugaacauggagacccugaacaugugcaugccccugagcugcaccaagaacaacagccaccacuacaucauggugggcaacgagaccggccuggagcugacccugaccaacaccagcaucaucaaccacaaguucugcaaccugagcgacgcccacaagaagaaccuguacgaccacgcccugaugagcaucaucagcaccuuccaccugagcauccccaacuucaaccaguacgaggccaugagcugcgacuucaacggcggcaagaucagcgugcaguacaaccugagccacagcuacgccggcgacgccgccaaccacugcggcaccaucgccaacggcgugcugcagaccuucaugagaauggccuggggcggcagcuacaucgcccuggacagcggcagagacagaugggacugcaucaugaccagcuaccaguaccugaucauccagaacaccaccugggaggaccacugccaguucagcagacccagccccaucggcuaccugggccugcugagccagagaaccagagacaucuacaucagcagaagaagaagaggcaccuucaccuggacccugagcgacagcgagggcaaggacacccccggcggcuacugccugaccagauggaugcugaucgaggccgagcugaagugcuucggcaacaccgccguggccaagugcaacgagaagcacgacgaggaguucugcgacaugcugagacuguucgacuucugcaagcaggccauccagagacugaaggcccccgcccagaugagcauccagcugaucaacaaggccgugaacgcccugaucaacgaccagcugaucaugaagaaccaccugagagacaucaugggcauccccuacugcaacuacagcaaguacugcuaccugaaccacaccaccaccggcaagaccagccugcccaagugcugccuggugagcaacggcagcuaccugaacgagacccacuucagcgacgacaucgagcagcaggccgacaacaugaucaccgagaugcugcagaaggaguacauggagagacagggcaagaccccccugggccugguggaccuguucguguucagcaccagcuucuaccugaucagcaucuuccugcaccuggugaagauccccacccacagacacguggugggcaagagcugccccaagccccacagacugaaccacaugggcaucugcagcugcggccuguacggccagcccggcgugcccgugaaguggaagagaugaggacuagucccuguucccagagcccacuuuuuuuucuuuuuuugaaauaaaauagccugucuuucagaucucaaaggcucuuuucagagccaccaaaaaaaaaaaaaaaaaaaaaaaaaaaaaaaaaaaaaaaaaaaaaaaaaaaaaaaaaaaaaaaaaaaaaaaaaaaaaaaaaaaaaaaaaaaaaaaaaaaaa

SEQ ID NO: 26720 - RNA, 1748 nt, Artificial Sequence
  mRNA product Design a-1 (hSL-A100) comprising derived and/or modified sequence from MOPV/LASV reassortant(IGS-1;Clade IV)__AFY05576__GPCmut4 (opt4)
aggagagucccgcagucggcguccagcggcucugcuuguucgugugugugucguugcaggccuuauucaagcuuaccaugggccagaucgugaccuucuuccaggaggugccccacgugaucgaggaggugaugaacaucgugcugaucgcccugagcgugcuggccgugcugaagggccuguacaacuucgccaccugcggccuggugggccuggugaccuuccugcugcugugcggcagaagcugcaccaccagccuguacaagggcguguacgagcugcagacccuggagcugaacauggagacccugaacaugugcaugccccugagcugcaccaagaacaacagccaccacuacaucauggugggcaacgagaccggccuggagcugacccugaccaacaccagcaucaucaaccacaaguucugcaaccugagcgacgcccacaagaagaaccuguacgaccacgcccugaugagcaucaucagcaccuuccaccugagcauccccaacuucaaccaguacgaggccaugagcugcgacuucaacggcggcaagaucagcgugcaguacaaccugagccacagcuacgccggcgacgccgccaaccacugcggcaccguggccaacggcgugcugcagaccuucaugagaauggccuggggcggcagcuacaucgcccuggacagcggcagaggcaacugggacugcaucaugaccagcuaccaguaccugaucauccagaacaccaccugggaggaccacugccaguucagcagacccagccccaucggcuaccugggccugcugagccagagaaccagagacaucuacaucagcagaagaagaagaggcaccuucaccuggacccugagcgacagcgagggcgaggacacccccggcggcuacugccugaccagauggaugcugaucgaggccgagcugaagugcuucggcaacaccgccguggccaagugcaacgagaagcacgacgaggaguucugcgacaugcugagacuguucgacuucugcaagcaggccauccagagacugaaggcccccgcccagaugagcauccagcugaucaacaaggccgugaacgcccugaucaacgaccagcugaucaugaagaaccaccugagagacaucaugggcauccccuacugcaacuacagcaaguacugcuaccugaaccacaccaccaccggcagaaccagccugcccaagugcugccuggugagcaacggcagcuaccugaacgagacccacuucagcgacgacaucgagcagcaggccgacaacaugaucaccgagaugcugcagaaggaguacauggagagacagggcaagaccccccugggccugguggaccuguucguguucagcaccagcuucuaccugaucagcaucuuccugcaccuggugaagauccccacccacagacacaucgugggcaagagcugccccaagccccacagacugaaccacaugggcaucugcagcugcggccuguacaagcagcccggcgugcccgugaaguggaagagaugaggacuagucccuguucccagagcccacuuuuuuuucuuuuuuugaaauaaaauagccugucuuucagaucucaaaggcucuuuucagagccaccaaaaaaaaaaaaaaaaaaaaaaaaaaaaaaaaaaaaaaaaaaaaaaaaaaaaaaaaaaaaaaaaaaaaaaaaaaaaaaaaaaaaaaaaaaaaaaaaaaaaa

SEQ ID NO: 26721 - RNA, 1748 nt, Artificial Sequence
  mRNA product Design a-1 (hSL-A100) comprising derived and/or modified sequence from LASV(LM765-SLE-2012;Clade IV)__AIT17814__GPCmut4 (opt4)
aggagagucccgcagucggcguccagcggcucugcuuguucgugugugugucguugcaggccuuauucaagcuuaccaugggccagaucgugaccuucuuccaggaggugccccacgugaucgaggaggugaugaacaucgugcugaucgcccugagcauccuggccgugcugaagggccuguacaacuucgccaccugcggccuggugggccuggugaccuuccugcugcugugcggcagaagcugcaccaccagccuguacaagggcguguacgagcugcagacccuggagcugaacauggagacccugaacaugugcaugccccugagcugcaccaagaacaacagccaccacuacaucauggugggcaacgagaccggccuggagcugacccugaccaacaccagcaucaucgaccacaaguucugcaaccugagcgacgcccacagaaagaaccuguacgaccacgcccugaugagcaucaucagcaccuuccaccugagcauccccaacuucaaccaguacgaggccaugagcugcgacuucaacggcggcaagaucagcgugcaguacaaccugagccacagcuacgccaaggacgccgccgaccacugcggcaccguggccaacggcgugcugcagaccuucaugagaauggccuggggcggcagcuacaucgcccuggacagcggcagaggcagaugggacugcaucaugaccagcuaccaguaccugaucauccagaacaccaccugggaggaccacugccaguucagcagacccagccccaucggcuaccugggccugcugagccagagaaccagagacaucuacaucagcagaagaagaagaggcaccuucaccuggacccugagcgacagcgagggcaaggacacccccggcggcuacugccugaccagauggaugcugaucgaggccgagcugaagugcuucggcaacaccgccguggccaagugcaacgagaagcacgacgaggaguucugcgacaugcugagacuguucgacuucugcaagcaggccauccagagacugaaggcccccgcccagaugagcauccagcugaucaacaaggccgugaacgcccugaucaacgaccagcugaucaugaagaaccaccugagagacaucaugggcauccccuacugcaacuacagcaaguacugcuaccugaaccacaccaccaccggcaagaccagccugcccaagugcugccuggugagcaacggcagcuaccugaacgagacccacuucagcgacgacaucgagcagcaggccgacaacaugaucaccgagaugcugcagaaggaguacauggagagacagggcaagaccccccugggccugguggaccuguucguguucagcaccagcuucuaccugaucagcaucuuccugcaccuggugaagauccccacccacagacacaucgugggcaagcccugccccaagccccacagacugaaccacaugggcaucugcagcugcggccuguacaagcagcccggcgugcccgugaaguggaagagaugaggacuagucccuguucccagagcccacuuuuuuuucuuuuuuugaaauaaaauagccugucuuucagaucucaaaggcucuuuucagagccaccaaaaaaaaaaaaaaaaaaaaaaaaaaaaaaaaaaaaaaaaaaaaaaaaaaaaaaaaaaaaaaaaaaaaaaaaaaaaaaaaaaaaaaaaaaaaaaaaaaaaa

SEQ ID NO: 26722 - RNA, 1748 nt, Artificial Sequence
  mRNA product Design a-1 (hSL-A100) comprising derived and/or modified sequence from LASV(LM776-SLE-2012;Clade IV)__AIT17824__GPCmut4 (opt4)
aggagagucccgcagucggcguccagcggcucugcuuguucgugugugugucguugcaggccuuauucaagcuuaccaugggccagaucgugaccuucuuccaggaggugccccacgugaucgaggaggugaugaacaucgugcugaucgcccugagcauccuggccgugcugaagggccuguacaacuucgccaccugcggccuggugggccuggugaccuuccugcugcugugcggcagaagcugcaccaccagcguguacaagggcguguacgagcugcagacccuggagcugaacauggagacccugaacaugugcaugccccugagcugcaccaagaacaacagccaccacuacaucauggugggcaacgagaccggccuggagcugacccugaccaacaccagcaucaucaaccacaaguucugcaaccugagcgacgcccacaagaagaaccuguacgaccacgcccugaugagcaucaucagcaccuuccaccugagcauccccaacuucaaccaguacgaggccaugagcugcgacuucaacggcggcaagaucagcgugcaguacaaccugagccacagcuacgccggcgacgccgccaaccacugcggcaccguggccaacggcgugcugcagaccuucaugagaauggccuggggcggcagcuacaucgcccuggacagcggccacggcaagugggacugcaucaugaccagcuaccaguaccugaucauccagaacaccaccugggaggaccacugccaguucagcagacccagccccaucggcuaccugggccugcugagccagagaaccagagacaucuacaucagcagaagaagaagaggcaccuucaccuggacccugagcgacagcgagggcaaggacacccccggcggcuacugccugaccagauggaugcugaucgaggccgagcugaagugcuucggcaacaccgccguggccaagugcaacgagaagcacgacgaggaguucugcgacaugcugagacuguucgacuucugcaagcaggccauccagagacugaaggcccccgcccagaugagcauccagcugaucaacaaggccgugaacgcccugaucaacgaccagcugaucaugaagaaccaccugagagacaucaugggcauccccuacugcaacuacagcaaguacugcuaccugaaccacaccaccaccggcaagaccagccugcccaagugcugccuggugagcaacggcagcuaccugaacgagacccacuucagcgacgacaucgagcagcaggccgacaacaugaucaccgagaugcugcagaaggaguacauggagagacagggcaagaccccccugggccugguggaccuguucguguucagcaccagcuucuaccugaucagcaucuuccugcaccuggugaagauccccacccacagacacaucgugggcaagagcugccccaagccccacagacugaaccacaugggcaucugcagcugcggccuguacaagcagcccggcgugcccgugagauggaagagaugaggacuagucccuguucccagagcccacuuuuuuuucuuuuuuugaaauaaaauagccugucuuucagaucucaaaggcucuuuucagagccaccaaaaaaaaaaaaaaaaaaaaaaaaaaaaaaaaaaaaaaaaaaaaaaaaaaaaaaaaaaaaaaaaaaaaaaaaaaaaaaaaaaaaaaaaaaaaaaaaaaaaa

SEQ ID NO: 26723 - RNA, 1748 nt, Artificial Sequence
  mRNA product Design a-1 (hSL-A100) comprising derived and/or modified sequence from LASV(Mad39;Clade IV)__ANH09722__GPCmut4 (opt4)
aggagagucccgcagucggcguccagcggcucugcuuguucgugugugugucguugcaggccuuauucaagcuuaccaugggccagaucgugaccuucuuccaggaggugccccacgugaucgaggaggugaugaacaucgugcugaucgcccugagcauccuggccgugcugaagggccuguacaacguggccaccugcggccugaucggccuggugaccuuccugcugcugugcggcagaagcugcaccaccacccuguacaagggcguguacgagcugcaggcccuggagcugaacauggagacccugaacaugugcaugccccugagcugcaccaagaacaacagccaccacuacaucagagugggcaacgagaccggccuggagcugacccugaccaacaccagccugaucaaccacaaguucugcaaccugagcgacgcccacaagaagaaccuguacgaccacgcccugaugagcaucaucagcaccuuccaccugagcauccccaacuucaaccaguacgaggccaugagcugcgacuucaacgacggcaagaucagcgugcaguacaaccugagccacaccuacgccggcgacaccgccaaccacugcggcaccguggccaacggcgugcugcagaccuucaugagaauggccuggggcggcagcuacaucgcccuggacagcggcagaggcggcugggacugcaucaugaccagcuaccaguaccugaucauccagaacaccaccugggaggaccacugccaguucagcagacccagccccaucggcuaccugggccugcugagccagagaaccagagacaucuacaucagcagaagaagaagaggcaccuucaccuggacccugagcgacagcgagggcaaggacacccccggcggcuacugccugaccagauggaugcugaucgaggccgagcugaagugcuucggcaacaccgccguggccaagugcaacgagaagcacgacgaggaguucugcgacaugcugagacuguucgacuucugcaagcaggccauccagagacugaaggcccccgcccagaugagcauccagcugaucaacaaggccgugaacgcccugaucaacgaccagcugaucaugaagaaccaccugagagacaucaugggcauccccuacugcaacuacagcaaguacugcuaccugaaccacaccgugaccggcaagaccagccugcccaagugcugccuggugagcaacggcagcuaccugaacgagacccacuucagcgacgacaucgagcagcaggccgacaacaugaucaccgagaugcugcagaaggaguacauggagagacagggcaagaccccccugggccugguggaccuguucguguucagcaccagcuucuaccugaucagcaucuuccugcaccuggugaagauccccacccacagacacguggugggcaagcccugccccaagccccacagacugaaccacaugggcaucugcagcugcggcuucuacaagcagcccggcgugcccgugagauggaagagaugaggacuagucccuguucccagagcccacuuuuuuuucuuuuuuugaaauaaaauagccugucuuucagaucucaaaggcucuuuucagagccaccaaaaaaaaaaaaaaaaaaaaaaaaaaaaaaaaaaaaaaaaaaaaaaaaaaaaaaaaaaaaaaaaaaaaaaaaaaaaaaaaaaaaaaaaaaaaaaaaaaaaa

SEQ ID NO: 26724 - RNA, 1748 nt, Artificial Sequence
  mRNA product Design a-1 (hSL-A100) comprising derived and/or modified sequence from LASV(Z0947-SLE-2011;Clade IV)__AIT17840__GPCmut4 (opt4)
aggagagucccgcagucggcguccagcggcucugcuuguucgugugugugucguugcaggccuuauucaagcuuaccaugggccagaucgugaccuucuuccaggaggugccccacgugaucgaggaggugaugaacaucgugcugaucgcccugagcauccuggccgugcugaagggccuguacaacuucgccaccugcggccuggugggccuggugaccuuccugcugcugugcggcagaagcugcaccaucagccuguacaagggcguguacgagcugcagacccuggagcugaacauggagacccugaacaugugcaugccccugagcugcaccaagaacaacagccaccacuacaucauggugggcaacgagaccggccuggagcugacccugaccaacaccagcaucaucaaccacaaguucugcaaccugagcgacgcccacaagaagaaccuguacgaccacgcccugaugagcaucaucagcaccuuccaccugagcauccccaacuucaaccaguacgaggccaugagcugcgacuucaacggcggcaagaucagcgugcaguacaaccugagccacagcuacgccggcgacgccgccaaccacugcggcaccguggccaacggcgugcugcagaccuucaugagaauggccuggggcggcagcuacaucgcccuggacagcggcagagacagaugggacugcaucaugaccagcuaccaguaccugaucauccagaacaccaccugggaggaccacugccaguucagcagacccagccccaucggcuaccugggccugcugagccagagaaccagagacaucuacaucagcagaagaagaagaggcaccuucaccuggacccugagcgacagcgagggcaaggacacccccggcggcuacugccugaccagauggaugcugaucgaggccgagcugaagugcuucggcaacaccgccguggccaagugcaacgagaagcacgacgaggaguucugcgacaugcugagacuguucgacuucugcaagcaggccauccagagacugaaggcccccgcccagaugagcauccagcugaucaacaaggccgugaacgcccugaucaacgaccagcugaucaugaagaaccaccugagagacaucaugggcauccccuacugcaacuacagcaaguacugcuaccugaaccacaccaccaccggcaagaccagccugcccaagugcugccuggugagcaacggcagcuaccugaacgagacccacuucagcgacgacaucgagcagcaggccgacaacaugaucaccgagaugcugcagaaggaguacauggagagacagggcaagaccccccugggccugguggaccuguucguguucagcaccagcuucuaccugaucagcaucuuccugcaccuggugaagauccccacccacagacacaucgugggcaagcccugccccaagccccacagacugaaccacaugggcaucugcagcugcggccuguacaagcagcccggcgugcccgugaaguggaagagaugaggacuagucccuguucccagagcccacuuuuuuuucuuuuuuugaaauaaaauagccugucuuucagaucucaaaggcucuuuucagagccaccaaaaaaaaaaaaaaaaaaaaaaaaaaaaaaaaaaaaaaaaaaaaaaaaaaaaaaaaaaaaaaaaaaaaaaaaaaaaaaaaaaaaaaaaaaaaaaaaaaaaa

SEQ ID NO: 26725 - RNA, 1748 nt, Artificial Sequence
  mRNA product Design a-1 (hSL-A100) comprising derived and/or modified sequence from LASV(Josiah;Clade IV)__NP_694870__GPCmut4 (opt5)
aggagagucccgcagucggcguccagcggcucugcuuguucgugugugugucguugcaggccuuauucaagcuuaccaugggccagaucgugaccuucuuucaagaggucccccacguuauugaagaggugaugaacaucgugcugauugcccucagcguccuggcugugcuuaaggggcuguacaauuucgccacaugcggacucguuggccuggugacguuucuucugcucugugggagauccugcaccacaucucuguauaaaggagucuacgaacugcagacccucgagcugaacauggaaacacuuaauauguguaugccucugagcugcaccaagaacaauucccaucacuauaucauggugggcaacgagacagggcucgagcugacccuuacgaauaccucuauuaucaaccauaaauucuguaaucugagcgacgcgcacaagaaaaaccucuacgaucaugcucugauguccaucauuucuacauuucaccugagcaucccgaauuucaaccaguaugaagccauguccugcgacuuuaauggaggcaagauuagcguucaguacaaccucucucacuccuaugccggcgaugcugccaaucauugugggaccguggcuaacggaguccugcaaacauucaugcggauggccuggggcgggagcuacaucgcgcuugacucuggacgcggcaacugggauugcauuaugaccuccuaccaguaucugaucauucagaauacgacaugggaggaccacugucaguuuagcagacccucuccuaucggguaccucggacugcuuucccaacggacccgcgauaucuauauuagcagacggcgcagaggcacauucaccuggacccuguccgacucugaaggcaaggauacacccgggggauacugccucacgcgguggaugcugaucgaggccgagcugaaauguuuuggcaacaccgcuguggccaagugcaaugaaaaacaugacgaggaguucugcgauaugcuccgccuguuugacuucuguaagcaggcuauucagagacuuaaagccccugcgcagaugagcauccaacugauuaacaaggccgugaaugcucucaucaacgaucagcugaucaugaagaaucaccuucgggacauuauggggauccccuauugcaacuacuccaaauauuguuaccugaaucacacaaccacaggacgcaccagccucccuaagugcugucuggucucuaacggcuccuaccugaaugaaacgcauuucagcgacgauauugaacagcaagccgacaacaugaucacagagaugcuccagaaagaguauauggaaagacaggggaagaccccgcugggacuuguugaucuguuuguguucucuaccagcuuuuaccucauuuccaucuuccugcaccuggugaaaauccccacacaucggcacauugucggcaagucuugcccuaaaccccaucgccuuaaucacaugggcaucuguagcugcgggcucuauaagcagccuggagugcccguuaaguggaaaagaugaggacuagucccuguucccagagcccacuuuuuuuucuuuuuuugaaauaaaauagccugucuuucagaucucaaaggcucuuuucagagccaccaaaaaaaaaaaaaaaaaaaaaaaaaaaaaaaaaaaaaaaaaaaaaaaaaaaaaaaaaaaaaaaaaaaaaaaaaaaaaaaaaaaaaaaaaaaaaaaaaaaaa

SEQ ID NO: 26726 - RNA, 1745 nt, Artificial Sequence
  mRNA product Design a-1 (hSL-A100) comprising derived and/or modified sequence from LASV(LP;Clade I)__AAF86701__GPCmut4 (opt5)
aggagagucccgcagucggcguccagcggcucugcuuguucgugugugugucguugcaggccuuauucaagcuuaccaugggccagaucauuaccuucuuucaagaggugccccacgucaucgaagagguuaugaacauugugcugaucgcccucagccugcuugcuauucugaaggggcucuacaauaucgccacaugcggaaucauuggccugguggcguuccuuuuucugugugggaaauccugcucucucacgcugaagggaggcuaugaacugcagacccucgagcugaacauggaaacacuuaauauguguaugccucugagcugcaccaaaaacuccucucaucacuacaucagagucgggaaugagacaggacucgagcugacccuuacaaacaccagcauuaucaaucauaaguucuguaaccuguccgacgcucacaaaaagaaucucuaugaucaugcccugaugucuauuaucagcacguuucaccuguccauuccgaacuucaaucaguacgaagccaugagcugcgacuuuaacggcggcaagaucucugugcaguauaaucucucccacagcuacgcuggggaugccgcugagcauuguggaaccguugccaacggcgugcugcaaacauucaugcggauggcguggggagggcgcuauaucgcccuugacucuggcaaagggaauugggauugcauuaugaccuccuaccaguaccugaucauucagaacacaaccugggaagaccacugucaguuuagcagacccucuccuaucggauaucucggccugcuuucccaacggacgcgcgauauuuacaucagcagacggcgcagaggcacauucaccuggacacuguccgacucugaggggaacgagacccccggaggcuauugccucacccgguggaugcugaucgaagcugagcugaaguguuuugggaauacagccgucgcuaaaugcaacgaaaagcaugaugaggaguucugcgacaugcuccgccuguuugauuucuguaaacaggccauuagacggcuuaaggcgccugcccagaugagcauccagcugauuaauaaggcugugaacgcccucaucaaugaccaacugauuaugaaaaaccaccuucgcgauaucaugggaauccccuacugcaauuauuccaaguacuguuaucugaaccacacgagcucuggcagaaccucccucccuaaaugcugucugauuagcaaugggucuuaccugaacgaaacacaguucagcgacgacaucgagcagcaagcugauaauaugauuaccgaaaugcuccagaaggaguacaucgaacggcagggaaaaacaccgcugggccuuguugacauuuuuaucuucuccaccucuuuuuaucugauuagcaucuuccuccaucugaucaagauucccacgcaccgccauaucgugggcaaaccuugccccaagccucacagacugaaccauaugggggucuguuccugcggacuuuacaagcaccccggcgugccgacaaaauggaagcggugaggacuagucccuguucccagagcccacuuuuuuuucuuuuuuugaaauaaaauagccugucuuucagaucucaaaggcucuuuucagagccaccaaaaaaaaaaaaaaaaaaaaaaaaaaaaaaaaaaaaaaaaaaaaaaaaaaaaaaaaaaaaaaaaaaaaaaaaaaaaaaaaaaaaaaaaaaaaaaaaaaaaa

SEQ ID NO: 26727 - RNA, 1745 nt, Artificial Sequence
  mRNA product Design a-1 (hSL-A100) comprising derived and/or modified sequence from LASV(803213;Clade II)__AAF86703__GPCmut4 (opt5)
aggagagucccgcagucggcguccagcggcucugcuuguucgugugugugucguugcaggccuuauucaagcuuaccaugggccagaucauuaccuucuuucaagaggugccccacgucaucgaagagguuaugaacauugugcugaucgcccucagccugcuugcuauucugaaggggaucuacaauguggccacaugcggacucuucggccugaucuccuuucuucugcucugugggagaucuugcagcgucacguauaaaggaguguacgaacugcagacccuggagcucaacauggcgaaucugaacauguguaugccucuuuccugcacaaagaauaacucucaucacuauauuaugguuggcaaugaaaccgggcuggagcucacacugaccaacacaagcaucauuaaucauaaauucuguaaccuuuccgacgcucacaagaaaaaucuguacgaucaugcccucaugucuaucauuagcaccuuucaccuguccaucccgaacuucaaucaguaugaggccaugagcugcgacuuuaacggaggcaagauuucugugcaguacaaucugucccacagcuucgcugucgaugccgcuaaccauuguggcacgaucgccaacggggugcuccaaaccuuuaugcggauggcguggggaggcucuuauaucgcccuggacuccgggaagggaaauugggauugcauuaugacaagcuaccaguaccuuaucauucagaacaccacaugggaagaccacugucaguucucucgccccuccccuaucggcuaucuggggcuccugagccaaagaacccgggauauuuacaucucccgcagacggcgcggaacguuuacauggacccuuucugacagcgagggcaaugaagcucccggcggguauugccugacaagauggaugcucaucgaggccgagcugaaauguuucggaaacaccgcuguugccaagugcaaugaaaaacaugaugaggaauuuugcgacaugcugcgccucuucgauuucuguaagcaggcgauuaaacggcugaagaccccugcccagauguccauccagcuuauuaacaaggcugugaaugcccugaucaacgaccaacucauuaugaaaaaucaccugagagauaucaugggcauccccuacugcaacuauagccgguacuguuaucuuaaucacacagucacggggaagaccucucugccucgcugcugucucguguccaacggaagcuaccugaaugagacacauuuuucugacgacauugaacagcaggcugauaacaugaucaccgagaugcugcaaaaagaguacauggacagacagggcaagacaccgcucgggcugguggaucuuuucgucuuuagcaccuccuucuaucugauuucuaucuuucuccaccugguuaaaauucccacgcaucggcacaucgugggaaagccuugccccaaaccucaucgccugaaucacaugggcauuuguagcugcggccuuuacaagcaccccggggugccggucaaguggaaaagaugaggacuagucccuguucccagagcccacuuuuuuuucuuuuuuugaaauaaaauagccugucuuucagaucucaaaggcucuuuucagagccaccaaaaaaaaaaaaaaaaaaaaaaaaaaaaaaaaaaaaaaaaaaaaaaaaaaaaaaaaaaaaaaaaaaaaaaaaaaaaaaaaaaaaaaaaaaaaaaaaaaaaa

SEQ ID NO: 26728 - RNA, 1745 nt, Artificial Sequence
  mRNA product Design a-1 (hSL-A100) comprising derived and/or modified sequence from LASV(GA391;Clade III)__CAA36645__GPCmut4 (opt5)
aggagagucccgcagucggcguccagcggcucugcuuguucgugugugugucguugcaggccuuauucaagcuuaccaugggccagaucgugaccuucuuucaagaggucccccacguuauugaagaggugaugaacaucgugcugauugcccucagcauccuggcuauucuuaaggggcuguacaaugucgccacaugcggacucaucggccuggugacguuccuucugcucuccgggagaucuuguagccugaucuauaaaggaaccuacgaacugcagacacucgagcugaacauggaaacccuuaauaugugcaugccucuguccuguacaaagaacaauucucaucacuauauucggguuggcaacgagaccgggcucgagcugacacuuaccaauacgagcauccugaaccauaaauuuugcaaucucuccgacgcgcacaagcgcaaccuguacgaucauucucugaugagcauuaucuccaccuuccaccucagcauuccgaauuuuaaccaguaugaagcuaugucuugugacuucaauggaggcaaaaucacagugcaguacaaccugucccacagcuuugccgucgaugccgcuggccauugcgggacccuugccaauggagugcugcaaacauucaugagaauggcuuggggcgggucuuauauugcccucgacuccggacggggcaacugggauuguaucaugaccagcuaccaguaccugaucauucagaacacgacaugggacgaucacugccaguuuucucgccccuccccuaucggguaucuuggacugcucagccaaagaacccgggacauuuacaucucccgcagacggcgcggcacauucaccuggacccugucugauagcgagggcaaugaaacacccgggggauauugucugacgagauggaugcucauugaggcggagcugaagugcuuuggcaacaccgccguugcuaaguguaaugaaaaacaugacgaggaguucugcgauaugcuucggcuguuugacuucugcaagcaggccauccgcagacucaaaaccccugcucagauguccauccagcugauuaacaaggccgugaaugcgcuuaucaacgaucaacugauuaugaaaaaucaccuccgggacaucauggggauucccuacuguaacuauagccgcuacugcuaucugaaucacacaucuacaggaaagaccucccugccuagauguugccucaucagcaacggcucuuaccugaaugaaacgaaguucagcgacgauaucgaacagcaggccgacaacaugauuacagagaugcuucaaaaagaguacaucgaucggcaggggaagaccccgcugggacucgucgaccuguuuguguucuccaccucuuuuuaucugauuagcaucuuccuucaucucgugaaaauucccacacacagacauaucgucggcaagccuugucccaaaccucaccgccugaaucauaugggcauuugcuccugugggcuguacaagcagcccggaguuccggugcgguggaaaagaugaggacuagucccuguucccagagcccacuuuuuuuucuuuuuuugaaauaaaauagccugucuuucagaucucaaaggcucuuuucagagccaccaaaaaaaaaaaaaaaaaaaaaaaaaaaaaaaaaaaaaaaaaaaaaaaaaaaaaaaaaaaaaaaaaaaaaaaaaaaaaaaaaaaaaaaaaaaaaaaaaaaaa

SEQ ID NO: 26729 - RNA, 1748 nt, Artificial Sequence
  mRNA product Design a-1 (hSL-A100) comprising derived and/or modified sequence from LASV(AV;Clade V)__CCA30314__GPCmut4 (opt5)
aggagagucccgcagucggcguccagcggcucugcuuguucgugugugugucguugcaggccuuauucaagcuuaccaugggccagaucgugaccuucuuucaagaggucccccacguuauugaagaggugaugaacaucgugcugauugcccucagcauccuggcuguccuuaaggggcuguacaauauugccacaugcggacucaucggccugaucacguuccuucugcucugugggagauccugcucuagcaaccuguauaaaggaguguacgaacugcagucccucgaccugaauauggagacccuuaacauguguaugccucugucuugcacaaagaauaacagccaucacuauauucggguuggcaaugauaccgggcucgaacugacacuuaccaacacauccauccugaaucauaaauuuuguaaccucucugacgcgcacaagaaagaucuguacgaccaugcucugaugagcauuaucuccaccuuccaccucagcauuccgaauuuuaaccaguaugaggccaugucuugcgauuucaauggaggcaagaucuccgugcaguacaaccugagccacucuuaugccauugacgcugccaaucauuguggcacggucgcuaacgggauccuucaaaccuuuaugcgcauggccuggggaggcuccuacaucgcgcuggauagcgggagaggaaacugggacugcauuaugacaucuuaccaguaucucaucauucagaauaccacaugggagaaccacugucaguucucccggcccagcccuaucggcuaccuggggcuucugucccaacgcaccagagauauuuauaucucucggcgcagacggggaacguuuacauggacccucagcgacuccgaaggcaaugccacacccggcggguacugccugacccgcuggaugcugaucgaggcugaacucaaguguuucggaaacaccgccguggcuaaaugcaaugagaagcaugaugaggaauuuugcgacaugcugagacuuuucgauuuuuguaaacaggccauuagccggcugaagucuccugcgcagauguccauccagcucauuaacaaagccguuaaugcucugaucaacgaccaacuuauuaugaagaaucaucugcgcgacaucaugggcauccccuauugcaacuacagcaaguauuguuaccucaaucacacaauuacggggaaaaccucucugccuaagugcugucuggugagcaacggauccuaccucaaugagacacacuucucugaugacaucgaacagcaggccgauaacaugauuaccgagaugcugcaaaaagaauauauggagagacagggcaagacaccgcuugggcuggucgaccucuucguguuuagcaccuccuucuaccugaucagcauuuuucugcggcuugugaaaauccccacgcaccgccauauugucggaaagccuugccccaaaccucacagacucaaucauaugggcaucuguucuugcggccuguauaagcagcccgggguuccggugcgguggaagagaugaggacuagucccuguucccagagcccacuuuuuuuucuuuuuuugaaauaaaauagccugucuuucagaucucaaaggcucuuuucagagccaccaaaaaaaaaaaaaaaaaaaaaaaaaaaaaaaaaaaaaaaaaaaaaaaaaaaaaaaaaaaaaaaaaaaaaaaaaaaaaaaaaaaaaaaaaaaaaaaaaaaaa

SEQ ID NO: 26730 - RNA, 1745 nt, Artificial Sequence
  mRNA product Design a-1 (hSL-A100) comprising derived and/or modified sequence from LASV(Togo/2016/7082;Clade VI)__AMR44577__GPCmut4 (opt5)
aggagagucccgcagucggcguccagcggcucugcuuguucgugugugugucguugcaggccuuauucaagcuuaccaugggccagaucauuaccuucuuucaagaggugccccacgucaucgaagagguuaugaacauugugcugaucgcccucagccugcuugcuauucugaaggggguguacaaugucgccacaugcggaaucaucggccucgugacguuccuguuucuuugugggagauccugcucucugauuuauaaaggaagcuacgaacuccagacccuggagcugaacauggaaacacucaauauguguaugccucuguccugcaccaagaacucuagccaucacuauauccggguuggcaaugagacagggcuugagcugacccucacaaacaccuccauuaucaaucauaaauucuguaaccugucugacgcgcacaagcgcaaucuuuacgaucaugcucugaugagcauucucuccacguuucaccugagcaucccgaacuucaaucaguaugaagccaugucuugcgacuuuaacggaggcaaaauuuccgugcaguacaaucugagccacgccuaugcugucgaugccgcugagcauuguggcaccguggccaacgggguucuccaaacauucaugagaauggcguggggaggcucuuacaucgcccuggacuccgggcggggaaauugggauugcaucaugaccagcuaccaguaucuuauuauccagaacacaaccugggaagaccacugucaguuuucucgccccuccccuauuggcuaccuggggcuccugagccaaagaacgcgggauaucuauauuucccgcagacggcgcggaacauucaccuggacacuuucugacagcgagggcaacgagacccccggcggguacugccugaccagauggaugcucaucgaagcugagcugaaguguuuuggaaauacagccguggcuaagugcaacgaaaaacaugaugaggaguucugcgacaugcugcggcucuuugauuucuguaagcaggccauccagcgccugaaauccccugcgcagaugagcauucaacuuaucaauaaggccgucaacgcucugauuaaugaccagcucaucaugaaaaaccaccugagagauaugaugggcauucccuauugcaauuacucuaaguauuguuaccuuaaccacacguccagcgggcggaccucucugccuaagugcugucucgugagcaauggauccuaccugaacgaaacacauuucucugacgacaucgagcagcaagccgauaauaugaucaccgaaaugcugcagaaagaguauauugaccgccagggcaagacaccgcucgggcugguggaucuuuuugucuucagcaccuccuuuuaccugaucagcauuuuccuccaccugaucaaaauucccacgcauagacacaucguuggaaagccuugccccaaaccucaucggcugaaccacaugggcauuuguucuugcggccuuuauaagcagcccggggugccgacaagauggaaacgcugaggacuagucccuguucccagagcccacuuuuuuuucuuuuuuugaaauaaaauagccugucuuucagaucucaaaggcucuuuucagagccaccaaaaaaaaaaaaaaaaaaaaaaaaaaaaaaaaaaaaaaaaaaaaaaaaaaaaaaaaaaaaaaaaaaaaaaaaaaaaaaaaaaaaaaaaaaaaaaaaaaaaa

SEQ ID NO: 26731 - RNA, 1745 nt, Artificial Sequence
  mRNA product Design a-1 (hSL-A100) comprising derived and/or modified sequence from LASV(KAK-428;Clade n.d. (VII))__ANH09740__GPCmut4 (opt5)
aggagagucccgcagucggcguccagcggcucugcuuguucgugugugugucguugcaggccuuauucaagcuuaccaugggccagaucgugaccuucuuucaagaggucccccacguuauugaagaggugaugaacaucgugcugauugcccucagccugcuugcuauccugaaggggcucuacaauuucgccacaugcggagucauuggccugaucacguuucuucugcucugugggagauccugcucugcgaccuauaaaggacaguacgaacugcagacacuggagcucaacauggaaagccugaauauguguaugccucuuuccugcaccaagaacaauucucaucacuauauccgggcuggcaacaauacagggcuggagcucacccugacaaacaccagcauuaucucccauaaauucuguaaucuuucugacgcccacaagaaaaaccuguacgaucauacgcucaugagcauuaucaccacauuucaccuguccauuccgaauuucaaccaguaugaggccaugagcugcgacuuuaauggaggcaagaucucuauucaauacaaccugucccacagcuaugcuggcgaugccgcucagcauugugggaccguggccaauggaguucuccagacauucaugcgcauggcguggggcgggucuuaccuggcccuugacuccggaagacggggcugggauugcaucaucagcucuuaccaguaucugauuauccaaaacaccacgugggacgaucacugucaguuuucccgccccagcccuauuggguaccucggauucgugucccagaagacaagagacaucuauauuucucggcgcagacggggcaccuuuacauggacccugagcgauuccgaaggccaugacaugcccgggggauacugccuuacccgcuggaugcugaucgaggcugaucucaaauguuucggcaacacagccgucgcuaagugcaaugaaaaacacgacgaggaguuuugcgauauguggagacuguucgacuucuguaagcaggccauccaacggcugaaagcgccugcccagaugaacauucagcucaucaauaaggcugugaacgcccugauuaaugaccaacuuaugaugaagaaccaucugcgcgauaucauggggauucccuauugcaauuacagcaaauuuuguuaucucaacaauacgaccacaggaagaaccucucugccucggugcugucuuaucuccaacggcagcuaccugaaugaaacacacuucucugacgauaucgagcagcaggcugacaacaugauuaccgaaaugcuccagaaggaguacauggaucgccaagggaaaacgccgcugggacugguugaccucuuuguguucagcacauccuuuuaucugaucaccauuuuccuucaccuggucaagauccccacccauagacacauugugggcaaaccuugccccaagccucaucggcucaaucacaugggcaucuguucuugcgggcuguacaaacagcccggagugccggucagauggaagcgcugaggacuagucccuguucccagagcccacuuuuuuuucuuuuuuugaaauaaaauagccugucuuucagaucucaaaggcucuuuucagagccaccaaaaaaaaaaaaaaaaaaaaaaaaaaaaaaaaaaaaaaaaaaaaaaaaaaaaaaaaaaaaaaaaaaaaaaaaaaaaaaaaaaaaaaaaaaaaaaaaaaaaa

SEQ ID NO: 26732 - RNA, 1745 nt, Artificial Sequence; identical to SEQ ID NO: 26726
  mRNA product Design a-1 (hSL-A100) comprising derived and/or modified sequence from LASV(Pinneo-NIG-1969;Clade I)__AIT17836__GPCmut4 (opt5)

SEQ ID NO: 26733 - RNA, 1745 nt, Artificial Sequence
  mRNA product Design a-1 (hSL-A100) comprising derived and/or modified sequence from LASV(ISTH0009-NIG-2011;Clade II)__AIT17404__GPCmut4 (opt5)
aggagagucccgcagucggcguccagcggcucugcuuguucgugugugugucguugcaggccuuauucaagcuuaccaugggccagaucauuaccuucuuucaagaggugccccacgucaucgaagagguuaugaacauugugcugaucgcccucagccugcuugcuauucugaaggggaucuacaauguggccacaugcggacucuucggccuggucuccuuucuucugcucugugggagaucuugcagcacgaccuauaaaggaguguacgaacugcagacacuggagcucgacauggcgucccugaacauguguaugccucuuucuugcaccaagaauaacagccaucacuauaucaugguuggcaaugaaacagggcuggagcucacccugacaaacaccuccauuaucaaucauaaauucuguaaccuuucugaugcucacaagaaaaaucuguacgaccaugcccucaugagcauuaucuccacguuucaccugagcauuccgaacuucaaucaguaugaggccaugucuugcgauuuuaacggaggcaagaucuccgugcaguacaaucugagccacgcuuaugccgucgacgcugccaaccauuguggcaccauugcgaauggggugcuccaaacauucaugcggauggccuggggaggcucuuacaucgcucuggauuccgggaagggaagcugggacugcaucaugaccucuuaccaguaucuuauuauccagaacacaaccugggaagaucacugucaguuuucccgccccagcccuauuggcuaccuggggcuccugucccaaagaacgcgggacaucuauauuucucgcagacggcgcggaacauucaccuggacacuuagcgauuccgagggcaacgaaacccccggcggguacugccugaccagauggaugcucaucgaggccgagcugaaauguuuuggaaauacagcuguugccaagugcaacgaaaaacaugacgaggaguucugcgauaugcugcggcucuuugacuucuguaagcaggcgauccgcagacugaaaacgccugcccagaugagcauucagcuuaucaauaaggcugugaacgcccugauuaaugaucaacucaucaugaagaaccaucugcgggacauuaugggcauccccuauugcaauuacucuaaauauuguuaccuuaaccacaccgucacagggaagaccucccugccucgcugcugucucgugagcaauggaucuuaccugaacgaaacacacuucagcgacgauaucgaacagcaggcugacaauaugauuaccgagcugcuccaaaaagaguauauggauagacagggcaagacgccgcuggggcuuguggaccuguuugucuucuccacaucuuuuuaccucaucagcauuuuccugcaccugaucaaaauucccacccaucggcacaucaccggaaagccuugccccaaaccucaucgccuuaaccacaugggcauuuguuccugcggccucuauaagcaccccgggguuccggugaaguggaaaagaugaggacuagucccuguucccagagcccacuuuuuuuucuuuuuuugaaauaaaauagccugucuuucagaucucaaaggcucuuuucagagccaccaaaaaaaaaaaaaaaaaaaaaaaaaaaaaaaaaaaaaaaaaaaaaaaaaaaaaaaaaaaaaaaaaaaaaaaaaaaaaaaaaaaaaaaaaaaaaaaaaaaaa

SEQ ID NO: 26734 - RNA, 1745 nt, Artificial Sequence
  mRNA product Design a-1 (hSL-A100) comprising derived and/or modified sequence from LASV(ISTH2010-NIG-2012;Clade II)__AIT17482__GPCmut4 (opt5)
aggagagucccgcagucggcguccagcggcucugcuuguucgugugugugucguugcaggccuuauucaagcuuaccaugggccagaucauuaccuucuuucaagaggugccccacgucaucgaagagguuaugaacauugugcugaucgcccucagccugcuugcuauucugaaggggaucuacaauguggccacaugcggacucuucggccuggucuccuuucuucugcucugugggagaucuugcagcacgaccuauaaaggaguguacgaacugcagacacuggagcucgacauggcgucccugaacauguguaugccucuuucuugcaccaagaauaacagccaucacuauaucaugguuggcaaugaaacagggcuggagcucacccugacaaacaccuccauuaucaaucauaaauucuguaaccuuucugaugcucacaagaaaaaucuguacgaccaugcccucaugagcauuaucuccacguuucaccugagcauuccgaacuucaaucaguaugaggccaugucuugcgauuuuaacggaggcaagaucuccgugcaguacaaucugagccacgcuuaugccgucgacgcugccaaccauuguggcaccauugcgaauggggugcuccaaacauucaugcggauggccuggggaggcucuuacaucgcucuggauuccgggaagggaagcugggacugcaucaugaccucuuaccaguaucuuauuauccagaacauuacaugggaagaucacugucaguuuucccgccccagcccuaucggcuaccuggggcuccugucccaaagaacccgggacauuuauaucucucgcagacggcgcggaacguucacauggacccuuagcgauuccgagggcaacgaaacacccggcggguacugccugaccagauggaugcucaucgaggccgagcugaaauguuuuggaaauaccgcuguugccaagugcaacgaaaaacaugacgaggaguucugcgauaugcugcggcucuuugacuucuguaagcaggcgauucgcagacugaaaacgccugcccagaugagcauccagcuuauuaauaaggcugugaacgcccugaucaaugaucaacucauuaugaagaaccaucugcgggacaucaugggcauccccuauugcaauuacucuaaauauuguuaccuuaaccacacagucaccgggaagacaucccugccucgcugcugucucgugagcaauggaucuuaccugaacgaaacccacuucagcgacgauauugaacagcaggcugacaauaugaucacagagcugcuccaaaaagaguauauugauagacagggcaagaccccgcuggggcuuguggaccuguuugucuucuccacgucuuuuuaccucaucagcauuuuccugcaccugguuaaaauccccacacaucggcacguggugggaaagccuugccccaaaccucaucgccuuaaccacaugggcauuuguuccugcggccucuauaagcaccccggggucccggugaaguggaaaagaugaggacuagucccuguucccagagcccacuuuuuuuucuuuuuuugaaauaaaauagccugucuuucagaucucaaaggcucuuuucagagccaccaaaaaaaaaaaaaaaaaaaaaaaaaaaaaaaaaaaaaaaaaaaaaaaaaaaaaaaaaaaaaaaaaaaaaaaaaaaaaaaaaaaaaaaaaaaaaaaaaaaaa

SEQ ID NO: 26735 - RNA, 1745 nt, Artificial Sequence
  mRNA product Design a-1 (hSL-A100) comprising derived and/or modified sequence from LASV(Lassa virus/H.sapiens-wt/NGA/2015/ISTH_0543;Clade II)__AVO03639__GPCmut4 (opt5)
aggagagucccgcagucggcguccagcggcucugcuuguucgugugugugucguugcaggccuuauucaagcuuaccaugggccagaucauuaccuucuuucaagaggugccccacgucaucgaagagguuaugaacauugugcugaucgcccucagccugcuugcuauucugaaggggaucuacaauguggccacaugcggacucuucggccuggucuccuuucuucugcucugugggagaucuugcagcacgaccuauaaaggaguguacgaacugcagacacuggagcucgacauggcgaaccugaauauguguaugccucuuuccugcaccaagaacaauucucaucacuauaucaugguuggcaacgaaacagggcuggagcucacccugacaaauaccagcauuaucaaccauaaauucuguaaucuuuccgaugcucacaagaaaaaccuguacgaccaugcccucaugucuauuaucagcacguuucaccuguccauuccgaauuucaaccaguaugaggccaugagcugcgauuuuaauggaggcaagaucucugugcaguacaaccugucccacaccuaugcugucgacgccgcuaaucauuguggcacaauugccaacggggugcuccaaaccuucaugcggauggcguggggaggcagcuacaucgcccuggauucugggaagggauccugggacugcaucaugacaagcuaccaguaucuuguuauucagaacaccacgugggaagaucacugucaguuuucucgccccuccccuaucggcuaccuggggcuccugagccaaagaacacgggacauuuauaucucccgcagacggcgcggaaccuucacauggacccuuucugauagcgagggcaaugaaacccccggcggguacugccugacaagauggaugcucauugaggcugagcugaaauguuuuggaaacacggccguggcuaagugcaaugaaaaacaugacgaggaguucugcgauaugcugcggcucuuugacuucuguaagcaggccauccgcagacugaaaaccccugcgcagauguccauccagcuuauuaacaaggccgucaaugcucugaucaacgaucaacucauuaugaagaaucaucugcgggacaucaugggcauucccuauugcaacuacagcaaauauuguuaccuuaaucacacagugaccgggaagacaucucugccucgcugcugucucguguccaacggaagcuaccugaaugaaacccacuucucugacgauaucgaacagcaggccgacaacaugaucacggagcugcuccaaaaagaguauauugauagacagggcaagacaccgcuggggcuugucgaccuguuuguuuucagcaccuccuuuuaccucaucucuauuuuccugcaccuggugaaaauccccacccaucggcacauuacaggaaagccuugccccaaaccucaucgccuuaaucacaugggcaucuguagcugcggccucuauaagcaccccggggugccggucaaguggaaaagaugaggacuagucccuguucccagagcccacuuuuuuuucuuuuuuugaaauaaaauagccugucuuucagaucucaaaggcucuuuucagagccaccaaaaaaaaaaaaaaaaaaaaaaaaaaaaaaaaaaaaaaaaaaaaaaaaaaaaaaaaaaaaaaaaaaaaaaaaaaaaaaaaaaaaaaaaaaaaaaaaaaaaa

SEQ ID NO: 26736 - RNA, 1745 nt, Artificial Sequence
  mRNA product Design a-1 (hSL-A100) comprising derived and/or modified sequence from LASV(Lassa virus/H.sapiens-wt/NGA/2016/ISTH_0009;Clade II)__AVO03571__GPCmut4 (opt5)
aggagagucccgcagucggcguccagcggcucugcuuguucgugugugugucguugcaggccuuauucaagcuuaccaugggccagaucauuaccuucuuucaagaggugccccacgucaucgaagagguuaugaacauugugcugaucgcccucagccugcuugcuauucugaaggggaucuacaauguggccacaugcggacuccugggccuugucuccuuccugcuccugugugggagaucuugcagcacgaccuauaaaggaguguacgaacugcagacacucgagcuggacauggcgucccuuaacauguguaugccucugucuugcaccaagaauaacagccaucacuauaucaugguuggcaaugaaacagggcucgagcugacccuuacaaacaccuccauuaucaaucauaaauuuuguaaccugucugaugcucacaagaaaaaucucuacgaccaugcccugaugagcauuaucuccacguuccaccugagcauuccgaacuuuaaucaguaugaggccaugucuugcgauuucaacggaggccggaucuccgugcaguacaaucucagccacucuuaugcugucgacgccgcuaaccauuguggcaccauugccaauggggugcugcaaacauuuaugcgcauggcguggggaggcuccuacaucgcccuugauagcgggaagggaucuugggacugcaucaugaccuccuaccaguaucugauuauccagaacacaaccugggaagaucacugucaguucagcagacccuccccuauuggcuaccucgggcugcuuucucaacggacgcgcgacaucuauauuagcagacggcgcagaggaacauuuaccuggacacuguccgauagcgagggcaacgaaacccccggcggguacugccucacccgguggaugcugaucgaggcugagcugaaguguuucggaaauacagccguugcuaaaugcaacgaaaagcaugacgaggaauuuugcgauaugcuccgccuguucgacuuuuguaaacaggccaucagacggcuuaagacgccugcgcagaugucuauucagcugaucaauaaagccgugaacgcucucauuaaugaucaacugaucaugaagaaccaccuucgcgacauuaugggcauccccuauugcaauuacuccaaguauuguuaccugaaccacaccgucacagggaaaaccagccucccuagaugcugucuggugucuaauggaagcuaccugaacgagacacauuucuccgacgauaucgaacagcaggccgacaauaugauuaccgagcuccugcaaaaggaguauaucgaucggcagggcaaaacgccgcuugggcugguggaccucuucgucuuuucuaccagcuucuaccugauuuccaucuuucugcaccuuguuaagauucccacacaucgccacaucaccggaaaaccuugccccaagccucauagacucaaccacaugggcauuuguagcugcggccuguauaaucaccccggggugccggugaaauggaagcggugaggacuagucccuguucccagagcccacuuuuuuuucuuuuuuugaaauaaaauagccugucuuucagaucucaaaggcucuuuucagagccaccaaaaaaaaaaaaaaaaaaaaaaaaaaaaaaaaaaaaaaaaaaaaaaaaaaaaaaaaaaaaaaaaaaaaaaaaaaaaaaaaaaaaaaaaaaaaaaaaaaaaa

SEQ ID NO: 26737 - RNA, 1745 nt, Artificial Sequence
  mRNA product Design a-1 (hSL-A100) comprising derived and/or modified sequence from LASV(Lassa virus/H.sapiens-wt/NGA/2016/ISTH_0017;Clade II)__AVO03567__GPCmut4 (opt5)
aggagagucccgcagucggcguccagcggcucugcuuguucgugugugugucguugcaggccuuauucaagcuuaccaugggccagaucauuaccuucuuucaagaggugccccacgucaucgaagagguuaugaacauugugcugaucgcccucagccugcuugcuauucugaaggggaucuacaauguggccacaugcggacucuucggccuggucuccuuucuucugcucugugggagaucuugcagcacgaccuauaaaggaguguacgaacugcagacacuggagcucgacauggcgucccugaacauguguaugccucuuucuugcaccaagaauaacagccaucacuauaucaugguuggcaaugaaacagggcuggagcucacccugacaaacaccuccauuaucaaucauaaauucuguaaccuuucugaugcucacaagaaaaaucuguacgaccaugcccucaugagcauuaucuccacguuucaccugagcauuccgaacuucaaucaguaugaggccaugucuugcgauuuuaacggaggcaagaucuccgugcaguacaaucugagccacaccuaugcuauugacgccgcuaaccauuguggcacaaucgccaaugggguccuccaaaccuucaugcggauggcguggggaggcucuuacaucgcccuggauuccgggaagggaagcugggacugcauuaugacaucuuaccaguaucuuaucauucagaacaccacgugggaagaucacugucaguuuucccgccccagcccuaucggcuaccuggggcuccugucccaaagaacacgggacauuuauaucucucgcagacggcgcggaaccuucacauggacccuuagcgauuccgagggcaacgaaacccccggcggguacugccugacaagauggaugcucaucgaggcugagcugaaauguuuuggaaauacggccguggcuaagugcaacgaaaaacaugacgaggaguucugcgauaugcugcggcucuuugacuucuguaagcaggccauucgcagacugaaaaccccugcgcagaugagcauccagcuuauuaauaaggccguuaacgcucugaucaaugaucaacucauuaugaagaaccaucugcgggacaucaugggcauccccuauugcaauuacucuaaauauuguuaccuuaaccacacagugaccgggaagacaucccugccucgcugcugucucgucagcaauggaucuuaccugaacgaaacccacuucagcgacgauauugaacagcaggccgacaauaugaucacggagcugcuccaaaaagaguauauggauagacagggcaagacaccgcuggggcuuguggaccuguuuguguucuccaccucuuuuuaccucauuagcaucuuccugcaccugguccggauucccacccaucgccacguuaucggaaaaccuugccccaagccucauagacuuaaccacaugggcauuuguuccugcggccucuauaaacaccccggggugccggugaaguggaagcggugaggacuagucccuguucccagagcccacuuuuuuuucuuuuuuugaaauaaaauagccugucuuucagaucucaaaggcucuuuucagagccaccaaaaaaaaaaaaaaaaaaaaaaaaaaaaaaaaaaaaaaaaaaaaaaaaaaaaaaaaaaaaaaaaaaaaaaaaaaaaaaaaaaaaaaaaaaaaaaaaaaaaa

SEQ ID NO: 26738 - RNA, 1745 nt, Artificial Sequence
  mRNA product Design a-1 (hSL-A100) comprising derived and/or modified sequence from LASV(Lassa virus/H.sapiens-wt/NGA/2018/ISTH_0959;Clade II)__AVV65099__GPCmut4 (opt5)
aggagagucccgcagucggcguccagcggcucugcuuguucgugugugugucguugcaggccuuauucaagcuuaccaugggccagaucauuaccuucuuucaagaggugccccacgucaucgaagagguuaugaacauugugcugaucgcccucagccugcuugcuauucugaaggggaucuacaauguggucacaugcggacucuucggccugguguccuuucuucugcucugugggagaucuugcagcacgaccuauaaaggaguuuacgaacugcagacacuggagcucgacauggccucccugaacauguguaugccucuuucuugcaccaagaauaacagccaucacuauaucauggugggcaaugaaacagggcuggagcucacccugacaaacaccuccauuaucaaucauaaauucuguaaccuuucugaugcgcacaagaaaaaucuguacgaccaugcucucaugagcauuaucuccacguuucaccugagcauuccgaacuucaaucaguaugaggccaugucuugcgauuuuaacggaggcaagaucuccguccaguacaaucugagccacgccuaugcuauugacgccgcuaaccauuguggcaccaucgccaauggggugcuccaaacauucaugcggauggcguggggaggcucuuacaucgcccuggauuccgggaagggaagcugggacugcauuaugaccucuuaccaguaucuuaucauucagaacacaaccugggaagaucacugucaguuuucccgccccagcccuaucggcuaccuggggcuccugucccaaagaacgcgggacauuuauaucucucgcagacggcgcggaacauucaccuggacacuuagcgauuccgagggcaacgaaacccccggcggguacugccugaccagauggaugcucaucgaggcugagcugaaauguuuuggaaauacagccguugcuaagugcaacgaaaaacaugacgaggaguucugcgauaugcugcggcucuuugacuucuguaagcaggccauucgcagacugaaaacgccugcgcagaugagcauccagcuuauuaauaaggccgugaacgcucugaucaaugaucaacucauuaugaagaaccaucugcgggacaucaugggcauccccuauugcaauuacucuaaauauuguuaccuuaaccacaccgucacagggaagaccucccugccucgcugcugucucgugagcaauggaucuuaccugaacgaaacacacuucagcgacgauauugaacagcaggccgacaauaugaucaccgagcugcuccaaaaagaguauauugauagacagggcaagacgccgcuggggcuuguggaccuguuugucuucuccacaucuuuuuaccucaucagcauuuuccugcaccugguuaaaauccccacccaucggcacgugauuggaaagccuugccccaaaccucaucgccuuaaccacaugggcaucuguuccugcggccucuauaagcaccccggggugccggucaaguggaaaagaugaggacuagucccuguucccagagcccacuuuuuuuucuuuuuuugaaauaaaauagccugucuuucagaucucaaaggcucuuuucagagccaccaaaaaaaaaaaaaaaaaaaaaaaaaaaaaaaaaaaaaaaaaaaaaaaaaaaaaaaaaaaaaaaaaaaaaaaaaaaaaaaaaaaaaaaaaaaaaaaaaaaaa

SEQ ID NO: 26739 - RNA, 1745 nt, Artificial Sequence
  mRNA product Design a-1 (hSL-A100) comprising derived and/or modified sequence from LASV(LASV003-NIG-2008;Clade II)__AIT17580__GPCmut4 (opt5)
aggagagucccgcagucggcguccagcggcucugcuuguucgugugugugucguugcaggccuuauucaagcuuaccaugggccagaucauuaccuucuuucaagaggugccccacgucaucgaagagguuaugaacauugugcugaucgcccucagccugcuugcuauucugaaggggaucuacaauguggccacaugcggacucuucggccuggucuccuuucuucugcucugugggagaucuugcagcacgaccuauaaaggaguguacgaacugcagacacuggagcucgacauggcgucccugaacauguguaugccucuuucuugcaccaagaauaacagccaucacuauaucaugguuggcaaugaaacagggcuggagcucacccugacaaacaccuccauuaucaaucauaaauucuguaaccuuucugaugcucacaagaaaaaucuguacgaccaugcccucaugagcauuaucuccacguuucaccugagcauuccgaacuucaaucaguaugaggccaugucuugcgauuuuaacggaggcaagaucuccgugcaguacaaucugagccacaccuaugcugucgacgccgcuaaccauuguggcacaauugccaauggggugcuccaaaccuucaugcggauggcguggggaggcucuuacaucgcccuggauuccgggaagggaagcugggacugcaucaugacaucuuaccaguaucuuauuauccagaacaccacgugggaagaucacugucaguuuucccgccccagcccuauuggcuaccuggggcuccugucccaaagaacacgggacaucuauauuucucgcagacggcgcggaaccuucacauggacccuuagcgauuccgagagcaacgaaacccccggcggcuacugccugacaagauggaugcucaucgaggcugagcugaaauguuuugggaauacggccguugcuaagugcaacgaaaaacaugacgaggaguucugcgauaugcugcggcucuuugacuucuguaagcaggccauccgcagacugaaagcgccugcccagaugucuauucagcuuaucaauaaggcugugaacgcccugauuaaugaucaacucaucaugaagaaccaucugcgggacauuaugggaauccccuauugcaauuacuccaaauauuguuaccuuaaccacaccgucacaggccgcaccagccugccuagaugcugucucgugucuaaugggagcuaccugaacgaaacacacuucuccgacgauaucgaacagcaggcugacaauaugauuaccgagcugcuccaaaaggaguauauggaucggcagggaaaaacgccgcugggccuuguggaccuguuugucuucucuaccagcuuuuaccucaucuccauuuuccugcaccugguuaagauccccacacaucgccacgugauugggaaaccuugccccaagccucauagacuuaaccacaugggaaucuguagcugcggccucuauaaacaccccggcgugccggucaaguggaagcggugaggacuagucccuguucccagagcccacuuuuuuuucuuuuuuugaaauaaaauagccugucuuucagaucucaaaggcucuuuucagagccaccaaaaaaaaaaaaaaaaaaaaaaaaaaaaaaaaaaaaaaaaaaaaaaaaaaaaaaaaaaaaaaaaaaaaaaaaaaaaaaaaaaaaaaaaaaaaaaaaaaaaa

SEQ ID NO: 26740 - RNA, 1745 nt, Artificial Sequence
  mRNA product Design a-1 (hSL-A100) comprising derived and/or modified sequence from LASV(LASV035-NIG-2009;Clade II)__AIT17588__GPCmut4 (opt5)
aggagagucccgcagucggcguccagcggcucugcuuguucgugugugugucguugcaggccuuauucaagcuuaccaugggccagaucauuaccuucuuucaagaggugccccacgucaucgaagagguuaugaacauugugcugaucgcccucagccugcuugcuauucugaaggggaucuacaauguggccacaugcggacucuucggccuggucuccuuucuucugcucugugggagaucuugcagcacgaccuauaaaggaguguacgaacugcagacacuggagcucgacauggcgucccugaacauguguaugccucuuucuugcaccaagaauaacagccaucacuauaucaugguuggcaaugaaacagggcuggagcucacccugacaaacaccuccauuaucaaucauaaauucuguaaccuuucugaugcucacaagaaaaaucuguacgaccaugcccucaugagcauuaucuccacguuucaccugagcauuccgaacuucaaucaguaugaggccaugucuugcgauuuuaacggaggcaagaucuccgugcaguacaaucugagccacgcuuaugccgucgacgcugccaaccauuguggcaccauugcgaauggggugcuccaaacauucaugcggauggccuggggaggcucuuacaucgcucuggauuccgggaagggaagcugggacugcaucaugaccucuuaccaguaucuuauuauccagaacacaaccugggaagaucacugucaguuuucccgccccagcccuauuggcuaccuggggcuccugucccaaagaacgcgggacaucuauauuucucgcagacggcgcggaacauucaccuggacacuuagcgauuccgagggcaacgaaacccccggcggguacugccugaccagauggaugcucaucgaggccgagcugaaauguuuuggaaauacagcuguugccaagugcaacgaaaaacaugacgaggaguucugcgauaugcugcggcucuuugacuucuguaagcaggcgauccgcagacugaaagccccugcucagaugagcauucagcuuaucaauaaggccgugaacgcucugauuaaugaucaacucaucaugaagaaccaucugcgggacauuaugggcauccccuauugcaauuacucuaaauauuguuaccuuaaccacacggucaccgggaagacaucccugccucgcugcugucucgugagcaauggaucuuaccugaacgaaacccacuucagcgacgauaucgaacagcaggccgacaauaugauuacagagcugcuccaaaaagaguauaucgauagacagggcaagaccccgcuggggcuuguggaccuguuugucuucuccacgucuuuuuaccucauuagcaucuuccugcaccugguuaaaauucccacacaucggcacgugaucggaaagccuugccccaaaccucaucgccuuaaccacaugggcauuuguuccugcggccucuauaagcaccccggggugccggucaaguggaaaagaugaggacuagucccuguucccagagcccacuuuuuuuucuuuuuuugaaauaaaauagccugucuuucagaucucaaaggcucuuuucagagccaccaaaaaaaaaaaaaaaaaaaaaaaaaaaaaaaaaaaaaaaaaaaaaaaaaaaaaaaaaaaaaaaaaaaaaaaaaaaaaaaaaaaaaaaaaaaaaaaaaaaaa

SEQ ID NO: 26741 - RNA, 1745 nt, Artificial Sequence
  mRNA product Design a-1 (hSL-A100) comprising derived and/or modified sequence from LASV(LASV1000-NIG-2009;Clade II)__AIT17782__GPCmut4 (opt5)
aggagagucccgcagucggcguccagcggcucugcuuguucgugugugugucguugcaggccuuauucaagcuuaccaugggccagaucauuaccuucuuucaagaggugccccacgucaucgaagagguuaugaacauugugcugaucgcccucagccugcuugcuauucugaaggggaucuacaauguggccacaugcggacucuucggccuggucuccuuucuucugcucugugggagaucuugcagcacgaccuauaaaggaguguacgaacugcagacacuggagcucgacauggcgucccugaacauguguaugccucuuucuugcaccaagaauaacagccaucacuauaucaugguuggcaaugaaacagggcuggagcucacccugacaaacaccuccauuaucaaucauaaauucuguaaccuuucugaugcucacaagaaaaaucuguacgaccaugcccucaugagcauuaucuccacguuucaccugagcauuccgaacuucaaucaguaugaggccaugucuugcgauuuuaacggaggcaagaucuccgugcaguacaaucugagccacaccuaugcugucgacgccgcuaaccauuguggcacaauugccaauggggugcuccaaaccuucaugcggauggcguggggaggcucuuacaucgcccuggauuccgggaagggaagcugggacugcaucaugacaucuuaccaguaucuuauuauccagaacaccacgugggaagaucacugucaguuuucccgccccagcccuauuggcuaccuggggcuccugucccaaagaacacgggacaucuauauuucucgcagacggcgcggaaccuucacauggacccuuagcgauuccgagggcaacgaaacccccggcggguacugccugacaagauggaugcucaucgaggcugagcugaaauguuuuggaaauacggccguugcuaagugcaacgaaaaacaugacgaggaguucugcgauaugcugcggcucuuugacuucuguaagcaggccaucaaacgccugaagaccccugcgcagaugagcauucagcuuaucaauaaggccgugaacgcucugauuaaugaucaacucaucaugaaaaaccaccugagagacauuaugggcauccccuauugcaauuacucuaaguauuguuaccuuaaccacacagucaccgggaaaacaucccugccucggugcugucucgugagcaauggaucuuaccugaacgaaacccauuucagcgacgauaucgaacagcaggccgacaauaugauuacggagcugcuccaaaaggaguauaucgaucgccagggcaaaacaccgcuggggcuuguggaccuguuugucuucuccaccucuuuuuaccucauuagcaucuuccugcaccugguuaagauucccacccauagacacguggugggaaaaccuugccccaagccucaucggcuuaaccacaugggcaucuguuccugcggccucuauaagcaccccggggucccggugaaauggaagcgcugaggacuagucccuguucccagagcccacuuuuuuuucuuuuuuugaaauaaaauagccugucuuucagaucucaaaggcucuuuucagagccaccaaaaaaaaaaaaaaaaaaaaaaaaaaaaaaaaaaaaaaaaaaaaaaaaaaaaaaaaaaaaaaaaaaaaaaaaaaaaaaaaaaaaaaaaaaaaaaaaaaaaa

SEQ ID NO: 26742 - RNA, 1745 nt, Artificial Sequence
  mRNA product Design a-1 (hSL-A100) comprising derived and/or modified sequence from LASV(LASV221-NIG-2010;Clade II)__AIT17624__GPCmut4 (opt5)
aggagagucccgcagucggcguccagcggcucugcuuguucgugugugugucguugcaggccuuauucaagcuuaccaugggccagaucauuaccuucuuucaagaggugccccacgucaucgaagagguuaugaacauugugcugaucgcccucagccugcuugcuauucugaaggggaucuacaauguggccacaugcggacucuucggccuggucuccuuucuucugcucugugggagaucuugcagcacgaccuauaaaggaguguacgaacugcagacacuggagcucgacauggcgucccugaacauguguaugccucuuucuugcaccaagaauaacagccaucacuauaucaugguuggcaaugaaacagggcuggagcucacccugacaaacaccuccauuaucaaucauaaauucuguaaccuuucugaugcucacaagaaaaaucuguacgaccaugcccucaugagcauuaucuccacguuucaccugagcauuccgaacuucaaucaguaugaggccaugucuugcgauuuuaacggaggcaagaucuccgugcaguacaaucugagccacaccuaugcuauugacgccgcuaaccauuguggcacaaucgccaaugggguccuccaaaccuucaugcggauggcguggggaggcucuuacaucgcccuggauuccgggaagggaagcugggacugcauuaugacaucuuaccaguaucuuaucauucagaacaccacgugggaagaucacugucaguuuucccgccccagcccuaucggcuaccuggggcuccugucccaaagaacacgggacauuuauaucucucgcagacggcgcggaaccuucacauggacccuuagcgauuccgagggcaacgaaacccccggcggguacugccugacaagauggaugcucaucgaggcugagcugaaauguuuuggaaauacggccguggcuaagugcaacgaaaaacaugacgaggaguucugcgauaugcugcggcucuuugacuucuguaagcaggccauucgcagacugaaaaccccugcgcagaugagcauccagcuuauuaauaaggccguuaacgcucugaucaaugaucaacucauuaugaagaaccaucugcgggacaucaugggcauccccuauugcaauuacucuaaauauuguuaccuuaaccacacagugaccgggaagacaucccugccucgcugcugucucgucagcaauggaucuuaccugaacgaaacccacuucagcgacgauauugaacagcaggccgacaauaugaucacggagaugcugcaaaaagaguauauggauagacagggcaagacaccgcucgggcugguggaccuuuuuguguucuccaccucuuuuuaccugauuagcaucuuccuccaccuggucaaaauucccacccaucggcacguuaucggaaagccuugccccaaaccucaucgccugaaccacaugggcauuuguuccugcggccuuuauaagcaccccggggugccggugaaguggaaaagaugaggacuagucccuguucccagagcccacuuuuuuuucuuuuuuugaaauaaaauagccugucuuucagaucucaaaggcucuuuucagagccaccaaaaaaaaaaaaaaaaaaaaaaaaaaaaaaaaaaaaaaaaaaaaaaaaaaaaaaaaaaaaaaaaaaaaaaaaaaaaaaaaaaaaaaaaaaaaaaaaaaaaa

SEQ ID NO: 26743 - RNA, 1745 nt, Artificial Sequence
  mRNA product Design a-1 (hSL-A100) comprising derived and/or modified sequence from LASV(LASV237-NIG-2010;Clade II)__AIT17638__GPCmut4 (opt5)
aggagagucccgcagucggcguccagcggcucugcuuguucgugugugugucguugcaggccuuauucaagcuuaccaugggccagaucauuaccuucuuucaagaggugccccacgucaucgaagagguuaugaacauugugcugaucgcccucagccugcuugcuauucugaaggggaucuacaauguggccacaugcggacucuucggccuggucuccuuucuucugcucugugggagaucuugcagcacgaccuauaaaggaguguacgaacugcagacacuggagcucgacauggcgucccugaacauguguaugccucuuucuugcaccaagaauaacagccaucacuauaucaugguuggcaaugaaacagggcuggagcucacccugacaaacaccuccauuaucaaucauaaauucuguaaccuuucugaugcucacaagaaagaccuguacgaucaugcccucaugagcauuaucuccacguuucaccugagcauuccgaauuucaaccaguaugaggccaugucuugcgacuuuaauggaggcaagaucuccgugcaguacaaccugagccacaccuaugcugucgaugccgcuaaucauuguggcacaauugccaacggggugcuccaaaccuucaugcggauggcguggggaggcucuuacaucgcccuggacuccgggaagggaagcugggauugcaucaugacaucuuaccaguaucuuauuauccagaauaccacgugggaagaccacugucaguuuucccgccccagcccuauuggcuaccuggggcuccugucccaaagaacacgggauaucuauauuucucgcagacggcgcggaaccuucacauggacccuuagcgacuccgagggcaacgaaacccccggcggguacugccugacaagauggaugcucaucgaggcugagcugaaauguuuuggaaacacggccguugcuaagugcaaugaaaaacaugaugaggaguucugcgacaugcugcggcucuuugauuucuguaagcaggccauccgcagacugaaaaccccugcgcagaugagcauucagcuuaucaacaaggccgugaaugcucugauuaacgaccaacucaucaugaagaaucaucugcgggacauuaugggcauccccuauugcaacuacucuaaauauuguuaccuuaaucacacagucaccgggaagacaucccugccucgcugcugucucgugagcaacggaucuuaccugaaugaaacccacuucagcgaugacaucgaacagcaggccgauaacaugauuacggagcugcuccaaaaagaguauauggacagacagggcaagacaccgcuggggcuuguggaucuguuugucuucuccaccucuuuuuaccucaucagcauuuuccugcaccugaucaaaauucccacccaucggcacaucacaggaaagccuugccccaaaccucaucgccuuaaucacaugggcauuuguuccugcggccucuauaagcaccccgggguuccggugaaguggaaaagaugaggacuagucccuguucccagagcccacuuuuuuuucuuuuuuugaaauaaaauagccugucuuucagaucucaaaggcucuuuucagagccaccaaaaaaaaaaaaaaaaaaaaaaaaaaaaaaaaaaaaaaaaaaaaaaaaaaaaaaaaaaaaaaaaaaaaaaaaaaaaaaaaaaaaaaaaaaaaaaaaaaaaa

SEQ ID NO: 26744 - RNA, 1745 nt, Artificial Sequence
  mRNA product Design a-1 (hSL-A100) comprising derived and/or modified sequence from LASV(LASV253-NIG-2011;Clade II)__AIT17670__GPCmut4 (opt5)
aggagagucccgcagucggcguccagcggcucugcuuguucgugugugugucguugcaggccuuauucaagcuuaccaugggccagaucauuaccuucuuucaagaggugccccacgucaucgaagagguuaugaacauugugcugaucgcccucagccugcuugcuauucugaaggggaucuacaauguggccacaugcggacucuucggccuggucuccuuucuucugcucugugggagaucuugcagcacgaccuauaaaggaguguacgaacugcagacacuggagcucgacauggcgucccugaacauguguaugccucuuucuugcaccaagaauaacagccaucacuauaucaugguuggcaaugaaacagggcuggagcucacccugacaaacaccuccauuaucaaucauaaauucuguaaccuuucugaugcucacaagaaaaaucuguacgaccaugcccucaugagcauuaucuccacguuucaccugagcauuccgaacuucaaucaguaugaggccaugucuugcgauuuuaacggaggcaagaucuccgugcaguacaaucugagccacaccuaugcugucgacgccgcuaaccauuguggcacaauugccaauggggugcuccaaaccuucaugcggauggcguggggaggcucuuacaucgcccuggauuccgggaagggaagcugggacugcaucaugacaucuuaccaguaucuuauuauccagaacaccacgugggaagaucacugucaguuuucccgccccagcccuauuggcuaccuggggcuccugucccaaagaacacgggacaucuauauuucucgcagacggcgcggaaccuucacauggacccuuagcgauuccgagggcaacgaaacccccggcggguacugccugacaagauggaugcucaucgaggcugagcugaaauguuuuggaaauacggccguugcuaagugcaacgaaaaacaugacgaggaguucugcgauaugcugcggcucuuugacuucuguaagcaggccauccgcagacugaaagcgccugcccagaugagcauucagcuuaucaauaaggcugugaacgcccugauuaaugaucaacucaucaugaagaaccaucugcgggacauuaugggcauccccuauugcaauuacucuaaauauuguuaccuuaaccacaccgucacagggcgcaccucccugccuagaugcugucucgugagcaauggaucuuaccugaacgaaacacacuucagcgacgauaucgaacagcaggcugacaauaugauuaccgagcugcuccaaaaggaguauaucgaucggcagggcaaaacgccgcuggggcuuguggaccuguuugucuucuccacaucuuuuuaccucauuagcaucuuccugcaccugguuaagauucccacccaucgccacaucauuggaaaaccuugccccaagccucauagacuuaaccacaugggcaucuguuccugcggccucuauaaacaccccggggugccggugaaguggaagcggugaggacuagucccuguucccagagcccacuuuuuuuucuuuuuuugaaauaaaauagccugucuuucagaucucaaaggcucuuuucagagccaccaaaaaaaaaaaaaaaaaaaaaaaaaaaaaaaaaaaaaaaaaaaaaaaaaaaaaaaaaaaaaaaaaaaaaaaaaaaaaaaaaaaaaaaaaaaaaaaaaaaaa

SEQ ID NO: 26745 - RNA, 1745 nt, Artificial Sequence
  mRNA product Design a-1 (hSL-A100) comprising derived and/or modified sequence from LASV(LASV254-NIG-2011;Clade II)__AIT17674__GPCmut4 (opt5)
aggagagucccgcagucggcguccagcggcucugcuuguucgugugugugucguugcaggccuuauucaagcuuaccaugggccagaucauuaccuucuuucaagaggugccccacgucaucgaagagguuaugaacauugugcugaucgcccucagccugcuugcuauucugaaggggaucuacaauguggccacaugcggacucuucggccuggucuccuuucuucugcucugugggagaucuugcagcacgaccuauaaaggaguguacgaacugcagacacuggagcucgacaugaccaaccugaauauguguaugccucuuuccugcacaaagaacaauucucaucacuauaucaugguuggcaacgaaaccgggcuggagcucacacugaccaauacgagcauuaucaaccauaaauucuguaaucuuuccgaugcgcacaagaaaaaccuguacaaucaugcucucaugucuauuaucagcaccuuucaccuguccauuccgaacuucaaucaguaugaggccaugagcugcgacuuuaacggaggcaagaucucugugcaguacaaucugucccacagcuaugccgucgaugcugccaaccauuguggcacaauugcuaacggggugcuccaaaccuucaugcggauggccuggggaggcucuuacaucgcgcuggacuccgggaagggaaauugggauugcaucaugacaagcuaccaguaucuuauuauccagaacaccacgugggaagaccacugucaguuuucucgccccuccccuauuggcuaccuggggcuccugagccaaagaacacgggauaucuauauuucccgcagacggcgcggaaccuucacauggacccuuucugacagcgagggcaaugaaacccccggcggguacugccugacaagauggaugcucaucgaggccgagcugaaauguuuuggaaacacggcuguugccaagugcaaugaaaaacaugaugaggaguucugcgacaugcugcggcucuuugauuucuguaagcaggcuauccgcagacugaaaaccccugcccaggcgaacauucagcuuaucaauaaggccgugaacgcucugauuaaugaccaacucaucaugaagaaccaucugcgggauauuaugggcauccccuauugcaauuacuccaaauauuguuaccuuaaccacacagucaccgggaagacaagccugccucgcugcugucucgugucuaauggauccuaccugaacgaaacccacuucagcgacgacaucgaacagcaggccgauaauaugauuacggagcugcuccaaaaagaguauauggacagacagggcaagacaccgcuggggcuuguggaucuguuugucuucucuaccagcuuuuaccucaucuccauuuuccugcaccugguuaaaauccccacccaucggcacgugauuggaaagccuugccccaaaccucaucgccuuaaccacaugggcaucuguucuugcggccucuauaagcaccccggggugccggucaaguggaaaagaugaggacuagucccuguucccagagcccacuuuuuuuucuuuuuuugaaauaaaauagccugucuuucagaucucaaaggcucuuuucagagccaccaaaaaaaaaaaaaaaaaaaaaaaaaaaaaaaaaaaaaaaaaaaaaaaaaaaaaaaaaaaaaaaaaaaaaaaaaaaaaaaaaaaaaaaaaaaaaaaaaaaaa

SEQ ID NO: 26746 - RNA, 1745 nt, Artificial Sequence
  mRNA product Design a-1 (hSL-A100) comprising derived and/or modified sequence from LASV(Nig08-A19;Clade III)__ADU56618__GPCmut4 (opt5)
aggagagucccgcagucggcguccagcggcucugcuuguucgugugugugucguugcaggccuuauucaagcuuaccaugggccagaucgugaccuucuuucaagaggucccccacguuauugaagaggugaugaacaucgugcugauugcccucagcauccuggcuauucuuaaggggcuguacaauaucgccacaugcggacucaucggccuggucacguuccuucugcucuccgggagaucuuguagcaugaccuauaaaggaguguacgaacugcagacacuggagcucaacaugaauacccugaacaugugcaugccucuuuccuguacaaagaauaacucucaucacuauauuaugguuggcaaugaaaccgggcuggagcucacacugaccaacacgagccuucugcaucacaaauuuugcaaucucuccgacgcgcauaagaaaaaccuguacgaucacacccugaugucuaucauuagcacauuccaccucuccaucccgaauuuuaaccaguaugaggcuaugagcugugacuucaauggaggcaagauuaccgugcaguacaaccugucucauuccuaugccaucgaugccgcuaaucacugcggcacagucgccaacggggugcuucaaaccuuuaugcggauggcuuggggaggcagcuacauugcccuggacucugggcgcggaaagugggauuguaucaugacguccuaccaguaucucaucauucagaacacaaccugggaagaccauugccaguucagcagacccucuccuaucggcuaccuggggcuucugucccaacggacacgcgauauuuauaucagcagacggcgcagaggaaccuuuaccuggacacucuccgacucugagggcaaugaaacgcccggcggguacugucugacccgguggaugcugauugaggcggagcucaaaugcuucggaaacacagccguugcuaaguguaaugaaaaacacgaugaggaauuuugcgacaugcugcgccuuuucgauuuuugcaagcaggccaucagacggcugaaagcuccugcccagaugagcauccagcucauuaacaaggcggugaaugcccugaucaacgaccaacuuauuaugaagaaucaucugcgcgauaucaugggcauucccuauuguaacuacuccaaauauugcuaccucaaucacaccagcacagggagaaccucucugccucgguguugccuggucuccaacggaagcuaccucaaugagacgcacuucucugacgacaucgaacagcaggcugauaacaugaucacagagaugcugcaaaaggaguaucuugaccgccagggcaaaaccccgcuggggcucguggaucuguucguguuuagcaccuccuucuaccugauuucuaucuuucuucaucucgucaagauucccacacacagacauaucguuggaaaaccuugucccaagccucaccggcugaaucacaugggcauuugcagcuguggccuguauaaacagcccggggugccggugagauggaagcgcugaggacuagucccuguucccagagcccacuuuuuuuucuuuuuuugaaauaaaauagccugucuuucagaucucaaaggcucuuuucagagccaccaaaaaaaaaaaaaaaaaaaaaaaaaaaaaaaaaaaaaaaaaaaaaaaaaaaaaaaaaaaaaaaaaaaaaaaaaaaaaaaaaaaaaaaaaaaaaaaaaaaaa

SEQ ID NO: 26747 - RNA, 1748 nt, Artificial Sequence
  mRNA product Design a-1 (hSL-A100) comprising derived and/or modified sequence from LASV(G1180-SLE-2010;Clade IV)__AIT17168__GPCmut4 (opt5)
aggagagucccgcagucggcguccagcggcucugcuuguucgugugugugucguugcaggccuuauucaagcuuaccaugggccagaucgugaccuucuuucaagaggucccccacguuauugaagaggugaugaacaucgugcugauugcccucagcauccuggcuguccuuaaggggcuguacaauuucgccacaugcggacucgugggccugcuuacguuucugcuccugugugggagauccugcaccgcgucucgguauaaaggaguuuacgaacugcagacacucgagcugaacauggaaacccuuaauauguguaugccucugagcugcacaaagaacaauucccaucacuauauuauggugggcaacgagaccgggcucgagcugacacuuaccaauacgucuaucaucaaccauaaauucuguaaucugagcgacgcucacaagaaaaaccucuacgaucaugcccugauguccauuaucucuaccuuucaccugagcauuccgaauuucaaccaguaugaagccauguccugcgacuuuaauggaggcaagaucagcguccaguacaaccucucucacuccuaugcuggcgaugccgcuaaucauugugggacaguggccaacggaguucugcaaaccuucaugcgcauggcguggggcgggagcuacauugcccuugacucuggacacggcuccugggauugcaucaugacaagcuaccaguaucugauuauccagaacaccacgugggaggaccauugucaguuuucuagacccuccccuaucggguaccucggacugcuuagccaacggacacgcgauauuuauaucuccagacggcgcagaggcaccuucacauggacccugucugacagcgaaggcaaggauacccccgggggauacugccucacacgguggaugcugauugaggcugagcugaaauguuuuggcaauacggccguggcuaagugcaacgaaaaacacgacgaggaguucugcgauaugcuccgccuguuugacuucuguaagcaggccauccagagacuuaaagcgccugcccagauguccauucaacugaucaauaaggcugucaacgcccucaucaaugaucagcugauuaugaagaaccaccuucgggacaucauggggauucccuauugcaauuacagcaaauauuguuaccugaaccauaccacaaccggaaagacaucucucccuaaaugcugucugguguccaauggcagcuaccugaacgaaacccacuucucugacgauaucgaacagcaagcugacaauaugauuacggagaugcuccagaaggaguauauggaacgccaggggaaaacaccgcugggacuuguggaucuguuugucuucagcaccuccuuuuaccucaucucuaucuuccugcaucugguuaagauucccacccacagacauaucgugggcaaaagcugcccuaagccccaccggcuuaaccacaugggcauuuguuccugcgggcucuauaagcagccuggagugcccgucaaauggaagcgcugaggacuagucccuguucccagagcccacuuuuuuuucuuuuuuugaaauaaaauagccugucuuucagaucucaaaggcucuuuucagagccaccaaaaaaaaaaaaaaaaaaaaaaaaaaaaaaaaaaaaaaaaaaaaaaaaaaaaaaaaaaaaaaaaaaaaaaaaaaaaaaaaaaaaaaaaaaaaaaaaaaaaa

SEQ ID NO: 26748 - RNA, 1748 nt, Artificial Sequence
  mRNA product Design a-1 (hSL-A100) comprising derived and/or modified sequence from LASV(G1442-SLE-2011;Clade IV)__AIT17180__GPCmut4 (opt5)
aggagagucccgcagucggcguccagcggcucugcuuguucgugugugugucguugcaggccuuauucaagcuuaccaugggccagaucgugaccuucuuucaagaggucccccacguuauugaagaggugaugaacaucgugcugauugcccucagcauccuggcuguccuuaaggggcuguacaauguggccacaugcggacucauuggccugguuacguuccuucugcucugugggagauccugcaccacaacccuguauaaaggaguguacgaacugcagacacucgagcugaacauggaaacccuuaauauguguaugccucugucuugcacaaagaacaauagccaucacuauauccgggucggcaacgagaccgggcucgagcugacgcuuaccaauacauccaucauuaaccauaaauuuuguaaucugucugacgcgcacaagaaaaaccucuacgaucaugcucugaugagcaucauuuccaccuuccaccugucuaucccgaauuuuaaccaguaugaagccaugagcugcgacuucaauggaggcaagauuuccgugcaguacaaccucagccacucuuaugccggcgaugcugccaaucauugugggacaguugcuaacggagugcugcaaaccuuuaugcgcauggccuggggcggguccuacaucgcgcuugacagcggaagaggcaacugggauugcauuaugacgucuuaccaguaucugaucauccagaauacaaccugggacgaucacugucaguucucccggcccagcccuauuggguaccucggacugcuuucucaacgcacaagagacgucuauaucucccggcgcagacggggcaccuuuaccuggacacugagcgauuccgagggcaaggacacgcccgggggauacugccucacccgcuggaugcugauugaagccgagcugaaauguuucggcaacacagcuguggccaagugcaaugagaaacaugaugaagaguuuugcgacaugcucagacuguucgauuuuuguaagcaggcuauccagcggcuuaaagccccugcgcagaugucuauucaacugaucaacaaggccgugaaugcucucaucaacgaccagcugauuaugaagaaucaccuucgcgacaucauggggauucccuauugcaacuacagcaaauauuguuaccugaauaacaccgccacaggaaagaccucccucccuaaaugcugucugaucagcaauggcucuuaccugaacgaaacgcacuucuccgaugacauugagcaggaagcugauaauaugaucacagagaugcuccaaaaggaguauauggaaagacaggggaaaaccccgcugggacuugucgaccuguucguuuuuagcaccucuuucuaccucaucagcauuuuucugcaucuggugaagauccccacacaccggcauauugugggcaaauccugcccuaagccccaccgccuuaaccauaugggcaucuguucuugcgggcucuauaagcagccuggaguccccgugagauggaaacggugaggacuagucccuguucccagagcccacuuuuuuuucuuuuuuugaaauaaaauagccugucuuucagaucucaaaggcucuuuucagagccaccaaaaaaaaaaaaaaaaaaaaaaaaaaaaaaaaaaaaaaaaaaaaaaaaaaaaaaaaaaaaaaaaaaaaaaaaaaaaaaaaaaaaaaaaaaaaaaaaaaaaa

SEQ ID NO: 26749 - RNA, 1748 nt, Artificial Sequence
  mRNA product Design a-1 (hSL-A100) comprising derived and/or modified sequence from LASV(G3010-SLE-2013;Clade IV)__AIT17344__GPCmut4 (opt5)
aggagagucccgcagucggcguccagcggcucugcuuguucgugugugugucguugcaggccuuauucaagcuuaccaugggccagaucgugaccuucuuucaagaggucccccacguuauugaagaggugaugaacaucgugcugauugcccucagcauccuggcuguccuuaaggggcuguacaauuucgccacaugcggacucgugggccugguuacguuucuucugcucugugggagauccugcaccacaucucuguauaaaggaguguacgaacugcagacccucgagcugaacauggaaacacuuaauauguguaugccucugagcugcaccaagaacaauucccaucacuauauuauggucggcaacgagacagggcucgagcugacccuuacgaauaccucuaucaucaaccauaaauucuguaaucugagcgacgcgcacaagaaaaaccucuacaaucaugcucugauguccauuaucucuacauuucaccugagcauuccgaacuucaaucaguaugaagccauguccugcgauuuuaacggaggcaagaucagcgugcaguacaaucucucucacuccuaugccggcgacgcugccagccauugugggaccguugcuaacggagugcugcaaacauucaugcggauggccuggggcgggucuuacauugcgcuugauuccggauacggcaagugggacugcaucaugaccagcuaucaguaccugauuauccagaacacgacaugggaggaucacugucaguuuucucgccccuccccuaucggguaucucggacugcuuagccaaagaacccgggacauuuacaucucccgcagacggcgcggcacauucaccuggacccugucugauagcgaaggcaaagacacacccgggggauauugccucacgagauggaugcugauugaggccgagcugaaguguuuuggcaauaccgcugucgccaaaugcaacgaaaagcaugaugaggaguucugcgacaugcuccggcuguuugauuucuguaaacaggcuauccagcgccuuaagaccccugcccagauguccauucaacugaucaauaaggcggugaacgcccucaucaaugaccagcugauuaugaaaaaccaccuuagagauaucauggggauucccuacugcaauuauagcaaguacuguuaccugaaccacacaacaaccggaaaaacgucucucccuaagugcugucugguguccaauggcagcuaucugaacgaaacacauuucucugacgacaucgaacagcaagcugauaauaugauuaccgagaugcuccagaaagaguacauggaacggcaggggaagaccccgcugggacuugucgaccuguuuguuuucagcacauccuuuuaucucaucucuaucuuccugcaccuggugaaaauucccacccaucgccacaucgugggcaagagcugcccuaagccccauagacuuaaccacaugggcauuuguuccugcgggcucuacaaacagccuggaguccccgugcgguggaagcgcugaggacuagucccuguucccagagcccacuuuuuuuucuuuuuuugaaauaaaauagccugucuuucagaucucaaaggcucuuuucagagccaccaaaaaaaaaaaaaaaaaaaaaaaaaaaaaaaaaaaaaaaaaaaaaaaaaaaaaaaaaaaaaaaaaaaaaaaaaaaaaaaaaaaaaaaaaaaaaaaaaaaaa

SEQ ID NO: 26750 - RNA, 1748 nt, Artificial Sequence
  mRNA product Design a-1 (hSL-A100) comprising derived and/or modified sequence from LASV(G502-SLE-2009;Clade IV)__AIT17126__GPCmut4 (opt5)
aggagagucccgcagucggcguccagcggcucugcuuguucgugugugugucguugcaggccuuauucaagcuuaccaugggccagaucgugaccuucuuucaagaggucccccacguuauugaagaggugaugaacaucgugcugauugcccucagcauccuggcuguccuuaaggggcuguacaauuucgccacaugcggacucgugggccugcuuacguuucugcuccugugugggagauccugcaccacaggacuguauaaaggcguuuacgaacuccagacccuggagcuuaacauggaaacacugaauauguguaugccucucucuugcaccaagaacaauagccaucacuauauuaugguggggaacgagacaggacuggagcuuacccugacgaauaccuccaucaucaaccauaaauucuguaaucucucugacgcgcacaagaaaaaccuguacgaucaugcucugaugagcauuaucuccacauuucaccucucuauuccgaauuucaaccaguaugaagccaugagcugcgacuuuaauggcggcaagaucuccguccaguacaaccugagccacucuuaugccggggaugcugccgaccauuguggaaccguggcuaauggcguucuucaaacauucaugcggauggccuggggaggguccuacauugcgcuggauagcggccgcgggagaugggacugcaucaugaccucuuaccaguaucucauuauccagaacacgacaugggaggaucacugucaguuuucccggcccagcccuaucggauaccugggccuucugucucaacgcaccagagacauuuauaucucccggcgcagacggggcacauucaccuggacccucagcgauuccgaagggaaggacacacccggaggcuacugccugacgcgcuggaugcugauugaggccgagcucaaauguuuugggaacaccgcuguggccaagugcaaugaaaaacaugaugaggaguucugcgacaugcugagacuuuuugauuucuguaagcaggcuauccagcggcugaaagccccugcgcagaugucuauucaacucaucaacaaggccgucaaugcucugaucaacgaccagcuugugaugaagaaucaucugcgcgacauuaugggaauccccuauugcaacuacagcagauauuguuaccucaaucacacaaccacaggccggaccucccugccuaaaugcugucuggugagcaacgggucuuaccucaaugaaacgcacuucuccgaugacauugaacagcaagccgauaacaugaucacagagaugcugcagaaggaguauauggaacgccagggaaaaaccccgcuuggccuggucgaccucuuuguuuucagcaccucuuuuuaccugauuagcaucuuccugcaccuugugaagauccccacacauagacacauugugggcaaauccugcccuaagccccaucggcucaaucacauggggaucuguucuugcggacuguauaaacagccuggcguccccgugaaguggaagagaugaggacuagucccuguucccagagcccacuuuuuuuucuuuuuuugaaauaaaauagccugucuuucagaucucaaaggcucuuuucagagccaccaaaaaaaaaaaaaaaaaaaaaaaaaaaaaaaaaaaaaaaaaaaaaaaaaaaaaaaaaaaaaaaaaaaaaaaaaaaaaaaaaaaaaaaaaaaaaaaaaaaaa

SEQ ID NO: 26751 - RNA, 1748 nt, Artificial Sequence
  mRNA product Design a-1 (hSL-A100) comprising derived and/or modified sequence from LASV(G733-SLE-2010;Clade IV)__AIT17154__GPCmut4 (opt5)
aggagagucccgcagucggcguccagcggcucugcuuguucgugugugugucguugcaggccuuauucaagcuuaccaugggccagaucgugaccuucuuucaagaggucccccacguuauugaagaggugaugaacaucgugcugauugcccucagcauccuggcuguccuuaaggggcuguacaauuucgccacaugcggaauugugggccucguuuccuuucugcuucugugugggagaucuugcacgaccagccucuauaaaggaguguacgaacugcagacacuggagcucaacauggaaacccugaauauguguaugccucuuuccugcacaaagaacaauucucaucacuauaucauggucggcaacgagaccgggcuggagcucacacugaccaauacgagcaucauuaaccauaaauucuguaaucuuuccgacgcgcacaagaaaaaccuguacgaucaugcucucaugucuaucauuagcaccuuucaccuguccaucccgaauuucaaccaguaugaagccaugagcugcgacuuuaauggaggcaagauuucugugcaguacaaccugucccacagcuaugccggcgaugcugccaaucauugugggacaaucgcuaacggaguucuccaaaccuucaugcggauggccuggggcgggucuuacauugcgcuggacuccggacgcgauagaugggacugcaucaugacaagcuaccaguaucuuaucauucagaacaccacgugggaggaucacugucaguuuucucggcccuccccuaucggcuaccuggggcuccugagccaacgcacaagagacauuuauaucucccggcgcagacggggaaccuucacauggacccuuucugauagcgaaggcaaggacacccccggcggguacugccugacacgcuggaugcucauugaggccgagcugaaauguuuuggaaauacggcuguggccaagugcaacgaaaaacaugaugaggaguucugcgacaugcugagacucuuugauuucuguaagcaggcuauccagcggcugaaagccccugcgcagauguccauccaacuuauuaauaaggccgucaacgcucugaucaaugaccagcucauuaugaagaaccaucugcgcgacaucaugggcauucccuauugcaauuacagcaaauauuguuaccuuaaccacaccacaaccgggaagacaucucugccuaaaugcugucucguguccaauggaagcuaccugaacgaaacccacuucucugaugacaucgaacagcaagccgauaauaugaucacggagaugcugcagaaggaguauauggaaagacagggcaaaacaccgcucgggcugguggaccuuuuugucuucagcaccuccuuuuaccugauuucuaucuuccuccaccugguuaagauucccacccaucggcacguggugggaaaaagcugcccuaagccccaucgccugaaccacaugggcaucuguuccugcggccuuuaugggcagccuggaguccccgugaaguggaaaagaugaggacuagucccuguucccagagcccacuuuuuuuucuuuuuuugaaauaaaauagccugucuuucagaucucaaaggcucuuuucagagccaccaaaaaaaaaaaaaaaaaaaaaaaaaaaaaaaaaaaaaaaaaaaaaaaaaaaaaaaaaaaaaaaaaaaaaaaaaaaaaaaaaaaaaaaaaaaaaaaaaaaaa

SEQ ID NO: 26752 - RNA, 1748 nt, Artificial Sequence
  mRNA product Design a-1 (hSL-A100) comprising derived and/or modified sequence from MOPV/LASV reassortant(IGS-1;Clade IV)__AFY05576__GPCmut4 (opt5)
aggagagucccgcagucggcguccagcggcucugcuuguucgugugugugucguugcaggccuuauucaagcuuaccaugggccagaucgugaccuucuuucaagaggucccccacguuauugaagaggugaugaacaucgugcugauugcccucagcguccuggcugugcuuaaggggcuguacaauuucgccacaugcggacucguuggccuggugacguuucuucugcucugugggagauccugcaccacaucucuguauaaaggagucuacgaacugcagacccucgagcugaacauggaaacacuuaauauguguaugccucugagcugcaccaagaacaauucccaucacuauaucauggugggcaacgagacagggcucgagcugacccuuacgaauaccucuauuaucaaccauaaauucuguaaucugagcgacgcgcacaagaaaaaccucuacgaucaugcucugauguccaucauuucuacauuucaccugagcaucccgaauuucaaccaguaugaagccauguccugcgacuuuaauggaggcaagauuagcguucaguacaaccucucucacuccuaugccggcgaugcugccaaucauugugggaccguggcuaacggaguccugcaaacauucaugcggauggccuggggcgggagcuacaucgcgcuugacucuggacgcggcaacugggauugcauuaugaccuccuaccaguaucugaucauucagaauacgacaugggaggaccacugucaguuuagcagacccucuccuaucggguaccucggacugcuuucccaacggacccgcgauaucuauauuagcagacggcgcagaggcacauucaccuggacccuguccgacucugaaggcgaggauacacccgggggauacugccucacgcgguggaugcugaucgaggccgaacugaaguguuuuggcaacaccgcuguggccaaaugcaaugagaagcaugacgaagaguucugcgauaugcuccgccuguuugacuucuguaaacaggcuauucagagacuuaaggccccugcgcagaugagcauccaacugauuaacaaagccgugaaugcucucaucaacgaucagcugaucaugaagaaucaccuucgggacauuauggggauccccuauugcaacuacuccaaguauuguuaccugaaucacacaaccacaggacgcaccagccucccuaaaugcugucuggucucuaacggcuccuaccugaaugaaacgcauuucagcgacgauauugagcagcaagccgacaacaugaucacagagaugcuccagaaggaauauauggagagacaggggaaaaccccgcugggacuuguugaucuguuuguguucucuaccagcuuuuaccucauuuccaucuuccugcaccuggugaagauccccacacaucggcacauugucggcaaaucuugcccuaagccccaucgccuuaaucacaugggcaucuguagcugcgggcucuauaaacagccuggagugcccguuaaguggaagagaugaggacuagucccuguucccagagcccacuuuuuuuucuuuuuuugaaauaaaauagccugucuuucagaucucaaaggcucuuuucagagccaccaaaaaaaaaaaaaaaaaaaaaaaaaaaaaaaaaaaaaaaaaaaaaaaaaaaaaaaaaaaaaaaaaaaaaaaaaaaaaaaaaaaaaaaaaaaaaaaaaaaaa

SEQ ID NO: 26753 - RNA, 1748 nt, Artificial Sequence
  mRNA product Design a-1 (hSL-A100) comprising derived and/or modified sequence from LASV(LM765-SLE-2012;Clade IV)__AIT17814__GPCmut4 (opt5)
aggagagucccgcagucggcguccagcggcucugcuuguucgugugugugucguugcaggccuuauucaagcuuaccaugggccagaucgugaccuucuuucaagaggucccccacguuauugaagaggugaugaacaucgugcugauugcccucagcauccuggcuguccuuaaggggcuguacaauuucgccacaugcggacucgugggccugguuacguuucuucugcucugugggagauccugcaccacaucucuguauaaaggaguguacgaacugcagacccucgagcugaacauggaaacacuuaauauguguaugccucugagcugcaccaagaacaauucccaucacuauauuauggucggcaacgagacagggcucgagcugacccuuacgaauaccucuaucaucgaccauaaauucuguaaccugagcgaugcgcaccggaagaaucucuacgaccaugcucugauguccauuaucucuacauuucaccugagcauuccgaacuucaaucaguaugaagccauguccugcgauuuuaacggaggcaaaaucagcgugcaguacaaucucucucacuccuaugccaaggacgcugccgaucauuguggcaccguugcuaacggggugcugcaaacauucaugcgcauggccuggggaggcagcuacauugcgcuugacucugggagaggacggugggauugcaucaugaccuccuaccaguaucugauuauccagaauacgacaugggaggaccacugucaguuuagccgccccucuccuaucggcuaccucgggcugcuuucccaaagaacccgggauauuuauaucagccgcagacggcgcggaacauucaccuggacccuguccgacucugaaggcaaggauacacccggcggguacugccucacgagauggaugcugauugaggccgagcugaaauguuuuggaaacaccgcugucgccaagugcaacgaaaaacaugacgaggaguucugcgauaugcuccggcuguuugacuucuguaagcaggcuauccagcgccuuaaagccccugcgcagaugagcauucaacugaucaauaaggccgugaacgcucucaucaaugaccagcugauuaugaagaaccaccuuagagauaucaugggcauucccuauugcaauuacuccaaauauuguuaccugaaccacacaaccacagggaagaccagccucccuaaaugcugucuggugucuaauggauccuaccugaacgaaacgcauuucagcgacgauaucgaacagcaagccgacaauaugauuacagagaugcuccagaaggaguauauggaacggcagggcaaaaccccgcuggggcuugucgaucuguuuguuuucucuaccagcuuuuaccucaucuccaucuuccugcaccuggugaagauucccacacaucgccacaucgugggaaaaccuugccccaagccucauagacuuaaccacaugggcauuuguucuugcggccucuauaagcagcccggggucccggugaaauggaagcggugaggacuagucccuguucccagagcccacuuuuuuuucuuuuuuugaaauaaaauagccugucuuucagaucucaaaggcucuuuucagagccaccaaaaaaaaaaaaaaaaaaaaaaaaaaaaaaaaaaaaaaaaaaaaaaaaaaaaaaaaaaaaaaaaaaaaaaaaaaaaaaaaaaaaaaaaaaaaaaaaaaaaa

SEQ ID NO: 26754 - RNA, 1748 nt, Artificial Sequence
  mRNA product Design a-1 (hSL-A100) comprising derived and/or modified sequence from LASV(LM776-SLE-2012;Clade IV)__AIT17824__GPCmut4 (opt5)
aggagagucccgcagucggcguccagcggcucugcuuguucgugugugugucguugcaggccuuauucaagcuuaccaugggccagaucgugaccuucuuucaagaggucccccacguuauugaagaggugaugaacaucgugcugauugcccucagcauccuggcuguccuuaaggggcuguacaauuucgccacaugcggacucgugggccugguuacguuucuucugcucugugggagauccugcaccacaucuguguauaaaggagucuacgaacugcagacccuggagcucaacauggaaacacugaauauguguaugccucuuagcugcaccaagaacaauucccaucacuauauuauggugggcaacgagacagggcuggagcucacccugacgaauaccucuaucaucaaccauaaauucuguaaucuuagcgacgcgcacaagaaaaaccuguacgaucaugcucucauguccauuaucucuacauuucaccugagcauuccgaauuucaaccaguaugaagccauguccugcgacuuuaauggaggcaagaucagcguucaguacaaccugucucacuccuaugccggcgaugcugccaaucauugugggaccguggcuaacggaguccuccaaacauucaugcggauggccuggggcgggagcuacauugcgcuggacucuggacacggcaagugggauugcaucaugaccuccuaccaguaucuuauuauccagaacacgacaugggaggaccauugucaguuuagccgccccucuccuaucggguaccugggacuccugucccaaagaacccgggauauuuauaucagccgcagacggcgcggcacauucaccuggacccuuuccgacucugaaggcaaagauacacccgggggauacugccugacgagauggaugcucauugaggccgagcugaaguguuuuggcaauaccgcuguggccaaaugcaacgaaaagcacgacgaggaguucugcgauaugcugcggcucuuugacuucuguaaacaggcuauccagcgccugaaggccccugcgcagaugagcauucaacuuaucaauaaggccgugaacgcucugaucaaugaucagcucauuaugaaaaaccaccugagagacaucauggggauucccuauugcaauuacuccaaguauuguuaccuuaaccauacaaccacaggaaaaaccagccugccuaagugcugucucgucucuaauggcuccuaccugaacgaaacgcacuucagcgacgauaucgaacagcaagccgacaauaugauuacagagaugcugcagaaagaguauauggaacggcaggggaagaccccgcucggacugguugaucuuuuuguguucucuaccagcuuuuaccugaucuccaucuuccuccaucuggugaaaauucccacacaccgccauaucgucggcaagucuugcccuaagccccacagacugaaccacaugggcauuuguagcugcgggcuuuauaaacagccuggagugcccguucgguggaagcgcugaggacuagucccuguucccagagcccacuuuuuuuucuuuuuuugaaauaaaauagccugucuuucagaucucaaaggcucuuuucagagccaccaaaaaaaaaaaaaaaaaaaaaaaaaaaaaaaaaaaaaaaaaaaaaaaaaaaaaaaaaaaaaaaaaaaaaaaaaaaaaaaaaaaaaaaaaaaaaaaaaaaaa

SEQ ID NO: 26755 - RNA, 1748 nt, Artificial Sequence
  mRNA product Design a-1 (hSL-A100) comprising derived and/or modified sequence from LASV(Mad39;Clade IV)__ANH09722__GPCmut4 (opt5)
aggagagucccgcagucggcguccagcggcucugcuuguucgugugugugucguugcaggccuuauucaagcuuaccaugggccagaucgugaccuucuuucaagaggucccccacguuauugaagaggugaugaacaucgugcugauugcccucagcauccuggcuguccuuaaggggcuguacaauguggccacaugcggacucauuggccugguuacguuccuucugcucugugggagauccugcaccacaacccuguauaaaggaguguacgaacugcaggcgcucgagcugaacauggaaacacuuaauauguguaugccucugucuugcaccaagaacaauagccaucacuauauccgggucggcaacgagacagggcucgagcugacccuuacgaauaccucccugaucaaccauaaauuuuguaaucucucugacgcucacaagaaaaaccuguacgaucaugcccugaugagcauuaucuccacauuccaccucucuauuccgaauuuuaaccaguaugaagccaugagcugcgacuucaaugauggaaagaucuccgugcaguacaaccugagccacaccuaugcuggcgacacagccaaucauuguggcaccguugcuaacggggugcuucaaacguuuaugcgcauggccuggggaggcucuuacauugcgcuggauuccgggagaggaggcugggacugcaucaugacaagcuaccaguaucucauuauccagaacaccacaugggaggaucacugucaguucucucggcccuccccuaucggguaccugggacuucugagccaacgcaccagagacauuuauaucucucggcgcagacggggcaccuuuacauggacgcucuccgauagcgaaggcaaggacacccccgggggauacugccugacacgcuggaugcugauugaggccgagcucaaauguuucggcaauaccgcugucgccaagugcaacgaaaaacaugaugaggaauuuugcgacaugcugagacuuuucgauuuuuguaagcaggcuauccagcggcugaaagccccugcgcagauguccauucaacucaucaauaaggccgugaacgcucugaucaaugaccagcuuauuaugaagaaccaucugcgcgacaucauggggauucccuauugcaauuacucuaaauauuguuaccucaaccacacagugaccggaaagacgagccugccuaaaugcugucuggucuccaauggcagcuaccucaacgagacacacuucucugaugacaucgaacagcaagccgauaauaugauuaccgagaugcugcagaaggaguauauggaaagacaggggaaaaccccgcuuggacugguugaccucuucguguuuuccaccagcuucuaccugaucucuaucuuucugcaccuugugaagauucccacacaucggcacgucgugggcaaaccuugccccaagccucaucgccucaaccacaugggcaucuguagcugcggguucuauaagcagcccggaguuccggugagauggaaacggugaggacuagucccuguucccagagcccacuuuuuuuucuuuuuuugaaauaaaauagccugucuuucagaucucaaaggcucuuuucagagccaccaaaaaaaaaaaaaaaaaaaaaaaaaaaaaaaaaaaaaaaaaaaaaaaaaaaaaaaaaaaaaaaaaaaaaaaaaaaaaaaaaaaaaaaaaaaaaaaaaaaaa

SEQ ID NO: 26756 - RNA, 1748 nt, Artificial Sequence
  mRNA product Design a-1 (hSL-A100) comprising derived and/or modified sequence from LASV(Z0947-SLE-2011;Clade IV)__AIT17840__GPCmut4 (opt5)
aggagagucccgcagucggcguccagcggcucugcuuguucgugugugugucguugcaggccuuauucaagcuuaccaugggccagaucgugaccuucuuucaagaggucccccacguuauugaagaggugaugaacaucgugcugauugcccucagcauccuggcuguccuuaaggggcuguacaauuucgccacaugcggacucgugggccugguuacguuucuucugcucugugggagauccugcaccauuucucuguauaaaggaguguacgaacugcagacacucgagcugaacauggaaacccuuaauauguguaugccucugagcugcacaaagaacaauucccaucacuauaucauggucggcaacgagaccgggcucgagcugacacuuaccaauacgucuaucauuaaccauaaauucuguaaucugagcgacgcgcacaagaaaaaccucuacgaucaugcucugauguccaucauuucuaccuuucaccugagcaucccgaauuucaaccaguaugaagccauguccugcgacuuuaauggaggcaagauuagcgugcaguacaaccucucucacuccuaugccggcgaugcugccaaucauugugggacaguugcuaacggagugcugcaaaccuucaugcggauggccuggggcgggagcuacaucgcgcuugacucuggacgcgauagaugggacugcauuaugacauccuaccaguaucugaucauccagaacaccacgugggaggaucacugucaguuuagccggcccucuccuauuggcuaccucgggcugcuuucccaacgcacaagagacaucuauauuagccggcgcagacggggaaccuucacauggacccuguccgauucugaaggcaaggacacccccggcggguacugccucacacgcuggaugcugaucgaggccgagcugaaauguuuuggaaauacggcugucgccaagugcaacgaaaaacaugaugaggaguucugcgacaugcucagacuguuugauuucuguaagcaggcuauucagcggcuuaaagccccugcgcagaugagcauccaacugaucaauaaggccgugaacgcucucauuaaugaccagcugaucaugaagaaccaccuucgcgacauuaugggcauccccuauugcaauuacuccaaauauuguuaccugaaccacaccacaaccgggaagacaagccucccuaaaugcugucuggugucuaauggauccuaccugaacgaaacccauuucagcgaugacauugaacagcaagccgauaauaugaucacggagaugcuccagaaggaguauauggaaagacagggcaaaacaccgcuggggcuugucgaccuguuuguuuucucuaccagcuuuuaccucaucuccauuuuccugcaccuggugaagauccccacccaucggcacauugugggaaaaccuugccccaagccucaucgccuuaaccacaugggcaucuguucuugcggccucuauaagcagcccggggucccggugaaauggaagagaugaggacuagucccuguucccagagcccacuuuuuuuucuuuuuuugaaauaaaauagccugucuuucagaucucaaaggcucuuuucagagccaccaaaaaaaaaaaaaaaaaaaaaaaaaaaaaaaaaaaaaaaaaaaaaaaaaaaaaaaaaaaaaaaaaaaaaaaaaaaaaaaaaaaaaaaaaaaaaaaaaaaaa

SEQ ID NO: 26757 - RNA, 1724 nt, Artificial Sequence
  mRNA product Design a-1 (A100) comprising derived and/or modified sequence from LASV(Josiah;Clade IV)__NP_694870__GPCmut4 (opt1)
aggagagucccgcagucggcguccagcggcucugcuuguucgugugugugucguugcaggccuuauucaagcuuaccaugggccagaucgugaccuucuuccaggaggucccccacgugaucgaggaggugaugaacaucguccugaucgcccucagcgugcuggccgugcugaaggggcucuacaacuucgcgaccugcggccuggucgggcuggugacguuccuccugcugugcggccgcuccugcaccaccagccucuacaaggggguguacgagcugcagacccuggagcucaacauggagacgcugaacaugugcaugccgcuguccugcaccaagaacaacagccaccacuacaucauggucggcaacgagaccggccucgagcugacgcugaccaacaccuccaucaucaaccacaaguucugcaaccucagcgacgcccacaagaagaaccuguacgaccacgcccugauguccaucaucagcaccuuccaccucuccauccccaacuucaaccaguacgaggccaugagcugcgacuucaacgggggcaagaucuccgugcaguacaaccugagccacuccuacgccggggacgcggccaaccacugcggcacgguggccaacgggguccugcagaccuucaugcggauggccuggggcggcagcuacaucgcgcucgacuccgggcgcggcaacugggacugcaucaugaccagcuaccaguaccugaucauccagaacaccacgugggaggaccacugccaguucucccggcccagccccaucggguaccugggccuccugucccagcgcacccgggacaucuacaucagccgccggcgccggggcaccuucaccuggacgcugagcgacuccgaggggaaggacaccccgggcggguacugccugacccgcuggaugcucaucgaggccgagcugaagugcuucggcaacaccgccguggccaagugcaacgagaagcacgacgaggaguucugcgacaugcugcggcuguucgacuucugcaagcaggccauccagcgccugaaggcgcccgcccagaugagcauccagcugaucaacaaggccgugaacgcccucaucaacgaccagcugaucaugaagaaccaccuccgggacaucauggggauccccuacugcaacuacuccaaguacugcuaccucaaccacacgaccaccggccgcaccagccugcccaagugcugccuggucuccaacggcagcuaccucaacgagacgcacuucuccgacgacaucgagcagcaggccgacaacaugaucaccgagaugcugcagaaggaguacauggagcggcaggggaagacgccccugggccucguggaccuguucguguucagcaccuccuucuaccugaucagcaucuuccugcaccucgucaagaucccgacccaccgccacaucguggggaaguccugccccaagccccaccggcugaaccacaugggcaucugcagcugcgggcuguacaagcagcccggcgugccggucaaguggaagcgcugaggacuagucccuguucccagagcccacuuuuuuuucuuuuuuugaaauaaaauagccugucuuucagaucuaaaaaaaaaaaaaaaaaaaaaaaaaaaaaaaaaaaaaaaaaaaaaaaaaaaaaaaaaaaaaaaaaaaaaaaaaaaaaaaaaaaaaaaaaaaaaaaaaaaa

SEQ ID NO: 26758 - RNA, 1721 nt, Artificial Sequence
  mRNA product Design a-1 (A100) comprising derived and/or modified sequence from LASV(LP;Clade I)__AAF86701__GPCmut4 (opt1)
aggagagucccgcagucggcguccagcggcucugcuuguucgugugugugucguugcaggccuuauucaagcuuaccaugggccagaucaucaccuucuuccaggaggugccccacgucaucgaggaggugaugaacaucgugcugaucgcccucagccugcuggccauccucaaggggcuguacaacaucgcgaccugcggcaucaucgggcuggucgccuuccucuuccugugcggcaaguccugcagccugacgcucaagggcggguacgagcugcagacccuggagcucaacauggagacccugaacaugugcaugccgcuguccugcacgaagaacagcucccaccacuacauccgcgugggcaacgagaccgggcucgagcugacccugaccaacacgagcaucaucaaccacaaguucugcaaccucuccgacgcccacaagaagaaccuguacgaccacgcccugaugagcaucaucuccaccuuccaccucagcauccccaacuucaaccaguacgaggccauguccugcgacuucaacggcgggaagaucagcgugcaguacaaccugucccacagcuacgcgggcgacgccgccgagcacugcgggaccgucgccaacggcgugcugcagaccuucaugcggauggcguggggcgggcgcuacaucgcccucgacuccggcaaggggaacugggacugcaucaugacgagcuaccaguaccugaucauccagaacaccaccugggaggaccacugccaguucucccggcccagccccaucggcuaccugggccuccugucccagcgcacccgggacaucuacaucagccgccggcgccgggggacguucaccuggacccugagcgacuccgagggcaacgagacccccgggggcuacugccugacgcgcuggaugcucaucgaggccgagcugaagugcuucgggaacaccgccguggccaagugcaacgagaagcacgacgaggaguucugcgacaugcugcggcuguucgacuucugcaagcaggcgauccgccggcugaaggcccccgcccagaugagcauccagcugaucaacaaggccgucaacgcccucaucaacgaccagcugaucaugaagaaccaccuccgcgacaucaugggcauccccuacugcaacuacuccaaguacugcuaccucaaccacaccagcuccggccggaccagccugcccaagugcugccugaucuccaacgggagcuaccucaacgagacgcaguucuccgacgacaucgagcagcaggcggacaacaugaucaccgagaugcugcagaaggaguacaucgagcgccagggcaagaccccgcuggggcucguggacaucuucaucuucagcaccuccuucuaccugaucagcaucuuccugcaccugaucaagaucccgacgcaccggcacaucgugggcaagcccugccccaagccccaccgccucaaccacaugggggucugcuccugcggccuguacaagcacccgggcgugcccaccaaguggaagcggugaggacuagucccuguucccagagcccacuuuuuuuucuuuuuuugaaauaaaauagccugucuuucagaucuaaaaaaaaaaaaaaaaaaaaaaaaaaaaaaaaaaaaaaaaaaaaaaaaaaaaaaaaaaaaaaaaaaaaaaaaaaaaaaaaaaaaaaaaaaaaaaaaaaaa

SEQ ID NO: 26759 - RNA, 1721 nt, Artificial Sequence
  mRNA product Design a-1 (A100) comprising derived and/or modified sequence from LASV(803213;Clade II)__AAF86703__GPCmut4 (opt1)
aggagagucccgcagucggcguccagcggcucugcuuguucgugugugugucguugcaggccuuauucaagcuuaccaugggccagaucaucaccuucuuccaggaggugccccacgucaucgaggaggugaugaacaucgugcugaucgcccucagccugcuggccauccucaaggggaucuacaacgucgcgaccugcggccuguucgggcugaucuccuuccuccugcugugcggccgcagcugcuccgugacguacaaggggguguacgagcuccagacccuggagcugaacauggccaaccucaacaugugcaugccgcugagcugcaccaagaacaacucccaccacuacaucauggucggcaacgagacgggccuggagcucacccugaccaacaccagcaucaucaaccacaaguucugcaaccuguccgacgcccacaagaagaaccucuacgaccacgcccugaugagcaucaucuccacguuccaccugagcauccccaacuucaaccaguacgaggccauguccugcgacuucaacgggggcaagaucagcgugcaguacaaccucucccacagcuucgcgguggacgccgccaaccacugcgggaccaucgccaacggcguccugcagaccuucaugcggauggcguggggcggguccuacaucgcccuggacagcggcaaggggaacugggacugcaucaugaccuccuaccaguaccucaucauccagaacacgaccugggaggaccacugccaguucagccgccccucccccaucggcuaccuggggcugcucagccagcggacccgcgacaucuacaucagccggcgccgccggggcaccuucacguggacccucuccgacagcgagggcaacgaggcccccgggggcuacugccugacccgguggaugcugaucgaggccgagcucaagugcuucgggaacaccgccguggcgaagugcaacgagaagcacgacgaggaguucugcgacaugcugcgccuguucgacuucugcaagcaggccaucaagcggcucaagacgcccgcccagauguccauccagcugaucaacaaggccgugaacgcccugaucaacgaccagcucaucaugaagaaccaccuccgcgacaucaugggcauccccuacugcaacuacagccgguacugcuaccugaaccacaccgucaccgggaagaccucccugccccgcugcugccuggugagcaacggcuccuaccugaacgagacgcacuucagcgacgacaucgagcagcaggcggacaacaugaucaccgagaugcuccagaaggaguacauggaccggcagggcaagaccccgcuggggcugguggaccucuucgucuucuccaccagcuucuaccugaucuccaucuuccugcaccuggugaagaucccgacgcaccgccacaucgugggcaagcccugccccaagccccaccggcucaaccacauggggaucugcagcugcggccuguacaagcacccggggguccccgugaaguggaagcgcugaggacuagucccuguucccagagcccacuuuuuuuucuuuuuuugaaauaaaauagccugucuuucagaucuaaaaaaaaaaaaaaaaaaaaaaaaaaaaaaaaaaaaaaaaaaaaaaaaaaaaaaaaaaaaaaaaaaaaaaaaaaaaaaaaaaaaaaaaaaaaaaaaaaaa

SEQ ID NO: 26760 - RNA, 1721 nt, Artificial Sequence
  mRNA product Design a-1 (A100) comprising derived and/or modified sequence from LASV(GA391;Clade III)__CAA36645__GPCmut4 (opt1)
aggagagucccgcagucggcguccagcggcucugcuuguucgugugugugucguugcaggccuuauucaagcuuaccaugggccagaucgugaccuucuuccaggaggucccccacgugaucgaggaggugaugaacaucguccugaucgcccucagcauccuggccauccugaaggggcucuacaacguggcgaccugcggccugaucgggcuggugacguuccuccugcuguccggccgcagcugcucccucaucuacaaggggaccuacgagcugcagacccuggagcucaacauggagacccugaacaugugcaugccgcugagcugcaccaagaacaacucccaccacuacauccgggucggcaacgagaccggccucgagcugacccugacgaacaccagcauccucaaccacaaguucugcaaccuguccgacgcccacaagcgcaaccuguacgaccacagccucauguccaucaucagcaccuuccaccuguccauccccaacuucaaccaguacgaggccaugagcugcgacuucaacgggggcaagaucaccgugcaguacaaccugucccacagcuucgccguggacgccgcggggcacugcggcacgcucgccaacgggguccugcagaccuucaugcggauggccuggggcggcuccuacaucgcccuggacagcgggcgcggcaacugggacugcaucaugaccuccuaccaguaccucaucauccagaacaccacgugggacgaccacugccaguucagccggcccucccccaucggguaccugggccugcucagccagcgcacccgggacaucuacaucagccgccggcgccggggcaccuucaccuggacgcucuccgacagcgaggggaacgagaccccgggcggguacugccugacccgcuggaugcugaucgaggcggagcucaagugcuucggcaacaccgccguggccaagugcaacgagaagcacgacgaggaguucugcgacaugcugcggcuguucgacuucugcaagcaggccauccgccggcucaagacgcccgcccagauguccauccagcugaucaacaaggcggugaacgcccugaucaacgaccagcucaucaugaagaaccaccuccgcgacaucauggggauccccuacugcaacuacagccgguacugcuaccugaaccacaccuccaccggcaagaccagccugccccgcugcugccugaucuccaacggcagcuaccugaacgagacgaaguucuccgacgacaucgagcagcaggccgacaacaugaucaccgagaugcuccagaaggaguacaucgaccggcaggggaagacgccccugggccuggucgaccuguucguguucagcaccuccuucuaccucaucagcaucuuccugcaccuggugaagaucccgacccaccgccacaucgucgggaagcccugccccaagccccaccggcucaaccacaugggcaucugcuccugcgggcuguacaagcagccgggcgugcccgugcgcuggaagcggugaggacuagucccuguucccagagcccacuuuuuuuucuuuuuuugaaauaaaauagccugucuuucagaucuaaaaaaaaaaaaaaaaaaaaaaaaaaaaaaaaaaaaaaaaaaaaaaaaaaaaaaaaaaaaaaaaaaaaaaaaaaaaaaaaaaaaaaaaaaaaaaaaaaaa

SEQ ID NO: 26761 - RNA, 1724 nt, Artificial Sequence
  mRNA product Design a-1 (A100) comprising derived and/or modified sequence from LASV(AV;Clade V)__CCA30314__GPCmut4 (opt1)
aggagagucccgcagucggcguccagcggcucugcuuguucgugugugugucguugcaggccuuauucaagcuuaccaugggccagaucgugaccuucuuccaggaggucccccacgugaucgaggaggugaugaacaucguccugaucgcccucagcauccuggccgugcugaaggggcucuacaacaucgcgaccugcggccugaucgggcugaucacguuccuccugcugugcggccgcuccugcagcuccaaccucuacaaggggguguacgagcugcagagccuggaccucaacauggagacccugaacaugugcaugccgcuguccugcaccaagaacaacagccaccacuacauccgggucggcaacgacacgggccucgagcugacccugaccaacaccuccauccucaaccacaaguucugcaaccugagcgacgcccacaagaaggaccuguacgaccacgcccucauguccaucaucagcacguuccaccuguccauccccaacuucaaccaguacgaggccaugagcugcgacuucaacgggggcaagaucuccgugcaguacaaccugagccacuccuacgccaucgacgcggccaaccacugcgggaccguggccaacggcauccuccagaccuucaugcgcauggccuggggcgggagcuacaucgcgcuggacuccggccgggggaacugggacugcaucaugaccagcuaccaguaccugaucauccagaacacgaccugggagaaccacugccaguucucccgccccagccccaucggcuaccucgggcugcugagccagcggacccgcgacaucuacaucucccggcgccgccggggcaccuucacguggacccugagcgacuccgagggcaacgccacccccgggggcuacugccucacccgguggaugcugaucgaggccgagcugaagugcuucgggaacacggccgucgccaagugcaacgagaagcacgacgaggaguucugcgacaugcuccgccuguucgacuucugcaagcaggcgaucagccggcugaagucccccgcccagaugagcauccagcucaucaacaaggccgugaacgcccugaucaacgaccagcugaucaugaagaaccaccuccgcgacaucaugggcauccccuacugcaacuacuccaaguacugcuaccugaaccacaccaucaccgggaagaccagccugcccaagugcugccucguguccaacggcagcuaccugaacgagacgcacuucuccgacgacaucgagcagcaggccgacaacaugaucaccgagaugcugcagaaggaguacauggagcggcagggcaagaccccgcucgggcuggucgaccuguucguguucagcaccuccuucuaccugaucagcaucuuccuccgccuggugaagaucccgacgcaccggcacaucgucggcaagcccugccccaagccccaccgccugaaccacauggggaucugcuccugcggccucuacaagcagccgggggugcccgugcgguggaagcgcugaggacuagucccuguucccagagcccacuuuuuuuucuuuuuuugaaauaaaauagccugucuuucagaucuaaaaaaaaaaaaaaaaaaaaaaaaaaaaaaaaaaaaaaaaaaaaaaaaaaaaaaaaaaaaaaaaaaaaaaaaaaaaaaaaaaaaaaaaaaaaaaaaaaaa

SEQ ID NO: 26762 - RNA, 1721 nt, Artificial Sequence
  mRNA product Design a-1 (A100) comprising derived and/or modified sequence from LASV(Togo/2016/7082;Clade VI)__AMR44577__GPCmut4 (opt1)
aggagagucccgcagucggcguccagcggcucugcuuguucgugugugugucguugcaggccuuauucaagcuuaccaugggccagaucaucaccuucuuccaggaggugccccacgucaucgaggaggugaugaacaucgugcugaucgcccucagccugcuggccauccucaagggggucuacaacguggcgaccugcggcaucaucgggcuggugacguuccuguuccucugcggccgcuccugcagccugaucuacaagggguccuacgagcugcagacccucgagcugaacauggagacccugaacaugugcaugccgcucagcugcacgaagaacuccagccaccacuacauccgggucggcaacgagaccggccuggagcugacccucaccaacacguccaucaucaaccacaaguucugcaaccugagcgacgcccacaagcgcaaccuguacgaccacgcccucauguccauccugagcaccuuccaccuguccauccccaacuucaaccaguacgaggccaugagcugcgacuucaacgggggcaagaucuccgugcaguacaaccucagccacgccuacgcgguggacgccgccgagcacugcgggaccgucgccaacggcgugcugcagaccuucaugcggauggcguggggcggguccuacaucgcccuggacagcggccgcgggaacugggacugcaucaugacguccuaccaguaccucaucauccagaacaccaccugggaggaccacugccaguucagccggcccucccccaucggcuaccuggggcugcucagccagcgcacccgggacaucuacaucagccgccggcgccggggcacguucaccuggacccucuccgacagcgagggcaacgagacccccgggggcuacugccugacgcgcuggaugcugaucgaggccgagcucaagugcuucgggaacaccgccguggccaagugcaacgagaagcacgacgaggaguucugcgacaugcugcggcuguucgacuucugcaagcaggcgauccagcgccucaagucccccgcccagaugagcauccagcugaucaacaaggccgucaacgcccugaucaacgaccagcucaucaugaagaaccaccuccgggacaugaugggcauccccuacugcaacuacuccaaguacugcuaccugaaccacaccagcuccgggcgcaccagccugcccaagugcugccugguguccaacggcagcuaccugaacgagacgcacuucuccgacgacaucgagcagcaggccgacaacaugaucaccgagaugcuccagaaggaguacaucgaccggcagggcaagaccccgcuggggcugguggaccucuucgucuucagcaccuccuucuaccugaucagcaucuuccugcaccugaucaagaucccgacgcaccgccacaucgugggcaagcccugccccaagccccaccggcucaaccacauggggaucugcuccugcggccuguacaagcagccgggggugcccacccgcuggaagcggugaggacuagucccuguucccagagcccacuuuuuuuucuuuuuuugaaauaaaauagccugucuuucagaucuaaaaaaaaaaaaaaaaaaaaaaaaaaaaaaaaaaaaaaaaaaaaaaaaaaaaaaaaaaaaaaaaaaaaaaaaaaaaaaaaaaaaaaaaaaaaaaaaaaaa

SEQ ID NO: 26763 - RNA, 1721 nt, Artificial Sequence
  mRNA product Design a-1 (A100) comprising derived and/or modified sequence from LASV(KAK-428;Clade n.d. (VII))__ANH09740__GPCmut4 (opt1)
aggagagucccgcagucggcguccagcggcucugcuuguucgugugugugucguugcaggccuuauucaagcuuaccaugggccagaucgugaccuucuuccaggaggucccccacgugaucgaggaggugaugaacaucguccugaucgcccucagccugcuggccauccucaaggggcuguacaacuucgcgaccugcggcgugaucgggcugaucacguuccuccugcugugcggccgcuccugcagcgccaccuacaaggggcaguacgagcuccagacccuggagcugaacauggagucccucaacaugugcaugccgcugagcugcacgaagaacaacucccaccacuacauccgggccggcaacaacaccggccuggagcucacccugaccaacacgagcaucaucucccacaaguucugcaaccugagcgacgcccacaagaagaaccucuacgaccacacccugauguccaucaucaccaccuuccaccugagcauccccaacuucaaccaguacgaggccauguccugcgacuucaacgggggcaagaucagcauccaguacaaccucucccacagcuacgcgggggacgccgcccagcacugcggcacgguggccaacgggguccugcagaccuucaugcgcauggcguggggcggcuccuaccuggcccucgacagcgggcggcgcggcugggacugcaucaucuccagcuaccaguaccugaucauccagaacaccaccugggacgaccacugccaguucucccggcccagccccaucggguaccugggcuucgugagccagaagacgcgcgacaucuacaucucccggcgccgccggggcaccuucaccuggacccugagcgacuccgaggggcacgacaugccgggcggguacugccucacgcgguggaugcugaucgaggccgaccugaagugcuucggcaacaccgccguggccaagugcaacgagaagcacgacgaggaguucugcgacauguggcgccucuucgacuucugcaagcaggcgauccagcggcugaaggcccccgcccagaugaacauccagcugaucaacaaggccgucaacgcccucaucaacgaccagcugaugaugaagaaccaccuccgcgacaucauggggauccccuacugcaacuacagcaaguucugcuaccugaacaacaccaccacgggccggaccucccugccccgcugcugccugaucagcaacggcuccuaccucaacgagacccacuucagcgacgacaucgagcagcaggcggacaacaugaucaccgagaugcugcagaaggaguacauggaccggcaggggaagacgccccugggccucguggaccuguucguguucuccaccagcuucuaccugaucaccaucuuccuccaccuggucaagaucccgacccaccgccacaucguggggaagcccugccccaagccccaccggcugaaccacaugggcaucugcuccugcgggcuguacaagcagccgggcgugcccguccgcuggaagcggugaggacuagucccuguucccagagcccacuuuuuuuucuuuuuuugaaauaaaauagccugucuuucagaucuaaaaaaaaaaaaaaaaaaaaaaaaaaaaaaaaaaaaaaaaaaaaaaaaaaaaaaaaaaaaaaaaaaaaaaaaaaaaaaaaaaaaaaaaaaaaaaaaaaaa

SEQ ID NO: 26764 - RNA, 1721 nt, Artificial Sequence; identical to SEQ ID NO: 26758
  mRNA product Design a-1 (A100) comprising derived and/or modified sequence from LASV(Pinneo-NIG-1969;Clade I)__AIT17836__GPCmut4 (opt1)

SEQ ID NO: 26765 - RNA, 1721 nt, Artificial Sequence
  mRNA product Design a-1 (A100) comprising derived and/or modified sequence from LASV(ISTH0009-NIG-2011;Clade II)__AIT17404__GPCmut4 (opt1)
aggagagucccgcagucggcguccagcggcucugcuuguucgugugugugucguugcaggccuuauucaagcuuaccaugggccagaucaucaccuucuuccaggaggugccccacgucaucgaggaggugaugaacaucgugcugaucgcccucagccugcuggccauccucaaggggaucuacaacgucgcgaccugcggccuguucgggcugguguccuuccuccugcugugcggccgcagcugcuccacgaccuacaaggggguguacgagcuccagacccuggagcuggacauggccagccucaacaugugcaugccgcuguccugcacgaagaacaacagccaccacuacaucauggucggcaacgagaccggccuggagcucacccugaccaacacguccaucaucaaccacaaguucugcaaccugagcgacgcccacaagaagaaccucuacgaccacgcccugauguccaucaucagcaccuuccaccuguccauccccaacuucaaccaguacgaggccaugagcugcgacuucaacgggggcaagaucuccgugcaguacaaccucagccacgcguacgccguggacgccgccaaccacugcgggaccaucgcgaacggcguccugcagaccuucaugcggauggccuggggcggguccuacaucgcccuggacagcggcaagggguccugggacugcaucaugacgagcuaccaguaccucaucauccagaacaccaccugggaggaccacugccaguucucccgccccagccccaucggcuaccuggggcugcucagccagcggacccgcgacaucuacaucucccggcgccgccggggcacguucaccuggacccucagcgacuccgagggcaacgagacccccgggggcuacugccugacgcgguggaugcugaucgaggccgagcucaagugcuucgggaacaccgccguggcgaagugcaacgagaagcacgacgaggaguucugcgacaugcugcgccuguucgacuucugcaagcaggccauccggcgccucaagacccccgcccagaugagcauccagcugaucaacaaggccgugaacgcccugaucaacgaccagcucaucaugaagaaccaccuccgggacaucaugggcaucccguacugcaacuacuccaaguacugcuaccugaaccacaccgucacggggaagaccagccugccccgcugcugccugguguccaacggcagcuaccugaacgagacccacuucuccgacgacaucgagcagcaggcggacaacaugaucaccgagcuccugcagaaggaguacauggaccggcagggcaagacgccccuggggcucguggaccuguucgucuucagcaccuccuucuaccugaucagcaucuuccugcaccucaucaagaucccgacccaccgccacaucaccggcaagcccugccccaagccccaccggcugaaccacauggggaucugcuccugcggccuguacaagcacccgggggugcccgugaaguggaagcgcugaggacuagucccuguucccagagcccacuuuuuuuucuuuuuuugaaauaaaauagccugucuuucagaucuaaaaaaaaaaaaaaaaaaaaaaaaaaaaaaaaaaaaaaaaaaaaaaaaaaaaaaaaaaaaaaaaaaaaaaaaaaaaaaaaaaaaaaaaaaaaaaaaaaaa

SEQ ID NO: 26766 - RNA, 1721 nt, Artificial Sequence
  mRNA product Design a-1 (A100) comprising derived and/or modified sequence from LASV(ISTH2010-NIG-2012;Clade II)__AIT17482__GPCmut4 (opt1)
aggagagucccgcagucggcguccagcggcucugcuuguucgugugugugucguugcaggccuuauucaagcuuaccaugggccagaucaucaccuucuuccaggaggugccccacgucaucgaggaggugaugaacaucgugcugaucgcccucagccugcuggccauccucaaggggaucuacaacgucgcgaccugcggccuguucgggcugguguccuuccuccugcugugcggccgcagcugcuccacgaccuacaaggggguguacgagcuccagacccuggagcuggacauggccagccucaacaugugcaugccgcuguccugcacgaagaacaacagccaccacuacaucauggucggcaacgagaccggccuggagcucacccugaccaacacguccaucaucaaccacaaguucugcaaccugagcgacgcccacaagaagaaccucuacgaccacgcccugauguccaucaucagcaccuuccaccuguccauccccaacuucaaccaguacgaggccaugagcugcgacuucaacgggggcaagaucuccgugcaguacaaccucagccacgcguacgccguggacgccgccaaccacugcgggaccaucgcgaacggcguccugcagaccuucaugcggauggccuggggcggguccuacaucgcccuggacagcggcaagggguccugggacugcaucaugacgagcuaccaguaccucaucauccagaacaucaccugggaggaccacugccaguucucccgccccagccccaucggcuaccuggggcugcucagccagcggacccgcgacaucuacaucucccggcgccgccggggcaccuucacguggacccucagcgacuccgagggcaacgagacccccgggggcuacugccugacccgguggaugcugaucgaggccgagcucaagugcuucgggaacacggccguggcgaagugcaacgagaagcacgacgaggaguucugcgacaugcugcgccuguucgacuucugcaagcaggccauccggcgccucaagacccccgcccagaugagcauccagcugaucaacaaggccgugaacgcccugaucaacgaccagcucaucaugaagaaccaccuccgggacaucaugggcauccccuacugcaacuacuccaaguacugcuaccugaaccacaccgucaccgggaagacgagccugccccgcugcugccugguguccaacggcagcuaccugaacgagacccacuucuccgacgacaucgagcagcaggcggacaacaugaucaccgagcuccugcagaaggaguacaucgaccggcagggcaagaccccgcuggggcucguggaccuguucgucuucagcacguccuucuaccugaucagcaucuuccugcaccucgugaagaucccgacccaccgccacguggucggcaagcccugccccaagccccaccggcugaaccacauggggaucugcuccugcggccuguacaagcacccgggggugcccgugaaguggaagcgcugaggacuagucccuguucccagagcccacuuuuuuuucuuuuuuugaaauaaaauagccugucuuucagaucuaaaaaaaaaaaaaaaaaaaaaaaaaaaaaaaaaaaaaaaaaaaaaaaaaaaaaaaaaaaaaaaaaaaaaaaaaaaaaaaaaaaaaaaaaaaaaaaaaaaa

SEQ ID NO: 26767 - RNA, 1721 nt, Artificial Sequence
  mRNA product Design a-1 (A100) comprising derived and/or modified sequence from LASV(Lassa virus/H.sapiens-wt/NGA/2015/ISTH_0543;Clade II)__AVO03639__GPCmut4 (opt1)
aggagagucccgcagucggcguccagcggcucugcuuguucgugugugugucguugcaggccuuauucaagcuuaccaugggccagaucaucaccuucuuccaggaggugccccacgucaucgaggaggugaugaacaucgugcugaucgcccucagccugcuggccauccucaaggggaucuacaacgucgcgaccugcggccuguucgggcugguguccuuccuccugcugugcggccgcagcugcuccacgaccuacaaggggguguacgagcuccagacccuggagcuggacauggccaaccucaacaugugcaugccgcugagcugcacgaagaacaacucccaccacuacaucauggucggcaacgagaccggccuggagcucacccugaccaacacgagcaucaucaaccacaaguucugcaaccuguccgacgcccacaagaagaaccucuacgaccacgcccugaugagcaucaucuccaccuuccaccugagcauccccaacuucaaccaguacgaggccauguccugcgacuucaacgggggcaagaucagcgugcaguacaaccucucccacaccuacgcgguggacgccgccaaccacugcgggaccaucgccaacggcguccugcagacguucaugcggauggcguggggcgggagcuacaucgcccuggacuccggcaaggggagcugggacugcaucaugaccuccuaccaguaccucgugauccagaacaccaccugggaggaccacugccaguucagccgccccucccccaucggcuaccuggggcugcucagccagcggacgcgcgacaucuacaucagccggcgccgccggggcaccuucaccuggacccucuccgacagcgagggcaacgagacgcccgggggcuacugccugacccgguggaugcugaucgaggccgagcucaagugcuucgggaacaccgccguggccaagugcaacgagaagcacgacgaggaguucugcgacaugcugcgccuguucgacuucugcaagcaggcgauccggcgccucaagacccccgcccagauguccauccagcugaucaacaaggccgucaacgcccugaucaacgaccagcucaucaugaagaaccaccuccgggacaucaugggcauccccuacugcaacuacagcaaguacugcuaccugaaccacacggugaccgggaagaccucccugccccgcugcugccuggugagcaacggcuccuaccugaacgagacccacuucagcgacgacaucgagcagcaggccgacaacaugaucacggagcuccugcagaaggaguacaucgaccggcagggcaagaccccgcuggggcucgucgaccuguucguguucuccaccagcuucuaccugaucuccaucuuccugcaccucgugaagaucccgacccaccgccacaucacgggcaagcccugccccaagccccaccggcugaaccacauggggaucugcagcugcggccuguacaagcacccggggguccccgugaaguggaagcgcugaggacuagucccuguucccagagcccacuuuuuuuucuuuuuuugaaauaaaauagccugucuuucagaucuaaaaaaaaaaaaaaaaaaaaaaaaaaaaaaaaaaaaaaaaaaaaaaaaaaaaaaaaaaaaaaaaaaaaaaaaaaaaaaaaaaaaaaaaaaaaaaaaaaaa

SEQ ID NO: 26768 - RNA, 1721 nt, Artificial Sequence
  mRNA product Design a-1 (A100) comprising derived and/or modified sequence from LASV(Lassa virus/H.sapiens-wt/NGA/2016/ISTH_0009;Clade II)__AVO03571__GPCmut4 (opt1)
aggagagucccgcagucggcguccagcggcucugcuuguucgugugugugucguugcaggccuuauucaagcuuaccaugggccagaucaucaccuucuuccaggaggugccccacgucaucgaggaggugaugaacaucgugcugaucgcccucagccugcuggccauccucaaggggaucuacaacgucgcgaccugcggccugcuggggcucguguccuuccugcugcucugcggccgcagcugcuccacgaccuacaaggggguguacgagcugcagacccuggagcucgacauggccagccugaacaugugcaugccgcuguccugcacgaagaacaacagccaccacuacaucauggucggcaacgagaccggccucgagcugacccugaccaacacguccaucaucaaccacaaguucugcaaccucagcgacgcccacaagaagaaccuguacgaccacgcccugauguccaucaucagcaccuuccaccucuccauccccaacuucaaccaguacgaggccaugagcugcgacuucaacgggggccggaucuccgugcaguacaaccugagccacuccuacgcgguggacgccgccaaccacugcgggaccaucgccaacggcguccugcagaccuucaugcgcauggcguggggcgggagcuacaucgcccucgacuccggcaaggggagcugggacugcaucaugacguccuaccaguaccugaucauccagaacaccaccugggaggaccacugccaguucagccggcccagccccaucggcuaccuggggcuccugucccagcgcacccgggacaucuacaucagccgccggcgccggggcacguucaccuggacccuguccgacagcgagggcaacgagacccccgggggcuacugccugacgcgcuggaugcucaucgaggccgagcugaagugcuucgggaacaccgccguggccaagugcaacgagaagcacgacgaggaguucugcgacaugcugcggcuguucgacuucugcaagcaggcgauccgccggcugaagacccccgcccagauguccauccagcugaucaacaaggccgugaacgcccucaucaacgaccagcugaucaugaagaaccaccuccgcgacaucaugggcaucccguacugcaacuacagcaaguacugcuaccucaaccacaccgucacggggaagaccucccugccccggugcugccuggugagcaacggcuccuaccucaacgagacccacuucagcgacgacaucgagcagcaggccgacaacaugaucaccgagcugcugcagaaggaguacaucgaccgccagggcaagacgccccucgggcugguggaccuguucgucuucuccaccagcuucuaccugaucuccaucuuccuccaccuggugaagaucccgacccaccggcacaucaccggcaagcccugccccaagccccaccgccugaaccacauggggaucugcagcugcggccucuacaaccacccgggggugcccgucaaguggaagcggugaggacuagucccuguucccagagcccacuuuuuuuucuuuuuuugaaauaaaauagccugucuuucagaucuaaaaaaaaaaaaaaaaaaaaaaaaaaaaaaaaaaaaaaaaaaaaaaaaaaaaaaaaaaaaaaaaaaaaaaaaaaaaaaaaaaaaaaaaaaaaaaaaaaaa

SEQ ID NO: 26769 - RNA, 1721 nt, Artificial Sequence
  mRNA product Design a-1 (A100) comprising derived and/or modified sequence from LASV(Lassa virus/H.sapiens-wt/NGA/2016/ISTH_0017;Clade II)__AVO03567__GPCmut4 (opt1)
aggagagucccgcagucggcguccagcggcucugcuuguucgugugugugucguugcaggccuuauucaagcuuaccaugggccagaucaucaccuucuuccaggaggugccccacgucaucgaggaggugaugaacaucgugcugaucgcccucagccugcuggccauccucaaggggaucuacaacgucgcgaccugcggccuguucgggcugguguccuuccuccugcugugcggccgcagcugcuccacgaccuacaaggggguguacgagcuccagacccuggagcuggacauggccagccucaacaugugcaugccgcuguccugcacgaagaacaacagccaccacuacaucauggucggcaacgagaccggccuggagcucacccugaccaacacguccaucaucaaccacaaguucugcaaccugagcgacgcccacaagaagaaccucuacgaccacgcccugauguccaucaucagcaccuuccaccuguccauccccaacuucaaccaguacgaggccaugagcugcgacuucaacgggggcaagaucuccgugcaguacaaccucagccacaccuacgcgaucgacgccgccaaccacugcgggaccaucgccaacggcgugcugcagacguucaugcggauggcguggggcggguccuacaucgcccuggacagcggcaagggguccugggacugcaucaugaccagcuaccaguaccucaucauccagaacaccaccugggaggaccacugccaguucucccgccccagccccaucggcuaccuggggcugcucagccagcggacgcgcgacaucuacaucucccggcgccgccggggcaccuucaccuggacccucagcgacuccgagggcaacgagacgcccgggggcuacugccugacccgguggaugcugaucgaggccgagcucaagugcuucgggaacaccgccgucgccaagugcaacgagaagcacgacgaggaguucugcgacaugcugcgccuguucgacuucugcaagcaggcgauccggcgccucaagacccccgcccagaugagcauccagcugaucaacaaggccgugaacgcccugaucaacgaccagcucaucaugaagaaccaccuccgggacaucaugggcauccccuacugcaacuacuccaaguacugcuaccugaaccacacggugaccgggaagaccagccugccccgcugcugccuggucuccaacggcagcuaccugaacgagacccacuucuccgacgacaucgagcagcaggccgacaacaugaucacggagcuccugcagaaggaguacauggaccggcagggcaagaccccgcuggggcucguggaccuguucguguucagcaccuccuucuaccugaucagcaucuuccugcaccucguccgcaucccgacccaccggcacgugaucggcaagcccugccccaagccccaccgccugaaccacauggggaucugcuccugcggccuguacaagcacccgggggugcccgucaaguggaagcggugaggacuagucccuguucccagagcccacuuuuuuuucuuuuuuugaaauaaaauagccugucuuucagaucuaaaaaaaaaaaaaaaaaaaaaaaaaaaaaaaaaaaaaaaaaaaaaaaaaaaaaaaaaaaaaaaaaaaaaaaaaaaaaaaaaaaaaaaaaaaaaaaaaaaa

SEQ ID NO: 26770 - RNA, 1721 nt, Artificial Sequence
  mRNA product Design a-1 (A100) comprising derived and/or modified sequence from LASV(Lassa virus/H.sapiens-wt/NGA/2018/ISTH_0959;Clade II)__AVV65099__GPCmut4 (opt1)
aggagagucccgcagucggcguccagcggcucugcuuguucgugugugugucguugcaggccuuauucaagcuuaccaugggccagaucaucaccuucuuccaggaggugccccacgucaucgaggaggugaugaacaucgugcugaucgcccucagccugcuggccauccucaaggggaucuacaacgucgugaccugcggccuguucgggcugguguccuuccuccugcugugcggccgcagcugcuccacgaccuacaagggggucuacgagcuccagacccuggagcuggacauggcgagccucaacaugugcaugccgcuguccugcacgaagaacaacagccaccacuacaucauggugggcaacgagaccggccuggagcucacccugaccaacacguccaucaucaaccacaaguucugcaaccugagcgacgcccacaagaagaaccucuacgaccacgcccugauguccaucaucagcaccuuccaccuguccauccccaacuucaaccaguacgaggccaugagcugcgacuucaacgggggcaagaucuccgugcaguacaaccucagccacgccuacgcgaucgacgccgccaaccacugcgggaccaucgccaacggcguccugcagaccuucaugcggauggcguggggcggguccuacaucgcccuggacagcggcaagggguccugggacugcaucaugacgagcuaccaguaccucaucauccagaacaccaccugggaggaccacugccaguucucccgccccagccccaucggcuaccuggggcugcucagccagcggacccgcgacaucuacaucucccggcgccgccggggcacguucaccuggacccucagcgacuccgagggcaacgagacccccgggggcuacugccugacgcgguggaugcugaucgaggccgagcucaagugcuucgggaacaccgccguggccaagugcaacgagaagcacgacgaggaguucugcgacaugcugcgccuguucgacuucugcaagcaggcgauccggcgccucaagacccccgcccagaugagcauccagcugaucaacaaggccgugaacgcccugaucaacgaccagcucaucaugaagaaccaccuccgggacaucaugggcaucccguacugcaacuacuccaaguacugcuaccugaaccacaccgucacggggaagaccagccugccccgcugcugccugguguccaacggcagcuaccugaacgagacccacuucuccgacgacaucgagcagcaggccgacaacaugaucaccgagcuccugcagaaggaguacaucgaccggcagggcaagacgccccuggggcucguggaccuguucgucuucagcaccuccuucuaccugaucagcaucuuccugcaccucgugaagaucccgacccaccgccacgugaucggcaagcccugccccaagccccaccggcugaaccacauggggaucugcuccugcggccuguacaagcacccggggguccccgugaaguggaagcgcugaggacuagucccuguucccagagcccacuuuuuuuucuuuuuuugaaauaaaauagccugucuuucagaucuaaaaaaaaaaaaaaaaaaaaaaaaaaaaaaaaaaaaaaaaaaaaaaaaaaaaaaaaaaaaaaaaaaaaaaaaaaaaaaaaaaaaaaaaaaaaaaaaaaaa

SEQ ID NO: 26771 - RNA, 1721 nt, Artificial Sequence
  mRNA product Design a-1 (A100) comprising derived and/or modified sequence from LASV(LASV003-NIG-2008;Clade II)__AIT17580__GPCmut4 (opt1)
aggagagucccgcagucggcguccagcggcucugcuuguucgugugugugucguugcaggccuuauucaagcuuaccaugggccagaucaucaccuucuuccaggaggugccccacgucaucgaggaggugaugaacaucgugcugaucgcccucagccugcuggccauccucaaggggaucuacaacgucgcgaccugcggccuguucgggcugguguccuuccuccugcugugcggccgcagcugcuccacgaccuacaaggggguguacgagcuccagacccuggagcuggacauggccagccucaacaugugcaugccgcuguccugcacgaagaacaacagccaccacuacaucauggucggcaacgagaccggccuggagcucacccugaccaacacguccaucaucaaccacaaguucugcaaccugagcgacgcccacaagaagaaccucuacgaccacgcccugauguccaucaucagcaccuuccaccuguccauccccaacuucaaccaguacgaggccaugagcugcgacuucaacgggggcaagaucuccgugcaguacaaccucagccacaccuacgcgguggacgccgccaaccacugcgggaccaucgccaacggcguccugcagacguucaugcggauggcguggggcggguccuacaucgcccuggacagcggcaagggguccugggacugcaucaugaccagcuaccaguaccucaucauccagaacaccaccugggaggaccacugccaguucucccgccccagccccaucggcuaccuggggcugcucagccagcggacgcgcgacaucuacaucucccggcgccgccggggcaccuucaccuggacccucagcgacuccgagagcaacgagacgccgggcggguacugccugacccgguggaugcugaucgaggccgagcucaagugcuucggcaacaccgccguggccaagugcaacgagaagcacgacgaggaguucugcgacaugcugcgccuguucgacuucugcaagcaggcgauccggcgccucaaggcccccgcccagauguccauccagcugaucaacaaggccgugaacgcccugaucaacgaccagcucaucaugaagaaccaccuccgggacaucauggggauccccuacugcaacuacagcaaguacugcuaccugaaccacaccgucacgggccgcaccucccugccccggugcugccuggugagcaacggguccuaccugaacgagacccacuucagcgacgacaucgagcagcaggcggacaacaugaucaccgagcuccugcagaaggaguacauggaccgccagggcaagacgccccugggccucguggaccuguucgucuucuccaccagcuucuaccugaucuccaucuuccugcaccucgugaagaucccgacccaccggcacgugaucgggaagcccugccccaagccccaccgccugaaccacaugggcaucugcagcugcgggcuguacaagcacccgggcguccccgugaaguggaagcggugaggacuagucccuguucccagagcccacuuuuuuuucuuuuuuugaaauaaaauagccugucuuucagaucuaaaaaaaaaaaaaaaaaaaaaaaaaaaaaaaaaaaaaaaaaaaaaaaaaaaaaaaaaaaaaaaaaaaaaaaaaaaaaaaaaaaaaaaaaaaaaaaaaaaa

SEQ ID NO: 26772 - RNA, 1721 nt, Artificial Sequence
  mRNA product Design a-1 (A100) comprising derived and/or modified sequence from LASV(LASV035-NIG-2009;Clade II)__AIT17588__GPCmut4 (opt1)
aggagagucccgcagucggcguccagcggcucugcuuguucgugugugugucguugcaggccuuauucaagcuuaccaugggccagaucaucaccuucuuccaggaggugccccacgucaucgaggaggugaugaacaucgugcugaucgcccucagccugcuggccauccucaaggggaucuacaacgucgcgaccugcggccuguucgggcugguguccuuccuccugcugugcggccgcagcugcuccacgaccuacaaggggguguacgagcuccagacccuggagcuggacauggccagccucaacaugugcaugccgcuguccugcacgaagaacaacagccaccacuacaucauggucggcaacgagaccggccuggagcucacccugaccaacacguccaucaucaaccacaaguucugcaaccugagcgacgcccacaagaagaaccucuacgaccacgcccugauguccaucaucagcaccuuccaccuguccauccccaacuucaaccaguacgaggccaugagcugcgacuucaacgggggcaagaucuccgugcaguacaaccucagccacgcguacgccguggacgccgccaaccacugcgggaccaucgcgaacggcguccugcagaccuucaugcggauggccuggggcggguccuacaucgcccuggacagcggcaagggguccugggacugcaucaugacgagcuaccaguaccucaucauccagaacaccaccugggaggaccacugccaguucucccgccccagccccaucggcuaccuggggcugcucagccagcggacccgcgacaucuacaucucccggcgccgccggggcacguucaccuggacccucagcgacuccgagggcaacgagacccccgggggcuacugccugacgcgguggaugcugaucgaggccgagcucaagugcuucgggaacaccgccguggcgaagugcaacgagaagcacgacgaggaguucugcgacaugcugcgccuguucgacuucugcaagcaggccauccggcgccucaaggcccccgcccagaugagcauccagcugaucaacaaggccgugaacgcgcugaucaacgaccagcucaucaugaagaaccaccuccgggacaucaugggcauccccuacugcaacuacuccaaguacugcuaccugaaccacaccgucaccgggaagacgagccugccccgcugcugccugguguccaacggcagcuaccugaacgagacccacuucuccgacgacaucgagcagcaggccgacaacaugaucaccgagcuccugcagaaggaguacaucgaccggcagggcaagaccccgcuggggcucguggaccuguucgucuucagcacguccuucuaccugaucagcaucuuccugcaccucgugaagaucccgacccaccgccacgugaucggcaagcccugccccaagccccaccggcugaaccacauggggaucugcuccugcggccuguacaagcacccggggguccccgugaaguggaagcgcugaggacuagucccuguucccagagcccacuuuuuuuucuuuuuuugaaauaaaauagccugucuuucagaucuaaaaaaaaaaaaaaaaaaaaaaaaaaaaaaaaaaaaaaaaaaaaaaaaaaaaaaaaaaaaaaaaaaaaaaaaaaaaaaaaaaaaaaaaaaaaaaaaaaaa

SEQ ID NO: 26773 - RNA, 1721 nt, Artificial Sequence
  mRNA product Design a-1 (A100) comprising derived and/or modified sequence from LASV(LASV1000-NIG-2009;Clade II)__AIT17782__GPCmut4 (opt1)
aggagagucccgcagucggcguccagcggcucugcuuguucgugugugugucguugcaggccuuauucaagcuuaccaugggccagaucaucaccuucuuccaggaggugccccacgucaucgaggaggugaugaacaucgugcugaucgcccucagccugcuggccauccucaaggggaucuacaacgucgcgaccugcggccuguucgggcugguguccuuccuccugcugugcggccgcagcugcuccacgaccuacaaggggguguacgagcuccagacccuggagcuggacauggccagccucaacaugugcaugccgcuguccugcacgaagaacaacagccaccacuacaucauggucggcaacgagaccggccuggagcucacccugaccaacacguccaucaucaaccacaaguucugcaaccugagcgacgcccacaagaagaaccucuacgaccacgcccugauguccaucaucagcaccuuccaccuguccauccccaacuucaaccaguacgaggccaugagcugcgacuucaacgggggcaagaucuccgugcaguacaaccucagccacaccuacgcgguggacgccgccaaccacugcgggaccaucgccaacggcguccugcagacguucaugcggauggcguggggcggguccuacaucgcccuggacagcggcaagggguccugggacugcaucaugaccagcuaccaguaccucaucauccagaacaccaccugggaggaccacugccaguucucccgccccagccccaucggcuaccuggggcugcucagccagcggacgcgcgacaucuacaucucccggcgccgccggggcaccuucaccuggacccucagcgacuccgagggcaacgagacgcccgggggcuacugccugacccgguggaugcugaucgaggccgagcucaagugcuucgggaacaccgccguggccaagugcaacgagaagcacgacgaggaguucugcgacaugcugcgccuguucgacuucugcaagcaggcgaucaagcggcucaagacccccgcccagaugagcauccagcugaucaacaaggccgugaacgcccugaucaacgaccagcucaucaugaagaaccaccuccgcgacaucaugggcauccccuacugcaacuacuccaaguacugcuaccugaaccacacggucaccgggaagaccagccugccccggugcugccugguguccaacggcagcuaccugaacgagacccacuucuccgacgacaucgagcagcaggccgacaacaugaucacggagcuccugcagaaggaguacaucgaccgccagggcaagaccccgcuggggcucguggaccuguucgucuucagcaccuccuucuaccugaucagcaucuuccugcaccucgugaagaucccgacccaccggcacguggucggcaagcccugccccaagccccaccgccugaaccacauggggaucugcuccugcggccuguacaagcacccgggggugcccgugaaguggaagcggugaggacuagucccuguucccagagcccacuuuuuuuucuuuuuuugaaauaaaauagccugucuuucagaucuaaaaaaaaaaaaaaaaaaaaaaaaaaaaaaaaaaaaaaaaaaaaaaaaaaaaaaaaaaaaaaaaaaaaaaaaaaaaaaaaaaaaaaaaaaaaaaaaaaaa

SEQ ID NO: 26774 - RNA, 1721 nt, Artificial Sequence
  mRNA product Design a-1 (A100) comprising derived and/or modified sequence from LASV(LASV221-NIG-2010;Clade II)__AIT17624__GPCmut4 (opt1)
aggagagucccgcagucggcguccagcggcucugcuuguucgugugugugucguugcaggccuuauucaagcuuaccaugggccagaucaucaccuucuuccaggaggugccccacgucaucgaggaggugaugaacaucgugcugaucgcccucagccugcuggccauccucaaggggaucuacaacgucgcgaccugcggccuguucgggcugguguccuuccuccugcugugcggccgcagcugcuccacgaccuacaaggggguguacgagcuccagacccuggagcuggacauggccagccucaacaugugcaugccgcuguccugcacgaagaacaacagccaccacuacaucauggucggcaacgagaccggccuggagcucacccugaccaacacguccaucaucaaccacaaguucugcaaccugagcgacgcccacaagaagaaccucuacgaccacgcccugauguccaucaucagcaccuuccaccuguccauccccaacuucaaccaguacgaggccaugagcugcgacuucaacgggggcaagaucuccgugcaguacaaccucagccacaccuacgcgaucgacgccgccaaccacugcgggaccaucgccaacggcgugcugcagacguucaugcggauggcguggggcggguccuacaucgcccuggacagcggcaagggguccugggacugcaucaugaccagcuaccaguaccucaucauccagaacaccaccugggaggaccacugccaguucucccgccccagccccaucggcuaccuggggcugcucagccagcggacgcgcgacaucuacaucucccggcgccgccggggcaccuucaccuggacccucagcgacuccgagggcaacgagacgcccgggggcuacugccugacccgguggaugcugaucgaggccgagcucaagugcuucgggaacaccgccgucgccaagugcaacgagaagcacgacgaggaguucugcgacaugcugcgccuguucgacuucugcaagcaggcgauccggcgccucaagacccccgcccagaugagcauccagcugaucaacaaggccgugaacgcccugaucaacgaccagcucaucaugaagaaccaccuccgggacaucaugggcauccccuacugcaacuacuccaaguacugcuaccugaaccacacggugaccgggaagaccagccugccccgcugcugccuggucuccaacggcagcuaccugaacgagacccacuucuccgacgacaucgagcagcaggccgacaacaugaucacggagaugcuccagaaggaguacauggaccggcagggcaagaccccgcuggggcugguggaccucuucguguucagcaccuccuucuaccugaucagcaucuuccugcaccuggucaagaucccgacccaccgccacgugaucggcaagcccugccccaagccccaccggcucaaccacauggggaucugcuccugcggccuguacaagcacccgggggugcccgucaaguggaagcgcugaggacuagucccuguucccagagcccacuuuuuuuucuuuuuuugaaauaaaauagccugucuuucagaucuaaaaaaaaaaaaaaaaaaaaaaaaaaaaaaaaaaaaaaaaaaaaaaaaaaaaaaaaaaaaaaaaaaaaaaaaaaaaaaaaaaaaaaaaaaaaaaaaaaaa

SEQ ID NO: 26775 - RNA, 1721 nt, Artificial Sequence
  mRNA product Design a-1 (A100) comprising derived and/or modified sequence from LASV(LASV237-NIG-2010;Clade II)__AIT17638__GPCmut4 (opt1)
aggagagucccgcagucggcguccagcggcucugcuuguucgugugugugucguugcaggccuuauucaagcuuaccaugggccagaucaucaccuucuuccaggaggugccccacgucaucgaggaggugaugaacaucgugcugaucgcccucagccugcuggccauccucaaggggaucuacaacgucgcgaccugcggccuguucgggcugguguccuuccuccugcugugcggccgcagcugcuccacgaccuacaaggggguguacgagcuccagacccuggagcuggacauggccagccucaacaugugcaugccgcuguccugcacgaagaacaacagccaccacuacaucauggucggcaacgagaccggccuggagcucacccugaccaacacguccaucaucaaccacaaguucugcaaccugagcgacgcccacaagaaggaccucuacgaccacgcccugauguccaucaucagcaccuuccaccuguccauccccaacuucaaccaguacgaggccaugagcugcgacuucaacgggggcaagaucuccgugcaguacaaccucagccacaccuacgcgguggacgccgccaaccacugcgggaccaucgccaacggcguccugcagacguucaugcggauggcguggggcggguccuacaucgcccuggacagcggcaagggguccugggacugcaucaugaccagcuaccaguaccucaucauccagaacaccaccugggaggaccacugccaguucucccgccccagccccaucggcuaccuggggcugcucagccagcggacgcgcgacaucuacaucucccggcgccgccggggcaccuucaccuggacccucagcgacuccgagggcaacgagacgcccgggggcuacugccugacccgguggaugcugaucgaggccgagcucaagugcuucgggaacaccgccguggccaagugcaacgagaagcacgacgaggaguucugcgacaugcugcgccuguucgacuucugcaagcaggcgauccggcgccucaagacccccgcccagaugagcauccagcugaucaacaaggccgugaacgcccugaucaacgaccagcucaucaugaagaaccaccuccgggacaucaugggcauccccuacugcaacuacuccaaguacugcuaccugaaccacacggucaccgggaagaccagccugccccgcugcugccugguguccaacggcagcuaccugaacgagacccacuucuccgacgacaucgagcagcaggccgacaacaugaucacggagcuccugcagaaggaguacauggaccggcagggcaagaccccgcuggggcucguggaccuguucgucuucagcaccuccuucuaccugaucagcaucuuccugcaccucaucaagaucccgacccaccgccacaucacgggcaagcccugccccaagccccaccggcugaaccacauggggaucugcuccugcggccuguacaagcacccgggggugcccgugaaguggaagcgcugaggacuagucccuguucccagagcccacuuuuuuuucuuuuuuugaaauaaaauagccugucuuucagaucuaaaaaaaaaaaaaaaaaaaaaaaaaaaaaaaaaaaaaaaaaaaaaaaaaaaaaaaaaaaaaaaaaaaaaaaaaaaaaaaaaaaaaaaaaaaaaaaaaaaa

SEQ ID NO: 26776 - RNA, 1721 nt, Artificial Sequence
  mRNA product Design a-1 (A100) comprising derived and/or modified sequence from LASV(LASV253-NIG-2011;Clade II)__AIT17670__GPCmut4 (opt1)
aggagagucccgcagucggcguccagcggcucugcuuguucgugugugugucguugcaggccuuauucaagcuuaccaugggccagaucaucaccuucuuccaggaggugccccacgucaucgaggaggugaugaacaucgugcugaucgcccucagccugcuggccauccucaaggggaucuacaacgucgcgaccugcggccuguucgggcugguguccuuccuccugcugugcggccgcagcugcuccacgaccuacaaggggguguacgagcuccagacccuggagcuggacauggccagccucaacaugugcaugccgcuguccugcacgaagaacaacagccaccacuacaucauggucggcaacgagaccggccuggagcucacccugaccaacacguccaucaucaaccacaaguucugcaaccugagcgacgcccacaagaagaaccucuacgaccacgcccugauguccaucaucagcaccuuccaccuguccauccccaacuucaaccaguacgaggccaugagcugcgacuucaacgggggcaagaucuccgugcaguacaaccucagccacaccuacgcgguggacgccgccaaccacugcgggaccaucgccaacggcguccugcagacguucaugcggauggcguggggcggguccuacaucgcccuggacagcggcaagggguccugggacugcaucaugaccagcuaccaguaccucaucauccagaacaccaccugggaggaccacugccaguucucccgccccagccccaucggcuaccuggggcugcucagccagcggacgcgcgacaucuacaucucccggcgccgccggggcaccuucaccuggacccucagcgacuccgagggcaacgagacgcccgggggcuacugccugacccgguggaugcugaucgaggccgagcucaagugcuucgggaacaccgccguggccaagugcaacgagaagcacgacgaggaguucugcgacaugcugcgccuguucgacuucugcaagcaggcgauccggcgccucaaggcccccgcccagaugagcauccagcugaucaacaaggccgugaacgcccugaucaacgaccagcucaucaugaagaaccaccuccgggacaucaugggcaucccguacugcaacuacuccaaguacugcuaccugaaccacaccgucacggggcgcaccagccugccccggugcugccugguguccaacggcagcuaccugaacgagacccacuucuccgacgacaucgagcagcaggcggacaacaugaucaccgagcuccugcagaaggaguacaucgaccgccagggcaagacgccccuggggcucguggaccuguucgucuucagcaccuccuucuaccugaucagcaucuuccugcaccucgugaagaucccgacccaccggcacaucaucggcaagcccugccccaagccccaccgccugaaccacauggggaucugcuccugcggccuguacaagcacccgggggugcccgucaaguggaagcggugaggacuagucccuguucccagagcccacuuuuuuuucuuuuuuugaaauaaaauagccugucuuucagaucuaaaaaaaaaaaaaaaaaaaaaaaaaaaaaaaaaaaaaaaaaaaaaaaaaaaaaaaaaaaaaaaaaaaaaaaaaaaaaaaaaaaaaaaaaaaaaaaaaaaa

SEQ ID NO: 26777 - RNA, 1721 nt, Artificial Sequence
  mRNA product Design a-1 (A100) comprising derived and/or modified sequence from LASV(LASV254-NIG-2011;Clade II)__AIT17674__GPCmut4 (opt1)
aggagagucccgcagucggcguccagcggcucugcuuguucgugugugugucguugcaggccuuauucaagcuuaccaugggccagaucaucaccuucuuccaggaggugccccacgucaucgaggaggugaugaacaucgugcugaucgcccucagccugcuggccauccucaaggggaucuacaacgucgcgaccugcggccuguucgggcugguguccuuccuccugcugugcggccgcagcugcuccacgaccuacaaggggguguacgagcuccagacccuggagcuggacaugaccaaccucaacaugugcaugccgcugagcugcaccaagaacaacucccaccacuacaucauggucggcaacgagaccggccuggagcucacccugacgaacaccagcaucaucaaccacaaguucugcaaccuguccgacgcccacaagaagaaccucuacaaccacgcccugaugagcaucaucuccaccuuccaccugagcauccccaacuucaaccaguacgaggccauguccugcgacuucaacgggggcaagaucagcgugcaguacaaccucucccacagcuacgccguggacgcggccaaccacugcgggaccaucgccaacggcguccugcagacguucaugcggauggccuggggcggguccuacaucgcgcuggacagcggcaaggggaacugggacugcaucaugaccuccuaccaguaccucaucauccagaacaccaccugggaggaccacugccaguucagccgccccucccccaucggcuaccuggggcugcucagccagcggacgcgcgacaucuacaucagccggcgccgccggggcaccuucaccuggacccucuccgacagcgagggcaacgagacgcccgggggcuacugccugacccgguggaugcugaucgaggccgagcucaagugcuucgggaacaccgccguggccaagugcaacgagaagcacgacgaggaguucugcgacaugcugcgccuguucgacuucugcaagcaggccauccggcgccucaagacccccgcgcaggccaacauccagcugaucaacaaggccgugaacgcccugaucaacgaccagcucaucaugaagaaccaccuccgggacaucaugggcauccccuacugcaacuacuccaaguacugcuaccugaaccacacggucaccgggaagaccagccugccccgcugcugccugguguccaacggcagcuaccugaacgagacccacuucuccgacgacaucgagcagcaggccgacaacaugaucacggagcuccugcagaaggaguacauggaccggcagggcaagaccccgcuggggcucguggaccuguucgucuucagcaccuccuucuaccugaucagcaucuuccugcaccucgugaagaucccgacccaccgccacgugaucggcaagcccugccccaagccccaccggcugaaccacauggggaucugcuccugcggccuguacaagcacccggggguccccgugaaguggaagcgcugaggacuagucccuguucccagagcccacuuuuuuuucuuuuuuugaaauaaaauagccugucuuucagaucuaaaaaaaaaaaaaaaaaaaaaaaaaaaaaaaaaaaaaaaaaaaaaaaaaaaaaaaaaaaaaaaaaaaaaaaaaaaaaaaaaaaaaaaaaaaaaaaaaaaa

SEQ ID NO: 26778 - RNA, 1721 nt, Artificial Sequence
  mRNA product Design a-1 (A100) comprising derived and/or modified sequence from LASV(Nig08-A19;Clade III)__ADU56618__GPCmut4 (opt1)
aggagagucccgcagucggcguccagcggcucugcuuguucgugugugugucguugcaggccuuauucaagcuuaccaugggccagaucgugaccuucuuccaggaggucccccacgugaucgaggaggugaugaacaucguccugaucgcccucagcauccuggccauccugaaggggcucuacaacaucgcgaccugcggccugaucgggcuggugacguuccuccugcuguccggccgcagcugcuccaugaccuacaaggggguguacgagcuccagacccuggagcugaacaugaacacccucaacaugugcaugccgcugagcugcaccaagaacaacucccaccacuacaucauggucggcaacgagaccggccuggagcucacccugacgaacaccagccugcuccaccacaaguucugcaaccuguccgacgcccacaagaagaaccuguacgaccacacccucaugagcaucaucuccaccuuccaccugagcauccccaacuucaaccaguacgaggccauguccugcgacuucaacgggggcaagaucacggugcaguacaaccugagccacuccuacgccaucgacgccgcgaaccacugcgggaccguggccaacggcguccuccagaccuucaugcggauggccuggggcgggagcuacaucgcccuggacuccggccgcgggaagugggacugcaucaugaccagcuaccaguaccugaucauccagaacacgaccugggaggaccacugccaguucucccggcccagccccaucggcuaccucgggcugcugucccagcgcacccgggacaucuacaucagccgccggcgccggggcaccuucacguggacccugagcgacuccgagggcaacgagacccccgggggcuacugccucacccgcuggaugcugaucgaggcggagcugaagugcuucgggaacacggccguggccaagugcaacgagaagcacgacgaggaguucugcgacaugcuccggcuguucgacuucugcaagcaggccauccgccggcugaaggcccccgcgcagaugagcauccagcucaucaacaaggccgugaacgcccugaucaacgaccagcugaucaugaagaaccaccuccgcgacaucaugggcauccccuacugcaacuacuccaaguacugcuaccugaaccacaccagcaccgggcggaccucccugccccgcugcugccucgucagcaacggcuccuaccugaacgagacgcacuucagcgacgacaucgagcagcaggccgacaacaugaucaccgagaugcugcagaaggaguaccucgaccggcagggcaagaccccgcuggggcugguggaccuguucguguucuccaccagcuucuaccucaucuccaucuuccugcaccuggucaagaucccgacgcaccgccacaucgugggcaagcccugccccaagccccaccggcucaaccacauggggaucugcagcugcggccuguacaagcagccgggggugcccguccgcuggaagcggugaggacuagucccuguucccagagcccacuuuuuuuucuuuuuuugaaauaaaauagccugucuuucagaucuaaaaaaaaaaaaaaaaaaaaaaaaaaaaaaaaaaaaaaaaaaaaaaaaaaaaaaaaaaaaaaaaaaaaaaaaaaaaaaaaaaaaaaaaaaaaaaaaaaaa

SEQ ID NO: 26779 - RNA, 1724 nt, Artificial Sequence
  mRNA product Design a-1 (A100) comprising derived and/or modified sequence from LASV(G1180-SLE-2010;Clade IV)__AIT17168__GPCmut4 (opt1)
aggagagucccgcagucggcguccagcggcucugcuuguucgugugugugucguugcaggccuuauucaagcuuaccaugggccagaucgugaccuucuuccaggaggucccccacgugaucgaggaggugaugaacaucguccugaucgcccucagcauccuggccgugcugaaggggcucuacaacuucgcgaccugcggccugguggggcugcucaccuuccugcugcucugcggccgcuccugcaccgccagccgguacaagggggucuacgagcugcagacccuggagcucaacauggagacccugaacaugugcaugccgcuguccugcaccaagaacaacagccaccacuacaucauggugggcaacgagaccggccucgagcugacccugacgaacaccuccaucaucaaccacaaguucugcaaccucagcgacgcccacaagaagaaccuguacgaccacgcccugauguccaucaucagcaccuuccaccucuccauccccaacuucaaccaguacgaggccaugagcugcgacuucaacgggggcaagaucuccgugcaguacaaccugagccacuccuacgcgggggacgccgccaaccacugcggcaccgucgccaacggggugcugcagacguucaugcgcauggcguggggcggcagcuacaucgcccucgacuccgggcacggcagcugggacugcaucaugaccuccuaccaguaccugaucauccagaacaccaccugggaggaccacugccaguucagccggcccucccccaucggguaccugggccuccugagccagcgcacgcgggacaucuacaucagccgccggcgccggggcaccuucaccuggacccuguccgacagcgaggggaaggacacgccgggcggguacugccugacccgcuggaugcucaucgaggccgagcugaagugcuucggcaacaccgccguggccaagugcaacgagaagcacgacgaggaguucugcgacaugcugcggcuguucgacuucugcaagcaggcgauccagcgccugaaggcccccgcccagauguccauccagcugaucaacaaggccgucaacgcccucaucaacgaccagcugaucaugaagaaccaccuccgggacaucauggggauccccuacugcaacuacagcaaguacugcuaccucaaccacaccacgaccggcaagaccucccugcccaagugcugccuggugagcaacggcuccuaccucaacgagacccacuucagcgacgacaucgagcagcaggcggacaacaugaucacggagaugcugcagaaggaguacauggagcgccaggggaagacgccccugggccucguggaccuguucgucuucuccaccagcuucuaccugaucuccaucuuccugcaccucgugaagaucccgacccaccggcacaucgugggcaagagcugccccaagccccaccgccugaaccacauggggaucugcuccugcgggcuguacaagcagcccggcgucccggugaaguggaagcggugaggacuagucccuguucccagagcccacuuuuuuuucuuuuuuugaaauaaaauagccugucuuucagaucuaaaaaaaaaaaaaaaaaaaaaaaaaaaaaaaaaaaaaaaaaaaaaaaaaaaaaaaaaaaaaaaaaaaaaaaaaaaaaaaaaaaaaaaaaaaaaaaaaaaa

SEQ ID NO: 26780 - RNA, 1724 nt, Artificial Sequence
  mRNA product Design a-1 (A100) comprising derived and/or modified sequence from LASV(G1442-SLE-2011;Clade IV)__AIT17180__GPCmut4 (opt1)
aggagagucccgcagucggcguccagcggcucugcuuguucgugugugugucguugcaggccuuauucaagcuuaccaugggccagaucgugaccuucuuccaggaggucccccacgugaucgaggaggugaugaacaucguccugaucgcccucagcauccuggccgugcugaaggggcucuacaacguggcgaccugcggccugaucgggcuggucacguuccuccugcugugcggccgcuccugcaccaccacccucuacaaggggguguacgagcugcagacgcuggagcucaacauggagacccugaacaugugcaugccgcugagcugcaccaagaacaacucccaccacuacauccgggugggcaacgagacgggccucgagcugacccugaccaacaccagcaucaucaaccacaaguucugcaaccucuccgacgcccacaagaagaaccuguacgaccacgcccugaugagcaucaucuccacguuccaccucagcauccccaacuucaaccaguacgaggccauguccugcgacuucaacgggggcaagaucagcguccaguacaaccugucccacagcuacgccggggacgcggccaaccacugcggcaccguggccaacggggugcugcagaccuucaugcgcauggccuggggcggcuccuacaucgcgcucgacagcgggcggggcaacugggacugcaucaugaccuccuaccaguaccugaucauccagaacacgaccugggacgaccacugccaguucagccgccccucccccaucggguaccugggccuccugagccagcggacccgcgacgucuacaucucccggcgccgccggggcaccuucacguggacccugagcgacagcgaggggaaggacaccccgggcggguacugccugacccgguggaugcucaucgaggccgagcugaagugcuucggcaacacggccguggccaagugcaacgagaagcacgacgaggaguucugcgacaugcugcgccucuucgacuucugcaagcaggccauccagcggcugaaggcgcccgcccagauguccauccagcugaucaacaaggccgugaacgcccucaucaacgaccagcugaucaugaagaaccaccuccgcgacaucauggggauccccuacugcaacuacagcaaguacugcuaccugaacaacaccgccaccggcaagaccucccugcccaagugcugccugaucagcaacggcuccuaccucaacgagacgcacuucagcgacgacaucgagcaggaggcggacaacaugaucaccgagaugcugcagaaggaguacauggagcggcaggggaagacgccccugggccucgucgaccuguucguguucuccaccagcuucuaccugaucuccaucuuccugcaccucgugaagaucccgacccaccgccacaucgucggcaagagcugccccaagccccaccggcugaaccacauggggaucugcuccugcgggcuguacaagcagcccggcgugccggugcgcuggaagcggugaggacuagucccuguucccagagcccacuuuuuuuucuuuuuuugaaauaaaauagccugucuuucagaucuaaaaaaaaaaaaaaaaaaaaaaaaaaaaaaaaaaaaaaaaaaaaaaaaaaaaaaaaaaaaaaaaaaaaaaaaaaaaaaaaaaaaaaaaaaaaaaaaaaaa

SEQ ID NO: 26781 - RNA, 1724 nt, Artificial Sequence
  mRNA product Design a-1 (A100) comprising derived and/or modified sequence from LASV(G3010-SLE-2013;Clade IV)__AIT17344__GPCmut4 (opt1)
aggagagucccgcagucggcguccagcggcucugcuuguucgugugugugucguugcaggccuuauucaagcuuaccaugggccagaucgugaccuucuuccaggaggucccccacgugaucgaggaggugaugaacaucguccugaucgcccucagcauccuggccgugcugaaggggcucuacaacuucgcgaccugcggccugguggggcuggucacguuccuccugcugugcggccgcuccugcaccaccagccucuacaaggggguguacgagcugcagacccuggagcucaacauggagacgcugaacaugugcaugccgcuguccugcaccaagaacaacagccaccacuacaucauggugggcaacgagaccggccucgagcugacgcugaccaacaccuccaucaucaaccacaaguucugcaaccucagcgacgcccacaagaagaaccuguacaaccacgcccugauguccaucaucagcaccuuccaccucuccauccccaacuucaaccaguacgaggccaugagcugcgacuucaacgggggcaagaucuccguccaguacaaccugagccacuccuacgccggggacgcggccagccacugcggcacgguggccaacggggugcugcagaccuucaugcggauggccuggggcggcuccuacaucgcgcucgacagcggguacggcaagugggacugcaucaugaccuccuaccaguaccugaucauccagaacaccacgugggaggaccacugccaguucagccgccccucccccaucggguaccugggccuccugagccagcggacccgcgacaucuacaucagccggcgccgccggggcaccuucaccuggacgcuguccgacagcgaggggaaggacaccccgggcggguacugccugacccgguggaugcucaucgaggccgagcugaagugcuucggcaacaccgccgucgccaagugcaacgagaagcacgacgaggaguucugcgacaugcugcgccucuucgacuucugcaagcaggccauccagcggcugaagacgcccgcgcagauguccauccagcugaucaacaaggccgugaacgcccucaucaacgaccagcugaucaugaagaaccaccuccgcgacaucauggggauccccuacugcaacuacagcaaguacugcuaccugaaccacaccaccaccggcaagacgucccugcccaagugcugccuggugagcaacggcuccuaccucaacgagacccacuucagcgacgacaucgagcagcaggccgacaacaugaucaccgagaugcugcagaaggaguacauggagcggcaggggaagacgccccugggccucgucgaccuguucguguucuccaccagcuucuaccugaucuccaucuuccugcaccucgugaagaucccgacccaccgccacaucgucggcaagagcugccccaagccccaccggcugaaccacauggggaucugcuccugcgggcuguacaagcagcccggcgugccggugcgcuggaagcggugaggacuagucccuguucccagagcccacuuuuuuuucuuuuuuugaaauaaaauagccugucuuucagaucuaaaaaaaaaaaaaaaaaaaaaaaaaaaaaaaaaaaaaaaaaaaaaaaaaaaaaaaaaaaaaaaaaaaaaaaaaaaaaaaaaaaaaaaaaaaaaaaaaaaa

SEQ ID NO: 26782 - RNA, 1724 nt, Artificial Sequence
  mRNA product Design a-1 (A100) comprising derived and/or modified sequence from LASV(G502-SLE-2009;Clade IV)__AIT17126__GPCmut4 (opt1)
aggagagucccgcagucggcguccagcggcucugcuuguucgugugugugucguugcaggccuuauucaagcuuaccaugggccagaucgugaccuucuuccaggaggucccccacgugaucgaggaggugaugaacaucguccugaucgcccucagcauccuggccgugcugaaggggcucuacaacuucgcgaccugcggccugguggggcugcucacguuccugcugcucugcggccgcuccugcaccaccgggcuguacaagggcgucuacgagcugcagacccucgagcugaacauggagacgcugaacaugugcaugccgcucagcugcaccaagaacaacucccaccacuacaucauggugggcaacgagaccgggcuggagcugacgcucaccaacaccagcaucaucaaccacaaguucugcaaccuguccgacgcccacaagaagaaccuguacgaccacgcccucaugagcaucaucuccaccuuccaccugagcauccccaacuucaaccaguacgaggccauguccugcgacuucaacggcgggaagaucagcgugcaguacaaccugucccacagcuacgccggcgacgcggccgaccacugcgggacggucgccaacggcgugcuccagaccuucaugcggauggccuggggcggguccuacaucgcgcuggacagcggccgcgggcggugggacugcaucaugaccuccuaccaguaccugaucauccagaacaccacgugggaggaccacugccaguucagccgccccucccccaucggcuaccucggccugcugagccagcggacccgcgacaucuacaucucccggcgccgccgggggaccuucaccuggacgcugagcgacagcgagggcaaggacacccccgggggcuacugccucacccgguggaugcugaucgaggccgagcugaagugcuucgggaacaccgccguggccaagugcaacgagaagcacgacgaggaguucugcgacaugcuccgccuguucgacuucugcaagcaggccauccagcggcugaaggcgcccgcccagauguccauccagcucaucaacaaggccgucaacgcccugaucaacgaccagcuggugaugaagaaccaccuccgcgacaucaugggcauccccuacugcaacuacagccgguacugcuaccugaaccacacgaccaccggccgcaccucccugcccaagugcugccucgugagcaacggguccuaccugaacgagacgcacuucagcgacgacaucgagcagcaggccgacaacaugaucaccgagaugcugcagaaggaguacauggagcggcagggcaagaccccgcucgggcuggucgaccuguucguguucuccaccagcuucuaccugaucuccaucuuccuccaccuggugaagaucccgacgcaccgccacaucgucggcaagagcugccccaagccccaccggcugaaccacauggggaucugcuccugcggccucuacaagcagcccggcgugccggugaaguggaagcgcugaggacuagucccuguucccagagcccacuuuuuuuucuuuuuuugaaauaaaauagccugucuuucagaucuaaaaaaaaaaaaaaaaaaaaaaaaaaaaaaaaaaaaaaaaaaaaaaaaaaaaaaaaaaaaaaaaaaaaaaaaaaaaaaaaaaaaaaaaaaaaaaaaaaaa

SEQ ID NO: 26783 - RNA, 1724 nt, Artificial Sequence
  mRNA product Design a-1 (A100) comprising derived and/or modified sequence from LASV(G733-SLE-2010;Clade IV)__AIT17154__GPCmut4 (opt1)
aggagagucccgcagucggcguccagcggcucugcuuguucgugugugugucguugcaggccuuauucaagcuuaccaugggccagaucgugaccuucuuccaggaggucccccacgugaucgaggaggugaugaacaucguccugaucgcccucagcauccuggccgugcugaaggggcucuacaacuucgcgaccugcggcaucguggggcuggucuccuuccugcuccugugcggccgcagcugcacgaccucccuguacaaggggguguacgagcuccagacccuggagcugaacauggagacccucaacaugugcaugccgcugagcugcaccaagaacaacucccaccacuacaucauggugggcaacgagaccggccuggagcucacccugacgaacaccagcaucaucaaccacaaguucugcaaccuguccgacgcccacaagaagaaccucuacgaccacgcccugaugagcaucaucuccaccuuccaccugagcauccccaacuucaaccaguacgaggccauguccugcgacuucaacgggggcaagaucagcguccaguacaaccucucccacagcuacgccggggacgcggccaaccacugcggcaccaucgccaacggggugcugcagacguucaugcggauggccuggggcggcuccuacaucgcgcuggacagcgggcgcgaccggugggacugcaucaugaccuccuaccaguaccucaucauccagaacaccaccugggaggaccacugccaguucagccgccccucccccaucggcuaccuggggcugcucagccagcggacgcgcgacaucuacaucagccggcgccgccggggcaccuucaccuggacccucuccgacagcgagggcaaggacacgcccgggggcuacugccugacccgguggaugcugaucgaggccgagcucaagugcuucgggaacaccgccguggccaagugcaacgagaagcacgacgaggaguucugcgacaugcugcgccuguucgacuucugcaagcaggccauccagcggcucaaggcgcccgcccagauguccauccagcugaucaacaaggccgucaacgcccugaucaacgaccagcucaucaugaagaaccaccuccgcgacaucaugggcauccccuacugcaacuacagcaaguacugcuaccugaaccacaccacgaccgggaagaccucccugcccaagugcugccuggugagcaacggcuccuaccugaacgagacccacuucagcgacgacaucgagcagcaggccgacaacaugaucacggagaugcuccagaaggaguacauggagcggcagggcaagaccccgcuggggcugguggaccucuucgucuucuccaccagcuucuaccugaucuccaucuuccugcaccuggugaagaucccgacccaccgccacguggucggcaagagcugccccaagccccaccggcucaaccacauggggaucugcuccugcggccuguacgggcagcccggcgugccggugaaguggaagcgcugaggacuagucccuguucccagagcccacuuuuuuuucuuuuuuugaaauaaaauagccugucuuucagaucuaaaaaaaaaaaaaaaaaaaaaaaaaaaaaaaaaaaaaaaaaaaaaaaaaaaaaaaaaaaaaaaaaaaaaaaaaaaaaaaaaaaaaaaaaaaaaaaaaaaa

SEQ ID NO: 26784 - RNA, 1724 nt, Artificial Sequence
  mRNA product Design a-1 (A100) comprising derived and/or modified sequence from MOPV/LASV reassortant(IGS-1;Clade IV)__AFY05576__GPCmut4 (opt1)
aggagagucccgcagucggcguccagcggcucugcuuguucgugugugugucguugcaggccuuauucaagcuuaccaugggccagaucgugaccuucuuccaggaggucccccacgugaucgaggaggugaugaacaucguccugaucgcccucagcgugcuggccgugcugaaggggcucuacaacuucgcgaccugcggccuggucgggcuggugacguuccuccugcugugcggccgcuccugcaccaccagccucuacaaggggguguacgagcugcagacccuggagcucaacauggagacgcugaacaugugcaugccgcuguccugcaccaagaacaacagccaccacuacaucauggucggcaacgagaccggccucgagcugacgcugaccaacaccuccaucaucaaccacaaguucugcaaccucagcgacgcccacaagaagaaccuguacgaccacgcccugauguccaucaucagcaccuuccaccucuccauccccaacuucaaccaguacgaggccaugagcugcgacuucaacgggggcaagaucuccgugcaguacaaccugagccacuccuacgccggggacgcggccaaccacugcggcacgguggccaacgggguccugcagaccuucaugcggauggccuggggcggcagcuacaucgcgcucgacuccgggcgcggcaacugggacugcaucaugaccagcuaccaguaccugaucauccagaacaccacgugggaggaccacugccaguucucccggcccagccccaucggguaccugggccuccugucccagcgcacccgggacaucuacaucagccgccggcgccggggcaccuucaccuggacgcugagcgacuccgagggggaggacaccccgggcggguacugccugacccgcuggaugcucaucgaggccgagcugaagugcuucggcaacaccgccguggccaagugcaacgagaagcacgacgaggaguucugcgacaugcugcggcuguucgacuucugcaagcaggccauccagcgccugaaggcgcccgcccagaugagcauccagcugaucaacaaggccgugaacgcccucaucaacgaccagcugaucaugaagaaccaccuccgggacaucauggggauccccuacugcaacuacuccaaguacugcuaccucaaccacacgaccaccggccgcaccagccugcccaagugcugccuggucuccaacggcagcuaccucaacgagacgcacuucuccgacgacaucgagcagcaggccgacaacaugaucaccgagaugcugcagaaggaguacauggagcggcaggggaagacgccccugggccucguggaccuguucguguucagcaccuccuucuaccugaucagcaucuuccugcaccucgucaagaucccgacccaccgccacaucguggggaaguccugccccaagccccaccggcugaaccacaugggcaucugcagcugcgggcuguacaagcagcccggcgugccggucaaguggaagcgcugaggacuagucccuguucccagagcccacuuuuuuuucuuuuuuugaaauaaaauagccugucuuucagaucuaaaaaaaaaaaaaaaaaaaaaaaaaaaaaaaaaaaaaaaaaaaaaaaaaaaaaaaaaaaaaaaaaaaaaaaaaaaaaaaaaaaaaaaaaaaaaaaaaaaa

SEQ ID NO: 26785 - RNA, 1724 nt, Artificial Sequence
  mRNA product Design a-1 (A100) comprising derived and/or modified sequence from LASV(LM765-SLE-2012;Clade IV)__AIT17814__GPCmut4 (opt1)
aggagagucccgcagucggcguccagcggcucugcuuguucgugugugugucguugcaggccuuauucaagcuuaccaugggccagaucgugaccuucuuccaggaggucccccacgugaucgaggaggugaugaacaucguccugaucgcccucagcauccuggccgugcugaaggggcucuacaacuucgcgaccugcggccugguggggcuggucacguuccuccugcugugcggccgcuccugcaccaccagccucuacaaggggguguacgagcugcagacccuggagcucaacauggagacgcugaacaugugcaugccgcuguccugcaccaagaacaacagccaccacuacaucauggugggcaacgagaccggccucgagcugacgcugaccaacaccuccaucaucgaccacaaguucugcaaccucagcgacgcccaccggaagaaccuguacgaccacgcccugauguccaucaucagcaccuuccaccucuccauccccaacuucaaccaguacgaggccaugagcugcgacuucaacgggggcaagaucuccguccaguacaaccugagccacuccuacgccaaggacgcggccgaccacugcgggacgguggccaacggcgugcugcagaccuucaugcgcauggccuggggcgggagcuacaucgcgcucgacuccggccgggggcgcugggacugcaucaugaccagcuaccaguaccugaucauccagaacaccacgugggaggaccacugccaguucucccggcccagccccaucggcuaccuggggcuccugucccagcgcacccgggacaucuacaucagccgccggcgccggggcaccuucaccuggacgcugagcgacuccgagggcaaggacacccccgggggcuacugccugacccgcuggaugcucaucgaggccgagcugaagugcuucgggaacaccgccgucgccaagugcaacgagaagcacgacgaggaguucugcgacaugcugcggcuguucgacuucugcaagcaggccauccagcgccugaaggcgcccgcccagaugagcauccagcugaucaacaaggccgugaacgcccucaucaacgaccagcugaucaugaagaaccaccuccgggacaucaugggcauccccuacugcaacuacuccaaguacugcuaccucaaccacacgaccaccgggaagaccagccugcccaagugcugccugguguccaacggcagcuaccucaacgagacgcacuucuccgacgacaucgagcagcaggccgacaacaugaucaccgagaugcugcagaaggaguacauggagcgccagggcaagaccccgcuggggcucgucgaccuguucguguucagcaccuccuucuaccugaucagcaucuuccugcaccucgugaagaucccgacgcaccggcacaucgucggcaagcccugccccaagccccaccgccugaaccacauggggaucugcuccugcggccuguacaagcagccgggggugcccgugaaguggaagcggugaggacuagucccuguucccagagcccacuuuuuuuucuuuuuuugaaauaaaauagccugucuuucagaucuaaaaaaaaaaaaaaaaaaaaaaaaaaaaaaaaaaaaaaaaaaaaaaaaaaaaaaaaaaaaaaaaaaaaaaaaaaaaaaaaaaaaaaaaaaaaaaaaaaaa

SEQ ID NO: 26786 - RNA, 1724 nt, Artificial Sequence
  mRNA product Design a-1 (A100) comprising derived and/or modified sequence from LASV(LM776-SLE-2012;Clade IV)__AIT17824__GPCmut4 (opt1)
aggagagucccgcagucggcguccagcggcucugcuuguucgugugugugucguugcaggccuuauucaagcuuaccaugggccagaucgugaccuucuuccaggaggucccccacgugaucgaggaggugaugaacaucguccugaucgcccucagcauccuggccgugcugaaggggcucuacaacuucgcgaccugcggccugguggggcuggucacguuccuccugcugugcggccgcuccugcaccaccagcguguacaaggggguguacgagcuccagacccuggagcugaacauggagacgcucaacaugugcaugccgcuguccugcaccaagaacaacagccaccacuacaucauggucggcaacgagaccggccuggagcucacgcugaccaacaccuccaucaucaaccacaaguucugcaaccugagcgacgcccacaagaagaaccucuacgaccacgcccugauguccaucaucagcaccuuccaccuguccauccccaacuucaaccaguacgaggccaugagcugcgacuucaacgggggcaagaucuccgugcaguacaaccucagccacuccuacgccggggacgcggccaaccacugcggcacgguggccaacgggguccugcagaccuucaugcggauggccuggggcggcagcuacaucgcgcuggacuccgggcacggcaagugggacugcaucaugaccagcuaccaguaccucaucauccagaacaccacgugggaggaccacugccaguucucccgccccagccccaucggguaccugggccugcucucccagcggacccgcgacaucuacaucagccggcgccgccggggcaccuucaccuggacgcucagcgacuccgaggggaaggacaccccgggcggguacugccugacccgguggaugcugaucgaggccgagcucaagugcuucggcaacaccgccguggccaagugcaacgagaagcacgacgaggaguucugcgacaugcugcgccuguucgacuucugcaagcaggccauccagcggcucaaggcgcccgcccagaugagcauccagcugaucaacaaggccgugaacgcccugaucaacgaccagcucaucaugaagaaccaccuccgcgacaucauggggauccccuacugcaacuacuccaaguacugcuaccugaaccacacgaccaccggcaagaccagccugcccaagugcugccuggucuccaacggcagcuaccugaacgagacgcacuucuccgacgacaucgagcagcaggccgacaacaugaucaccgagaugcuccagaaggaguacauggagcggcaggggaagacgccccugggccugguggaccucuucguguucagcaccuccuucuaccugaucagcaucuuccugcaccuggucaagaucccgacccaccgccacaucguggggaaguccugccccaagccccaccggcucaaccacaugggcaucugcagcugcgggcuguacaagcagcccggcgugccgguccgcuggaagcggugaggacuagucccuguucccagagcccacuuuuuuuucuuuuuuugaaauaaaauagccugucuuucagaucuaaaaaaaaaaaaaaaaaaaaaaaaaaaaaaaaaaaaaaaaaaaaaaaaaaaaaaaaaaaaaaaaaaaaaaaaaaaaaaaaaaaaaaaaaaaaaaaaaaaa

SEQ ID NO: 26787 - RNA, 1724 nt, Artificial Sequence
  mRNA product Design a-1 (A100) comprising derived and/or modified sequence from LASV(Mad39;Clade IV)__ANH09722__GPCmut4 (opt1)
aggagagucccgcagucggcguccagcggcucugcuuguucgugugugugucguugcaggccuuauucaagcuuaccaugggccagaucgugaccuucuuccaggaggucccccacgugaucgaggaggugaugaacaucguccugaucgcccucagcauccuggccgugcugaaggggcucuacaacguggcgaccugcggccugaucgggcuggucacguuccuccugcugugcggccgcuccugcaccaccacccucuacaaggggguguacgagcugcaggcccuggagcucaacauggagacgcugaacaugugcaugccgcugagcugcaccaagaacaacucccaccacuacauccgggugggcaacgagaccggccucgagcugacgcugaccaacaccagccucaucaaccacaaguucugcaaccuguccgacgcccacaagaagaaccuguacgaccacgcccucaugagcaucaucuccaccuuccaccugagcauccccaacuucaaccaguacgaggccauguccugcgacuucaacgacgggaagaucagcguccaguacaaccugucccacacguacgcgggcgacaccgccaaccacugcgggaccguggccaacggcgugcuccagaccuucaugcgcauggccuggggcgggagcuacaucgcgcuggacuccggccgcgggggcugggacugcaucaugacgagcuaccaguaccugaucauccagaacaccaccugggaggaccacugccaguucucccggcccagccccaucggguaccucggccugcugucccagcggacccgcgacaucuacaucagccggcgccgccggggcacguucaccuggacccuguccgacagcgaggggaaggacaccccgggcggguacugccucacgcgguggaugcugaucgaggccgagcugaagugcuucggcaacaccgccgucgccaagugcaacgagaagcacgacgaggaguucugcgacaugcuccgccuguucgacuucugcaagcaggccauccagcggcugaaggcgcccgcccagaugagcauccagcucaucaacaaggccgugaacgcccugaucaacgaccagcugaucaugaagaaccaccuccgcgacaucauggggauccccuacugcaacuacuccaaguacugcuaccugaaccacaccgugaccggcaagacgagccugcccaagugcugccucgucuccaacggcagcuaccugaacgagacccacuucuccgacgacaucgagcagcaggccgacaacaugaucaccgagaugcugcagaaggaguacauggagcggcaggggaagacgccccucggccugguggaccuguucguguucagcaccuccuucuaccugaucagcaucuuccuccaccuggucaagaucccgacccaccgccacgugguggggaagcccugccccaagccccaccggcugaaccacaugggcaucugcuccugcggguucuacaagcagccgggcguccccgugcgcuggaagcggugaggacuagucccuguucccagagcccacuuuuuuuucuuuuuuugaaauaaaauagccugucuuucagaucuaaaaaaaaaaaaaaaaaaaaaaaaaaaaaaaaaaaaaaaaaaaaaaaaaaaaaaaaaaaaaaaaaaaaaaaaaaaaaaaaaaaaaaaaaaaaaaaaaaaa

SEQ ID NO: 26788 - RNA, 1724 nt, Artificial Sequence
  mRNA product Design a-1 (A100) comprising derived and/or modified sequence from LASV(Z0947-SLE-2011;Clade IV)__AIT17840__GPCmut4 (opt1)
aggagagucccgcagucggcguccagcggcucugcuuguucgugugugugucguugcaggccuuauucaagcuuaccaugggccagaucgugaccuucuuccaggaggucccccacgugaucgaggaggugaugaacaucguccugaucgcccucagcauccuggccgugcugaaggggcucuacaacuucgcgaccugcggccugguggggcuggucacguuccuccugcugugcggccgcuccugcaccaucagccucuacaaggggguguacgagcugcagacccuggagcucaacauggagacccugaacaugugcaugccgcuguccugcaccaagaacaacagccaccacuacaucauggugggcaacgagaccggccucgagcugacccugacgaacaccuccaucaucaaccacaaguucugcaaccucagcgacgcccacaagaagaaccuguacgaccacgcccugauguccaucaucagcaccuuccaccucuccauccccaacuucaaccaguacgaggccaugagcugcgacuucaacgggggcaagaucuccguccaguacaaccugagccacuccuacgccggggacgcggccaaccacugcggcaccguggccaacggggugcugcagacguucaugcggauggccuggggcggcagcuacaucgcgcucgacuccgggcgcgaccggugggacugcaucaugaccagcuaccaguaccugaucauccagaacaccaccugggaggaccacugccaguucucccgccccagccccaucggcuaccuggggcuccugucccagcggacgcgcgacaucuacaucagccggcgccgccggggcaccuucaccuggacccugagcgacuccgagggcaaggacacgcccgggggcuacugccugacccgguggaugcucaucgaggccgagcugaagugcuucgggaacaccgccgucgccaagugcaacgagaagcacgacgaggaguucugcgacaugcugcgccucuucgacuucugcaagcaggccauccagcggcugaaggcgcccgcccagaugagcauccagcugaucaacaaggccgugaacgcccucaucaacgaccagcugaucaugaagaaccaccuccgcgacaucaugggcauccccuacugcaacuacuccaaguacugcuaccugaaccacaccacgaccgggaagaccagccugcccaagugcugccugguguccaacggcagcuaccucaacgagacccacuucuccgacgacaucgagcagcaggccgacaacaugaucacggagaugcugcagaaggaguacauggagcggcagggcaagaccccgcuggggcucgucgaccuguucguguucagcaccuccuucuaccugaucagcaucuuccugcaccucgugaagaucccgacccaccgccacaucgucggcaagcccugccccaagccccaccggcugaaccacauggggaucugcuccugcggccuguacaagcagccgggggugcccgugaaguggaagcgcugaggacuagucccuguucccagagcccacuuuuuuuucuuuuuuugaaauaaaauagccugucuuucagaucuaaaaaaaaaaaaaaaaaaaaaaaaaaaaaaaaaaaaaaaaaaaaaaaaaaaaaaaaaaaaaaaaaaaaaaaaaaaaaaaaaaaaaaaaaaaaaaaaaaaa

SEQ ID NO: 26789 - RNA, 1724 nt, Artificial Sequence
  mRNA product Design a-1 (A100) comprising derived and/or modified sequence from LASV(Josiah;Clade IV)__NP_694870__GPCmut4 (opt1)
aggagagucccgcagucggcguccagcggcucugcuuguucgugugugugucguugcaggccuuauucaagcuuaccaugggccagaucgugaccuucuuccaggaggucccccacgugaucgaggaggugaugaacaucguccugaucgcccucagcgugcuggccgugcugaaggggcucuacaacuucgcgaccugcggccuggucgggcuggugacguuccuccugcugugcggccgcuccugcaccaccagccucuacaaggggguguacgagcugcagacccuggagcucaacauggagacgcugaacaugugcaugccgcuguccugcaccaagaacaacagccaccacuacaucauggucggcaacgagaccggccucgagcugacccugacgaacaccuccaucaucaaccacaaguucugcaaccucagcgacgcccacaagaagaaccuguacgaccacgcccugauguccaucaucagcaccuuccaccucuccauccccaacuucaaccaguacgaggccaugagcugcgacuucaacgggggcaagaucuccgugcaguacaaccugagccacuccuacgccggggacgcggccaaccacugcggcaccguggccaacgggguccugcagacguucaugcggauggccuggggcggcagcuacaucgcgcucgacuccgggcgcggcaacugggacugcaucaugaccagcuaccaguaccugaucauccagaacaccaccugggaggaccacugccaguucucccggcccagccccaucggguaccugggccuccugucccagcgcacgcgggacaucuacaucagccgccggcgccggggcaccuucaccuggacccugagcgacuccgaggggaaggacacgccgggcggguacugccucacccgcuggaugcugaucgaggccgagcugaagugcuucggcaacaccgccguggccaagugcaacgagaagcacgacgaggaguucugcgacaugcuccggcuguucgacuucugcaagcaggccauccagcgccugaaggcgcccgcccagaugagcauccagcucaucaacaaggccgugaacgcccugaucaacgaccagcugaucaugaagaaccaccuccgggacaucauggggauccccuacugcaacuacuccaaguacugcuaccugaaccacaccacgaccggccgcaccagccugcccaagugcugccucgucuccaacggcagcuaccugaacgagacccacuucuccgacgacaucgagcagcaggccgacaacaugaucacggagaugcugcagaaggaguacauggagcggcaggggaagaccccgcucggccugguggaccuguucguguucagcaccuccuucuaccugaucagcaucuuccuccaccuggucaagauccccacccaccgccacaucguggggaaguccugccccaagccccaccggcugaaccacaugggcaucugcagcugcgggcucuacaagcagccgggcgugcccgucaaguggaagcgcugaggacuagucccuguucccagagcccacuuuuuuuucuuuuuuugaaauaaaauagccugucuuucagaucuaaaaaaaaaaaaaaaaaaaaaaaaaaaaaaaaaaaaaaaaaaaaaaaaaaaaaaaaaaaaaaaaaaaaaaaaaaaaaaaaaaaaaaaaaaaaaaaaaaaa

SEQ ID NO: 26790 - RNA, 1721 nt, Artificial Sequence
  mRNA product Design a-1 (A100) comprising derived and/or modified sequence from LASV(LP;Clade I)__AAF86701__GPCmut4 (opt1)
aggagagucccgcagucggcguccagcggcucugcuuguucgugugugugucguugcaggccuuauucaagcuuaccaugggccagaucaucaccuucuuccaggaggugccccacgucaucgaggaggugaugaacaucgugcugaucgcccucagccugcuggccauccucaaggggcuguacaacaucgcgaccugcggcaucaucgggcuggucgccuuccucuuccugugcggcaaguccugcagccugacgcucaagggcggguacgagcugcagacccuggagcucaacauggagacccugaacaugugcaugccgcuguccugcaccaagaacagcucccaccacuacauccgcgugggcaacgagacggggcucgagcugacccugaccaacaccagcaucaucaaccacaaguucugcaaccucuccgacgcccacaagaagaaccuguacgaccacgcccugaugagcaucaucuccacguuccaccucagcauccccaacuucaaccaguacgaggccauguccugcgacuucaacggcgggaagaucagcgugcaguacaaccugucccacagcuacgcgggcgacgccgccgagcacugcgggaccgucgccaacggcgugcugcagaccuucaugcggauggcguggggcgggcgcuacaucgcccucgacuccggcaaggggaacugggacugcaucaugaccagcuaccaguaccugaucauccagaacacgaccugggaggaccacugccaguucucccggcccagccccaucggcuaccugggccuccugucccagcgcacccgggacaucuacaucagccgccggcgccgggggaccuucacguggacccugagcgacuccgagggcaacgagacccccgggggcuacugccucacccgcuggaugcugaucgaggccgagcugaagugcuucgggaacacggccguggccaagugcaacgagaagcacgacgaggaguucugcgacaugcuccggcuguucgacuucugcaagcaggcgauccgccggcugaaggccccggcccagaugagcauccagcucaucaacaaggccgucaacgcccugaucaacgaccagcugaucaugaagaaccaccuccgcgacaucaugggcauccccuacugcaacuacuccaaguacugcuaccugaaccacaccagcuccggccggaccagccugcccaagugcugccucaucuccaacgggagcuaccugaacgagacccaguucuccgacgacaucgagcagcaggcggacaacaugaucacggagaugcugcagaaggaguacaucgagcgccagggcaagaccccgcucgggcugguggacaucuucaucuucagcaccuccuucuaccugaucagcaucuuccugcaccucaucaagauccccacccaccggcacaucgugggcaagcccugccccaagccgcaccgccugaaccacaugggggucugcuccugcggccuguacaagcaccccggcgugcccacgaaguggaagcggugaggacuagucccuguucccagagcccacuuuuuuuucuuuuuuugaaauaaaauagccugucuuucagaucuaaaaaaaaaaaaaaaaaaaaaaaaaaaaaaaaaaaaaaaaaaaaaaaaaaaaaaaaaaaaaaaaaaaaaaaaaaaaaaaaaaaaaaaaaaaaaaaaaaaa

SEQ ID NO: 26791 - RNA, 1721 nt, Artificial Sequence
  mRNA product Design a-1 (A100) comprising derived and/or modified sequence from LASV(803213;Clade II)__AAF86703__GPCmut4 (opt1)
aggagagucccgcagucggcguccagcggcucugcuuguucgugugugugucguugcaggccuuauucaagcuuaccaugggccagaucaucaccuucuuccaggaggugccccacgucaucgaggaggugaugaacaucgugcugaucgcccucagccugcuggccauccucaaggggaucuacaacgucgcgaccugcggccuguucgggcugaucuccuuccuccugcugugcggccgcagcugcuccgugacguacaaggggguguacgagcuccagacccuggagcugaacauggccaaccucaacaugugcaugccgcugagcugcaccaagaacaacucccaccacuacaucauggucggcaacgagaccggccuggagcucacgcugaccaacaccagcaucaucaaccacaaguucugcaaccuguccgacgcccacaagaagaaccucuacgaccacgcccugaugagcaucaucuccaccuuccaccugagcauccccaacuucaaccaguacgaggccauguccugcgacuucaacgggggcaagaucagcgugcaguacaaccucucccacagcuucgcgguggacgccgccaaccacugcgggacgaucgccaacggcguccugcagaccuucaugcggauggcguggggcggguccuacaucgcccuggacagcggcaaggggaacugggacugcaucaugaccuccuaccaguaccucaucauccagaacaccacgugggaggaccacugccaguucagccgccccucccccaucggcuaccuggggcugcucagccagcggacccgcgacaucuacaucagccggcgccggcgcggcaccuucaccuggacgcuguccgacagcgagggcaacgaggcccccgggggcuacugccugacccgguggaugcucaucgaggccgagcugaagugcuucgggaacaccgccguggcgaagugcaacgagaagcacgacgaggaguucugcgacaugcugcgccucuucgacuucugcaagcaggccaucaagcggcugaagaccccggcccagauguccauccagcugaucaacaaggccgugaacgcccucaucaacgaccagcugaucaugaagaaccaccuccgcgacaucaugggcauccccuacugcaacuacagccgguacugcuaccugaaccacacggucaccgggaagaccucccugccccgcugcugccuggugagcaacggcuccuaccucaacgagacccacuucagcgacgacaucgagcagcaggcggacaacaugaucacggagaugcugcagaaggaguacauggaccggcagggcaagaccccgcuggggcucguggaccuguucgucuucuccaccagcuucuaccugaucuccaucuuccugcaccucgugaagauccccacccaccgccacaucgugggcaagcccugccccaagccgcaccggcugaaccacauggggaucugcagcugcggccuguacaagcaccccgggguccccgugaaguggaagcgcugaggacuagucccuguucccagagcccacuuuuuuuucuuuuuuugaaauaaaauagccugucuuucagaucuaaaaaaaaaaaaaaaaaaaaaaaaaaaaaaaaaaaaaaaaaaaaaaaaaaaaaaaaaaaaaaaaaaaaaaaaaaaaaaaaaaaaaaaaaaaaaaaaaaaa

SEQ ID NO: 26792 - RNA, 1721 nt, Artificial Sequence
  mRNA product Design a-1 (A100) comprising derived and/or modified sequence from LASV(GA391;Clade III)__CAA36645__GPCmut4 (opt1)
aggagagucccgcagucggcguccagcggcucugcuuguucgugugugugucguugcaggccuuauucaagcuuaccaugggccagaucgugaccuucuuccaggaggucccccacgugaucgaggaggugaugaacaucguccugaucgcccucagcauccuggccauccugaaggggcucuacaacguggcgaccugcggccugaucgggcuggugacguuccuccugcuguccggccgcagcugcucccucaucuacaaggggaccuacgagcugcagacccuggagcucaacauggagacccugaacaugugcaugccgcugagcugcacgaagaacaacucccaccacuacauccgggucggcaacgagaccggccucgagcugacccugaccaacacgagcauccucaaccacaaguucugcaaccuguccgacgcccacaagcgcaaccuguacgaccacagccucauguccaucaucagcaccuuccaccuguccauccccaacuucaaccaguacgaggccaugagcugcgacuucaacgggggcaagaucaccgugcaguacaaccugucccacagcuucgccguggacgccgcggggcacugcggcacccucgccaacgggguccugcagacguucaugcggauggccuggggcggcuccuacaucgcccuggacagcgggcgcggcaacugggacugcaucaugaccuccuaccaguaccucaucauccagaacaccaccugggacgaccacugccaguucagccggcccucccccaucggguaccugggccugcucagccagcgcacgcgggacaucuacaucagccgccggcgccggggcaccuucaccuggacccuguccgacagcgaggggaacgagacgccgggcggguacugccugacccgcuggaugcucaucgaggcggagcugaagugcuucggcaacaccgccguggccaagugcaacgagaagcacgacgaggaguucugcgacaugcugcggcuguucgacuucugcaagcaggccauccgccggcugaagacccccgcccagauguccauccagcugaucaacaaggcggugaacgcccucaucaacgaccagcugaucaugaagaaccaccuccgcgacaucauggggauccccuacugcaacuacagccgguacugcuaccucaaccacacguccaccggcaagaccagccugccccgcugcugccugaucuccaacggcagcuaccucaacgagaccaaguucuccgacgacaucgagcagcaggccgacaacaugaucacggagaugcugcagaaggaguacaucgaccggcaggggaagaccccgcugggccuggucgaccucuucguguucagcaccuccuucuaccugaucagcaucuuccugcaccucgugaagauccccacccaccgccacaucgucgggaagcccugccccaagccgcaccggcugaaccacaugggcaucugcuccugcgggcuguacaagcagcccggcgugcccgugcgcuggaagcgcugaggacuagucccuguucccagagcccacuuuuuuuucuuuuuuugaaauaaaauagccugucuuucagaucuaaaaaaaaaaaaaaaaaaaaaaaaaaaaaaaaaaaaaaaaaaaaaaaaaaaaaaaaaaaaaaaaaaaaaaaaaaaaaaaaaaaaaaaaaaaaaaaaaaaa

SEQ ID NO: 26793 - RNA, 1724 nt, Artificial Sequence
  mRNA product Design a-1 (A100) comprising derived and/or modified sequence from LASV(AV;Clade V)__CCA30314__GPCmut4 (opt1)
aggagagucccgcagucggcguccagcggcucugcuuguucgugugugugucguugcaggccuuauucaagcuuaccaugggccagaucgugaccuucuuccaggaggucccccacgugaucgaggaggugaugaacaucguccugaucgcccucagcauccuggccgugcugaaggggcucuacaacaucgcgaccugcggccugaucgggcugaucacguuccuccugcugugcggccgcuccugcagcuccaaccucuacaaggggguguacgagcugcagagccuggaccucaacauggagacccugaacaugugcaugccgcuguccugcaccaagaacaacagccaccacuacauccgggucggcaacgacaccggccucgagcugacgcugaccaacaccuccauccucaaccacaaguucugcaaccugagcgacgcccacaagaaggaccuguacgaccacgcccucauguccaucaucagcaccuuccaccuguccauccccaacuucaaccaguacgaggccaugagcugcgacuucaacgggggcaagaucuccgugcaguacaaccugagccacuccuacgccaucgacgcggccaaccacugcgggacgguggccaacggcauccuccagaccuucaugcgcauggccuggggcgggagcuacaucgcgcuggacuccggccgggggaacugggacugcaucaugaccagcuaccaguaccugaucauccagaacaccacgugggagaaccacugccaguucucccgccccagccccaucggcuaccucgggcugcugagccagcggacccgcgacaucuacaucucccggcgccggcgcggcaccuucaccuggacgcucagcgacuccgagggcaacgccacccccgggggcuacugccugacccgguggaugcugaucgaggccgagcucaagugcuucgggaacaccgccgucgccaagugcaacgagaagcacgacgaggaguucugcgacaugcugcgccuguucgacuucugcaagcaggcgaucagccggcucaaguccccggcccagaugagcauccagcugaucaacaaggccgugaacgcccugaucaacgaccagcucaucaugaagaaccaccuccgcgacaucaugggcauccccuacugcaacuacuccaaguacugcuaccugaaccacacgaucaccgggaagaccagccugcccaagugcugccugguguccaacggcagcuaccugaacgagacccacuucuccgacgacaucgagcagcaggccgacaacaugaucacggagaugcuccagaaggaguacauggagcggcagggcaagaccccgcuggggcuggucgaccuguucguguucagcaccuccuucuaccucaucagcaucuuccugcgccuggugaagauccccacccaccggcacaucgucggcaagcccugccccaagccgcaccgccucaaccacauggggaucugcuccugcggccuguacaagcagcccggggugcccgugcgguggaagcgcugaggacuagucccuguucccagagcccacuuuuuuuucuuuuuuugaaauaaaauagccugucuuucagaucuaaaaaaaaaaaaaaaaaaaaaaaaaaaaaaaaaaaaaaaaaaaaaaaaaaaaaaaaaaaaaaaaaaaaaaaaaaaaaaaaaaaaaaaaaaaaaaaaaaaa

SEQ ID NO: 26794 - RNA, 1721 nt, Artificial Sequence
  mRNA product Design a-1 (A100) comprising derived and/or modified sequence from LASV(Togo/2016/7082;Clade VI)__AMR44577__GPCmut4 (opt1)
aggagagucccgcagucggcguccagcggcucugcuuguucgugugugugucguugcaggccuuauucaagcuuaccaugggccagaucaucaccuucuuccaggaggugccccacgucaucgaggaggugaugaacaucgugcugaucgcccucagccugcuggccauccucaagggggucuacaacguggcgaccugcggcaucaucgggcuggugacguuccuguuccucugcggccgcuccugcagccugaucuacaagggguccuacgagcugcagacccucgagcugaacauggagacccugaacaugugcaugccgcucagcugcaccaagaacuccagccaccacuacauccgggucggcaacgagacgggccuggagcugacccucaccaacaccuccaucaucaaccacaaguucugcaaccugagcgacgcccacaagcgcaaccuguacgaccacgcccucauguccauccugagcacguuccaccuguccauccccaacuucaaccaguacgaggccaugagcugcgacuucaacgggggcaagaucuccgugcaguacaaccucagccacgccuacgcgguggacgccgccgagcacugcgggaccgucgccaacggcgugcugcagaccuucaugcggauggcguggggcggguccuacaucgcccuggacagcggccgcgggaacugggacugcaucaugaccuccuaccaguaccucaucauccagaacacgaccugggaggaccacugccaguucagccggcccucccccaucggcuaccuggggcugcucagccagcgcacccgggacaucuacaucagccgccggcgccggggcaccuucacguggacccuguccgacagcgagggcaacgagacccccgggggcuacugccugacccgcuggaugcucaucgaggccgagcugaagugcuucgggaacacggccguggccaagugcaacgagaagcacgacgaggaguucugcgacaugcugcggcuguucgacuucugcaagcaggcgauccagcgccugaaguccccggcccagaugagcauccagcugaucaacaaggccgucaacgcccucaucaacgaccagcugaucaugaagaaccaccuccgggacaugaugggcauccccuacugcaacuacuccaaguacugcuaccucaaccacaccagcuccgggcgcaccagccugcccaagugcugccugguguccaacggcagcuaccucaacgagacccacuucuccgacgacaucgagcagcaggccgacaacaugaucacggagaugcugcagaaggaguacaucgaccggcagggcaagaccccgcuggggcucguggaccuguucgucuucagcaccuccuucuaccugaucagcaucuuccugcaccucaucaagauccccacccaccgccacaucgugggcaagcccugccccaagccgcaccggcugaaccacauggggaucugcuccugcggccuguacaagcagcccggggugcccacgcgcuggaagcggugaggacuagucccuguucccagagcccacuuuuuuuucuuuuuuugaaauaaaauagccugucuuucagaucuaaaaaaaaaaaaaaaaaaaaaaaaaaaaaaaaaaaaaaaaaaaaaaaaaaaaaaaaaaaaaaaaaaaaaaaaaaaaaaaaaaaaaaaaaaaaaaaaaaaa

SEQ ID NO: 26795 - RNA, 1721 nt, Artificial Sequence
  mRNA product Design a-1 (A100) comprising derived and/or modified sequence from LASV(KAK-428;Clade n.d. (VII))__ANH09740__GPCmut4 (opt1)
aggagagucccgcagucggcguccagcggcucugcuuguucgugugugugucguugcaggccuuauucaagcuuaccaugggccagaucgugaccuucuuccaggaggucccccacgugaucgaggaggugaugaacaucguccugaucgcccucagccugcuggccauccucaaggggcuguacaacuucgcgaccugcggcgugaucgggcugaucacguuccuccugcugugcggccgcuccugcagcgccaccuacaaggggcaguacgagcuccagacccuggagcugaacauggagucccucaacaugugcaugccgcugagcugcaccaagaacaacucccaccacuacauccgggccggcaacaacacgggccuggagcucacccugaccaacaccagcaucaucucccacaaguucugcaaccugagcgacgcccacaagaagaaccucuacgaccacacgcugauguccaucaucaccaccuuccaccugagcauccccaacuucaaccaguacgaggccauguccugcgacuucaacgggggcaagaucagcauccaguacaaccucucccacagcuacgcgggggacgccgcccagcacugcggcaccguggccaacgggguccugcagacguucaugcgcauggcguggggcggcuccuaccuggcccucgacagcgggcggcgcggcugggacugcaucaucuccagcuaccaguaccugaucauccagaacaccaccugggacgaccacugccaguucucccggcccagccccaucggguaccugggcuucgugagccagaagacccgcgacaucuacaucucccggcgccggcgcggcacguucaccuggacccucagcgacuccgaggggcacgacaugccgggcggguacugccugacccgguggaugcugaucgaggccgaccucaagugcuucggcaacacggccguggccaagugcaacgagaagcacgacgaggaguucugcgacauguggcgccuguucgacuucugcaagcaggcgauccagcggcugaaggcccccgcccagaugaacauccagcucaucaacaaggccgucaacgcccugaucaacgaccagcugaugaugaagaaccaccuccgcgacaucauggggauccccuacugcaacuacagcaaguucugcuaccugaacaacaccaccaccggccggacgucccugccccgcugcugccucaucagcaacggcuccuaccugaacgagacccacuucagcgacgacaucgagcagcaggcggacaacaugaucaccgagaugcugcagaaggaguacauggaccggcaggggaagaccccgcucggccugguggaccuguucguguucuccacgagcuucuaccucaucaccaucuuccugcaccuggucaagauccccacccaccgccacaucguggggaagcccugccccaagccgcaccggcugaaccacaugggcaucugcuccugcgggcucuacaagcagcccggcgugcccguccgcuggaagcggugaggacuagucccuguucccagagcccacuuuuuuuucuuuuuuugaaauaaaauagccugucuuucagaucuaaaaaaaaaaaaaaaaaaaaaaaaaaaaaaaaaaaaaaaaaaaaaaaaaaaaaaaaaaaaaaaaaaaaaaaaaaaaaaaaaaaaaaaaaaaaaaaaaaaa

SEQ ID NO: 26796 - RNA, 1721 nt, Artificial Sequence; identical to SEQ ID NO: 26790
  mRNA product Design a-1 (A100) comprising derived and/or modified sequence from LASV(Pinneo-NIG-1969;Clade I)__AIT17836__GPCmut4 (opt1)

SEQ ID NO: 26797 - RNA, 1721 nt, Artificial Sequence
  mRNA product Design a-1 (A100) comprising derived and/or modified sequence from LASV(ISTH0009-NIG-2011;Clade II)__AIT17404__GPCmut4 (opt1)
aggagagucccgcagucggcguccagcggcucugcuuguucgugugugugucguugcaggccuuauucaagcuuaccaugggccagaucaucaccuucuuccaggaggugccccacgucaucgaggaggugaugaacaucgugcugaucgcccucagccugcuggccauccucaaggggaucuacaacgucgcgaccugcggccuguucgggcugguguccuuccuccugcugugcggccgcagcugcuccacgaccuacaaggggguguacgagcuccagacccuggagcuggacauggccagccucaacaugugcaugccgcuguccugcaccaagaacaacagccaccacuacaucauggucggcaacgagacgggccuggagcucacccugaccaacaccuccaucaucaaccacaaguucugcaaccugagcgacgcccacaagaagaaccucuacgaccacgcccugauguccaucaucagcacguuccaccuguccauccccaacuucaaccaguacgaggccaugagcugcgacuucaacgggggcaagaucuccgugcaguacaaccucagccacgcguacgccguggacgccgccaaccacugcgggaccaucgcgaacggcguccugcagaccuucaugcggauggccuggggcggguccuacaucgcccuggacagcggcaagggguccugggacugcaucaugaccagcuaccaguaccucaucauccagaacacgaccugggaggaccacugccaguucucccgccccagccccaucggcuaccuggggcugcucagccagcggacccgcgacaucuacaucucccggcgccggcgcggcaccuucacguggacccugagcgacuccgagggcaacgagacccccgggggcuacugccugacccgguggaugcucaucgaggccgagcugaagugcuucgggaacacggccguggcgaagugcaacgagaagcacgacgaggaguucugcgacaugcugcgccucuucgacuucugcaagcaggccauccggcgccugaagaccccggcccagaugagcauccagcugaucaacaaggccgugaacgcccucaucaacgaccagcugaucaugaagaaccaccuccgggacaucaugggcauccccuacugcaacuacuccaaguacugcuaccugaaccacaccgucaccgggaagacgagccugccccgcugcugccugguguccaacggcagcuaccucaacgagacccacuucuccgacgacaucgagcagcaggcggacaacaugaucaccgagcugcugcagaaggaguacauggaccggcagggcaagaccccgcucgggcugguggaccuguucgucuucagcacguccuucuaccugaucagcaucuuccuccaccugaucaagauccccacccaccgccacaucaccggcaagcccugccccaagccgcaccggcugaaccacauggggaucugcuccugcggccucuacaagcaccccggggugcccgugaaguggaagcgcugaggacuagucccuguucccagagcccacuuuuuuuucuuuuuuugaaauaaaauagccugucuuucagaucuaaaaaaaaaaaaaaaaaaaaaaaaaaaaaaaaaaaaaaaaaaaaaaaaaaaaaaaaaaaaaaaaaaaaaaaaaaaaaaaaaaaaaaaaaaaaaaaaaaaa

SEQ ID NO: 26798 - RNA, 1721 nt, Artificial Sequence
  mRNA product Design a-1 (A100) comprising derived and/or modified sequence from LASV(ISTH2010-NIG-2012;Clade II)__AIT17482__GPCmut4 (opt1)
aggagagucccgcagucggcguccagcggcucugcuuguucgugugugugucguugcaggccuuauucaagcuuaccaugggccagaucaucaccuucuuccaggaggugccccacgucaucgaggaggugaugaacaucgugcugaucgcccucagccugcuggccauccucaaggggaucuacaacgucgcgaccugcggccuguucgggcugguguccuuccuccugcugugcggccgcagcugcuccacgaccuacaaggggguguacgagcuccagacccuggagcuggacauggccagccucaacaugugcaugccgcuguccugcaccaagaacaacagccaccacuacaucauggucggcaacgagacgggccuggagcucacccugaccaacaccuccaucaucaaccacaaguucugcaaccugagcgacgcccacaagaagaaccucuacgaccacgcccugauguccaucaucagcacguuccaccuguccauccccaacuucaaccaguacgaggccaugagcugcgacuucaacgggggcaagaucuccgugcaguacaaccucagccacgcguacgccguggacgccgccaaccacugcgggaccaucgcgaacggcguccugcagaccuucaugcggauggccuggggcggguccuacaucgcccuggacagcggcaagggguccugggacugcaucaugaccagcuaccaguaccucaucauccagaacaucacgugggaggaccacugccaguucucccgccccagccccaucggcuaccuggggcugcucagccagcggacccgcgacaucuacaucucccggcgccggcgcggcaccuucaccuggacgcugagcgacuccgagggcaacgagacccccgggggcuacugccugacccgguggaugcucaucgaggccgagcugaagugcuucgggaacaccgccguggcgaagugcaacgagaagcacgacgaggaguucugcgacaugcugcgccucuucgacuucugcaagcaggccauccggcgccugaagacgccggcccagaugagcauccagcugaucaacaaggccgugaacgcccucaucaacgaccagcugaucaugaagaaccaccuccgggacaucaugggcauccccuacugcaacuacuccaaguacugcuaccugaaccacaccgucaccgggaagaccagccugccccgcugcugccugguguccaacggcagcuaccucaacgagacgcacuucuccgacgacaucgagcagcaggcggacaacaugaucaccgagcugcugcagaaggaguacaucgaccggcagggcaagaccccgcucgggcugguggaccuguucgucuucagcaccuccuucuaccugaucagcaucuuccuccaccuggugaagauccccacgcaccgccacguggucggcaagcccugccccaagccgcaccggcugaaccacauggggaucugcuccugcggccucuacaagcaccccggggugcccgugaaguggaagcgcugaggacuagucccuguucccagagcccacuuuuuuuucuuuuuuugaaauaaaauagccugucuuucagaucuaaaaaaaaaaaaaaaaaaaaaaaaaaaaaaaaaaaaaaaaaaaaaaaaaaaaaaaaaaaaaaaaaaaaaaaaaaaaaaaaaaaaaaaaaaaaaaaaaaaa

SEQ ID NO: 26799 - RNA, 1721 nt, Artificial Sequence
  mRNA product Design a-1 (A100) comprising derived and/or modified sequence from LASV(Lassa virus/H.sapiens-wt/NGA/2015/ISTH_0543;Clade II)__AVO03639__GPCmut4 (opt1)
aggagagucccgcagucggcguccagcggcucugcuuguucgugugugugucguugcaggccuuauucaagcuuaccaugggccagaucaucaccuucuuccaggaggugccccacgucaucgaggaggugaugaacaucgugcugaucgcccucagccugcuggccauccucaaggggaucuacaacgucgcgaccugcggccuguucgggcugguguccuuccuccugcugugcggccgcagcugcuccacgaccuacaaggggguguacgagcuccagacccuggagcuggacauggccaaccucaacaugugcaugccgcugagcugcaccaagaacaacucccaccacuacaucauggucggcaacgagacgggccuggagcucacccugaccaacaccagcaucaucaaccacaaguucugcaaccuguccgacgcccacaagaagaaccucuacgaccacgcccugaugagcaucaucuccacguuccaccugagcauccccaacuucaaccaguacgaggccauguccugcgacuucaacgggggcaagaucagcgugcaguacaaccucucccacaccuacgcgguggacgccgccaaccacugcgggaccaucgccaacggcguccugcagaccuucaugcggauggcguggggcgggagcuacaucgcccuggacuccggcaaggggagcugggacugcaucaugacguccuaccaguaccucgugauccagaacaccaccugggaggaccacugccaguucagccgccccucccccaucggcuaccuggggcugcucagccagcggacccgcgacaucuacaucagccggcgccggcgcggcacguucaccuggacccuguccgacagcgagggcaacgagacccccgggggcuacugccugacgcgguggaugcucaucgaggccgagcugaagugcuucgggaacaccgccguggccaagugcaacgagaagcacgacgaggaguucugcgacaugcugcgccucuucgacuucugcaagcaggcgauccggcgccugaagaccccggcccagauguccauccagcugaucaacaaggccgucaacgcccucaucaacgaccagcugaucaugaagaaccaccuccgggacaucaugggcauccccuacugcaacuacagcaaguacugcuaccugaaccacaccgugacggggaagaccucccugccccgcugcugccuggugagcaacggcuccuaccucaacgagacccacuucagcgacgacaucgagcagcaggccgacaacaugaucaccgagcugcugcagaaggaguacaucgaccggcagggcaagacgccgcucgggcuggucgaccuguucguguucuccaccagcuucuaccugaucuccaucuuccuccaccuggugaagauccccacccaccgccacaucaccggcaagcccugccccaagccgcaccggcugaaccacauggggaucugcagcugcggccucuacaagcaccccgggguccccgugaaguggaagcgcugaggacuagucccuguucccagagcccacuuuuuuuucuuuuuuugaaauaaaauagccugucuuucagaucuaaaaaaaaaaaaaaaaaaaaaaaaaaaaaaaaaaaaaaaaaaaaaaaaaaaaaaaaaaaaaaaaaaaaaaaaaaaaaaaaaaaaaaaaaaaaaaaaaaaa

SEQ ID NO: 26800 - RNA, 1721 nt, Artificial Sequence
  mRNA product Design a-1 (A100) comprising derived and/or modified sequence from LASV(Lassa virus/H.sapiens-wt/NGA/2016/ISTH_0009;Clade II)__AVO03571__GPCmut4 (opt1)
aggagagucccgcagucggcguccagcggcucugcuuguucgugugugugucguugcaggccuuauucaagcuuaccaugggccagaucaucaccuucuuccaggaggugccccacgucaucgaggaggugaugaacaucgugcugaucgcccucagccugcuggccauccucaaggggaucuacaacgucgcgaccugcggccugcuggggcucguguccuuccugcugcucugcggccgcagcugcuccacgaccuacaaggggguguacgagcugcagacccuggagcucgacauggccagccugaacaugugcaugccgcuguccugcaccaagaacaacagccaccacuacaucauggucggcaacgagacgggccucgagcugacccugaccaacaccuccaucaucaaccacaaguucugcaaccucagcgacgcccacaagaagaaccuguacgaccacgcccugauguccaucaucagcacguuccaccucuccauccccaacuucaaccaguacgaggccaugagcugcgacuucaacgggggccggaucuccgugcaguacaaccugagccacuccuacgcgguggacgccgccaaccacugcgggaccaucgccaacggcguccugcagaccuucaugcgcauggcguggggcgggagcuacaucgcccucgacuccggcaaggggagcugggacugcaucaugaccuccuaccaguaccugaucauccagaacacgaccugggaggaccacugccaguucagccggcccagccccaucggcuaccuggggcuccugucccagcgcacccgggacaucuacaucagccgccggcgccggggcaccuucacguggacccuguccgacagcgagggcaacgagacccccgggggcuacugccucacccgcuggaugcugaucgaggccgagcugaagugcuucgggaacacggccguggccaagugcaacgagaagcacgacgaggaguucugcgacaugcuccggcuguucgacuucugcaagcaggcgauccgccggcugaagaccccggcccagauguccauccagcucaucaacaaggccgugaacgcccugaucaacgaccagcugaucaugaagaaccaccuccgcgacaucaugggcauccccuacugcaacuacagcaaguacugcuaccugaaccacaccgucaccgggaagacgucccugccccggugcugccucgugagcaacggcuccuaccugaacgagacccacuucagcgacgacaucgagcagcaggccgacaacaugaucaccgagcugcuccagaaggaguacaucgaccgccagggcaagaccccgcuggggcugguggaccuguucgucuucuccacgagcuucuaccucaucuccaucuuccugcaccuggugaagauccccacccaccggcacaucaccggcaagcccugccccaagccgcaccgccucaaccacauggggaucugcagcugcggccuguacaaccaccccggggugcccgucaaguggaagcggugaggacuagucccuguucccagagcccacuuuuuuuucuuuuuuugaaauaaaauagccugucuuucagaucuaaaaaaaaaaaaaaaaaaaaaaaaaaaaaaaaaaaaaaaaaaaaaaaaaaaaaaaaaaaaaaaaaaaaaaaaaaaaaaaaaaaaaaaaaaaaaaaaaaaa

SEQ ID NO: 26801 - RNA, 1721 nt, Artificial Sequence
  mRNA product Design a-1 (A100) comprising derived and/or modified sequence from LASV(Lassa virus/H.sapiens-wt/NGA/2016/ISTH_0017;Clade II)__AVO03567__GPCmut4 (opt1)
aggagagucccgcagucggcguccagcggcucugcuuguucgugugugugucguugcaggccuuauucaagcuuaccaugggccagaucaucaccuucuuccaggaggugccccacgucaucgaggaggugaugaacaucgugcugaucgcccucagccugcuggccauccucaaggggaucuacaacgucgcgaccugcggccuguucgggcugguguccuuccuccugcugugcggccgcagcugcuccacgaccuacaaggggguguacgagcuccagacccuggagcuggacauggccagccucaacaugugcaugccgcuguccugcaccaagaacaacagccaccacuacaucauggucggcaacgagacgggccuggagcucacccugaccaacaccuccaucaucaaccacaaguucugcaaccugagcgacgcccacaagaagaaccucuacgaccacgcccugauguccaucaucagcacguuccaccuguccauccccaacuucaaccaguacgaggccaugagcugcgacuucaacgggggcaagaucuccgugcaguacaaccucagccacaccuacgcgaucgacgccgccaaccacugcgggaccaucgccaacggcgugcugcagaccuucaugcggauggcguggggcggguccuacaucgcccuggacagcggcaagggguccugggacugcaucaugacgagcuaccaguaccucaucauccagaacaccaccugggaggaccacugccaguucucccgccccagccccaucggcuaccuggggcugcucagccagcggacccgcgacaucuacaucucccggcgccggcgcggcacguucaccuggacccugagcgacuccgagggcaacgagacccccgggggcuacugccugacgcgguggaugcucaucgaggccgagcugaagugcuucgggaacaccgccgucgccaagugcaacgagaagcacgacgaggaguucugcgacaugcugcgccucuucgacuucugcaagcaggcgauccggcgccugaagaccccggcccagaugagcauccagcugaucaacaaggccgugaacgcccucaucaacgaccagcugaucaugaagaaccaccuccgggacaucaugggcauccccuacugcaacuacuccaaguacugcuaccugaaccacaccgugacggggaagaccagccugccccgcugcugccuggucuccaacggcagcuaccucaacgagacccacuucuccgacgacaucgagcagcaggccgacaacaugaucaccgagcugcugcagaaggaguacauggaccggcagggcaagacgccgcucgggcugguggaccuguucguguucagcaccuccuucuaccugaucagcaucuuccuccaccugguccgcauccccacccaccggcacgugaucggcaagcccugccccaagccgcaccgccugaaccacauggggaucugcuccugcggccucuacaagcaccccggggugcccgucaaguggaagcggugaggacuagucccuguucccagagcccacuuuuuuuucuuuuuuugaaauaaaauagccugucuuucagaucuaaaaaaaaaaaaaaaaaaaaaaaaaaaaaaaaaaaaaaaaaaaaaaaaaaaaaaaaaaaaaaaaaaaaaaaaaaaaaaaaaaaaaaaaaaaaaaaaaaaa

SEQ ID NO: 26802 - RNA, 1721 nt, Artificial Sequence
  mRNA product Design a-1 (A100) comprising derived and/or modified sequence from LASV(Lassa virus/H.sapiens-wt/NGA/2018/ISTH_0959;Clade II)__AVV65099__GPCmut4 (opt1)
aggagagucccgcagucggcguccagcggcucugcuuguucgugugugugucguugcaggccuuauucaagcuuaccaugggccagaucaucaccuucuuccaggaggugccccacgucaucgaggaggugaugaacaucgugcugaucgcccucagccugcuggccauccucaaggggaucuacaacgucgugaccugcggccuguucgggcugguguccuuccuccugcugugcggccgcagcugcuccacgaccuacaagggggucuacgagcuccagacccuggagcuggacauggcgagccucaacaugugcaugccgcuguccugcaccaagaacaacagccaccacuacaucauggugggcaacgagacgggccuggagcucacccugaccaacaccuccaucaucaaccacaaguucugcaaccugagcgacgcccacaagaagaaccucuacgaccacgcccugauguccaucaucagcacguuccaccuguccauccccaacuucaaccaguacgaggccaugagcugcgacuucaacgggggcaagaucuccgugcaguacaaccucagccacgccuacgcgaucgacgccgccaaccacugcgggaccaucgccaacggcguccugcagaccuucaugcggauggcguggggcggguccuacaucgcccuggacagcggcaagggguccugggacugcaucaugaccagcuaccaguaccucaucauccagaacacgaccugggaggaccacugccaguucucccgccccagccccaucggcuaccuggggcugcucagccagcggacccgcgacaucuacaucucccggcgccggcgcggcaccuucacguggacccugagcgacuccgagggcaacgagacccccgggggcuacugccugacccgguggaugcucaucgaggccgagcugaagugcuucgggaacacggccguggccaagugcaacgagaagcacgacgaggaguucugcgacaugcugcgccucuucgacuucugcaagcaggcgauccggcgccugaagaccccggcccagaugagcauccagcugaucaacaaggccgugaacgcccucaucaacgaccagcugaucaugaagaaccaccuccgggacaucaugggcauccccuacugcaacuacuccaaguacugcuaccugaaccacaccgucaccgggaagacgagccugccccgcugcugccugguguccaacggcagcuaccucaacgagacccacuucuccgacgacaucgagcagcaggccgacaacaugaucaccgagcugcugcagaaggaguacaucgaccggcagggcaagaccccgcucgggcugguggaccuguucgucuucagcacguccuucuaccugaucagcaucuuccuccaccuggugaagauccccacccaccgccacgugaucggcaagcccugccccaagccgcaccggcugaaccacauggggaucugcuccugcggccucuacaagcaccccgggguccccgugaaguggaagcgcugaggacuagucccuguucccagagcccacuuuuuuuucuuuuuuugaaauaaaauagccugucuuucagaucuaaaaaaaaaaaaaaaaaaaaaaaaaaaaaaaaaaaaaaaaaaaaaaaaaaaaaaaaaaaaaaaaaaaaaaaaaaaaaaaaaaaaaaaaaaaaaaaaaaaa

SEQ ID NO: 26803 - RNA, 1721 nt, Artificial Sequence
  mRNA product Design a-1 (A100) comprising derived and/or modified sequence from LASV(LASV003-NIG-2008;Clade II)__AIT17580__GPCmut4 (opt1)
aggagagucccgcagucggcguccagcggcucugcuuguucgugugugugucguugcaggccuuauucaagcuuaccaugggccagaucaucaccuucuuccaggaggugccccacgucaucgaggaggugaugaacaucgugcugaucgcccucagccugcuggccauccucaaggggaucuacaacgucgcgaccugcggccuguucgggcugguguccuuccuccugcugugcggccgcagcugcuccacgaccuacaaggggguguacgagcuccagacccuggagcuggacauggccagccucaacaugugcaugccgcuguccugcaccaagaacaacagccaccacuacaucauggucggcaacgagacgggccuggagcucacccugaccaacaccuccaucaucaaccacaaguucugcaaccugagcgacgcccacaagaagaaccucuacgaccacgcccugauguccaucaucagcacguuccaccuguccauccccaacuucaaccaguacgaggccaugagcugcgacuucaacgggggcaagaucuccgugcaguacaaccucagccacaccuacgcgguggacgccgccaaccacugcgggaccaucgccaacggcguccugcagaccuucaugcggauggcguggggcggguccuacaucgcccuggacagcggcaagggguccugggacugcaucaugacgagcuaccaguaccucaucauccagaacaccaccugggaggaccacugccaguucucccgccccagccccaucggcuaccuggggcugcucagccagcggacccgcgacaucuacaucucccggcgccggcgcggcacguucaccuggacccugagcgacuccgagagcaacgagaccccgggcggguacugccugacgcgguggaugcucaucgaggccgagcugaagugcuucggcaacaccgccguggccaagugcaacgagaagcacgacgaggaguucugcgacaugcugcgccucuucgacuucugcaagcaggcgauccggcgccugaaggcccccgcccagauguccauccagcugaucaacaaggccgugaacgcccucaucaacgaccagcugaucaugaagaaccaccuccgggacaucauggggauccccuacugcaacuacagcaaguacugcuaccugaaccacaccgucaccggccgcacgucccugccccggugcugccuggugagcaacggguccuaccucaacgagacccacuucagcgacgacaucgagcagcaggcggacaacaugaucaccgagcugcugcagaaggaguacauggaccgccagggcaagaccccgcucggccugguggaccuguucgucuucuccacgagcuucuaccugaucuccaucuuccuccaccuggugaagauccccacccaccggcacgugaucgggaagcccugccccaagccgcaccgccugaaccacaugggcaucugcagcugcgggcucuacaagcaccccggcguccccgugaaguggaagcggugaggacuagucccuguucccagagcccacuuuuuuuucuuuuuuugaaauaaaauagccugucuuucagaucuaaaaaaaaaaaaaaaaaaaaaaaaaaaaaaaaaaaaaaaaaaaaaaaaaaaaaaaaaaaaaaaaaaaaaaaaaaaaaaaaaaaaaaaaaaaaaaaaaaaa

SEQ ID NO: 26804 - RNA, 1721 nt, Artificial Sequence
  mRNA product Design a-1 (A100) comprising derived and/or modified sequence from LASV(LASV035-NIG-2009;Clade II)__AIT17588__GPCmut4 (opt1)
aggagagucccgcagucggcguccagcggcucugcuuguucgugugugugucguugcaggccuuauucaagcuuaccaugggccagaucaucaccuucuuccaggaggugccccacgucaucgaggaggugaugaacaucgugcugaucgcccucagccugcuggccauccucaaggggaucuacaacgucgcgaccugcggccuguucgggcugguguccuuccuccugcugugcggccgcagcugcuccacgaccuacaaggggguguacgagcuccagacccuggagcuggacauggccagccucaacaugugcaugccgcuguccugcaccaagaacaacagccaccacuacaucauggucggcaacgagacgggccuggagcucacccugaccaacaccuccaucaucaaccacaaguucugcaaccugagcgacgcccacaagaagaaccucuacgaccacgcccugauguccaucaucagcacguuccaccuguccauccccaacuucaaccaguacgaggccaugagcugcgacuucaacgggggcaagaucuccgugcaguacaaccucagccacgcguacgccguggacgccgccaaccacugcgggaccaucgcgaacggcguccugcagaccuucaugcggauggccuggggcggguccuacaucgcccuggacagcggcaagggguccugggacugcaucaugaccagcuaccaguaccucaucauccagaacacgaccugggaggaccacugccaguucucccgccccagccccaucggcuaccuggggcugcucagccagcggacccgcgacaucuacaucucccggcgccggcgcggcaccuucacguggacccugagcgacuccgagggcaacgagacccccgggggcuacugccugacccgguggaugcucaucgaggccgagcugaagugcuucgggaacacggccguggcgaagugcaacgagaagcacgacgaggaguucugcgacaugcugcgccucuucgacuucugcaagcaggccauccggcgccugaaggccccggcccagaugagcauccagcugaucaacaaggccgugaacgcgcucaucaacgaccagcugaucaugaagaaccaccuccgggacaucaugggcauccccuacugcaacuacuccaaguacugcuaccugaaccacaccgucaccgggaagaccagccugccccgcugcugccugguguccaacggcagcuaccucaacgagacgcacuucuccgacgacaucgagcagcaggccgacaacaugaucaccgagcugcugcagaaggaguacaucgaccggcagggcaagaccccgcucgggcugguggaccuguucgucuucagcaccuccuucuaccugaucagcaucuuccuccaccuggugaagauccccacgcaccgccacgugaucggcaagcccugccccaagccgcaccggcugaaccacauggggaucugcuccugcggccucuacaagcaccccgggguccccgugaaguggaagcgcugaggacuagucccuguucccagagcccacuuuuuuuucuuuuuuugaaauaaaauagccugucuuucagaucuaaaaaaaaaaaaaaaaaaaaaaaaaaaaaaaaaaaaaaaaaaaaaaaaaaaaaaaaaaaaaaaaaaaaaaaaaaaaaaaaaaaaaaaaaaaaaaaaaaaa

SEQ ID NO: 26805 - RNA, 1721 nt, Artificial Sequence
  mRNA product Design a-1 (A100) comprising derived and/or modified sequence from LASV(LASV1000-NIG-2009;Clade II)__AIT17782__GPCmut4 (opt1)
aggagagucccgcagucggcguccagcggcucugcuuguucgugugugugucguugcaggccuuauucaagcuuaccaugggccagaucaucaccuucuuccaggaggugccccacgucaucgaggaggugaugaacaucgugcugaucgcccucagccugcuggccauccucaaggggaucuacaacgucgcgaccugcggccuguucgggcugguguccuuccuccugcugugcggccgcagcugcuccacgaccuacaaggggguguacgagcuccagacccuggagcuggacauggccagccucaacaugugcaugccgcuguccugcaccaagaacaacagccaccacuacaucauggucggcaacgagacgggccuggagcucacccugaccaacaccuccaucaucaaccacaaguucugcaaccugagcgacgcccacaagaagaaccucuacgaccacgcccugauguccaucaucagcacguuccaccuguccauccccaacuucaaccaguacgaggccaugagcugcgacuucaacgggggcaagaucuccgugcaguacaaccucagccacaccuacgcgguggacgccgccaaccacugcgggaccaucgccaacggcguccugcagaccuucaugcggauggcguggggcggguccuacaucgcccuggacagcggcaagggguccugggacugcaucaugacgagcuaccaguaccucaucauccagaacaccaccugggaggaccacugccaguucucccgccccagccccaucggcuaccuggggcugcucagccagcggacccgcgacaucuacaucucccggcgccggcgcggcacguucaccuggacccugagcgacuccgagggcaacgagacccccgggggcuacugccugacgcgguggaugcucaucgaggccgagcugaagugcuucgggaacaccgccguggccaagugcaacgagaagcacgacgaggaguucugcgacaugcugcgccucuucgacuucugcaagcaggcgaucaagcggcugaagaccccggcccagaugagcauccagcugaucaacaaggccgugaacgcccucaucaacgaccagcugaucaugaagaaccaccuccgcgacaucaugggcauccccuacugcaacuacuccaaguacugcuaccugaaccacaccgucacggggaagaccagccugccccggugcugccugguguccaacggcagcuaccucaacgagacccacuucuccgacgacaucgagcagcaggccgacaacaugaucaccgagcugcugcagaaggaguacaucgaccgccagggcaagacgccgcucgggcugguggaccuguucgucuucagcaccuccuucuaccugaucagcaucuuccuccaccuggugaagauccccacccaccggcacguggucggcaagcccugccccaagccgcaccgccugaaccacauggggaucugcuccugcggccucuacaagcaccccggggugcccgugaaguggaagcggugaggacuagucccuguucccagagcccacuuuuuuuucuuuuuuugaaauaaaauagccugucuuucagaucuaaaaaaaaaaaaaaaaaaaaaaaaaaaaaaaaaaaaaaaaaaaaaaaaaaaaaaaaaaaaaaaaaaaaaaaaaaaaaaaaaaaaaaaaaaaaaaaaaaaa

SEQ ID NO: 26806 - RNA, 1721 nt, Artificial Sequence
  mRNA product Design a-1 (A100) comprising derived and/or modified sequence from LASV(LASV221-NIG-2010;Clade II)__AIT17624__GPCmut4 (opt1)
aggagagucccgcagucggcguccagcggcucugcuuguucgugugugugucguugcaggccuuauucaagcuuaccaugggccagaucaucaccuucuuccaggaggugccccacgucaucgaggaggugaugaacaucgugcugaucgcccucagccugcuggccauccucaaggggaucuacaacgucgcgaccugcggccuguucgggcugguguccuuccuccugcugugcggccgcagcugcuccacgaccuacaaggggguguacgagcuccagacccuggagcuggacauggccagccucaacaugugcaugccgcuguccugcaccaagaacaacagccaccacuacaucauggucggcaacgagacgggccuggagcucacccugaccaacaccuccaucaucaaccacaaguucugcaaccugagcgacgcccacaagaagaaccucuacgaccacgcccugauguccaucaucagcacguuccaccuguccauccccaacuucaaccaguacgaggccaugagcugcgacuucaacgggggcaagaucuccgugcaguacaaccucagccacaccuacgcgaucgacgccgccaaccacugcgggaccaucgccaacggcgugcugcagaccuucaugcggauggcguggggcggguccuacaucgcccuggacagcggcaagggguccugggacugcaucaugacgagcuaccaguaccucaucauccagaacaccaccugggaggaccacugccaguucucccgccccagccccaucggcuaccuggggcugcucagccagcggacccgcgacaucuacaucucccggcgccggcgcggcacguucaccuggacccugagcgacuccgagggcaacgagacccccgggggcuacugccugacgcgguggaugcucaucgaggccgagcugaagugcuucgggaacaccgccgucgccaagugcaacgagaagcacgacgaggaguucugcgacaugcugcgccucuucgacuucugcaagcaggcgauccggcgccugaagaccccggcccagaugagcauccagcugaucaacaaggccgugaacgcccucaucaacgaccagcugaucaugaagaaccaccuccgggacaucaugggcauccccuacugcaacuacuccaaguacugcuaccugaaccacaccgugacggggaagaccagccugccccgcugcugccuggucuccaacggcagcuaccucaacgagacccacuucuccgacgacaucgagcagcaggccgacaacaugaucaccgagaugcugcagaaggaguacauggaccggcagggcaagacgccgcuggggcucguggaccuguucguguucagcaccuccuucuaccugaucagcaucuuccugcaccucgucaagauccccacccaccgccacgugaucggcaagcccugccccaagccgcaccggcugaaccacauggggaucugcuccugcggccuguacaagcaccccggggugcccgucaaguggaagcgcugaggacuagucccuguucccagagcccacuuuuuuuucuuuuuuugaaauaaaauagccugucuuucagaucuaaaaaaaaaaaaaaaaaaaaaaaaaaaaaaaaaaaaaaaaaaaaaaaaaaaaaaaaaaaaaaaaaaaaaaaaaaaaaaaaaaaaaaaaaaaaaaaaaaaa

SEQ ID NO: 26807 - RNA, 1721 nt, Artificial Sequence
  mRNA product Design a-1 (A100) comprising derived and/or modified sequence from LASV(LASV237-NIG-2010;Clade II)__AIT17638__GPCmut4 (opt1)
aggagagucccgcagucggcguccagcggcucugcuuguucgugugugugucguugcaggccuuauucaagcuuaccaugggccagaucaucaccuucuuccaggaggugccccacgucaucgaggaggugaugaacaucgugcugaucgcccucagccugcuggccauccucaaggggaucuacaacgucgcgaccugcggccuguucgggcugguguccuuccuccugcugugcggccgcagcugcuccacgaccuacaaggggguguacgagcuccagacccuggagcuggacauggccagccucaacaugugcaugccgcuguccugcaccaagaacaacagccaccacuacaucauggucggcaacgagacgggccuggagcucacccugaccaacaccuccaucaucaaccacaaguucugcaaccugagcgacgcccacaagaaggaccucuacgaccacgcccugauguccaucaucagcacguuccaccuguccauccccaacuucaaccaguacgaggccaugagcugcgacuucaacgggggcaagaucuccgugcaguacaaccucagccacaccuacgcgguggacgccgccaaccacugcgggaccaucgccaacggcguccugcagaccuucaugcggauggcguggggcggguccuacaucgcccuggacagcggcaagggguccugggacugcaucaugacgagcuaccaguaccucaucauccagaacaccaccugggaggaccacugccaguucucccgccccagccccaucggcuaccuggggcugcucagccagcggacccgcgacaucuacaucucccggcgccggcgcggcacguucaccuggacccugagcgacuccgagggcaacgagacccccgggggcuacugccugacgcgguggaugcucaucgaggccgagcugaagugcuucgggaacaccgccguggccaagugcaacgagaagcacgacgaggaguucugcgacaugcugcgccucuucgacuucugcaagcaggcgauccggcgccugaagaccccggcccagaugagcauccagcugaucaacaaggccgugaacgcccucaucaacgaccagcugaucaugaagaaccaccuccgggacaucaugggcauccccuacugcaacuacuccaaguacugcuaccugaaccacaccgucacggggaagaccagccugccccgcugcugccugguguccaacggcagcuaccucaacgagacccacuucuccgacgacaucgagcagcaggccgacaacaugaucaccgagcugcugcagaaggaguacauggaccggcagggcaagacgccgcucgggcugguggaccuguucgucuucagcaccuccuucuaccugaucagcaucuuccuccaccugaucaagauccccacccaccgccacaucaccggcaagcccugccccaagccgcaccggcugaaccacauggggaucugcuccugcggccucuacaagcaccccggggugcccgugaaguggaagcgcugaggacuagucccuguucccagagcccacuuuuuuuucuuuuuuugaaauaaaauagccugucuuucagaucuaaaaaaaaaaaaaaaaaaaaaaaaaaaaaaaaaaaaaaaaaaaaaaaaaaaaaaaaaaaaaaaaaaaaaaaaaaaaaaaaaaaaaaaaaaaaaaaaaaaa

SEQ ID NO: 26808 - RNA, 1721 nt, Artificial Sequence
  mRNA product Design a-1 (A100) comprising derived and/or modified sequence from LASV(LASV253-NIG-2011;Clade II)__AIT17670__GPCmut4 (opt1)
aggagagucccgcagucggcguccagcggcucugcuuguucgugugugugucguugcaggccuuauucaagcuuaccaugggccagaucaucaccuucuuccaggaggugccccacgucaucgaggaggugaugaacaucgugcugaucgcccucagccugcuggccauccucaaggggaucuacaacgucgcgaccugcggccuguucgggcugguguccuuccuccugcugugcggccgcagcugcuccacgaccuacaaggggguguacgagcuccagacccuggagcuggacauggccagccucaacaugugcaugccgcuguccugcaccaagaacaacagccaccacuacaucauggucggcaacgagacgggccuggagcucacccugaccaacaccuccaucaucaaccacaaguucugcaaccugagcgacgcccacaagaagaaccucuacgaccacgcccugauguccaucaucagcacguuccaccuguccauccccaacuucaaccaguacgaggccaugagcugcgacuucaacgggggcaagaucuccgugcaguacaaccucagccacaccuacgcgguggacgccgccaaccacugcgggaccaucgccaacggcguccugcagaccuucaugcggauggcguggggcggguccuacaucgcccuggacagcggcaagggguccugggacugcaucaugacgagcuaccaguaccucaucauccagaacaccaccugggaggaccacugccaguucucccgccccagccccaucggcuaccuggggcugcucagccagcggacccgcgacaucuacaucucccggcgccggcgcggcacguucaccuggacccugagcgacuccgagggcaacgagacccccgggggcuacugccugacgcgguggaugcucaucgaggccgagcugaagugcuucgggaacaccgccguggccaagugcaacgagaagcacgacgaggaguucugcgacaugcugcgccucuucgacuucugcaagcaggcgauccggcgccugaaggccccggcccagaugagcauccagcugaucaacaaggccgugaacgcccucaucaacgaccagcugaucaugaagaaccaccuccgggacaucaugggcauccccuacugcaacuacuccaaguacugcuaccugaaccacaccgucaccgggcgcacgagccugccccggugcugccugguguccaacggcagcuaccucaacgagacccacuucuccgacgacaucgagcagcaggcggacaacaugaucaccgagcugcugcagaaggaguacaucgaccgccagggcaagaccccgcucgggcugguggaccuguucgucuucagcacguccuucuaccugaucagcaucuuccuccaccuggugaagauccccacccaccggcacaucaucggcaagcccugccccaagccgcaccgccugaaccacauggggaucugcuccugcggccucuacaagcaccccggggugcccgucaaguggaagcggugaggacuagucccuguucccagagcccacuuuuuuuucuuuuuuugaaauaaaauagccugucuuucagaucuaaaaaaaaaaaaaaaaaaaaaaaaaaaaaaaaaaaaaaaaaaaaaaaaaaaaaaaaaaaaaaaaaaaaaaaaaaaaaaaaaaaaaaaaaaaaaaaaaaaa

SEQ ID NO: 26809 - RNA, 1721 nt, Artificial Sequence
  mRNA product Design a-1 (A100) comprising derived and/or modified sequence from LASV(LASV254-NIG-2011;Clade II)__AIT17674__GPCmut4 (opt1)
aggagagucccgcagucggcguccagcggcucugcuuguucgugugugugucguugcaggccuuauucaagcuuaccaugggccagaucaucaccuucuuccaggaggugccccacgucaucgaggaggugaugaacaucgugcugaucgcccucagccugcuggccauccucaaggggaucuacaacgucgcgaccugcggccuguucgggcugguguccuuccuccugcugugcggccgcagcugcuccacgaccuacaaggggguguacgagcuccagacccuggagcuggacaugaccaaccucaacaugugcaugccgcugagcugcacgaagaacaacucccaccacuacaucauggucggcaacgagaccggccuggagcucacccugaccaacacgagcaucaucaaccacaaguucugcaaccuguccgacgcccacaagaagaaccucuacaaccacgcccugaugagcaucaucuccaccuuccaccugagcauccccaacuucaaccaguacgaggccauguccugcgacuucaacgggggcaagaucagcgugcaguacaaccucucccacagcuacgccguggacgcggccaaccacugcgggaccaucgccaacggcguccugcagaccuucaugcggauggccuggggcggguccuacaucgcgcuggacagcggcaaggggaacugggacugcaucaugacguccuaccaguaccucaucauccagaacaccaccugggaggaccacugccaguucagccgccccucccccaucggcuaccuggggcugcucagccagcggacccgcgacaucuacaucagccggcgccggcgcggcacguucaccuggacccuguccgacagcgagggcaacgagacccccgggggcuacugccugacgcgguggaugcucaucgaggccgagcugaagugcuucgggaacaccgccguggccaagugcaacgagaagcacgacgaggaguucugcgacaugcugcgccucuucgacuucugcaagcaggccauccggcgccugaagaccccggcgcaggccaacauccagcugaucaacaaggccgugaacgcccucaucaacgaccagcugaucaugaagaaccaccuccgggacaucaugggcauccccuacugcaacuacuccaaguacugcuaccugaaccacaccgucacggggaagaccagccugccccgcugcugccugguguccaacggcagcuaccucaacgagacccacuucuccgacgacaucgagcagcaggccgacaacaugaucaccgagcugcugcagaaggaguacauggaccggcagggcaagacgccgcucgggcugguggaccuguucgucuucagcaccuccuucuaccugaucagcaucuuccuccaccuggugaagauccccacccaccgccacgugaucggcaagcccugccccaagccgcaccggcugaaccacauggggaucugcuccugcggccucuacaagcaccccgggguccccgugaaguggaagcgcugaggacuagucccuguucccagagcccacuuuuuuuucuuuuuuugaaauaaaauagccugucuuucagaucuaaaaaaaaaaaaaaaaaaaaaaaaaaaaaaaaaaaaaaaaaaaaaaaaaaaaaaaaaaaaaaaaaaaaaaaaaaaaaaaaaaaaaaaaaaaaaaaaaaaa

SEQ ID NO: 26810 - RNA, 1721 nt, Artificial Sequence
  mRNA product Design a-1 (A100) comprising derived and/or modified sequence from LASV(Nig08-A19;Clade III)__ADU56618__GPCmut4 (opt1)
aggagagucccgcagucggcguccagcggcucugcuuguucgugugugugucguugcaggccuuauucaagcuuaccaugggccagaucgugaccuucuuccaggaggucccccacgugaucgaggaggugaugaacaucguccugaucgcccucagcauccuggccauccugaaggggcucuacaacaucgcgaccugcggccugaucgggcuggugacguuccuccugcuguccggccgcagcugcuccaugaccuacaaggggguguacgagcuccagacccuggagcugaacaugaacacccucaacaugugcaugccgcugagcugcacgaagaacaacucccaccacuacaucauggucggcaacgagaccggccuggagcucacccugaccaacacgagccugcuccaccacaaguucugcaaccuguccgacgcccacaagaagaaccuguacgaccacacccucaugagcaucaucuccaccuuccaccugagcauccccaacuucaaccaguacgaggccauguccugcgacuucaacgggggcaagaucaccgugcaguacaaccugagccacuccuacgccaucgacgccgcgaaccacugcgggacgguggccaacggcguccuccagaccuucaugcggauggccuggggcgggagcuacaucgcccuggacuccggccgcgggaagugggacugcaucaugaccagcuaccaguaccugaucauccagaacaccacgugggaggaccacugccaguucucccggcccagccccaucggcuaccucgggcugcugucccagcgcacccgggacaucuacaucagccgccggcgccggggcaccuucaccuggacgcucagcgacuccgagggcaacgagacccccgggggcuacugccugacccgcuggaugcugaucgaggcggagcucaagugcuucgggaacaccgccguggccaagugcaacgagaagcacgacgaggaguucugcgacaugcugcggcuguucgacuucugcaagcaggccauccgccggcucaaggccccggcgcagaugagcauccagcugaucaacaaggccgugaacgcccugaucaacgaccagcucaucaugaagaaccaccuccgcgacaucaugggcauccccuacugcaacuacuccaaguacugcuaccugaaccacacgagcaccgggcggaccucccugccccgcugcugccuggucagcaacggcuccuaccugaacgagacccacuucagcgacgacaucgagcagcaggccgacaacaugaucacggagaugcuccagaaggaguaccuggaccggcagggcaagaccccgcuggggcugguggaccucuucguguucuccaccagcuucuaccugaucuccaucuuccugcaccucgucaagauccccacccaccgccacaucgugggcaagcccugccccaagccgcaccggcugaaccacauggggaucugcagcugcggccuguacaagcagcccggggugcccguccgcuggaagcggugaggacuagucccuguucccagagcccacuuuuuuuucuuuuuuugaaauaaaauagccugucuuucagaucuaaaaaaaaaaaaaaaaaaaaaaaaaaaaaaaaaaaaaaaaaaaaaaaaaaaaaaaaaaaaaaaaaaaaaaaaaaaaaaaaaaaaaaaaaaaaaaaaaaaa

SEQ ID NO: 26811 - RNA, 1724 nt, Artificial Sequence
  mRNA product Design a-1 (A100) comprising derived and/or modified sequence from LASV(G1180-SLE-2010;Clade IV)__AIT17168__GPCmut4 (opt1)
aggagagucccgcagucggcguccagcggcucugcuuguucgugugugugucguugcaggccuuauucaagcuuaccaugggccagaucgugaccuucuuccaggaggucccccacgugaucgaggaggugaugaacaucguccugaucgcccucagcauccuggccgugcugaaggggcucuacaacuucgcgaccugcggccugguggggcugcucacguuccugcugcucugcggccgcuccugcaccgccagccgguacaagggggucuacgagcugcagacccuggagcucaacauggagacccugaacaugugcaugccgcuguccugcacgaagaacaacagccaccacuacaucauggugggcaacgagaccggccucgagcugacccugaccaacacguccaucaucaaccacaaguucugcaaccucagcgacgcccacaagaagaaccuguacgaccacgcccugauguccaucaucagcaccuuccaccucuccauccccaacuucaaccaguacgaggccaugagcugcgacuucaacgggggcaagaucuccgugcaguacaaccugagccacuccuacgcgggggacgccgccaaccacugcggcaccgucgccaacggggugcugcagaccuucaugcgcauggcguggggcggcagcuacaucgcccucgacuccgggcacggcagcugggacugcaucaugacguccuaccaguaccugaucauccagaacaccaccugggaggaccacugccaguucagccggcccucccccaucggguaccugggccuccugagccagcgcacccgggacaucuacaucagccgccggcgccggggcacguucaccuggacccuguccgacagcgaggggaaggacaccccgggcggguacugccucacgcgcuggaugcugaucgaggccgagcugaagugcuucggcaacaccgccguggccaagugcaacgagaagcacgacgaggaguucugcgacaugcuccggcuguucgacuucugcaagcaggcgauccagcgccugaaggcccccgcccagauguccauccagcucaucaacaaggccgucaacgcccugaucaacgaccagcugaucaugaagaaccaccuccgggacaucauggggauccccuacugcaacuacagcaaguacugcuaccugaaccacaccaccacgggcaagaccucccugcccaagugcugccucgugagcaacggcuccuaccugaacgagacccacuucagcgacgacaucgagcagcaggcggacaacaugaucaccgagaugcugcagaaggaguacauggagcgccaggggaagacgccgcucggccugguggaccuguucgucuucuccaccagcuucuaccugaucuccaucuuccuccaccuggugaagauccccacccaccggcacaucgugggcaagagcugccccaagccccaccgccugaaccacauggggaucugcuccugcgggcucuacaagcagccgggcguccccgugaaguggaagcggugaggacuagucccuguucccagagcccacuuuuuuuucuuuuuuugaaauaaaauagccugucuuucagaucuaaaaaaaaaaaaaaaaaaaaaaaaaaaaaaaaaaaaaaaaaaaaaaaaaaaaaaaaaaaaaaaaaaaaaaaaaaaaaaaaaaaaaaaaaaaaaaaaaaaa

SEQ ID NO: 26812 - RNA, 1724 nt, Artificial Sequence
  mRNA product Design a-1 (A100) comprising derived and/or modified sequence from LASV(G1442-SLE-2011;Clade IV)__AIT17180__GPCmut4 (opt1)
aggagagucccgcagucggcguccagcggcucugcuuguucgugugugugucguugcaggccuuauucaagcuuaccaugggccagaucgugaccuucuuccaggaggucccccacgugaucgaggaggugaugaacaucguccugaucgcccucagcauccuggccgugcugaaggggcucuacaacguggcgaccugcggccugaucgggcuggucacguuccuccugcugugcggccgcuccugcaccaccacccucuacaaggggguguacgagcugcagacgcuggagcucaacauggagacccugaacaugugcaugccgcugagcugcaccaagaacaacucccaccacuacauccgggugggcaacgagaccggccucgagcugacgcugaccaacaccagcaucaucaaccacaaguucugcaaccucuccgacgcccacaagaagaaccuguacgaccacgcccugaugagcaucaucuccaccuuccaccucagcauccccaacuucaaccaguacgaggccauguccugcgacuucaacgggggcaagaucagcguccaguacaaccugucccacagcuacgccggggacgcggccaaccacugcggcacgguggccaacggggugcugcagaccuucaugcgcauggccuggggcggcuccuacaucgcgcucgacagcgggcggggcaacugggacugcaucaugaccuccuaccaguaccugaucauccagaacaccacgugggacgaccacugccaguucagccgccccucccccaucggguaccugggccuccugagccagcggacccgcgacgucuacaucucccggcgccggcgcggcaccuucaccuggacgcugagcgacagcgaggggaaggacaccccgggcggguacugccucacccgguggaugcugaucgaggccgagcugaagugcuucggcaacaccgccguggccaagugcaacgagaagcacgacgaggaguucugcgacaugcuccgccuguucgacuucugcaagcaggccauccagcggcugaaggcgcccgcccagauguccauccagcucaucaacaaggccgugaacgcccugaucaacgaccagcugaucaugaagaaccaccuccgcgacaucauggggauccccuacugcaacuacagcaaguacugcuaccugaacaacacggccaccggcaagaccucccugcccaagugcugccucaucagcaacggcuccuaccugaacgagacccacuucagcgacgacaucgagcaggaggcggacaacaugaucacggagaugcugcagaaggaguacauggagcggcaggggaagaccccgcucggccuggucgaccuguucguguucuccaccagcuucuaccugaucuccaucuuccuccaccuggugaagauccccacccaccgccacaucgucggcaagagcugccccaagccccaccggcugaaccacauggggaucugcuccugcgggcucuacaagcagccgggcgugcccgugcgcuggaagcggugaggacuagucccuguucccagagcccacuuuuuuuucuuuuuuugaaauaaaauagccugucuuucagaucuaaaaaaaaaaaaaaaaaaaaaaaaaaaaaaaaaaaaaaaaaaaaaaaaaaaaaaaaaaaaaaaaaaaaaaaaaaaaaaaaaaaaaaaaaaaaaaaaaaaa

SEQ ID NO: 26813 - RNA, 1724 nt, Artificial Sequence
  mRNA product Design a-1 (A100) comprising derived and/or modified sequence from LASV(G3010-SLE-2013;Clade IV)__AIT17344__GPCmut4 (opt1)
aggagagucccgcagucggcguccagcggcucugcuuguucgugugugugucguugcaggccuuauucaagcuuaccaugggccagaucgugaccuucuuccaggaggucccccacgugaucgaggaggugaugaacaucguccugaucgcccucagcauccuggccgugcugaaggggcucuacaacuucgcgaccugcggccugguggggcuggucacguuccuccugcugugcggccgcuccugcaccaccagccucuacaaggggguguacgagcugcagacccuggagcucaacauggagacgcugaacaugugcaugccgcuguccugcaccaagaacaacagccaccacuacaucauggugggcaacgagaccggccucgagcugacccugacgaacaccuccaucaucaaccacaaguucugcaaccucagcgacgcccacaagaagaaccuguacaaccacgcccugauguccaucaucagcaccuuccaccucuccauccccaacuucaaccaguacgaggccaugagcugcgacuucaacgggggcaagaucuccguccaguacaaccugagccacuccuacgccggggacgcggccagccacugcggcaccguggccaacggggugcugcagacguucaugcggauggccuggggcggcuccuacaucgcgcucgacagcggguacggcaagugggacugcaucaugaccuccuaccaguaccugaucauccagaacaccaccugggaggaccacugccaguucagccgccccucccccaucggguaccugggccuccugagccagcggacgcgcgacaucuacaucagccggcgccggcgcggcaccuucaccuggacccuguccgacagcgaggggaaggacacgccgggcggguacugccucacccgguggaugcugaucgaggccgagcugaagugcuucggcaacaccgccgucgccaagugcaacgagaagcacgacgaggaguucugcgacaugcuccgccuguucgacuucugcaagcaggccauccagcggcugaagacccccgcgcagauguccauccagcucaucaacaaggccgugaacgcccugaucaacgaccagcugaucaugaagaaccaccuccgcgacaucauggggauccccuacugcaacuacagcaaguacugcuaccugaaccacacgaccaccggcaagaccucccugcccaagugcugccucgugagcaacggcuccuaccugaacgagacgcacuucagcgacgacaucgagcagcaggccgacaacaugaucaccgagaugcugcagaaggaguacauggagcggcaggggaagaccccgcucggccuggucgaccuguucguguucuccaccagcuucuaccugaucuccaucuuccuccaccuggugaagauccccacgcaccgccacaucgucggcaagagcugccccaagccccaccggcugaaccacauggggaucugcuccugcgggcucuacaagcagccgggcgugcccgugcgcuggaagcggugaggacuagucccuguucccagagcccacuuuuuuuucuuuuuuugaaauaaaauagccugucuuucagaucuaaaaaaaaaaaaaaaaaaaaaaaaaaaaaaaaaaaaaaaaaaaaaaaaaaaaaaaaaaaaaaaaaaaaaaaaaaaaaaaaaaaaaaaaaaaaaaaaaaaa

SEQ ID NO: 26814 - RNA, 1724 nt, Artificial Sequence
  mRNA product Design a-1 (A100) comprising derived and/or modified sequence from LASV(G502-SLE-2009;Clade IV)__AIT17126__GPCmut4 (opt1)
aggagagucccgcagucggcguccagcggcucugcuuguucgugugugugucguugcaggccuuauucaagcuuaccaugggccagaucgugaccuucuuccaggaggucccccacgugaucgaggaggugaugaacaucguccugaucgcccucagcauccuggccgugcugaaggggcucuacaacuucgcgaccugcggccugguggggcugcucacguuccugcugcucugcggccgcuccugcaccaccgggcuguacaagggcgucuacgagcugcagacccucgagcugaacauggagacgcugaacaugugcaugccgcucagcugcaccaagaacaacucccaccacuacaucauggugggcaacgagaccgggcuggagcugacccucacgaacaccagcaucaucaaccacaaguucugcaaccuguccgacgcccacaagaagaaccuguacgaccacgcccucaugagcaucaucuccaccuuccaccugagcauccccaacuucaaccaguacgaggccauguccugcgacuucaacggcgggaagaucagcgugcaguacaaccugucccacagcuacgccggcgacgcggccgaccacugcgggaccgucgccaacggcgugcuccagacguucaugcggauggccuggggcggguccuacaucgcgcuggacagcggccgcgggcggugggacugcaucaugaccuccuaccaguaccugaucauccagaacaccaccugggaggaccacugccaguucagccgccccucccccaucggcuaccucggccugcugagccagcggacgcgcgacaucuacaucucccggcgccggcgcgggaccuucaccuggacccucagcgacagcgagggcaaggacacgcccgggggcuacugccugacccgguggaugcugaucgaggccgagcucaagugcuucgggaacaccgccguggccaagugcaacgagaagcacgacgaggaguucugcgacaugcugcgccuguucgacuucugcaagcaggccauccagcggcucaaggcgccggcccagauguccauccagcugaucaacaaggccgucaacgcccugaucaacgaccagcucgugaugaagaaccaccuccgcgacaucaugggcauccccuacugcaacuacagccgguacugcuaccugaaccacaccacgaccggccgcaccucccugcccaagugcugccuggugagcaacggguccuaccugaacgagacccacuucagcgacgacaucgagcagcaggccgacaacaugaucacggagaugcuccagaaggaguacauggagcggcagggcaagaccccgcuggggcuggucgaccuguucguguucuccaccagcuucuaccucaucuccaucuuccugcaccuggugaagauccccacccaccgccacaucgucggcaagagcugccccaagccccaccggcucaaccacauggggaucugcuccugcggccuguacaagcagccgggcgugcccgugaaguggaagcgcugaggacuagucccuguucccagagcccacuuuuuuuucuuuuuuugaaauaaaauagccugucuuucagaucuaaaaaaaaaaaaaaaaaaaaaaaaaaaaaaaaaaaaaaaaaaaaaaaaaaaaaaaaaaaaaaaaaaaaaaaaaaaaaaaaaaaaaaaaaaaaaaaaaaaa

SEQ ID NO: 26815 - RNA, 1724 nt, Artificial Sequence
  mRNA product Design a-1 (A100) comprising derived and/or modified sequence from LASV(G733-SLE-2010;Clade IV)__AIT17154__GPCmut4 (opt1)
aggagagucccgcagucggcguccagcggcucugcuuguucgugugugugucguugcaggccuuauucaagcuuaccaugggccagaucgugaccuucuuccaggaggucccccacgugaucgaggaggugaugaacaucguccugaucgcccucagcauccuggccgugcugaaggggcucuacaacuucgcgaccugcggcaucguggggcuggucuccuuccugcuccugugcggccgcagcugcacgaccucccuguacaaggggguguacgagcuccagacccuggagcugaacauggagacccucaacaugugcaugccgcugagcugcacgaagaacaacucccaccacuacaucauggugggcaacgagaccggccuggagcucacccugaccaacacgagcaucaucaaccacaaguucugcaaccuguccgacgcccacaagaagaaccucuacgaccacgcccugaugagcaucaucuccaccuuccaccugagcauccccaacuucaaccaguacgaggccauguccugcgacuucaacgggggcaagaucagcguccaguacaaccucucccacagcuacgccggggacgcggccaaccacugcggcaccaucgccaacggggugcugcagaccuucaugcggauggccuggggcggcuccuacaucgcgcuggacagcgggcgcgaccggugggacugcaucaugacguccuaccaguaccucaucauccagaacaccaccugggaggaccacugccaguucagccgccccucccccaucggcuaccuggggcugcucagccagcggacccgcgacaucuacaucagccggcgccggcgcggcacguucaccuggacccuguccgacagcgagggcaaggacacccccgggggcuacugccugacgcgguggaugcucaucgaggccgagcugaagugcuucgggaacaccgccguggccaagugcaacgagaagcacgacgaggaguucugcgacaugcugcgccucuucgacuucugcaagcaggccauccagcggcugaaggcgccggcccagauguccauccagcugaucaacaaggccgucaacgcccucaucaacgaccagcugaucaugaagaaccaccuccgcgacaucaugggcauccccuacugcaacuacagcaaguacugcuaccugaaccacaccaccacggggaagaccucccugcccaagugcugccuggugagcaacggcuccuaccucaacgagacccacuucagcgacgacaucgagcagcaggccgacaacaugaucaccgagaugcugcagaaggaguacauggagcggcagggcaagacgccgcuggggcucguggaccuguucgucuucuccaccagcuucuaccugaucuccaucuuccugcaccucgugaagauccccacccaccgccacguggucggcaagagcugccccaagccccaccggcugaaccacauggggaucugcuccugcggccuguacgggcagccgggcgugcccgugaaguggaagcgcugaggacuagucccuguucccagagcccacuuuuuuuucuuuuuuugaaauaaaauagccugucuuucagaucuaaaaaaaaaaaaaaaaaaaaaaaaaaaaaaaaaaaaaaaaaaaaaaaaaaaaaaaaaaaaaaaaaaaaaaaaaaaaaaaaaaaaaaaaaaaaaaaaaaaa

SEQ ID NO: 26816 - RNA, 1724 nt, Artificial Sequence
  mRNA product Design a-1 (A100) comprising derived and/or modified sequence from MOPV/LASV reassortant(IGS-1;Clade IV)__AFY05576__GPCmut4 (opt1)
aggagagucccgcagucggcguccagcggcucugcuuguucgugugugugucguugcaggccuuauucaagcuuaccaugggccagaucgugaccuucuuccaggaggucccccacgugaucgaggaggugaugaacaucguccugaucgcccucagcgugcuggccgugcugaaggggcucuacaacuucgcgaccugcggccuggucgggcuggugacguuccuccugcugugcggccgcuccugcaccaccagccucuacaaggggguguacgagcugcagacccuggagcucaacauggagacgcugaacaugugcaugccgcuguccugcaccaagaacaacagccaccacuacaucauggucggcaacgagaccggccucgagcugacccugacgaacaccuccaucaucaaccacaaguucugcaaccucagcgacgcccacaagaagaaccuguacgaccacgcccugauguccaucaucagcaccuuccaccucuccauccccaacuucaaccaguacgaggccaugagcugcgacuucaacgggggcaagaucuccgugcaguacaaccugagccacuccuacgccggggacgcggccaaccacugcggcaccguggccaacgggguccugcagacguucaugcggauggccuggggcggcagcuacaucgcgcucgacuccgggcgcggcaacugggacugcaucaugaccagcuaccaguaccugaucauccagaacaccaccugggaggaccacugccaguucucccggcccagccccaucggguaccugggccuccugucccagcgcacgcgggacaucuacaucagccgccggcgccggggcaccuucaccuggacccugagcgacuccgagggggaggacacgccgggcggguacugccucacccgcuggaugcugaucgaggccgagcugaagugcuucggcaacaccgccguggccaagugcaacgagaagcacgacgaggaguucugcgacaugcuccggcuguucgacuucugcaagcaggccauccagcgccugaaggcgcccgcccagaugagcauccagcucaucaacaaggccgugaacgcccugaucaacgaccagcugaucaugaagaaccaccuccgggacaucauggggauccccuacugcaacuacuccaaguacugcuaccugaaccacaccacgaccggccgcaccagccugcccaagugcugccucgucuccaacggcagcuaccugaacgagacccacuucuccgacgacaucgagcagcaggccgacaacaugaucacggagaugcugcagaaggaguacauggagcggcaggggaagaccccgcucggccugguggaccuguucguguucagcaccuccuucuaccugaucagcaucuuccuccaccuggucaagauccccacccaccgccacaucguggggaaguccugccccaagccccaccggcugaaccacaugggcaucugcagcugcgggcucuacaagcagccgggcgugcccgucaaguggaagcgcugaggacuagucccuguucccagagcccacuuuuuuuucuuuuuuugaaauaaaauagccugucuuucagaucuaaaaaaaaaaaaaaaaaaaaaaaaaaaaaaaaaaaaaaaaaaaaaaaaaaaaaaaaaaaaaaaaaaaaaaaaaaaaaaaaaaaaaaaaaaaaaaaaaaaa

SEQ ID NO: 26817 - RNA, 1724 nt, Artificial Sequence
  mRNA product Design a-1 (A100) comprising derived and/or modified sequence from LASV(LM765-SLE-2012;Clade IV)__AIT17814__GPCmut4 (opt1)
aggagagucccgcagucggcguccagcggcucugcuuguucgugugugugucguugcaggccuuauucaagcuuaccaugggccagaucgugaccuucuuccaggaggucccccacgugaucgaggaggugaugaacaucguccugaucgcccucagcauccuggccgugcugaaggggcucuacaacuucgcgaccugcggccugguggggcuggucacguuccuccugcugugcggccgcuccugcaccaccagccucuacaaggggguguacgagcugcagacccuggagcucaacauggagacgcugaacaugugcaugccgcuguccugcaccaagaacaacagccaccacuacaucauggugggcaacgagaccggccucgagcugacccugacgaacaccuccaucaucgaccacaaguucugcaaccucagcgacgcccaccggaagaaccuguacgaccacgcccugauguccaucaucagcaccuuccaccucuccauccccaacuucaaccaguacgaggccaugagcugcgacuucaacgggggcaagaucuccguccaguacaaccugagccacuccuacgccaaggacgcggccgaccacugcgggaccguggccaacggcgugcugcagacguucaugcgcauggccuggggcgggagcuacaucgcgcucgacuccggccgggggcgcugggacugcaucaugaccagcuaccaguaccugaucauccagaacaccaccugggaggaccacugccaguucucccggcccagccccaucggcuaccuggggcuccugucccagcgcacgcgggacaucuacaucagccgccggcgccggggcaccuucaccuggacccugagcgacuccgagggcaaggacacgcccgggggcuacugccucacccgcuggaugcugaucgaggccgagcugaagugcuucgggaacaccgccgucgccaagugcaacgagaagcacgacgaggaguucugcgacaugcuccggcuguucgacuucugcaagcaggccauccagcgccugaaggcgccggcccagaugagcauccagcucaucaacaaggccgugaacgcccugaucaacgaccagcugaucaugaagaaccaccuccgggacaucaugggcauccccuacugcaacuacuccaaguacugcuaccugaaccacaccacgaccgggaagaccagccugcccaagugcugccucguguccaacggcagcuaccugaacgagacccacuucuccgacgacaucgagcagcaggccgacaacaugaucacggagaugcugcagaaggaguacauggagcgccagggcaagaccccgcucgggcuggucgaccuguucguguucagcaccuccuucuaccugaucagcaucuuccuccaccuggugaagauccccacccaccggcacaucgucggcaagcccugccccaagccgcaccgccugaaccacauggggaucugcuccugcggccucuacaagcagcccggggugcccgugaaguggaagcggugaggacuagucccuguucccagagcccacuuuuuuuucuuuuuuugaaauaaaauagccugucuuucagaucuaaaaaaaaaaaaaaaaaaaaaaaaaaaaaaaaaaaaaaaaaaaaaaaaaaaaaaaaaaaaaaaaaaaaaaaaaaaaaaaaaaaaaaaaaaaaaaaaaaaa

SEQ ID NO: 26818 - RNA, 1724 nt, Artificial Sequence
  mRNA product Design a-1 (A100) comprising derived and/or modified sequence from LASV(LM776-SLE-2012;Clade IV)__AIT17824__GPCmut4 (opt1)
aggagagucccgcagucggcguccagcggcucugcuuguucgugugugugucguugcaggccuuauucaagcuuaccaugggccagaucgugaccuucuuccaggaggucccccacgugaucgaggaggugaugaacaucguccugaucgcccucagcauccuggccgugcugaaggggcucuacaacuucgcgaccugcggccugguggggcuggucacguuccuccugcugugcggccgcuccugcaccaccagcguguacaaggggguguacgagcuccagacccuggagcugaacauggagacgcucaacaugugcaugccgcuguccugcaccaagaacaacagccaccacuacaucauggucggcaacgagaccggccuggagcucacccugacgaacaccuccaucaucaaccacaaguucugcaaccugagcgacgcccacaagaagaaccucuacgaccacgcccugauguccaucaucagcaccuuccaccuguccauccccaacuucaaccaguacgaggccaugagcugcgacuucaacgggggcaagaucuccgugcaguacaaccucagccacuccuacgccggggacgcggccaaccacugcggcaccguggccaacgggguccugcagacguucaugcggauggccuggggcggcagcuacaucgcgcuggacuccgggcacggcaagugggacugcaucaugaccagcuaccaguaccucaucauccagaacaccaccugggaggaccacugccaguucucccgccccagccccaucggguaccugggccugcucucccagcggacgcgcgacaucuacaucagccggcgccggcgcggcaccuucaccuggacccugagcgacuccgaggggaaggacacgccgggcggguacugccugacccgguggaugcucaucgaggccgagcugaagugcuucggcaacaccgccguggccaagugcaacgagaagcacgacgaggaguucugcgacaugcugcgccucuucgacuucugcaagcaggccauccagcggcugaaggcgcccgcccagaugagcauccagcugaucaacaaggccgugaacgcccucaucaacgaccagcugaucaugaagaaccaccuccgcgacaucauggggauccccuacugcaacuacuccaaguacugcuaccugaaccacaccacgaccggcaagaccagccugcccaagugcugccuggucuccaacggcagcuaccucaacgagacccacuucuccgacgacaucgagcagcaggccgacaacaugaucacggagaugcugcagaaggaguacauggagcggcaggggaagaccccgcugggccucguggaccuguucguguucagcaccuccuucuaccugaucagcaucuuccugcaccucgucaagauccccacccaccgccacaucguggggaaguccugccccaagccccaccggcugaaccacaugggcaucugcagcugcgggcuguacaagcagccgggcgugcccguccgcuggaagcggugaggacuagucccuguucccagagcccacuuuuuuuucuuuuuuugaaauaaaauagccugucuuucagaucuaaaaaaaaaaaaaaaaaaaaaaaaaaaaaaaaaaaaaaaaaaaaaaaaaaaaaaaaaaaaaaaaaaaaaaaaaaaaaaaaaaaaaaaaaaaaaaaaaaaa

SEQ ID NO: 26819 - RNA, 1724 nt, Artificial Sequence
  mRNA product Design a-1 (A100) comprising derived and/or modified sequence from LASV(Mad39;Clade IV)__ANH09722__GPCmut4 (opt1)
aggagagucccgcagucggcguccagcggcucugcuuguucgugugugugucguugcaggccuuauucaagcuuaccaugggccagaucgugaccuucuuccaggaggucccccacgugaucgaggaggugaugaacaucguccugaucgcccucagcauccuggccgugcugaaggggcucuacaacguggcgaccugcggccugaucgggcuggucacguuccuccugcugugcggccgcuccugcaccaccacccucuacaaggggguguacgagcugcaggcccuggagcucaacauggagacgcugaacaugugcaugccgcugagcugcaccaagaacaacucccaccacuacauccgggugggcaacgagaccggccucgagcugacccugacgaacaccagccucaucaaccacaaguucugcaaccuguccgacgcccacaagaagaaccuguacgaccacgcccucaugagcaucaucuccaccuuccaccugagcauccccaacuucaaccaguacgaggccauguccugcgacuucaacgacgggaagaucagcguccaguacaaccugucccacaccuacgcgggcgacacggccaaccacugcgggaccguggccaacggcgugcuccagaccuucaugcgcauggccuggggcgggagcuacaucgcgcuggacuccggccgcgggggcugggacugcaucaugaccagcuaccaguaccugaucauccagaacacgaccugggaggaccacugccaguucucccggcccagccccaucggguaccucggccugcugucccagcggacccgcgacaucuacaucagccggcgccggcgcggcaccuucacguggacccucuccgacagcgaggggaaggacaccccgggcggguacugccugacccgguggaugcugaucgaggccgagcucaagugcuucggcaacacggccgucgccaagugcaacgagaagcacgacgaggaguucugcgacaugcugcgccuguucgacuucugcaagcaggccauccagcggcucaaggcgcccgcccagaugagcauccagcugaucaacaaggccgugaacgcccugaucaacgaccagcucaucaugaagaaccaccuccgcgacaucauggggauccccuacugcaacuacuccaaguacugcuaccugaaccacaccgugaccggcaagaccagccugcccaagugcugccuggucuccaacggcagcuaccugaacgagacgcacuucuccgacgacaucgagcagcaggccgacaacaugaucaccgagaugcuccagaaggaguacauggagcggcaggggaagaccccgcugggccugguggaccuguucguguucagcaccuccuucuaccucaucagcaucuuccugcaccuggucaagauccccacgcaccgccacgugguggggaagcccugccccaagccgcaccggcucaaccacaugggcaucugcuccugcggguucuacaagcagcccggcguccccgugcgcuggaagcggugaggacuagucccuguucccagagcccacuuuuuuuucuuuuuuugaaauaaaauagccugucuuucagaucuaaaaaaaaaaaaaaaaaaaaaaaaaaaaaaaaaaaaaaaaaaaaaaaaaaaaaaaaaaaaaaaaaaaaaaaaaaaaaaaaaaaaaaaaaaaaaaaaaaaa

SEQ ID NO: 26820 - RNA, 1724 nt, Artificial Sequence
  mRNA product Design a-1 (A100) comprising derived and/or modified sequence from LASV(Z0947-SLE-2011;Clade IV)__AIT17840__GPCmut4 (opt1)
aggagagucccgcagucggcguccagcggcucugcuuguucgugugugugucguugcaggccuuauucaagcuuaccaugggccagaucgugaccuucuuccaggaggucccccacgugaucgaggaggugaugaacaucguccugaucgcccucagcauccuggccgugcugaaggggcucuacaacuucgcgaccugcggccugguggggcuggucacguuccuccugcugugcggccgcuccugcaccaucagccucuacaaggggguguacgagcugcagacccuggagcucaacauggagacccugaacaugugcaugccgcuguccugcacgaagaacaacagccaccacuacaucauggugggcaacgagaccggccucgagcugacccugaccaacacguccaucaucaaccacaaguucugcaaccucagcgacgcccacaagaagaaccuguacgaccacgcccugauguccaucaucagcaccuuccaccucuccauccccaacuucaaccaguacgaggccaugagcugcgacuucaacgggggcaagaucuccguccaguacaaccugagccacuccuacgccggggacgcggccaaccacugcggcaccguggccaacggggugcugcagaccuucaugcggauggccuggggcggcagcuacaucgcgcucgacuccgggcgcgaccggugggacugcaucaugacgagcuaccaguaccugaucauccagaacaccaccugggaggaccacugccaguucucccgccccagccccaucggcuaccuggggcuccugucccagcggacccgcgacaucuacaucagccggcgccggcgcggcacguucaccuggacccugagcgacuccgagggcaaggacacccccgggggcuacugccucacgcgguggaugcugaucgaggccgagcugaagugcuucgggaacaccgccgucgccaagugcaacgagaagcacgacgaggaguucugcgacaugcuccgccuguucgacuucugcaagcaggccauccagcggcugaaggcgccggcccagaugagcauccagcucaucaacaaggccgugaacgcccugaucaacgaccagcugaucaugaagaaccaccuccgcgacaucaugggcauccccuacugcaacuacuccaaguacugcuaccugaaccacaccaccacggggaagaccagccugcccaagugcugccucguguccaacggcagcuaccugaacgagacccacuucuccgacgacaucgagcagcaggccgacaacaugaucaccgagaugcugcagaaggaguacauggagcggcagggcaagacgccgcucgggcuggucgaccuguucguguucagcaccuccuucuaccugaucagcaucuuccuccaccuggugaagauccccacccaccgccacaucgucggcaagcccugccccaagccgcaccggcugaaccacauggggaucugcuccugcggccucuacaagcagcccggggugcccgugaaguggaagcgcugaggacuagucccuguucccagagcccacuuuuuuuucuuuuuuugaaauaaaauagccugucuuucagaucuaaaaaaaaaaaaaaaaaaaaaaaaaaaaaaaaaaaaaaaaaaaaaaaaaaaaaaaaaaaaaaaaaaaaaaaaaaaaaaaaaaaaaaaaaaaaaaaaaaaa

SEQ ID NO: 26821 - RNA, 1724 nt, Artificial Sequence
  mRNA product Design a-1 (A100) comprising derived and/or modified sequence from LASV(Josiah;Clade IV)__NP_694870__GPCmut4 (opt4)
aggagagucccgcagucggcguccagcggcucugcuuguucgugugugugucguugcaggccuuauucaagcuuaccaugggccagaucgugaccuucuuccaggaggugccccacgugaucgaggaggugaugaacaucgugcugaucgcccugagcgugcuggccgugcugaagggccuguacaacuucgccaccugcggccuggugggccuggugaccuuccugcugcugugcggcagaagcugcaccaccagccuguacaagggcguguacgagcugcagacccuggagcugaacauggagacccugaacaugugcaugccccugagcugcaccaagaacaacagccaccacuacaucauggugggcaacgagaccggccuggagcugacccugaccaacaccagcaucaucaaccacaaguucugcaaccugagcgacgcccacaagaagaaccuguacgaccacgcccugaugagcaucaucagcaccuuccaccugagcauccccaacuucaaccaguacgaggccaugagcugcgacuucaacggcggcaagaucagcgugcaguacaaccugagccacagcuacgccggcgacgccgccaaccacugcggcaccguggccaacggcgugcugcagaccuucaugagaauggccuggggcggcagcuacaucgcccuggacagcggcagaggcaacugggacugcaucaugaccagcuaccaguaccugaucauccagaacaccaccugggaggaccacugccaguucagcagacccagccccaucggcuaccugggccugcugagccagagaaccagagacaucuacaucagcagaagaagaagaggcaccuucaccuggacccugagcgacagcgagggcaaggacacccccggcggcuacugccugaccagauggaugcugaucgaggccgagcugaagugcuucggcaacaccgccguggccaagugcaacgagaagcacgacgaggaguucugcgacaugcugagacuguucgacuucugcaagcaggccauccagagacugaaggcccccgcccagaugagcauccagcugaucaacaaggccgugaacgcccugaucaacgaccagcugaucaugaagaaccaccugagagacaucaugggcauccccuacugcaacuacagcaaguacugcuaccugaaccacaccaccaccggcagaaccagccugcccaagugcugccuggugagcaacggcagcuaccugaacgagacccacuucagcgacgacaucgagcagcaggccgacaacaugaucaccgagaugcugcagaaggaguacauggagagacagggcaagaccccccugggccugguggaccuguucguguucagcaccagcuucuaccugaucagcaucuuccugcaccuggugaagauccccacccacagacacaucgugggcaagagcugccccaagccccacagacugaaccacaugggcaucugcagcugcggccuguacaagcagcccggcgugcccgugaaguggaagagaugaggacuagucccuguucccagagcccacuuuuuuuucuuuuuuugaaauaaaauagccugucuuucagaucuaaaaaaaaaaaaaaaaaaaaaaaaaaaaaaaaaaaaaaaaaaaaaaaaaaaaaaaaaaaaaaaaaaaaaaaaaaaaaaaaaaaaaaaaaaaaaaaaaaaa

SEQ ID NO: 26822 - RNA, 1721 nt, Artificial Sequence
  mRNA product Design a-1 (A100) comprising derived and/or modified sequence from LASV(LP;Clade I)__AAF86701__GPCmut4 (opt4)
aggagagucccgcagucggcguccagcggcucugcuuguucgugugugugucguugcaggccuuauucaagcuuaccaugggccagaucaucaccuucuuccaggaggugccccacgugaucgaggaggugaugaacaucgugcugaucgcccugagccugcuggccauccugaagggccuguacaacaucgccaccugcggcaucaucggccugguggccuuccuguuccugugcggcaagagcugcagccugacccugaagggcggcuacgagcugcagacccuggagcugaacauggagacccugaacaugugcaugccccugagcugcaccaagaacagcagccaccacuacaucagagugggcaacgagaccggccuggagcugacccugaccaacaccagcaucaucaaccacaaguucugcaaccugagcgacgcccacaagaagaaccuguacgaccacgcccugaugagcaucaucagcaccuuccaccugagcauccccaacuucaaccaguacgaggccaugagcugcgacuucaacggcggcaagaucagcgugcaguacaaccugagccacagcuacgccggcgacgccgccgagcacugcggcaccguggccaacggcgugcugcagaccuucaugagaauggccuggggcggcagauacaucgcccuggacagcggcaagggcaacugggacugcaucaugaccagcuaccaguaccugaucauccagaacaccaccugggaggaccacugccaguucagcagacccagccccaucggcuaccugggccugcugagccagagaaccagagacaucuacaucagcagaagaagaagaggcaccuucaccuggacccugagcgacagcgagggcaacgagacccccggcggcuacugccugaccagauggaugcugaucgaggccgagcugaagugcuucggcaacaccgccguggccaagugcaacgagaagcacgacgaggaguucugcgacaugcugagacuguucgacuucugcaagcaggccaucagaagacugaaggcccccgcccagaugagcauccagcugaucaacaaggccgugaacgcccugaucaacgaccagcugaucaugaagaaccaccugagagacaucaugggcauccccuacugcaacuacagcaaguacugcuaccugaaccacaccagcagcggcagaaccagccugcccaagugcugccugaucagcaacggcagcuaccugaacgagacccaguucagcgacgacaucgagcagcaggccgacaacaugaucaccgagaugcugcagaaggaguacaucgagagacagggcaagaccccccugggccugguggacaucuucaucuucagcaccagcuucuaccugaucagcaucuuccugcaccugaucaagauccccacccacagacacaucgugggcaagcccugccccaagccccacagacugaaccacaugggcgugugcagcugcggccuguacaagcaccccggcgugcccaccaaguggaagagaugaggacuagucccuguucccagagcccacuuuuuuuucuuuuuuugaaauaaaauagccugucuuucagaucuaaaaaaaaaaaaaaaaaaaaaaaaaaaaaaaaaaaaaaaaaaaaaaaaaaaaaaaaaaaaaaaaaaaaaaaaaaaaaaaaaaaaaaaaaaaaaaaaaaaa

SEQ ID NO: 26823 - RNA, 1721 nt, Artificial Sequence
  mRNA product Design a-1 (A100) comprising derived and/or modified sequence from LASV(803213;Clade II)__AAF86703__GPCmut4 (opt4)
aggagagucccgcagucggcguccagcggcucugcuuguucgugugugugucguugcaggccuuauucaagcuuaccaugggccagaucaucaccuucuuccaggaggugccccacgugaucgaggaggugaugaacaucgugcugaucgcccugagccugcuggccauccugaagggcaucuacaacguggccaccugcggccuguucggccugaucagcuuccugcugcugugcggcagaagcugcagcgugaccuacaagggcguguacgagcugcagacccuggagcugaacauggccaaccugaacaugugcaugccccugagcugcaccaagaacaacagccaccacuacaucauggugggcaacgagaccggccuggagcugacccugaccaacaccagcaucaucaaccacaaguucugcaaccugagcgacgcccacaagaagaaccuguacgaccacgcccugaugagcaucaucagcaccuuccaccugagcauccccaacuucaaccaguacgaggccaugagcugcgacuucaacggcggcaagaucagcgugcaguacaaccugagccacagcuucgccguggacgccgccaaccacugcggcaccaucgccaacggcgugcugcagaccuucaugagaauggccuggggcggcagcuacaucgcccuggacagcggcaagggcaacugggacugcaucaugaccagcuaccaguaccugaucauccagaacaccaccugggaggaccacugccaguucagcagacccagccccaucggcuaccugggccugcugagccagagaaccagagacaucuacaucagcagaagaagaagaggcaccuucaccuggacccugagcgacagcgagggcaacgaggcccccggcggcuacugccugaccagauggaugcugaucgaggccgagcugaagugcuucggcaacaccgccguggccaagugcaacgagaagcacgacgaggaguucugcgacaugcugagacuguucgacuucugcaagcaggccaucaagagacugaagacccccgcccagaugagcauccagcugaucaacaaggccgugaacgcccugaucaacgaccagcugaucaugaagaaccaccugagagacaucaugggcauccccuacugcaacuacagcagauacugcuaccugaaccacaccgugaccggcaagaccagccugcccagaugcugccuggugagcaacggcagcuaccugaacgagacccacuucagcgacgacaucgagcagcaggccgacaacaugaucaccgagaugcugcagaaggaguacauggacagacagggcaagaccccccugggccugguggaccuguucguguucagcaccagcuucuaccugaucagcaucuuccugcaccuggugaagauccccacccacagacacaucgugggcaagcccugccccaagccccacagacugaaccacaugggcaucugcagcugcggccuguacaagcaccccggcgugcccgugaaguggaagagaugaggacuagucccuguucccagagcccacuuuuuuuucuuuuuuugaaauaaaauagccugucuuucagaucuaaaaaaaaaaaaaaaaaaaaaaaaaaaaaaaaaaaaaaaaaaaaaaaaaaaaaaaaaaaaaaaaaaaaaaaaaaaaaaaaaaaaaaaaaaaaaaaaaaaa

SEQ ID NO: 26824 - RNA, 1721 nt, Artificial Sequence
  mRNA product Design a-1 (A100) comprising derived and/or modified sequence from LASV(GA391;Clade III)__CAA36645__GPCmut4 (opt4)
aggagagucccgcagucggcguccagcggcucugcuuguucgugugugugucguugcaggccuuauucaagcuuaccaugggccagaucgugaccuucuuccaggaggugccccacgugaucgaggaggugaugaacaucgugcugaucgcccugagcauccuggccauccugaagggccuguacaacguggccaccugcggccugaucggccuggugaccuuccugcugcugagcggcagaagcugcagccugaucuacaagggcaccuacgagcugcagacccuggagcugaacauggagacccugaacaugugcaugccccugagcugcaccaagaacaacagccaccacuacaucagagugggcaacgagaccggccuggagcugacccugaccaacaccagcauccugaaccacaaguucugcaaccugagcgacgcccacaagagaaaccuguacgaccacagccugaugagcaucaucagcaccuuccaccugagcauccccaacuucaaccaguacgaggccaugagcugcgacuucaacggcggcaagaucaccgugcaguacaaccugagccacagcuucgccguggacgccgccggccacugcggcacccuggccaacggcgugcugcagaccuucaugagaauggccuggggcggcagcuacaucgcccuggacagcggcagaggcaacugggacugcaucaugaccagcuaccaguaccugaucauccagaacaccaccugggacgaccacugccaguucagcagacccagccccaucggcuaccugggccugcugagccagagaaccagagacaucuacaucagcagaagaagaagaggcaccuucaccuggacccugagcgacagcgagggcaacgagacccccggcggcuacugccugaccagauggaugcugaucgaggccgagcugaagugcuucggcaacaccgccguggccaagugcaacgagaagcacgacgaggaguucugcgacaugcugagacuguucgacuucugcaagcaggccaucagaagacugaagacccccgcccagaugagcauccagcugaucaacaaggccgugaacgcccugaucaacgaccagcugaucaugaagaaccaccugagagacaucaugggcauccccuacugcaacuacagcagauacugcuaccugaaccacaccagcaccggcaagaccagccugcccagaugcugccugaucagcaacggcagcuaccugaacgagaccaaguucagcgacgacaucgagcagcaggccgacaacaugaucaccgagaugcugcagaaggaguacaucgacagacagggcaagaccccccugggccugguggaccuguucguguucagcaccagcuucuaccugaucagcaucuuccugcaccuggugaagauccccacccacagacacaucgugggcaagcccugccccaagccccacagacugaaccacaugggcaucugcagcugcggccuguacaagcagcccggcgugcccgugagauggaagagaugaggacuagucccuguucccagagcccacuuuuuuuucuuuuuuugaaauaaaauagccugucuuucagaucuaaaaaaaaaaaaaaaaaaaaaaaaaaaaaaaaaaaaaaaaaaaaaaaaaaaaaaaaaaaaaaaaaaaaaaaaaaaaaaaaaaaaaaaaaaaaaaaaaaaa

SEQ ID NO: 26825 - RNA, 1724 nt, Artificial Sequence
  mRNA product Design a-1 (A100) comprising derived and/or modified sequence from LASV(AV;Clade V)__CCA30314__GPCmut4 (opt4)
aggagagucccgcagucggcguccagcggcucugcuuguucgugugugugucguugcaggccuuauucaagcuuaccaugggccagaucgugaccuucuuccaggaggugccccacgugaucgaggaggugaugaacaucgugcugaucgcccugagcauccuggccgugcugaagggccuguacaacaucgccaccugcggccugaucggccugaucaccuuccugcugcugugcggcagaagcugcagcagcaaccuguacaagggcguguacgagcugcagagccuggaccugaacauggagacccugaacaugugcaugccccugagcugcaccaagaacaacagccaccacuacaucagagugggcaacgacaccggccuggagcugacccugaccaacaccagcauccugaaccacaaguucugcaaccugagcgacgcccacaagaaggaccuguacgaccacgcccugaugagcaucaucagcaccuuccaccugagcauccccaacuucaaccaguacgaggccaugagcugcgacuucaacggcggcaagaucagcgugcaguacaaccugagccacagcuacgccaucgacgccgccaaccacugcggcaccguggccaacggcauccugcagaccuucaugagaauggccuggggcggcagcuacaucgcccuggacagcggcagaggcaacugggacugcaucaugaccagcuaccaguaccugaucauccagaacaccaccugggagaaccacugccaguucagcagacccagccccaucggcuaccugggccugcugagccagagaaccagagacaucuacaucagcagaagaagaagaggcaccuucaccuggacccugagcgacagcgagggcaacgccacccccggcggcuacugccugaccagauggaugcugaucgaggccgagcugaagugcuucggcaacaccgccguggccaagugcaacgagaagcacgacgaggaguucugcgacaugcugagacuguucgacuucugcaagcaggccaucagcagacugaagagccccgcccagaugagcauccagcugaucaacaaggccgugaacgcccugaucaacgaccagcugaucaugaagaaccaccugagagacaucaugggcauccccuacugcaacuacagcaaguacugcuaccugaaccacaccaucaccggcaagaccagccugcccaagugcugccuggugagcaacggcagcuaccugaacgagacccacuucagcgacgacaucgagcagcaggccgacaacaugaucaccgagaugcugcagaaggaguacauggagagacagggcaagaccccccugggccugguggaccuguucguguucagcaccagcuucuaccugaucagcaucuuccugagacuggugaagauccccacccacagacacaucgugggcaagcccugccccaagccccacagacugaaccacaugggcaucugcagcugcggccuguacaagcagcccggcgugcccgugagauggaagagaugaggacuagucccuguucccagagcccacuuuuuuuucuuuuuuugaaauaaaauagccugucuuucagaucuaaaaaaaaaaaaaaaaaaaaaaaaaaaaaaaaaaaaaaaaaaaaaaaaaaaaaaaaaaaaaaaaaaaaaaaaaaaaaaaaaaaaaaaaaaaaaaaaaaaa

SEQ ID NO: 26826 - RNA, 1721 nt, Artificial Sequence
  mRNA product Design a-1 (A100) comprising derived and/or modified sequence from LASV(Togo/2016/7082;Clade VI)__AMR44577__GPCmut4 (opt4)
aggagagucccgcagucggcguccagcggcucugcuuguucgugugugugucguugcaggccuuauucaagcuuaccaugggccagaucaucaccuucuuccaggaggugccccacgugaucgaggaggugaugaacaucgugcugaucgcccugagccugcuggccauccugaagggcguguacaacguggccaccugcggcaucaucggccuggugaccuuccuguuccugugcggcagaagcugcagccugaucuacaagggcagcuacgagcugcagacccuggagcugaacauggagacccugaacaugugcaugccccugagcugcaccaagaacagcagccaccacuacaucagagugggcaacgagaccggccuggagcugacccugaccaacaccagcaucaucaaccacaaguucugcaaccugagcgacgcccacaagagaaaccuguacgaccacgcccugaugagcauccugagcaccuuccaccugagcauccccaacuucaaccaguacgaggccaugagcugcgacuucaacggcggcaagaucagcgugcaguacaaccugagccacgccuacgccguggacgccgccgagcacugcggcaccguggccaacggcgugcugcagaccuucaugagaauggccuggggcggcagcuacaucgcccuggacagcggcagaggcaacugggacugcaucaugaccagcuaccaguaccugaucauccagaacaccaccugggaggaccacugccaguucagcagacccagccccaucggcuaccugggccugcugagccagagaaccagagacaucuacaucagcagaagaagaagaggcaccuucaccuggacccugagcgacagcgagggcaacgagacccccggcggcuacugccugaccagauggaugcugaucgaggccgagcugaagugcuucggcaacaccgccguggccaagugcaacgagaagcacgacgaggaguucugcgacaugcugagacuguucgacuucugcaagcaggccauccagagacugaagagccccgcccagaugagcauccagcugaucaacaaggccgugaacgcccugaucaacgaccagcugaucaugaagaaccaccugagagacaugaugggcauccccuacugcaacuacagcaaguacugcuaccugaaccacaccagcagcggcagaaccagccugcccaagugcugccuggugagcaacggcagcuaccugaacgagacccacuucagcgacgacaucgagcagcaggccgacaacaugaucaccgagaugcugcagaaggaguacaucgacagacagggcaagaccccccugggccugguggaccuguucguguucagcaccagcuucuaccugaucagcaucuuccugcaccugaucaagauccccacccacagacacaucgugggcaagcccugccccaagccccacagacugaaccacaugggcaucugcagcugcggccuguacaagcagcccggcgugcccaccagauggaagagaugaggacuagucccuguucccagagcccacuuuuuuuucuuuuuuugaaauaaaauagccugucuuucagaucuaaaaaaaaaaaaaaaaaaaaaaaaaaaaaaaaaaaaaaaaaaaaaaaaaaaaaaaaaaaaaaaaaaaaaaaaaaaaaaaaaaaaaaaaaaaaaaaaaaaa

SEQ ID NO: 26827 - RNA, 1721 nt, Artificial Sequence
  mRNA product Design a-1 (A100) comprising derived and/or modified sequence from LASV(KAK-428;Clade n.d. (VII))__ANH09740__GPCmut4 (opt4)
aggagagucccgcagucggcguccagcggcucugcuuguucgugugugugucguugcaggccuuauucaagcuuaccaugggccagaucgugaccuucuuccaggaggugccccacgugaucgaggaggugaugaacaucgugcugaucgcccugagccugcuggccauccugaagggccuguacaacuucgccaccugcggcgugaucggccugaucaccuuccugcugcugugcggcagaagcugcagcgccaccuacaagggccaguacgagcugcagacccuggagcugaacauggagagccugaacaugugcaugccccugagcugcaccaagaacaacagccaccacuacaucagagccggcaacaacaccggccuggagcugacccugaccaacaccagcaucaucagccacaaguucugcaaccugagcgacgcccacaagaagaaccuguacgaccacacccugaugagcaucaucaccaccuuccaccugagcauccccaacuucaaccaguacgaggccaugagcugcgacuucaacggcggcaagaucagcauccaguacaaccugagccacagcuacgccggcgacgccgcccagcacugcggcaccguggccaacggcgugcugcagaccuucaugagaauggccuggggcggcagcuaccuggcccuggacagcggcagaagaggcugggacugcaucaucagcagcuaccaguaccugaucauccagaacaccaccugggacgaccacugccaguucagcagacccagccccaucggcuaccugggcuucgugagccagaagaccagagacaucuacaucagcagaagaagaagaggcaccuucaccuggacccugagcgacagcgagggccacgacaugcccggcggcuacugccugaccagauggaugcugaucgaggccgaccugaagugcuucggcaacaccgccguggccaagugcaacgagaagcacgacgaggaguucugcgacauguggagacuguucgacuucugcaagcaggccauccagagacugaaggcccccgcccagaugaacauccagcugaucaacaaggccgugaacgcccugaucaacgaccagcugaugaugaagaaccaccugagagacaucaugggcauccccuacugcaacuacagcaaguucugcuaccugaacaacaccaccaccggcagaaccagccugcccagaugcugccugaucagcaacggcagcuaccugaacgagacccacuucagcgacgacaucgagcagcaggccgacaacaugaucaccgagaugcugcagaaggaguacauggacagacagggcaagaccccccugggccugguggaccuguucguguucagcaccagcuucuaccugaucaccaucuuccugcaccuggugaagauccccacccacagacacaucgugggcaagcccugccccaagccccacagacugaaccacaugggcaucugcagcugcggccuguacaagcagcccggcgugcccgugagauggaagagaugaggacuagucccuguucccagagcccacuuuuuuuucuuuuuuugaaauaaaauagccugucuuucagaucuaaaaaaaaaaaaaaaaaaaaaaaaaaaaaaaaaaaaaaaaaaaaaaaaaaaaaaaaaaaaaaaaaaaaaaaaaaaaaaaaaaaaaaaaaaaaaaaaaaaa

SEQ ID NO: 26828 - RNA, 1721 nt, Artificial Sequence; identical to SEQ ID NO: 26822
  mRNA product Design a-1 (A100) comprising derived and/or modified sequence from LASV(Pinneo-NIG-1969;Clade I)__AIT17836__GPCmut4 (opt4)

SEQ ID NO: 26829 - RNA, 1721 nt, Artificial Sequence
  mRNA product Design a-1 (A100) comprising derived and/or modified sequence from LASV(ISTH0009-NIG-2011;Clade II)__AIT17404__GPCmut4 (opt4)
aggagagucccgcagucggcguccagcggcucugcuuguucgugugugugucguugcaggccuuauucaagcuuaccaugggccagaucaucaccuucuuccaggaggugccccacgugaucgaggaggugaugaacaucgugcugaucgcccugagccugcuggccauccugaagggcaucuacaacguggccaccugcggccuguucggccuggugagcuuccugcugcugugcggcagaagcugcagcaccaccuacaagggcguguacgagcugcagacccuggagcuggacauggccagccugaacaugugcaugccccugagcugcaccaagaacaacagccaccacuacaucauggugggcaacgagaccggccuggagcugacccugaccaacaccagcaucaucaaccacaaguucugcaaccugagcgacgcccacaagaagaaccuguacgaccacgcccugaugagcaucaucagcaccuuccaccugagcauccccaacuucaaccaguacgaggccaugagcugcgacuucaacggcggcaagaucagcgugcaguacaaccugagccacgccuacgccguggacgccgccaaccacugcggcaccaucgccaacggcgugcugcagaccuucaugagaauggccuggggcggcagcuacaucgcccuggacagcggcaagggcagcugggacugcaucaugaccagcuaccaguaccugaucauccagaacaccaccugggaggaccacugccaguucagcagacccagccccaucggcuaccugggccugcugagccagagaaccagagacaucuacaucagcagaagaagaagaggcaccuucaccuggacccugagcgacagcgagggcaacgagacccccggcggcuacugccugaccagauggaugcugaucgaggccgagcugaagugcuucggcaacaccgccguggccaagugcaacgagaagcacgacgaggaguucugcgacaugcugagacuguucgacuucugcaagcaggccaucagaagacugaagacccccgcccagaugagcauccagcugaucaacaaggccgugaacgcccugaucaacgaccagcugaucaugaagaaccaccugagagacaucaugggcauccccuacugcaacuacagcaaguacugcuaccugaaccacaccgugaccggcaagaccagccugcccagaugcugccuggugagcaacggcagcuaccugaacgagacccacuucagcgacgacaucgagcagcaggccgacaacaugaucaccgagcugcugcagaaggaguacauggacagacagggcaagaccccccugggccugguggaccuguucguguucagcaccagcuucuaccugaucagcaucuuccugcaccugaucaagauccccacccacagacacaucaccggcaagcccugccccaagccccacagacugaaccacaugggcaucugcagcugcggccuguacaagcaccccggcgugcccgugaaguggaagagaugaggacuagucccuguucccagagcccacuuuuuuuucuuuuuuugaaauaaaauagccugucuuucagaucuaaaaaaaaaaaaaaaaaaaaaaaaaaaaaaaaaaaaaaaaaaaaaaaaaaaaaaaaaaaaaaaaaaaaaaaaaaaaaaaaaaaaaaaaaaaaaaaaaaaa

SEQ ID NO: 26830 - RNA, 1721 nt, Artificial Sequence
  mRNA product Design a-1 (A100) comprising derived and/or modified sequence from LASV(ISTH2010-NIG-2012;Clade II)__AIT17482__GPCmut4 (opt4)
aggagagucccgcagucggcguccagcggcucugcuuguucgugugugugucguugcaggccuuauucaagcuuaccaugggccagaucaucaccuucuuccaggaggugccccacgugaucgaggaggugaugaacaucgugcugaucgcccugagccugcuggccauccugaagggcaucuacaacguggccaccugcggccuguucggccuggugagcuuccugcugcugugcggcagaagcugcagcaccaccuacaagggcguguacgagcugcagacccuggagcuggacauggccagccugaacaugugcaugccccugagcugcaccaagaacaacagccaccacuacaucauggugggcaacgagaccggccuggagcugacccugaccaacaccagcaucaucaaccacaaguucugcaaccugagcgacgcccacaagaagaaccuguacgaccacgcccugaugagcaucaucagcaccuuccaccugagcauccccaacuucaaccaguacgaggccaugagcugcgacuucaacggcggcaagaucagcgugcaguacaaccugagccacgccuacgccguggacgccgccaaccacugcggcaccaucgccaacggcgugcugcagaccuucaugagaauggccuggggcggcagcuacaucgcccuggacagcggcaagggcagcugggacugcaucaugaccagcuaccaguaccugaucauccagaacaucaccugggaggaccacugccaguucagcagacccagccccaucggcuaccugggccugcugagccagagaaccagagacaucuacaucagcagaagaagaagaggcaccuucaccuggacccugagcgacagcgagggcaacgagacccccggcggcuacugccugaccagauggaugcugaucgaggccgagcugaagugcuucggcaacaccgccguggccaagugcaacgagaagcacgacgaggaguucugcgacaugcugagacuguucgacuucugcaagcaggccaucagaagacugaagacccccgcccagaugagcauccagcugaucaacaaggccgugaacgcccugaucaacgaccagcugaucaugaagaaccaccugagagacaucaugggcauccccuacugcaacuacagcaaguacugcuaccugaaccacaccgugaccggcaagaccagccugcccagaugcugccuggugagcaacggcagcuaccugaacgagacccacuucagcgacgacaucgagcagcaggccgacaacaugaucaccgagcugcugcagaaggaguacaucgacagacagggcaagaccccccugggccugguggaccuguucguguucagcaccagcuucuaccugaucagcaucuuccugcaccuggugaagauccccacccacagacacguggugggcaagcccugccccaagccccacagacugaaccacaugggcaucugcagcugcggccuguacaagcaccccggcgugcccgugaaguggaagagaugaggacuagucccuguucccagagcccacuuuuuuuucuuuuuuugaaauaaaauagccugucuuucagaucuaaaaaaaaaaaaaaaaaaaaaaaaaaaaaaaaaaaaaaaaaaaaaaaaaaaaaaaaaaaaaaaaaaaaaaaaaaaaaaaaaaaaaaaaaaaaaaaaaaaa

SEQ ID NO: 26831 - RNA, 1721 nt, Artificial Sequence
  mRNA product Design a-1 (A100) comprising derived and/or modified sequence from LASV(Lassa virus/H.sapiens-wt/NGA/2015/ISTH_0543;Clade II)__AVO03639__GPCmut4 (opt4)
aggagagucccgcagucggcguccagcggcucugcuuguucgugugugugucguugcaggccuuauucaagcuuaccaugggccagaucaucaccuucuuccaggaggugccccacgugaucgaggaggugaugaacaucgugcugaucgcccugagccugcuggccauccugaagggcaucuacaacguggccaccugcggccuguucggccuggugagcuuccugcugcugugcggcagaagcugcagcaccaccuacaagggcguguacgagcugcagacccuggagcuggacauggccaaccugaacaugugcaugccccugagcugcaccaagaacaacagccaccacuacaucauggugggcaacgagaccggccuggagcugacccugaccaacaccagcaucaucaaccacaaguucugcaaccugagcgacgcccacaagaagaaccuguacgaccacgcccugaugagcaucaucagcaccuuccaccugagcauccccaacuucaaccaguacgaggccaugagcugcgacuucaacggcggcaagaucagcgugcaguacaaccugagccacaccuacgccguggacgccgccaaccacugcggcaccaucgccaacggcgugcugcagaccuucaugagaauggccuggggcggcagcuacaucgcccuggacagcggcaagggcagcugggacugcaucaugaccagcuaccaguaccuggugauccagaacaccaccugggaggaccacugccaguucagcagacccagccccaucggcuaccugggccugcugagccagagaaccagagacaucuacaucagcagaagaagaagaggcaccuucaccuggacccugagcgacagcgagggcaacgagacccccggcggcuacugccugaccagauggaugcugaucgaggccgagcugaagugcuucggcaacaccgccguggccaagugcaacgagaagcacgacgaggaguucugcgacaugcugagacuguucgacuucugcaagcaggccaucagaagacugaagacccccgcccagaugagcauccagcugaucaacaaggccgugaacgcccugaucaacgaccagcugaucaugaagaaccaccugagagacaucaugggcauccccuacugcaacuacagcaaguacugcuaccugaaccacaccgugaccggcaagaccagccugcccagaugcugccuggugagcaacggcagcuaccugaacgagacccacuucagcgacgacaucgagcagcaggccgacaacaugaucaccgagcugcugcagaaggaguacaucgacagacagggcaagaccccccugggccugguggaccuguucguguucagcaccagcuucuaccugaucagcaucuuccugcaccuggugaagauccccacccacagacacaucaccggcaagcccugccccaagccccacagacugaaccacaugggcaucugcagcugcggccuguacaagcaccccggcgugcccgugaaguggaagagaugaggacuagucccuguucccagagcccacuuuuuuuucuuuuuuugaaauaaaauagccugucuuucagaucuaaaaaaaaaaaaaaaaaaaaaaaaaaaaaaaaaaaaaaaaaaaaaaaaaaaaaaaaaaaaaaaaaaaaaaaaaaaaaaaaaaaaaaaaaaaaaaaaaaaa

SEQ ID NO: 26832 - RNA, 1721 nt, Artificial Sequence
  mRNA product Design a-1 (A100) comprising derived and/or modified sequence from LASV(Lassa virus/H.sapiens-wt/NGA/2016/ISTH_0009;Clade II)__AVO03571__GPCmut4 (opt4)
aggagagucccgcagucggcguccagcggcucugcuuguucgugugugugucguugcaggccuuauucaagcuuaccaugggccagaucaucaccuucuuccaggaggugccccacgugaucgaggaggugaugaacaucgugcugaucgcccugagccugcuggccauccugaagggcaucuacaacguggccaccugcggccugcugggccuggugagcuuccugcugcugugcggcagaagcugcagcaccaccuacaagggcguguacgagcugcagacccuggagcuggacauggccagccugaacaugugcaugccccugagcugcaccaagaacaacagccaccacuacaucauggugggcaacgagaccggccuggagcugacccugaccaacaccagcaucaucaaccacaaguucugcaaccugagcgacgcccacaagaagaaccuguacgaccacgcccugaugagcaucaucagcaccuuccaccugagcauccccaacuucaaccaguacgaggccaugagcugcgacuucaacggcggcagaaucagcgugcaguacaaccugagccacagcuacgccguggacgccgccaaccacugcggcaccaucgccaacggcgugcugcagaccuucaugagaauggccuggggcggcagcuacaucgcccuggacagcggcaagggcagcugggacugcaucaugaccagcuaccaguaccugaucauccagaacaccaccugggaggaccacugccaguucagcagacccagccccaucggcuaccugggccugcugagccagagaaccagagacaucuacaucagcagaagaagaagaggcaccuucaccuggacccugagcgacagcgagggcaacgagacccccggcggcuacugccugaccagauggaugcugaucgaggccgagcugaagugcuucggcaacaccgccguggccaagugcaacgagaagcacgacgaggaguucugcgacaugcugagacuguucgacuucugcaagcaggccaucagaagacugaagacccccgcccagaugagcauccagcugaucaacaaggccgugaacgcccugaucaacgaccagcugaucaugaagaaccaccugagagacaucaugggcauccccuacugcaacuacagcaaguacugcuaccugaaccacaccgugaccggcaagaccagccugcccagaugcugccuggugagcaacggcagcuaccugaacgagacccacuucagcgacgacaucgagcagcaggccgacaacaugaucaccgagcugcugcagaaggaguacaucgacagacagggcaagaccccccugggccugguggaccuguucguguucagcaccagcuucuaccugaucagcaucuuccugcaccuggugaagauccccacccacagacacaucaccggcaagcccugccccaagccccacagacugaaccacaugggcaucugcagcugcggccuguacaaccaccccggcgugcccgugaaguggaagagaugaggacuagucccuguucccagagcccacuuuuuuuucuuuuuuugaaauaaaauagccugucuuucagaucuaaaaaaaaaaaaaaaaaaaaaaaaaaaaaaaaaaaaaaaaaaaaaaaaaaaaaaaaaaaaaaaaaaaaaaaaaaaaaaaaaaaaaaaaaaaaaaaaaaaa

SEQ ID NO: 26833 - RNA, 1721 nt, Artificial Sequence
  mRNA product Design a-1 (A100) comprising derived and/or modified sequence from LASV(Lassa virus/H.sapiens-wt/NGA/2016/ISTH_0017;Clade II)__AVO03567__GPCmut4 (opt4)
aggagagucccgcagucggcguccagcggcucugcuuguucgugugugugucguugcaggccuuauucaagcuuaccaugggccagaucaucaccuucuuccaggaggugccccacgugaucgaggaggugaugaacaucgugcugaucgcccugagccugcuggccauccugaagggcaucuacaacguggccaccugcggccuguucggccuggugagcuuccugcugcugugcggcagaagcugcagcaccaccuacaagggcguguacgagcugcagacccuggagcuggacauggccagccugaacaugugcaugccccugagcugcaccaagaacaacagccaccacuacaucauggugggcaacgagaccggccuggagcugacccugaccaacaccagcaucaucaaccacaaguucugcaaccugagcgacgcccacaagaagaaccuguacgaccacgcccugaugagcaucaucagcaccuuccaccugagcauccccaacuucaaccaguacgaggccaugagcugcgacuucaacggcggcaagaucagcgugcaguacaaccugagccacaccuacgccaucgacgccgccaaccacugcggcaccaucgccaacggcgugcugcagaccuucaugagaauggccuggggcggcagcuacaucgcccuggacagcggcaagggcagcugggacugcaucaugaccagcuaccaguaccugaucauccagaacaccaccugggaggaccacugccaguucagcagacccagccccaucggcuaccugggccugcugagccagagaaccagagacaucuacaucagcagaagaagaagaggcaccuucaccuggacccugagcgacagcgagggcaacgagacccccggcggcuacugccugaccagauggaugcugaucgaggccgagcugaagugcuucggcaacaccgccguggccaagugcaacgagaagcacgacgaggaguucugcgacaugcugagacuguucgacuucugcaagcaggccaucagaagacugaagacccccgcccagaugagcauccagcugaucaacaaggccgugaacgcccugaucaacgaccagcugaucaugaagaaccaccugagagacaucaugggcauccccuacugcaacuacagcaaguacugcuaccugaaccacaccgugaccggcaagaccagccugcccagaugcugccuggugagcaacggcagcuaccugaacgagacccacuucagcgacgacaucgagcagcaggccgacaacaugaucaccgagcugcugcagaaggaguacauggacagacagggcaagaccccccugggccugguggaccuguucguguucagcaccagcuucuaccugaucagcaucuuccugcaccuggugagaauccccacccacagacacgugaucggcaagcccugccccaagccccacagacugaaccacaugggcaucugcagcugcggccuguacaagcaccccggcgugcccgugaaguggaagagaugaggacuagucccuguucccagagcccacuuuuuuuucuuuuuuugaaauaaaauagccugucuuucagaucuaaaaaaaaaaaaaaaaaaaaaaaaaaaaaaaaaaaaaaaaaaaaaaaaaaaaaaaaaaaaaaaaaaaaaaaaaaaaaaaaaaaaaaaaaaaaaaaaaaaa

SEQ ID NO: 26834 - RNA, 1721 nt, Artificial Sequence
  mRNA product Design a-1 (A100) comprising derived and/or modified sequence from LASV(Lassa virus/H.sapiens-wt/NGA/2018/ISTH_0959;Clade II)__AVV65099__GPCmut4 (opt4)
aggagagucccgcagucggcguccagcggcucugcuuguucgugugugugucguugcaggccuuauucaagcuuaccaugggccagaucaucaccuucuuccaggaggugccccacgugaucgaggaggugaugaacaucgugcugaucgcccugagccugcuggccauccugaagggcaucuacaacguggugaccugcggccuguucggccuggugagcuuccugcugcugugcggcagaagcugcagcaccaccuacaagggcguguacgagcugcagacccuggagcuggacauggccagccugaacaugugcaugccccugagcugcaccaagaacaacagccaccacuacaucauggugggcaacgagaccggccuggagcugacccugaccaacaccagcaucaucaaccacaaguucugcaaccugagcgacgcccacaagaagaaccuguacgaccacgcccugaugagcaucaucagcaccuuccaccugagcauccccaacuucaaccaguacgaggccaugagcugcgacuucaacggcggcaagaucagcgugcaguacaaccugagccacgccuacgccaucgacgccgccaaccacugcggcaccaucgccaacggcgugcugcagaccuucaugagaauggccuggggcggcagcuacaucgcccuggacagcggcaagggcagcugggacugcaucaugaccagcuaccaguaccugaucauccagaacaccaccugggaggaccacugccaguucagcagacccagccccaucggcuaccugggccugcugagccagagaaccagagacaucuacaucagcagaagaagaagaggcaccuucaccuggacccugagcgacagcgagggcaacgagacccccggcggcuacugccugaccagauggaugcugaucgaggccgagcugaagugcuucggcaacaccgccguggccaagugcaacgagaagcacgacgaggaguucugcgacaugcugagacuguucgacuucugcaagcaggccaucagaagacugaagacccccgcccagaugagcauccagcugaucaacaaggccgugaacgcccugaucaacgaccagcugaucaugaagaaccaccugagagacaucaugggcauccccuacugcaacuacagcaaguacugcuaccugaaccacaccgugaccggcaagaccagccugcccagaugcugccuggugagcaacggcagcuaccugaacgagacccacuucagcgacgacaucgagcagcaggccgacaacaugaucaccgagcugcugcagaaggaguacaucgacagacagggcaagaccccccugggccugguggaccuguucguguucagcaccagcuucuaccugaucagcaucuuccugcaccuggugaagauccccacccacagacacgugaucggcaagcccugccccaagccccacagacugaaccacaugggcaucugcagcugcggccuguacaagcaccccggcgugcccgugaaguggaagagaugaggacuagucccuguucccagagcccacuuuuuuuucuuuuuuugaaauaaaauagccugucuuucagaucuaaaaaaaaaaaaaaaaaaaaaaaaaaaaaaaaaaaaaaaaaaaaaaaaaaaaaaaaaaaaaaaaaaaaaaaaaaaaaaaaaaaaaaaaaaaaaaaaaaaa

SEQ ID NO: 26835 - RNA, 1721 nt, Artificial Sequence
  mRNA product Design a-1 (A100) comprising derived and/or modified sequence from LASV(LASV003-NIG-2008;Clade II)__AIT17580__GPCmut4 (opt4)
aggagagucccgcagucggcguccagcggcucugcuuguucgugugugugucguugcaggccuuauucaagcuuaccaugggccagaucaucaccuucuuccaggaggugccccacgugaucgaggaggugaugaacaucgugcugaucgcccugagccugcuggccauccugaagggcaucuacaacguggccaccugcggccuguucggccuggugagcuuccugcugcugugcggcagaagcugcagcaccaccuacaagggcguguacgagcugcagacccuggagcuggacauggccagccugaacaugugcaugccccugagcugcaccaagaacaacagccaccacuacaucauggugggcaacgagaccggccuggagcugacccugaccaacaccagcaucaucaaccacaaguucugcaaccugagcgacgcccacaagaagaaccuguacgaccacgcccugaugagcaucaucagcaccuuccaccugagcauccccaacuucaaccaguacgaggccaugagcugcgacuucaacggcggcaagaucagcgugcaguacaaccugagccacaccuacgccguggacgccgccaaccacugcggcaccaucgccaacggcgugcugcagaccuucaugagaauggccuggggcggcagcuacaucgcccuggacagcggcaagggcagcugggacugcaucaugaccagcuaccaguaccugaucauccagaacaccaccugggaggaccacugccaguucagcagacccagccccaucggcuaccugggccugcugagccagagaaccagagacaucuacaucagcagaagaagaagaggcaccuucaccuggacccugagcgacagcgagagcaacgagacccccggcggcuacugccugaccagauggaugcugaucgaggccgagcugaagugcuucggcaacaccgccguggccaagugcaacgagaagcacgacgaggaguucugcgacaugcugagacuguucgacuucugcaagcaggccaucagaagacugaaggcccccgcccagaugagcauccagcugaucaacaaggccgugaacgcccugaucaacgaccagcugaucaugaagaaccaccugagagacaucaugggcauccccuacugcaacuacagcaaguacugcuaccugaaccacaccgugaccggcagaaccagccugcccagaugcugccuggugagcaacggcagcuaccugaacgagacccacuucagcgacgacaucgagcagcaggccgacaacaugaucaccgagcugcugcagaaggaguacauggacagacagggcaagaccccccugggccugguggaccuguucguguucagcaccagcuucuaccugaucagcaucuuccugcaccuggugaagauccccacccacagacacgugaucggcaagcccugccccaagccccacagacugaaccacaugggcaucugcagcugcggccuguacaagcaccccggcgugcccgugaaguggaagagaugaggacuagucccuguucccagagcccacuuuuuuuucuuuuuuugaaauaaaauagccugucuuucagaucuaaaaaaaaaaaaaaaaaaaaaaaaaaaaaaaaaaaaaaaaaaaaaaaaaaaaaaaaaaaaaaaaaaaaaaaaaaaaaaaaaaaaaaaaaaaaaaaaaaaa

SEQ ID NO: 26836 - RNA, 1721 nt, Artificial Sequence
  mRNA product Design a-1 (A100) comprising derived and/or modified sequence from LASV(LASV035-NIG-2009;Clade II)__AIT17588__GPCmut4 (opt4)
aggagagucccgcagucggcguccagcggcucugcuuguucgugugugugucguugcaggccuuauucaagcuuaccaugggccagaucaucaccuucuuccaggaggugccccacgugaucgaggaggugaugaacaucgugcugaucgcccugagccugcuggccauccugaagggcaucuacaacguggccaccugcggccuguucggccuggugagcuuccugcugcugugcggcagaagcugcagcaccaccuacaagggcguguacgagcugcagacccuggagcuggacauggccagccugaacaugugcaugccccugagcugcaccaagaacaacagccaccacuacaucauggugggcaacgagaccggccuggagcugacccugaccaacaccagcaucaucaaccacaaguucugcaaccugagcgacgcccacaagaagaaccuguacgaccacgcccugaugagcaucaucagcaccuuccaccugagcauccccaacuucaaccaguacgaggccaugagcugcgacuucaacggcggcaagaucagcgugcaguacaaccugagccacgccuacgccguggacgccgccaaccacugcggcaccaucgccaacggcgugcugcagaccuucaugagaauggccuggggcggcagcuacaucgcccuggacagcggcaagggcagcugggacugcaucaugaccagcuaccaguaccugaucauccagaacaccaccugggaggaccacugccaguucagcagacccagccccaucggcuaccugggccugcugagccagagaaccagagacaucuacaucagcagaagaagaagaggcaccuucaccuggacccugagcgacagcgagggcaacgagacccccggcggcuacugccugaccagauggaugcugaucgaggccgagcugaagugcuucggcaacaccgccguggccaagugcaacgagaagcacgacgaggaguucugcgacaugcugagacuguucgacuucugcaagcaggccaucagaagacugaaggcccccgcccagaugagcauccagcugaucaacaaggccgugaacgcccugaucaacgaccagcugaucaugaagaaccaccugagagacaucaugggcauccccuacugcaacuacagcaaguacugcuaccugaaccacaccgugaccggcaagaccagccugcccagaugcugccuggugagcaacggcagcuaccugaacgagacccacuucagcgacgacaucgagcagcaggccgacaacaugaucaccgagcugcugcagaaggaguacaucgacagacagggcaagaccccccugggccugguggaccuguucguguucagcaccagcuucuaccugaucagcaucuuccugcaccuggugaagauccccacccacagacacgugaucggcaagcccugccccaagccccacagacugaaccacaugggcaucugcagcugcggccuguacaagcaccccggcgugcccgugaaguggaagagaugaggacuagucccuguucccagagcccacuuuuuuuucuuuuuuugaaauaaaauagccugucuuucagaucuaaaaaaaaaaaaaaaaaaaaaaaaaaaaaaaaaaaaaaaaaaaaaaaaaaaaaaaaaaaaaaaaaaaaaaaaaaaaaaaaaaaaaaaaaaaaaaaaaaaa

SEQ ID NO: 26837 - RNA, 1721 nt, Artificial Sequence
  mRNA product Design a-1 (A100) comprising derived and/or modified sequence from LASV(LASV1000-NIG-2009;Clade II)__AIT17782__GPCmut4 (opt4)
aggagagucccgcagucggcguccagcggcucugcuuguucgugugugugucguugcaggccuuauucaagcuuaccaugggccagaucaucaccuucuuccaggaggugccccacgugaucgaggaggugaugaacaucgugcugaucgcccugagccugcuggccauccugaagggcaucuacaacguggccaccugcggccuguucggccuggugagcuuccugcugcugugcggcagaagcugcagcaccaccuacaagggcguguacgagcugcagacccuggagcuggacauggccagccugaacaugugcaugccccugagcugcaccaagaacaacagccaccacuacaucauggugggcaacgagaccggccuggagcugacccugaccaacaccagcaucaucaaccacaaguucugcaaccugagcgacgcccacaagaagaaccuguacgaccacgcccugaugagcaucaucagcaccuuccaccugagcauccccaacuucaaccaguacgaggccaugagcugcgacuucaacggcggcaagaucagcgugcaguacaaccugagccacaccuacgccguggacgccgccaaccacugcggcaccaucgccaacggcgugcugcagaccuucaugagaauggccuggggcggcagcuacaucgcccuggacagcggcaagggcagcugggacugcaucaugaccagcuaccaguaccugaucauccagaacaccaccugggaggaccacugccaguucagcagacccagccccaucggcuaccugggccugcugagccagagaaccagagacaucuacaucagcagaagaagaagaggcaccuucaccuggacccugagcgacagcgagggcaacgagacccccggcggcuacugccugaccagauggaugcugaucgaggccgagcugaagugcuucggcaacaccgccguggccaagugcaacgagaagcacgacgaggaguucugcgacaugcugagacuguucgacuucugcaagcaggccaucaagagacugaagacccccgcccagaugagcauccagcugaucaacaaggccgugaacgcccugaucaacgaccagcugaucaugaagaaccaccugagagacaucaugggcauccccuacugcaacuacagcaaguacugcuaccugaaccacaccgugaccggcaagaccagccugcccagaugcugccuggugagcaacggcagcuaccugaacgagacccacuucagcgacgacaucgagcagcaggccgacaacaugaucaccgagcugcugcagaaggaguacaucgacagacagggcaagaccccccugggccugguggaccuguucguguucagcaccagcuucuaccugaucagcaucuuccugcaccuggugaagauccccacccacagacacguggugggcaagcccugccccaagccccacagacugaaccacaugggcaucugcagcugcggccuguacaagcaccccggcgugcccgugaaguggaagagaugaggacuagucccuguucccagagcccacuuuuuuuucuuuuuuugaaauaaaauagccugucuuucagaucuaaaaaaaaaaaaaaaaaaaaaaaaaaaaaaaaaaaaaaaaaaaaaaaaaaaaaaaaaaaaaaaaaaaaaaaaaaaaaaaaaaaaaaaaaaaaaaaaaaaa

SEQ ID NO: 26838 - RNA, 1721 nt, Artificial Sequence
  mRNA product Design a-1 (A100) comprising derived and/or modified sequence from LASV(LASV221-NIG-2010;Clade II)__AIT17624__GPCmut4 (opt4)
aggagagucccgcagucggcguccagcggcucugcuuguucgugugugugucguugcaggccuuauucaagcuuaccaugggccagaucaucaccuucuuccaggaggugccccacgugaucgaggaggugaugaacaucgugcugaucgcccugagccugcuggccauccugaagggcaucuacaacguggccaccugcggccuguucggccuggugagcuuccugcugcugugcggcagaagcugcagcaccaccuacaagggcguguacgagcugcagacccuggagcuggacauggccagccugaacaugugcaugccccugagcugcaccaagaacaacagccaccacuacaucauggugggcaacgagaccggccuggagcugacccugaccaacaccagcaucaucaaccacaaguucugcaaccugagcgacgcccacaagaagaaccuguacgaccacgcccugaugagcaucaucagcaccuuccaccugagcauccccaacuucaaccaguacgaggccaugagcugcgacuucaacggcggcaagaucagcgugcaguacaaccugagccacaccuacgccaucgacgccgccaaccacugcggcaccaucgccaacggcgugcugcagaccuucaugagaauggccuggggcggcagcuacaucgcccuggacagcggcaagggcagcugggacugcaucaugaccagcuaccaguaccugaucauccagaacaccaccugggaggaccacugccaguucagcagacccagccccaucggcuaccugggccugcugagccagagaaccagagacaucuacaucagcagaagaagaagaggcaccuucaccuggacccugagcgacagcgagggcaacgagacccccggcggcuacugccugaccagauggaugcugaucgaggccgagcugaagugcuucggcaacaccgccguggccaagugcaacgagaagcacgacgaggaguucugcgacaugcugagacuguucgacuucugcaagcaggccaucagaagacugaagacccccgcccagaugagcauccagcugaucaacaaggccgugaacgcccugaucaacgaccagcugaucaugaagaaccaccugagagacaucaugggcauccccuacugcaacuacagcaaguacugcuaccugaaccacaccgugaccggcaagaccagccugcccagaugcugccuggugagcaacggcagcuaccugaacgagacccacuucagcgacgacaucgagcagcaggccgacaacaugaucaccgagaugcugcagaaggaguacauggacagacagggcaagaccccccugggccugguggaccuguucguguucagcaccagcuucuaccugaucagcaucuuccugcaccuggugaagauccccacccacagacacgugaucggcaagcccugccccaagccccacagacugaaccacaugggcaucugcagcugcggccuguacaagcaccccggcgugcccgugaaguggaagagaugaggacuagucccuguucccagagcccacuuuuuuuucuuuuuuugaaauaaaauagccugucuuucagaucuaaaaaaaaaaaaaaaaaaaaaaaaaaaaaaaaaaaaaaaaaaaaaaaaaaaaaaaaaaaaaaaaaaaaaaaaaaaaaaaaaaaaaaaaaaaaaaaaaaaa

SEQ ID NO: 26839 - RNA, 1721 nt, Artificial Sequence
  mRNA product Design a-1 (A100) comprising derived and/or modified sequence from LASV(LASV237-NIG-2010;Clade II)__AIT17638__GPCmut4 (opt4)
aggagagucccgcagucggcguccagcggcucugcuuguucgugugugugucguugcaggccuuauucaagcuuaccaugggccagaucaucaccuucuuccaggaggugccccacgugaucgaggaggugaugaacaucgugcugaucgcccugagccugcuggccauccugaagggcaucuacaacguggccaccugcggccuguucggccuggugagcuuccugcugcugugcggcagaagcugcagcaccaccuacaagggcguguacgagcugcagacccuggagcuggacauggccagccugaacaugugcaugccccugagcugcaccaagaacaacagccaccacuacaucauggugggcaacgagaccggccuggagcugacccugaccaacaccagcaucaucaaccacaaguucugcaaccugagcgacgcccacaagaaggaccuguacgaccacgcccugaugagcaucaucagcaccuuccaccugagcauccccaacuucaaccaguacgaggccaugagcugcgacuucaacggcggcaagaucagcgugcaguacaaccugagccacaccuacgccguggacgccgccaaccacugcggcaccaucgccaacggcgugcugcagaccuucaugagaauggccuggggcggcagcuacaucgcccuggacagcggcaagggcagcugggacugcaucaugaccagcuaccaguaccugaucauccagaacaccaccugggaggaccacugccaguucagcagacccagccccaucggcuaccugggccugcugagccagagaaccagagacaucuacaucagcagaagaagaagaggcaccuucaccuggacccugagcgacagcgagggcaacgagacccccggcggcuacugccugaccagauggaugcugaucgaggccgagcugaagugcuucggcaacaccgccguggccaagugcaacgagaagcacgacgaggaguucugcgacaugcugagacuguucgacuucugcaagcaggccaucagaagacugaagacccccgcccagaugagcauccagcugaucaacaaggccgugaacgcccugaucaacgaccagcugaucaugaagaaccaccugagagacaucaugggcauccccuacugcaacuacagcaaguacugcuaccugaaccacaccgugaccggcaagaccagccugcccagaugcugccuggugagcaacggcagcuaccugaacgagacccacuucagcgacgacaucgagcagcaggccgacaacaugaucaccgagcugcugcagaaggaguacauggacagacagggcaagaccccccugggccugguggaccuguucguguucagcaccagcuucuaccugaucagcaucuuccugcaccugaucaagauccccacccacagacacaucaccggcaagcccugccccaagccccacagacugaaccacaugggcaucugcagcugcggccuguacaagcaccccggcgugcccgugaaguggaagagaugaggacuagucccuguucccagagcccacuuuuuuuucuuuuuuugaaauaaaauagccugucuuucagaucuaaaaaaaaaaaaaaaaaaaaaaaaaaaaaaaaaaaaaaaaaaaaaaaaaaaaaaaaaaaaaaaaaaaaaaaaaaaaaaaaaaaaaaaaaaaaaaaaaaaa

SEQ ID NO: 26840 - RNA, 1721 nt, Artificial Sequence
  mRNA product Design a-1 (A100) comprising derived and/or modified sequence from LASV(LASV253-NIG-2011;Clade II)__AIT17670__GPCmut4 (opt4)
aggagagucccgcagucggcguccagcggcucugcuuguucgugugugugucguugcaggccuuauucaagcuuaccaugggccagaucaucaccuucuuccaggaggugccccacgugaucgaggaggugaugaacaucgugcugaucgcccugagccugcuggccauccugaagggcaucuacaacguggccaccugcggccuguucggccuggugagcuuccugcugcugugcggcagaagcugcagcaccaccuacaagggcguguacgagcugcagacccuggagcuggacauggccagccugaacaugugcaugccccugagcugcaccaagaacaacagccaccacuacaucauggugggcaacgagaccggccuggagcugacccugaccaacaccagcaucaucaaccacaaguucugcaaccugagcgacgcccacaagaagaaccuguacgaccacgcccugaugagcaucaucagcaccuuccaccugagcauccccaacuucaaccaguacgaggccaugagcugcgacuucaacggcggcaagaucagcgugcaguacaaccugagccacaccuacgccguggacgccgccaaccacugcggcaccaucgccaacggcgugcugcagaccuucaugagaauggccuggggcggcagcuacaucgcccuggacagcggcaagggcagcugggacugcaucaugaccagcuaccaguaccugaucauccagaacaccaccugggaggaccacugccaguucagcagacccagccccaucggcuaccugggccugcugagccagagaaccagagacaucuacaucagcagaagaagaagaggcaccuucaccuggacccugagcgacagcgagggcaacgagacccccggcggcuacugccugaccagauggaugcugaucgaggccgagcugaagugcuucggcaacaccgccguggccaagugcaacgagaagcacgacgaggaguucugcgacaugcugagacuguucgacuucugcaagcaggccaucagaagacugaaggcccccgcccagaugagcauccagcugaucaacaaggccgugaacgcccugaucaacgaccagcugaucaugaagaaccaccugagagacaucaugggcauccccuacugcaacuacagcaaguacugcuaccugaaccacaccgugaccggcagaaccagccugcccagaugcugccuggugagcaacggcagcuaccugaacgagacccacuucagcgacgacaucgagcagcaggccgacaacaugaucaccgagcugcugcagaaggaguacaucgacagacagggcaagaccccccugggccugguggaccuguucguguucagcaccagcuucuaccugaucagcaucuuccugcaccuggugaagauccccacccacagacacaucaucggcaagcccugccccaagccccacagacugaaccacaugggcaucugcagcugcggccuguacaagcaccccggcgugcccgugaaguggaagagaugaggacuagucccuguucccagagcccacuuuuuuuucuuuuuuugaaauaaaauagccugucuuucagaucuaaaaaaaaaaaaaaaaaaaaaaaaaaaaaaaaaaaaaaaaaaaaaaaaaaaaaaaaaaaaaaaaaaaaaaaaaaaaaaaaaaaaaaaaaaaaaaaaaaaa

SEQ ID NO: 26841 - RNA, 1721 nt, Artificial Sequence
  mRNA product Design a-1 (A100) comprising derived and/or modified sequence from LASV(LASV254-NIG-2011;Clade II)__AIT17674__GPCmut4 (opt4)
aggagagucccgcagucggcguccagcggcucugcuuguucgugugugugucguugcaggccuuauucaagcuuaccaugggccagaucaucaccuucuuccaggaggugccccacgugaucgaggaggugaugaacaucgugcugaucgcccugagccugcuggccauccugaagggcaucuacaacguggccaccugcggccuguucggccuggugagcuuccugcugcugugcggcagaagcugcagcaccaccuacaagggcguguacgagcugcagacccuggagcuggacaugaccaaccugaacaugugcaugccccugagcugcaccaagaacaacagccaccacuacaucauggugggcaacgagaccggccuggagcugacccugaccaacaccagcaucaucaaccacaaguucugcaaccugagcgacgcccacaagaagaaccuguacaaccacgcccugaugagcaucaucagcaccuuccaccugagcauccccaacuucaaccaguacgaggccaugagcugcgacuucaacggcggcaagaucagcgugcaguacaaccugagccacagcuacgccguggacgccgccaaccacugcggcaccaucgccaacggcgugcugcagaccuucaugagaauggccuggggcggcagcuacaucgcccuggacagcggcaagggcaacugggacugcaucaugaccagcuaccaguaccugaucauccagaacaccaccugggaggaccacugccaguucagcagacccagccccaucggcuaccugggccugcugagccagagaaccagagacaucuacaucagcagaagaagaagaggcaccuucaccuggacccugagcgacagcgagggcaacgagacccccggcggcuacugccugaccagauggaugcugaucgaggccgagcugaagugcuucggcaacaccgccguggccaagugcaacgagaagcacgacgaggaguucugcgacaugcugagacuguucgacuucugcaagcaggccaucagaagacugaagacccccgcccaggccaacauccagcugaucaacaaggccgugaacgcccugaucaacgaccagcugaucaugaagaaccaccugagagacaucaugggcauccccuacugcaacuacagcaaguacugcuaccugaaccacaccgugaccggcaagaccagccugcccagaugcugccuggugagcaacggcagcuaccugaacgagacccacuucagcgacgacaucgagcagcaggccgacaacaugaucaccgagcugcugcagaaggaguacauggacagacagggcaagaccccccugggccugguggaccuguucguguucagcaccagcuucuaccugaucagcaucuuccugcaccuggugaagauccccacccacagacacgugaucggcaagcccugccccaagccccacagacugaaccacaugggcaucugcagcugcggccuguacaagcaccccggcgugcccgugaaguggaagagaugaggacuagucccuguucccagagcccacuuuuuuuucuuuuuuugaaauaaaauagccugucuuucagaucuaaaaaaaaaaaaaaaaaaaaaaaaaaaaaaaaaaaaaaaaaaaaaaaaaaaaaaaaaaaaaaaaaaaaaaaaaaaaaaaaaaaaaaaaaaaaaaaaaaaa

SEQ ID NO: 26842 - RNA, 1721 nt, Artificial Sequence
  mRNA product Design a-1 (A100) comprising derived and/or modified sequence from LASV(Nig08-A19;Clade III)__ADU56618__GPCmut4 (opt4)
aggagagucccgcagucggcguccagcggcucugcuuguucgugugugugucguugcaggccuuauucaagcuuaccaugggccagaucgugaccuucuuccaggaggugccccacgugaucgaggaggugaugaacaucgugcugaucgcccugagcauccuggccauccugaagggccuguacaacaucgccaccugcggccugaucggccuggugaccuuccugcugcugagcggcagaagcugcagcaugaccuacaagggcguguacgagcugcagacccuggagcugaacaugaacacccugaacaugugcaugccccugagcugcaccaagaacaacagccaccacuacaucauggugggcaacgagaccggccuggagcugacccugaccaacaccagccugcugcaccacaaguucugcaaccugagcgacgcccacaagaagaaccuguacgaccacacccugaugagcaucaucagcaccuuccaccugagcauccccaacuucaaccaguacgaggccaugagcugcgacuucaacggcggcaagaucaccgugcaguacaaccugagccacagcuacgccaucgacgccgccaaccacugcggcaccguggccaacggcgugcugcagaccuucaugagaauggccuggggcggcagcuacaucgcccuggacagcggcagaggcaagugggacugcaucaugaccagcuaccaguaccugaucauccagaacaccaccugggaggaccacugccaguucagcagacccagccccaucggcuaccugggccugcugagccagagaaccagagacaucuacaucagcagaagaagaagaggcaccuucaccuggacccugagcgacagcgagggcaacgagacccccggcggcuacugccugaccagauggaugcugaucgaggccgagcugaagugcuucggcaacaccgccguggccaagugcaacgagaagcacgacgaggaguucugcgacaugcugagacuguucgacuucugcaagcaggccaucagaagacugaaggcccccgcccagaugagcauccagcugaucaacaaggccgugaacgcccugaucaacgaccagcugaucaugaagaaccaccugagagacaucaugggcauccccuacugcaacuacagcaaguacugcuaccugaaccacaccagcaccggcagaaccagccugcccagaugcugccuggugagcaacggcagcuaccugaacgagacccacuucagcgacgacaucgagcagcaggccgacaacaugaucaccgagaugcugcagaaggaguaccuggacagacagggcaagaccccccugggccugguggaccuguucguguucagcaccagcuucuaccugaucagcaucuuccugcaccuggugaagauccccacccacagacacaucgugggcaagcccugccccaagccccacagacugaaccacaugggcaucugcagcugcggccuguacaagcagcccggcgugcccgugagauggaagagaugaggacuagucccuguucccagagcccacuuuuuuuucuuuuuuugaaauaaaauagccugucuuucagaucuaaaaaaaaaaaaaaaaaaaaaaaaaaaaaaaaaaaaaaaaaaaaaaaaaaaaaaaaaaaaaaaaaaaaaaaaaaaaaaaaaaaaaaaaaaaaaaaaaaaa

SEQ ID NO: 26843 - RNA, 1724 nt, Artificial Sequence
  mRNA product Design a-1 (A100) comprising derived and/or modified sequence from LASV(G1180-SLE-2010;Clade IV)__AIT17168__GPCmut4 (opt4)
aggagagucccgcagucggcguccagcggcucugcuuguucgugugugugucguugcaggccuuauucaagcuuaccaugggccagaucgugaccuucuuccaggaggugccccacgugaucgaggaggugaugaacaucgugcugaucgcccugagcauccuggccgugcugaagggccuguacaacuucgccaccugcggccuggugggccugcugaccuuccugcugcugugcggcagaagcugcaccgccagcagauacaagggcguguacgagcugcagacccuggagcugaacauggagacccugaacaugugcaugccccugagcugcaccaagaacaacagccaccacuacaucauggugggcaacgagaccggccuggagcugacccugaccaacaccagcaucaucaaccacaaguucugcaaccugagcgacgcccacaagaagaaccuguacgaccacgcccugaugagcaucaucagcaccuuccaccugagcauccccaacuucaaccaguacgaggccaugagcugcgacuucaacggcggcaagaucagcgugcaguacaaccugagccacagcuacgccggcgacgccgccaaccacugcggcaccguggccaacggcgugcugcagaccuucaugagaauggccuggggcggcagcuacaucgcccuggacagcggccacggcagcugggacugcaucaugaccagcuaccaguaccugaucauccagaacaccaccugggaggaccacugccaguucagcagacccagccccaucggcuaccugggccugcugagccagagaaccagagacaucuacaucagcagaagaagaagaggcaccuucaccuggacccugagcgacagcgagggcaaggacacccccggcggcuacugccugaccagauggaugcugaucgaggccgagcugaagugcuucggcaacaccgccguggccaagugcaacgagaagcacgacgaggaguucugcgacaugcugagacuguucgacuucugcaagcaggccauccagagacugaaggcccccgcccagaugagcauccagcugaucaacaaggccgugaacgcccugaucaacgaccagcugaucaugaagaaccaccugagagacaucaugggcauccccuacugcaacuacagcaaguacugcuaccugaaccacaccaccaccggcaagaccagccugcccaagugcugccuggugagcaacggcagcuaccugaacgagacccacuucagcgacgacaucgagcagcaggccgacaacaugaucaccgagaugcugcagaaggaguacauggagagacagggcaagaccccccugggccugguggaccuguucguguucagcaccagcuucuaccugaucagcaucuuccugcaccuggugaagauccccacccacagacacaucgugggcaagagcugccccaagccccacagacugaaccacaugggcaucugcagcugcggccuguacaagcagcccggcgugcccgugaaguggaagagaugaggacuagucccuguucccagagcccacuuuuuuuucuuuuuuugaaauaaaauagccugucuuucagaucuaaaaaaaaaaaaaaaaaaaaaaaaaaaaaaaaaaaaaaaaaaaaaaaaaaaaaaaaaaaaaaaaaaaaaaaaaaaaaaaaaaaaaaaaaaaaaaaaaaaa

SEQ ID NO: 26844 - RNA, 1724 nt, Artificial Sequence
  mRNA product Design a-1 (A100) comprising derived and/or modified sequence from LASV(G1442-SLE-2011;Clade IV)__AIT17180__GPCmut4 (opt4)
aggagagucccgcagucggcguccagcggcucugcuuguucgugugugugucguugcaggccuuauucaagcuuaccaugggccagaucgugaccuucuuccaggaggugccccacgugaucgaggaggugaugaacaucgugcugaucgcccugagcauccuggccgugcugaagggccuguacaacguggccaccugcggccugaucggccuggugaccuuccugcugcugugcggcagaagcugcaccaccacccuguacaagggcguguacgagcugcagacccuggagcugaacauggagacccugaacaugugcaugccccugagcugcaccaagaacaacagccaccacuacaucagagugggcaacgagaccggccuggagcugacccugaccaacaccagcaucaucaaccacaaguucugcaaccugagcgacgcccacaagaagaaccuguacgaccacgcccugaugagcaucaucagcaccuuccaccugagcauccccaacuucaaccaguacgaggccaugagcugcgacuucaacggcggcaagaucagcgugcaguacaaccugagccacagcuacgccggcgacgccgccaaccacugcggcaccguggccaacggcgugcugcagaccuucaugagaauggccuggggcggcagcuacaucgcccuggacagcggcagaggcaacugggacugcaucaugaccagcuaccaguaccugaucauccagaacaccaccugggacgaccacugccaguucagcagacccagccccaucggcuaccugggccugcugagccagagaaccagagacguguacaucagcagaagaagaagaggcaccuucaccuggacccugagcgacagcgagggcaaggacacccccggcggcuacugccugaccagauggaugcugaucgaggccgagcugaagugcuucggcaacaccgccguggccaagugcaacgagaagcacgacgaggaguucugcgacaugcugagacuguucgacuucugcaagcaggccauccagagacugaaggcccccgcccagaugagcauccagcugaucaacaaggccgugaacgcccugaucaacgaccagcugaucaugaagaaccaccugagagacaucaugggcauccccuacugcaacuacagcaaguacugcuaccugaacaacaccgccaccggcaagaccagccugcccaagugcugccugaucagcaacggcagcuaccugaacgagacccacuucagcgacgacaucgagcaggaggccgacaacaugaucaccgagaugcugcagaaggaguacauggagagacagggcaagaccccccugggccugguggaccuguucguguucagcaccagcuucuaccugaucagcaucuuccugcaccuggugaagauccccacccacagacacaucgugggcaagagcugccccaagccccacagacugaaccacaugggcaucugcagcugcggccuguacaagcagcccggcgugcccgugagauggaagagaugaggacuagucccuguucccagagcccacuuuuuuuucuuuuuuugaaauaaaauagccugucuuucagaucuaaaaaaaaaaaaaaaaaaaaaaaaaaaaaaaaaaaaaaaaaaaaaaaaaaaaaaaaaaaaaaaaaaaaaaaaaaaaaaaaaaaaaaaaaaaaaaaaaaaa

SEQ ID NO: 26845 - RNA, 1724 nt, Artificial Sequence
  mRNA product Design a-1 (A100) comprising derived and/or modified sequence from LASV(G3010-SLE-2013;Clade IV)__AIT17344__GPCmut4 (opt4)
aggagagucccgcagucggcguccagcggcucugcuuguucgugugugugucguugcaggccuuauucaagcuuaccaugggccagaucgugaccuucuuccaggaggugccccacgugaucgaggaggugaugaacaucgugcugaucgcccugagcauccuggccgugcugaagggccuguacaacuucgccaccugcggccuggugggccuggugaccuuccugcugcugugcggcagaagcugcaccaccagccuguacaagggcguguacgagcugcagacccuggagcugaacauggagacccugaacaugugcaugccccugagcugcaccaagaacaacagccaccacuacaucauggugggcaacgagaccggccuggagcugacccugaccaacaccagcaucaucaaccacaaguucugcaaccugagcgacgcccacaagaagaaccuguacaaccacgcccugaugagcaucaucagcaccuuccaccugagcauccccaacuucaaccaguacgaggccaugagcugcgacuucaacggcggcaagaucagcgugcaguacaaccugagccacagcuacgccggcgacgccgccagccacugcggcaccguggccaacggcgugcugcagaccuucaugagaauggccuggggcggcagcuacaucgcccuggacagcggcuacggcaagugggacugcaucaugaccagcuaccaguaccugaucauccagaacaccaccugggaggaccacugccaguucagcagacccagccccaucggcuaccugggccugcugagccagagaaccagagacaucuacaucagcagaagaagaagaggcaccuucaccuggacccugagcgacagcgagggcaaggacacccccggcggcuacugccugaccagauggaugcugaucgaggccgagcugaagugcuucggcaacaccgccguggccaagugcaacgagaagcacgacgaggaguucugcgacaugcugagacuguucgacuucugcaagcaggccauccagagacugaagacccccgcccagaugagcauccagcugaucaacaaggccgugaacgcccugaucaacgaccagcugaucaugaagaaccaccugagagacaucaugggcauccccuacugcaacuacagcaaguacugcuaccugaaccacaccaccaccggcaagaccagccugcccaagugcugccuggugagcaacggcagcuaccugaacgagacccacuucagcgacgacaucgagcagcaggccgacaacaugaucaccgagaugcugcagaaggaguacauggagagacagggcaagaccccccugggccugguggaccuguucguguucagcaccagcuucuaccugaucagcaucuuccugcaccuggugaagauccccacccacagacacaucgugggcaagagcugccccaagccccacagacugaaccacaugggcaucugcagcugcggccuguacaagcagcccggcgugcccgugagauggaagagaugaggacuagucccuguucccagagcccacuuuuuuuucuuuuuuugaaauaaaauagccugucuuucagaucuaaaaaaaaaaaaaaaaaaaaaaaaaaaaaaaaaaaaaaaaaaaaaaaaaaaaaaaaaaaaaaaaaaaaaaaaaaaaaaaaaaaaaaaaaaaaaaaaaaaa

SEQ ID NO: 26846 - RNA, 1724 nt, Artificial Sequence
  mRNA product Design a-1 (A100) comprising derived and/or modified sequence from LASV(G502-SLE-2009;Clade IV)__AIT17126__GPCmut4 (opt4)
aggagagucccgcagucggcguccagcggcucugcuuguucgugugugugucguugcaggccuuauucaagcuuaccaugggccagaucgugaccuucuuccaggaggugccccacgugaucgaggaggugaugaacaucgugcugaucgcccugagcauccuggccgugcugaagggccuguacaacuucgccaccugcggccuggugggccugcugaccuuccugcugcugugcggcagaagcugcaccaccggccuguacaagggcguguacgagcugcagacccuggagcugaacauggagacccugaacaugugcaugccccugagcugcaccaagaacaacagccaccacuacaucauggugggcaacgagaccggccuggagcugacccugaccaacaccagcaucaucaaccacaaguucugcaaccugagcgacgcccacaagaagaaccuguacgaccacgcccugaugagcaucaucagcaccuuccaccugagcauccccaacuucaaccaguacgaggccaugagcugcgacuucaacggcggcaagaucagcgugcaguacaaccugagccacagcuacgccggcgacgccgccgaccacugcggcaccguggccaacggcgugcugcagaccuucaugagaauggccuggggcggcagcuacaucgcccuggacagcggcagaggcagaugggacugcaucaugaccagcuaccaguaccugaucauccagaacaccaccugggaggaccacugccaguucagcagacccagccccaucggcuaccugggccugcugagccagagaaccagagacaucuacaucagcagaagaagaagaggcaccuucaccuggacccugagcgacagcgagggcaaggacacccccggcggcuacugccugaccagauggaugcugaucgaggccgagcugaagugcuucggcaacaccgccguggccaagugcaacgagaagcacgacgaggaguucugcgacaugcugagacuguucgacuucugcaagcaggccauccagagacugaaggcccccgcccagaugagcauccagcugaucaacaaggccgugaacgcccugaucaacgaccagcuggugaugaagaaccaccugagagacaucaugggcauccccuacugcaacuacagcagauacugcuaccugaaccacaccaccaccggcagaaccagccugcccaagugcugccuggugagcaacggcagcuaccugaacgagacccacuucagcgacgacaucgagcagcaggccgacaacaugaucaccgagaugcugcagaaggaguacauggagagacagggcaagaccccccugggccugguggaccuguucguguucagcaccagcuucuaccugaucagcaucuuccugcaccuggugaagauccccacccacagacacaucgugggcaagagcugccccaagccccacagacugaaccacaugggcaucugcagcugcggccuguacaagcagcccggcgugcccgugaaguggaagagaugaggacuagucccuguucccagagcccacuuuuuuuucuuuuuuugaaauaaaauagccugucuuucagaucuaaaaaaaaaaaaaaaaaaaaaaaaaaaaaaaaaaaaaaaaaaaaaaaaaaaaaaaaaaaaaaaaaaaaaaaaaaaaaaaaaaaaaaaaaaaaaaaaaaaa

SEQ ID NO: 26847 - RNA, 1724 nt, Artificial Sequence
  mRNA product Design a-1 (A100) comprising derived and/or modified sequence from LASV(G733-SLE-2010;Clade IV)__AIT17154__GPCmut4 (opt4)
aggagagucccgcagucggcguccagcggcucugcuuguucgugugugugucguugcaggccuuauucaagcuuaccaugggccagaucgugaccuucuuccaggaggugccccacgugaucgaggaggugaugaacaucgugcugaucgcccugagcauccuggccgugcugaagggccuguacaacuucgccaccugcggcaucgugggccuggugagcuuccugcugcugugcggcagaagcugcaccaccagccuguacaagggcguguacgagcugcagacccuggagcugaacauggagacccugaacaugugcaugccccugagcugcaccaagaacaacagccaccacuacaucauggugggcaacgagaccggccuggagcugacccugaccaacaccagcaucaucaaccacaaguucugcaaccugagcgacgcccacaagaagaaccuguacgaccacgcccugaugagcaucaucagcaccuuccaccugagcauccccaacuucaaccaguacgaggccaugagcugcgacuucaacggcggcaagaucagcgugcaguacaaccugagccacagcuacgccggcgacgccgccaaccacugcggcaccaucgccaacggcgugcugcagaccuucaugagaauggccuggggcggcagcuacaucgcccuggacagcggcagagacagaugggacugcaucaugaccagcuaccaguaccugaucauccagaacaccaccugggaggaccacugccaguucagcagacccagccccaucggcuaccugggccugcugagccagagaaccagagacaucuacaucagcagaagaagaagaggcaccuucaccuggacccugagcgacagcgagggcaaggacacccccggcggcuacugccugaccagauggaugcugaucgaggccgagcugaagugcuucggcaacaccgccguggccaagugcaacgagaagcacgacgaggaguucugcgacaugcugagacuguucgacuucugcaagcaggccauccagagacugaaggcccccgcccagaugagcauccagcugaucaacaaggccgugaacgcccugaucaacgaccagcugaucaugaagaaccaccugagagacaucaugggcauccccuacugcaacuacagcaaguacugcuaccugaaccacaccaccaccggcaagaccagccugcccaagugcugccuggugagcaacggcagcuaccugaacgagacccacuucagcgacgacaucgagcagcaggccgacaacaugaucaccgagaugcugcagaaggaguacauggagagacagggcaagaccccccugggccugguggaccuguucguguucagcaccagcuucuaccugaucagcaucuuccugcaccuggugaagauccccacccacagacacguggugggcaagagcugccccaagccccacagacugaaccacaugggcaucugcagcugcggccuguacggccagcccggcgugcccgugaaguggaagagaugaggacuagucccuguucccagagcccacuuuuuuuucuuuuuuugaaauaaaauagccugucuuucagaucuaaaaaaaaaaaaaaaaaaaaaaaaaaaaaaaaaaaaaaaaaaaaaaaaaaaaaaaaaaaaaaaaaaaaaaaaaaaaaaaaaaaaaaaaaaaaaaaaaaaa

SEQ ID NO: 26848 - RNA, 1724 nt, Artificial Sequence
  mRNA product Design a-1 (A100) comprising derived and/or modified sequence from MOPV/LASV reassortant(IGS-1;Clade IV)__AFY05576__GPCmut4 (opt4)
aggagagucccgcagucggcguccagcggcucugcuuguucgugugugugucguugcaggccuuauucaagcuuaccaugggccagaucgugaccuucuuccaggaggugccccacgugaucgaggaggugaugaacaucgugcugaucgcccugagcgugcuggccgugcugaagggccuguacaacuucgccaccugcggccuggugggccuggugaccuuccugcugcugugcggcagaagcugcaccaccagccuguacaagggcguguacgagcugcagacccuggagcugaacauggagacccugaacaugugcaugccccugagcugcaccaagaacaacagccaccacuacaucauggugggcaacgagaccggccuggagcugacccugaccaacaccagcaucaucaaccacaaguucugcaaccugagcgacgcccacaagaagaaccuguacgaccacgcccugaugagcaucaucagcaccuuccaccugagcauccccaacuucaaccaguacgaggccaugagcugcgacuucaacggcggcaagaucagcgugcaguacaaccugagccacagcuacgccggcgacgccgccaaccacugcggcaccguggccaacggcgugcugcagaccuucaugagaauggccuggggcggcagcuacaucgcccuggacagcggcagaggcaacugggacugcaucaugaccagcuaccaguaccugaucauccagaacaccaccugggaggaccacugccaguucagcagacccagccccaucggcuaccugggccugcugagccagagaaccagagacaucuacaucagcagaagaagaagaggcaccuucaccuggacccugagcgacagcgagggcgaggacacccccggcggcuacugccugaccagauggaugcugaucgaggccgagcugaagugcuucggcaacaccgccguggccaagugcaacgagaagcacgacgaggaguucugcgacaugcugagacuguucgacuucugcaagcaggccauccagagacugaaggcccccgcccagaugagcauccagcugaucaacaaggccgugaacgcccugaucaacgaccagcugaucaugaagaaccaccugagagacaucaugggcauccccuacugcaacuacagcaaguacugcuaccugaaccacaccaccaccggcagaaccagccugcccaagugcugccuggugagcaacggcagcuaccugaacgagacccacuucagcgacgacaucgagcagcaggccgacaacaugaucaccgagaugcugcagaaggaguacauggagagacagggcaagaccccccugggccugguggaccuguucguguucagcaccagcuucuaccugaucagcaucuuccugcaccuggugaagauccccacccacagacacaucgugggcaagagcugccccaagccccacagacugaaccacaugggcaucugcagcugcggccuguacaagcagcccggcgugcccgugaaguggaagagaugaggacuagucccuguucccagagcccacuuuuuuuucuuuuuuugaaauaaaauagccugucuuucagaucuaaaaaaaaaaaaaaaaaaaaaaaaaaaaaaaaaaaaaaaaaaaaaaaaaaaaaaaaaaaaaaaaaaaaaaaaaaaaaaaaaaaaaaaaaaaaaaaaaaaa

SEQ ID NO: 26849 - RNA, 1724 nt, Artificial Sequence
  mRNA product Design a-1 (A100) comprising derived and/or modified sequence from LASV(LM765-SLE-2012;Clade IV)__AIT17814__GPCmut4 (opt4)
aggagagucccgcagucggcguccagcggcucugcuuguucgugugugugucguugcaggccuuauucaagcuuaccaugggccagaucgugaccuucuuccaggaggugccccacgugaucgaggaggugaugaacaucgugcugaucgcccugagcauccuggccgugcugaagggccuguacaacuucgccaccugcggccuggugggccuggugaccuuccugcugcugugcggcagaagcugcaccaccagccuguacaagggcguguacgagcugcagacccuggagcugaacauggagacccugaacaugugcaugccccugagcugcaccaagaacaacagccaccacuacaucauggugggcaacgagaccggccuggagcugacccugaccaacaccagcaucaucgaccacaaguucugcaaccugagcgacgcccacagaaagaaccuguacgaccacgcccugaugagcaucaucagcaccuuccaccugagcauccccaacuucaaccaguacgaggccaugagcugcgacuucaacggcggcaagaucagcgugcaguacaaccugagccacagcuacgccaaggacgccgccgaccacugcggcaccguggccaacggcgugcugcagaccuucaugagaauggccuggggcggcagcuacaucgcccuggacagcggcagaggcagaugggacugcaucaugaccagcuaccaguaccugaucauccagaacaccaccugggaggaccacugccaguucagcagacccagccccaucggcuaccugggccugcugagccagagaaccagagacaucuacaucagcagaagaagaagaggcaccuucaccuggacccugagcgacagcgagggcaaggacacccccggcggcuacugccugaccagauggaugcugaucgaggccgagcugaagugcuucggcaacaccgccguggccaagugcaacgagaagcacgacgaggaguucugcgacaugcugagacuguucgacuucugcaagcaggccauccagagacugaaggcccccgcccagaugagcauccagcugaucaacaaggccgugaacgcccugaucaacgaccagcugaucaugaagaaccaccugagagacaucaugggcauccccuacugcaacuacagcaaguacugcuaccugaaccacaccaccaccggcaagaccagccugcccaagugcugccuggugagcaacggcagcuaccugaacgagacccacuucagcgacgacaucgagcagcaggccgacaacaugaucaccgagaugcugcagaaggaguacauggagagacagggcaagaccccccugggccugguggaccuguucguguucagcaccagcuucuaccugaucagcaucuuccugcaccuggugaagauccccacccacagacacaucgugggcaagcccugccccaagccccacagacugaaccacaugggcaucugcagcugcggccuguacaagcagcccggcgugcccgugaaguggaagagaugaggacuagucccuguucccagagcccacuuuuuuuucuuuuuuugaaauaaaauagccugucuuucagaucuaaaaaaaaaaaaaaaaaaaaaaaaaaaaaaaaaaaaaaaaaaaaaaaaaaaaaaaaaaaaaaaaaaaaaaaaaaaaaaaaaaaaaaaaaaaaaaaaaaaa

SEQ ID NO: 26850 - RNA, 1724 nt, Artificial Sequence
  mRNA product Design a-1 (A100) comprising derived and/or modified sequence from LASV(LM776-SLE-2012;Clade IV)__AIT17824__GPCmut4 (opt4)
aggagagucccgcagucggcguccagcggcucugcuuguucgugugugugucguugcaggccuuauucaagcuuaccaugggccagaucgugaccuucuuccaggaggugccccacgugaucgaggaggugaugaacaucgugcugaucgcccugagcauccuggccgugcugaagggccuguacaacuucgccaccugcggccuggugggccuggugaccuuccugcugcugugcggcagaagcugcaccaccagcguguacaagggcguguacgagcugcagacccuggagcugaacauggagacccugaacaugugcaugccccugagcugcaccaagaacaacagccaccacuacaucauggugggcaacgagaccggccuggagcugacccugaccaacaccagcaucaucaaccacaaguucugcaaccugagcgacgcccacaagaagaaccuguacgaccacgcccugaugagcaucaucagcaccuuccaccugagcauccccaacuucaaccaguacgaggccaugagcugcgacuucaacggcggcaagaucagcgugcaguacaaccugagccacagcuacgccggcgacgccgccaaccacugcggcaccguggccaacggcgugcugcagaccuucaugagaauggccuggggcggcagcuacaucgcccuggacagcggccacggcaagugggacugcaucaugaccagcuaccaguaccugaucauccagaacaccaccugggaggaccacugccaguucagcagacccagccccaucggcuaccugggccugcugagccagagaaccagagacaucuacaucagcagaagaagaagaggcaccuucaccuggacccugagcgacagcgagggcaaggacacccccggcggcuacugccugaccagauggaugcugaucgaggccgagcugaagugcuucggcaacaccgccguggccaagugcaacgagaagcacgacgaggaguucugcgacaugcugagacuguucgacuucugcaagcaggccauccagagacugaaggcccccgcccagaugagcauccagcugaucaacaaggccgugaacgcccugaucaacgaccagcugaucaugaagaaccaccugagagacaucaugggcauccccuacugcaacuacagcaaguacugcuaccugaaccacaccaccaccggcaagaccagccugcccaagugcugccuggugagcaacggcagcuaccugaacgagacccacuucagcgacgacaucgagcagcaggccgacaacaugaucaccgagaugcugcagaaggaguacauggagagacagggcaagaccccccugggccugguggaccuguucguguucagcaccagcuucuaccugaucagcaucuuccugcaccuggugaagauccccacccacagacacaucgugggcaagagcugccccaagccccacagacugaaccacaugggcaucugcagcugcggccuguacaagcagcccggcgugcccgugagauggaagagaugaggacuagucccuguucccagagcccacuuuuuuuucuuuuuuugaaauaaaauagccugucuuucagaucuaaaaaaaaaaaaaaaaaaaaaaaaaaaaaaaaaaaaaaaaaaaaaaaaaaaaaaaaaaaaaaaaaaaaaaaaaaaaaaaaaaaaaaaaaaaaaaaaaaaa

SEQ ID NO: 26851 - RNA, 1724 nt, Artificial Sequence
  mRNA product Design a-1 (A100) comprising derived and/or modified sequence from LASV(Mad39;Clade IV)__ANH09722__GPCmut4 (opt4)
aggagagucccgcagucggcguccagcggcucugcuuguucgugugugugucguugcaggccuuauucaagcuuaccaugggccagaucgugaccuucuuccaggaggugccccacgugaucgaggaggugaugaacaucgugcugaucgcccugagcauccuggccgugcugaagggccuguacaacguggccaccugcggccugaucggccuggugaccuuccugcugcugugcggcagaagcugcaccaccacccuguacaagggcguguacgagcugcaggcccuggagcugaacauggagacccugaacaugugcaugccccugagcugcaccaagaacaacagccaccacuacaucagagugggcaacgagaccggccuggagcugacccugaccaacaccagccugaucaaccacaaguucugcaaccugagcgacgcccacaagaagaaccuguacgaccacgcccugaugagcaucaucagcaccuuccaccugagcauccccaacuucaaccaguacgaggccaugagcugcgacuucaacgacggcaagaucagcgugcaguacaaccugagccacaccuacgccggcgacaccgccaaccacugcggcaccguggccaacggcgugcugcagaccuucaugagaauggccuggggcggcagcuacaucgcccuggacagcggcagaggcggcugggacugcaucaugaccagcuaccaguaccugaucauccagaacaccaccugggaggaccacugccaguucagcagacccagccccaucggcuaccugggccugcugagccagagaaccagagacaucuacaucagcagaagaagaagaggcaccuucaccuggacccugagcgacagcgagggcaaggacacccccggcggcuacugccugaccagauggaugcugaucgaggccgagcugaagugcuucggcaacaccgccguggccaagugcaacgagaagcacgacgaggaguucugcgacaugcugagacuguucgacuucugcaagcaggccauccagagacugaaggcccccgcccagaugagcauccagcugaucaacaaggccgugaacgcccugaucaacgaccagcugaucaugaagaaccaccugagagacaucaugggcauccccuacugcaacuacagcaaguacugcuaccugaaccacaccgugaccggcaagaccagccugcccaagugcugccuggugagcaacggcagcuaccugaacgagacccacuucagcgacgacaucgagcagcaggccgacaacaugaucaccgagaugcugcagaaggaguacauggagagacagggcaagaccccccugggccugguggaccuguucguguucagcaccagcuucuaccugaucagcaucuuccugcaccuggugaagauccccacccacagacacguggugggcaagcccugccccaagccccacagacugaaccacaugggcaucugcagcugcggcuucuacaagcagcccggcgugcccgugagauggaagagaugaggacuagucccuguucccagagcccacuuuuuuuucuuuuuuugaaauaaaauagccugucuuucagaucuaaaaaaaaaaaaaaaaaaaaaaaaaaaaaaaaaaaaaaaaaaaaaaaaaaaaaaaaaaaaaaaaaaaaaaaaaaaaaaaaaaaaaaaaaaaaaaaaaaaa

SEQ ID NO: 26852 - RNA, 1724 nt, Artificial Sequence
  mRNA product Design a-1 (A100) comprising derived and/or modified sequence from LASV(Z0947-SLE-2011;Clade IV)__AIT17840__GPCmut4 (opt4)
aggagagucccgcagucggcguccagcggcucugcuuguucgugugugugucguugcaggccuuauucaagcuuaccaugggccagaucgugaccuucuuccaggaggugccccacgugaucgaggaggugaugaacaucgugcugaucgcccugagcauccuggccgugcugaagggccuguacaacuucgccaccugcggccuggugggccuggugaccuuccugcugcugugcggcagaagcugcaccaucagccuguacaagggcguguacgagcugcagacccuggagcugaacauggagacccugaacaugugcaugccccugagcugcaccaagaacaacagccaccacuacaucauggugggcaacgagaccggccuggagcugacccugaccaacaccagcaucaucaaccacaaguucugcaaccugagcgacgcccacaagaagaaccuguacgaccacgcccugaugagcaucaucagcaccuuccaccugagcauccccaacuucaaccaguacgaggccaugagcugcgacuucaacggcggcaagaucagcgugcaguacaaccugagccacagcuacgccggcgacgccgccaaccacugcggcaccguggccaacggcgugcugcagaccuucaugagaauggccuggggcggcagcuacaucgcccuggacagcggcagagacagaugggacugcaucaugaccagcuaccaguaccugaucauccagaacaccaccugggaggaccacugccaguucagcagacccagccccaucggcuaccugggccugcugagccagagaaccagagacaucuacaucagcagaagaagaagaggcaccuucaccuggacccugagcgacagcgagggcaaggacacccccggcggcuacugccugaccagauggaugcugaucgaggccgagcugaagugcuucggcaacaccgccguggccaagugcaacgagaagcacgacgaggaguucugcgacaugcugagacuguucgacuucugcaagcaggccauccagagacugaaggcccccgcccagaugagcauccagcugaucaacaaggccgugaacgcccugaucaacgaccagcugaucaugaagaaccaccugagagacaucaugggcauccccuacugcaacuacagcaaguacugcuaccugaaccacaccaccaccggcaagaccagccugcccaagugcugccuggugagcaacggcagcuaccugaacgagacccacuucagcgacgacaucgagcagcaggccgacaacaugaucaccgagaugcugcagaaggaguacauggagagacagggcaagaccccccugggccugguggaccuguucguguucagcaccagcuucuaccugaucagcaucuuccugcaccuggugaagauccccacccacagacacaucgugggcaagcccugccccaagccccacagacugaaccacaugggcaucugcagcugcggccuguacaagcagcccggcgugcccgugaaguggaagagaugaggacuagucccuguucccagagcccacuuuuuuuucuuuuuuugaaauaaaauagccugucuuucagaucuaaaaaaaaaaaaaaaaaaaaaaaaaaaaaaaaaaaaaaaaaaaaaaaaaaaaaaaaaaaaaaaaaaaaaaaaaaaaaaaaaaaaaaaaaaaaaaaaaaaa

SEQ ID NO: 26853 - RNA, 1724 nt, Artificial Sequence
  mRNA product Design a-1 (A100) comprising derived and/or modified sequence from LASV(Josiah;Clade IV)__NP_694870__GPCmut4 (opt5)
aggagagucccgcagucggcguccagcggcucugcuuguucgugugugugucguugcaggccuuauucaagcuuaccaugggccagaucgugaccuucuuucaagaggucccccacguuauugaagaggugaugaacaucgugcugauugcccucagcguccuggcugugcuuaaggggcuguacaauuucgccacaugcggacucguuggccuggugacguuucuucugcucugugggagauccugcaccacaucucuguauaaaggagucuacgaacugcagacccucgagcugaacauggaaacacuuaauauguguaugccucugagcugcaccaagaacaauucccaucacuauaucauggugggcaacgagacagggcucgagcugacccuuacgaauaccucuauuaucaaccauaaauucuguaaucugagcgacgcgcacaagaaaaaccucuacgaucaugcucugauguccaucauuucuacauuucaccugagcaucccgaauuucaaccaguaugaagccauguccugcgacuuuaauggaggcaagauuagcguucaguacaaccucucucacuccuaugccggcgaugcugccaaucauugugggaccguggcuaacggaguccugcaaacauucaugcggauggccuggggcgggagcuacaucgcgcuugacucuggacgcggcaacugggauugcauuaugaccuccuaccaguaucugaucauucagaauacgacaugggaggaccacugucaguuuagcagacccucuccuaucggguaccucggacugcuuucccaacggacccgcgauaucuauauuagcagacggcgcagaggcacauucaccuggacccuguccgacucugaaggcaaggauacacccgggggauacugccucacgcgguggaugcugaucgaggccgagcugaaauguuuuggcaacaccgcuguggccaagugcaaugaaaaacaugacgaggaguucugcgauaugcuccgccuguuugacuucuguaagcaggcuauucagagacuuaaagccccugcgcagaugagcauccaacugauuaacaaggccgugaaugcucucaucaacgaucagcugaucaugaagaaucaccuucgggacauuauggggauccccuauugcaacuacuccaaauauuguuaccugaaucacacaaccacaggacgcaccagccucccuaagugcugucuggucucuaacggcuccuaccugaaugaaacgcauuucagcgacgauauugaacagcaagccgacaacaugaucacagagaugcuccagaaagaguauauggaaagacaggggaagaccccgcugggacuuguugaucuguuuguguucucuaccagcuuuuaccucauuuccaucuuccugcaccuggugaaaauccccacacaucggcacauugucggcaagucuugcccuaaaccccaucgccuuaaucacaugggcaucuguagcugcgggcucuauaagcagccuggagugcccguuaaguggaaaagaugaggacuagucccuguucccagagcccacuuuuuuuucuuuuuuugaaauaaaauagccugucuuucagaucuaaaaaaaaaaaaaaaaaaaaaaaaaaaaaaaaaaaaaaaaaaaaaaaaaaaaaaaaaaaaaaaaaaaaaaaaaaaaaaaaaaaaaaaaaaaaaaaaaaaa

SEQ ID NO: 26854 - RNA, 1721 nt, Artificial Sequence
  mRNA product Design a-1 (A100) comprising derived and/or modified sequence from LASV(LP;Clade I)__AAF86701__GPCmut4 (opt5)
aggagagucccgcagucggcguccagcggcucugcuuguucgugugugugucguugcaggccuuauucaagcuuaccaugggccagaucauuaccuucuuucaagaggugccccacgucaucgaagagguuaugaacauugugcugaucgcccucagccugcuugcuauucugaaggggcucuacaauaucgccacaugcggaaucauuggccugguggcguuccuuuuucugugugggaaauccugcucucucacgcugaagggaggcuaugaacugcagacccucgagcugaacauggaaacacuuaauauguguaugccucugagcugcaccaaaaacuccucucaucacuacaucagagucgggaaugagacaggacucgagcugacccuuacaaacaccagcauuaucaaucauaaguucuguaaccuguccgacgcucacaaaaagaaucucuaugaucaugcccugaugucuauuaucagcacguuucaccuguccauuccgaacuucaaucaguacgaagccaugagcugcgacuuuaacggcggcaagaucucugugcaguauaaucucucccacagcuacgcuggggaugccgcugagcauuguggaaccguugccaacggcgugcugcaaacauucaugcggauggcguggggagggcgcuauaucgcccuugacucuggcaaagggaauugggauugcauuaugaccuccuaccaguaccugaucauucagaacacaaccugggaagaccacugucaguuuagcagacccucuccuaucggauaucucggccugcuuucccaacggacgcgcgauauuuacaucagcagacggcgcagaggcacauucaccuggacacuguccgacucugaggggaacgagacccccggaggcuauugccucacccgguggaugcugaucgaagcugagcugaaguguuuugggaauacagccgucgcuaaaugcaacgaaaagcaugaugaggaguucugcgacaugcuccgccuguuugauuucuguaaacaggccauuagacggcuuaaggcgccugcccagaugagcauccagcugauuaauaaggcugugaacgcccucaucaaugaccaacugauuaugaaaaaccaccuucgcgauaucaugggaauccccuacugcaauuauuccaaguacuguuaucugaaccacacgagcucuggcagaaccucccucccuaaaugcugucugauuagcaaugggucuuaccugaacgaaacacaguucagcgacgacaucgagcagcaagcugauaauaugauuaccgaaaugcuccagaaggaguacaucgaacggcagggaaaaacaccgcugggccuuguugacauuuuuaucuucuccaccucuuuuuaucugauuagcaucuuccuccaucugaucaagauucccacgcaccgccauaucgugggcaaaccuugccccaagccucacagacugaaccauaugggggucuguuccugcggacuuuacaagcaccccggcgugccgacaaaauggaagcggugaggacuagucccuguucccagagcccacuuuuuuuucuuuuuuugaaauaaaauagccugucuuucagaucuaaaaaaaaaaaaaaaaaaaaaaaaaaaaaaaaaaaaaaaaaaaaaaaaaaaaaaaaaaaaaaaaaaaaaaaaaaaaaaaaaaaaaaaaaaaaaaaaaaaa

SEQ ID NO: 26855 - RNA, 1721 nt, Artificial Sequence
  mRNA product Design a-1 (A100) comprising derived and/or modified sequence from LASV(803213;Clade II)__AAF86703__GPCmut4 (opt5)
aggagagucccgcagucggcguccagcggcucugcuuguucgugugugugucguugcaggccuuauucaagcuuaccaugggccagaucauuaccuucuuucaagaggugccccacgucaucgaagagguuaugaacauugugcugaucgcccucagccugcuugcuauucugaaggggaucuacaauguggccacaugcggacucuucggccugaucuccuuucuucugcucugugggagaucuugcagcgucacguauaaaggaguguacgaacugcagacccuggagcucaacauggcgaaucugaacauguguaugccucuuuccugcacaaagaauaacucucaucacuauauuaugguuggcaaugaaaccgggcuggagcucacacugaccaacacaagcaucauuaaucauaaauucuguaaccuuuccgacgcucacaagaaaaaucuguacgaucaugcccucaugucuaucauuagcaccuuucaccuguccaucccgaacuucaaucaguaugaggccaugagcugcgacuuuaacggaggcaagauuucugugcaguacaaucugucccacagcuucgcugucgaugccgcuaaccauuguggcacgaucgccaacggggugcuccaaaccuuuaugcggauggcguggggaggcucuuauaucgcccuggacuccgggaagggaaauugggauugcauuaugacaagcuaccaguaccuuaucauucagaacaccacaugggaagaccacugucaguucucucgccccuccccuaucggcuaucuggggcuccugagccaaagaacccgggauauuuacaucucccgcagacggcgcggaacguuuacauggacccuuucugacagcgagggcaaugaagcucccggcggguauugccugacaagauggaugcucaucgaggccgagcugaaauguuucggaaacaccgcuguugccaagugcaaugaaaaacaugaugaggaauuuugcgacaugcugcgccucuucgauuucuguaagcaggcgauuaaacggcugaagaccccugcccagauguccauccagcuuauuaacaaggcugugaaugcccugaucaacgaccaacucauuaugaaaaaucaccugagagauaucaugggcauccccuacugcaacuauagccgguacuguuaucuuaaucacacagucacggggaagaccucucugccucgcugcugucucguguccaacggaagcuaccugaaugagacacauuuuucugacgacauugaacagcaggcugauaacaugaucaccgagaugcugcaaaaagaguacauggacagacagggcaagacaccgcucgggcugguggaucuuuucgucuuuagcaccuccuucuaucugauuucuaucuuucuccaccugguuaaaauucccacgcaucggcacaucgugggaaagccuugccccaaaccucaucgccugaaucacaugggcauuuguagcugcggccuuuacaagcaccccggggugccggucaaguggaaaagaugaggacuagucccuguucccagagcccacuuuuuuuucuuuuuuugaaauaaaauagccugucuuucagaucuaaaaaaaaaaaaaaaaaaaaaaaaaaaaaaaaaaaaaaaaaaaaaaaaaaaaaaaaaaaaaaaaaaaaaaaaaaaaaaaaaaaaaaaaaaaaaaaaaaaa

SEQ ID NO: 26856 - RNA, 1721 nt, Artificial Sequence
  mRNA product Design a-1 (A100) comprising derived and/or modified sequence from LASV(GA391;Clade III)__CAA36645__GPCmut4 (opt5)
aggagagucccgcagucggcguccagcggcucugcuuguucgugugugugucguugcaggccuuauucaagcuuaccaugggccagaucgugaccuucuuucaagaggucccccacguuauugaagaggugaugaacaucgugcugauugcccucagcauccuggcuauucuuaaggggcuguacaaugucgccacaugcggacucaucggccuggugacguuccuucugcucuccgggagaucuuguagccugaucuauaaaggaaccuacgaacugcagacacucgagcugaacauggaaacccuuaauaugugcaugccucuguccuguacaaagaacaauucucaucacuauauucggguuggcaacgagaccgggcucgagcugacacuuaccaauacgagcauccugaaccauaaauuuugcaaucucuccgacgcgcacaagcgcaaccuguacgaucauucucugaugagcauuaucuccaccuuccaccucagcauuccgaauuuuaaccaguaugaagcuaugucuugugacuucaauggaggcaaaaucacagugcaguacaaccugucccacagcuuugccgucgaugccgcuggccauugcgggacccuugccaauggagugcugcaaacauucaugagaauggcuuggggcgggucuuauauugcccucgacuccggacggggcaacugggauuguaucaugaccagcuaccaguaccugaucauucagaacacgacaugggacgaucacugccaguuuucucgccccuccccuaucggguaucuuggacugcucagccaaagaacccgggacauuuacaucucccgcagacggcgcggcacauucaccuggacccugucugauagcgagggcaaugaaacacccgggggauauugucugacgagauggaugcucauugaggcggagcugaagugcuuuggcaacaccgccguugcuaaguguaaugaaaaacaugacgaggaguucugcgauaugcuucggcuguuugacuucugcaagcaggccauccgcagacucaaaaccccugcucagauguccauccagcugauuaacaaggccgugaaugcgcuuaucaacgaucaacugauuaugaaaaaucaccuccgggacaucauggggauucccuacuguaacuauagccgcuacugcuaucugaaucacacaucuacaggaaagaccucccugccuagauguugccucaucagcaacggcucuuaccugaaugaaacgaaguucagcgacgauaucgaacagcaggccgacaacaugauuacagagaugcuucaaaaagaguacaucgaucggcaggggaagaccccgcugggacucgucgaccuguuuguguucuccaccucuuuuuaucugauuagcaucuuccuucaucucgugaaaauucccacacacagacauaucgucggcaagccuugucccaaaccucaccgccugaaucauaugggcauuugcuccugugggcuguacaagcagcccggaguuccggugcgguggaaaagaugaggacuagucccuguucccagagcccacuuuuuuuucuuuuuuugaaauaaaauagccugucuuucagaucuaaaaaaaaaaaaaaaaaaaaaaaaaaaaaaaaaaaaaaaaaaaaaaaaaaaaaaaaaaaaaaaaaaaaaaaaaaaaaaaaaaaaaaaaaaaaaaaaaaaa

SEQ ID NO: 26857 - RNA, 1724 nt, Artificial Sequence
  mRNA product Design a-1 (A100) comprising derived and/or modified sequence from LASV(AV;Clade V)__CCA30314__GPCmut4 (opt5)
aggagagucccgcagucggcguccagcggcucugcuuguucgugugugugucguugcaggccuuauucaagcuuaccaugggccagaucgugaccuucuuucaagaggucccccacguuauugaagaggugaugaacaucgugcugauugcccucagcauccuggcuguccuuaaggggcuguacaauauugccacaugcggacucaucggccugaucacguuccuucugcucugugggagauccugcucuagcaaccuguauaaaggaguguacgaacugcagucccucgaccugaauauggagacccuuaacauguguaugccucugucuugcacaaagaauaacagccaucacuauauucggguuggcaaugauaccgggcucgaacugacacuuaccaacacauccauccugaaucauaaauuuuguaaccucucugacgcgcacaagaaagaucuguacgaccaugcucugaugagcauuaucuccaccuuccaccucagcauuccgaauuuuaaccaguaugaggccaugucuugcgauuucaauggaggcaagaucuccgugcaguacaaccugagccacucuuaugccauugacgcugccaaucauuguggcacggucgcuaacgggauccuucaaaccuuuaugcgcauggccuggggaggcuccuacaucgcgcuggauagcgggagaggaaacugggacugcauuaugacaucuuaccaguaucucaucauucagaauaccacaugggagaaccacugucaguucucccggcccagcccuaucggcuaccuggggcuucugucccaacgcaccagagauauuuauaucucucggcgcagacggggaacguuuacauggacccucagcgacuccgaaggcaaugccacacccggcggguacugccugacccgcuggaugcugaucgaggcugaacucaaguguuucggaaacaccgccguggcuaaaugcaaugagaagcaugaugaggaauuuugcgacaugcugagacuuuucgauuuuuguaaacaggccauuagccggcugaagucuccugcgcagauguccauccagcucauuaacaaagccguuaaugcucugaucaacgaccaacuuauuaugaagaaucaucugcgcgacaucaugggcauccccuauugcaacuacagcaaguauuguuaccucaaucacacaauuacggggaaaaccucucugccuaagugcugucuggugagcaacggauccuaccucaaugagacacacuucucugaugacaucgaacagcaggccgauaacaugauuaccgagaugcugcaaaaagaauauauggagagacagggcaagacaccgcuugggcuggucgaccucuucguguuuagcaccuccuucuaccugaucagcauuuuucugcggcuugugaaaauccccacgcaccgccauauugucggaaagccuugccccaaaccucacagacucaaucauaugggcaucuguucuugcggccuguauaagcagcccgggguuccggugcgguggaagagaugaggacuagucccuguucccagagcccacuuuuuuuucuuuuuuugaaauaaaauagccugucuuucagaucuaaaaaaaaaaaaaaaaaaaaaaaaaaaaaaaaaaaaaaaaaaaaaaaaaaaaaaaaaaaaaaaaaaaaaaaaaaaaaaaaaaaaaaaaaaaaaaaaaaaa

SEQ ID NO: 26858 - RNA, 1721 nt, Artificial Sequence
  mRNA product Design a-1 (A100) comprising derived and/or modified sequence from LASV(Togo/2016/7082;Clade VI)__AMR44577__GPCmut4 (opt5)
aggagagucccgcagucggcguccagcggcucugcuuguucgugugugugucguugcaggccuuauucaagcuuaccaugggccagaucauuaccuucuuucaagaggugccccacgucaucgaagagguuaugaacauugugcugaucgcccucagccugcuugcuauucugaaggggguguacaaugucgccacaugcggaaucaucggccucgugacguuccuguuucuuugugggagauccugcucucugauuuauaaaggaagcuacgaacuccagacccuggagcugaacauggaaacacucaauauguguaugccucuguccugcaccaagaacucuagccaucacuauauccggguuggcaaugagacagggcuugagcugacccucacaaacaccuccauuaucaaucauaaauucuguaaccugucugacgcgcacaagcgcaaucuuuacgaucaugcucugaugagcauucucuccacguuucaccugagcaucccgaacuucaaucaguaugaagccaugucuugcgacuuuaacggaggcaaaauuuccgugcaguacaaucugagccacgccuaugcugucgaugccgcugagcauuguggcaccguggccaacgggguucuccaaacauucaugagaauggcguggggaggcucuuacaucgcccuggacuccgggcggggaaauugggauugcaucaugaccagcuaccaguaucuuauuauccagaacacaaccugggaagaccacugucaguuuucucgccccuccccuauuggcuaccuggggcuccugagccaaagaacgcgggauaucuauauuucccgcagacggcgcggaacauucaccuggacacuuucugacagcgagggcaacgagacccccggcggguacugccugaccagauggaugcucaucgaagcugagcugaaguguuuuggaaauacagccguggcuaagugcaacgaaaaacaugaugaggaguucugcgacaugcugcggcucuuugauuucuguaagcaggccauccagcgccugaaauccccugcgcagaugagcauucaacuuaucaauaaggccgucaacgcucugauuaaugaccagcucaucaugaaaaaccaccugagagauaugaugggcauucccuauugcaauuacucuaaguauuguuaccuuaaccacacguccagcgggcggaccucucugccuaagugcugucucgugagcaauggauccuaccugaacgaaacacauuucucugacgacaucgagcagcaagccgauaauaugaucaccgaaaugcugcagaaagaguauauugaccgccagggcaagacaccgcucgggcugguggaucuuuuugucuucagcaccuccuuuuaccugaucagcauuuuccuccaccugaucaaaauucccacgcauagacacaucguuggaaagccuugccccaaaccucaucggcugaaccacaugggcauuuguucuugcggccuuuauaagcagcccggggugccgacaagauggaaacgcugaggacuagucccuguucccagagcccacuuuuuuuucuuuuuuugaaauaaaauagccugucuuucagaucuaaaaaaaaaaaaaaaaaaaaaaaaaaaaaaaaaaaaaaaaaaaaaaaaaaaaaaaaaaaaaaaaaaaaaaaaaaaaaaaaaaaaaaaaaaaaaaaaaaaa

SEQ ID NO: 26859 - RNA, 1721 nt, Artificial Sequence
  mRNA product Design a-1 (A100) comprising derived and/or modified sequence from LASV(KAK-428;Clade n.d. (VII))__ANH09740__GPCmut4 (opt5)
aggagagucccgcagucggcguccagcggcucugcuuguucgugugugugucguugcaggccuuauucaagcuuaccaugggccagaucgugaccuucuuucaagaggucccccacguuauugaagaggugaugaacaucgugcugauugcccucagccugcuugcuauccugaaggggcucuacaauuucgccacaugcggagucauuggccugaucacguuucuucugcucugugggagauccugcucugcgaccuauaaaggacaguacgaacugcagacacuggagcucaacauggaaagccugaauauguguaugccucuuuccugcaccaagaacaauucucaucacuauauccgggcuggcaacaauacagggcuggagcucacccugacaaacaccagcauuaucucccauaaauucuguaaucuuucugacgcccacaagaaaaaccuguacgaucauacgcucaugagcauuaucaccacauuucaccuguccauuccgaauuucaaccaguaugaggccaugagcugcgacuuuaauggaggcaagaucucuauucaauacaaccugucccacagcuaugcuggcgaugccgcucagcauugugggaccguggccaauggaguucuccagacauucaugcgcauggcguggggcgggucuuaccuggcccuugacuccggaagacggggcugggauugcaucaucagcucuuaccaguaucugauuauccaaaacaccacgugggacgaucacugucaguuuucccgccccagcccuauuggguaccucggauucgugucccagaagacaagagacaucuauauuucucggcgcagacggggcaccuuuacauggacccugagcgauuccgaaggccaugacaugcccgggggauacugccuuacccgcuggaugcugaucgaggcugaucucaaauguuucggcaacacagccgucgcuaagugcaaugaaaaacacgacgaggaguuuugcgauauguggagacuguucgacuucuguaagcaggccauccaacggcugaaagcgccugcccagaugaacauucagcucaucaauaaggcugugaacgcccugauuaaugaccaacuuaugaugaagaaccaucugcgcgauaucauggggauucccuauugcaauuacagcaaauuuuguuaucucaacaauacgaccacaggaagaaccucucugccucggugcugucuuaucuccaacggcagcuaccugaaugaaacacacuucucugacgauaucgagcagcaggcugacaacaugauuaccgaaaugcuccagaaggaguacauggaucgccaagggaaaacgccgcugggacugguugaccucuuuguguucagcacauccuuuuaucugaucaccauuuuccuucaccuggucaagauccccacccauagacacauugugggcaaaccuugccccaagccucaucggcucaaucacaugggcaucuguucuugcgggcuguacaaacagcccggagugccggucagauggaagcgcugaggacuagucccuguucccagagcccacuuuuuuuucuuuuuuugaaauaaaauagccugucuuucagaucuaaaaaaaaaaaaaaaaaaaaaaaaaaaaaaaaaaaaaaaaaaaaaaaaaaaaaaaaaaaaaaaaaaaaaaaaaaaaaaaaaaaaaaaaaaaaaaaaaaaa

SEQ ID NO: 26860 - RNA, 1721 nt, Artificial Sequence; identical to SEQ ID NO: 26854
  mRNA product Design a-1 (A100) comprising derived and/or modified sequence from LASV(Pinneo-NIG-1969;Clade I)__AIT17836__GPCmut4 (opt5)

SEQ ID NO: 26861 - RNA, 1721 nt, Artificial Sequence
  mRNA product Design a-1 (A100) comprising derived and/or modified sequence from LASV(ISTH0009-NIG-2011;Clade II)__AIT17404__GPCmut4 (opt5)
aggagagucccgcagucggcguccagcggcucugcuuguucgugugugugucguugcaggccuuauucaagcuuaccaugggccagaucauuaccuucuuucaagaggugccccacgucaucgaagagguuaugaacauugugcugaucgcccucagccugcuugcuauucugaaggggaucuacaauguggccacaugcggacucuucggccuggucuccuuucuucugcucugugggagaucuugcagcacgaccuauaaaggaguguacgaacugcagacacuggagcucgacauggcgucccugaacauguguaugccucuuucuugcaccaagaauaacagccaucacuauaucaugguuggcaaugaaacagggcuggagcucacccugacaaacaccuccauuaucaaucauaaauucuguaaccuuucugaugcucacaagaaaaaucuguacgaccaugcccucaugagcauuaucuccacguuucaccugagcauuccgaacuucaaucaguaugaggccaugucuugcgauuuuaacggaggcaagaucuccgugcaguacaaucugagccacgcuuaugccgucgacgcugccaaccauuguggcaccauugcgaauggggugcuccaaacauucaugcggauggccuggggaggcucuuacaucgcucuggauuccgggaagggaagcugggacugcaucaugaccucuuaccaguaucuuauuauccagaacacaaccugggaagaucacugucaguuuucccgccccagcccuauuggcuaccuggggcuccugucccaaagaacgcgggacaucuauauuucucgcagacggcgcggaacauucaccuggacacuuagcgauuccgagggcaacgaaacccccggcggguacugccugaccagauggaugcucaucgaggccgagcugaaauguuuuggaaauacagcuguugccaagugcaacgaaaaacaugacgaggaguucugcgauaugcugcggcucuuugacuucuguaagcaggcgauccgcagacugaaaacgccugcccagaugagcauucagcuuaucaauaaggcugugaacgcccugauuaaugaucaacucaucaugaagaaccaucugcgggacauuaugggcauccccuauugcaauuacucuaaauauuguuaccuuaaccacaccgucacagggaagaccucccugccucgcugcugucucgugagcaauggaucuuaccugaacgaaacacacuucagcgacgauaucgaacagcaggcugacaauaugauuaccgagcugcuccaaaaagaguauauggauagacagggcaagacgccgcuggggcuuguggaccuguuugucuucuccacaucuuuuuaccucaucagcauuuuccugcaccugaucaaaauucccacccaucggcacaucaccggaaagccuugccccaaaccucaucgccuuaaccacaugggcauuuguuccugcggccucuauaagcaccccgggguuccggugaaguggaaaagaugaggacuagucccuguucccagagcccacuuuuuuuucuuuuuuugaaauaaaauagccugucuuucagaucuaaaaaaaaaaaaaaaaaaaaaaaaaaaaaaaaaaaaaaaaaaaaaaaaaaaaaaaaaaaaaaaaaaaaaaaaaaaaaaaaaaaaaaaaaaaaaaaaaaaa

SEQ ID NO: 26862 - RNA, 1721 nt, Artificial Sequence
  mRNA product Design a-1 (A100) comprising derived and/or modified sequence from LASV(ISTH2010-NIG-2012;Clade II)__AIT17482__GPCmut4 (opt5)
aggagagucccgcagucggcguccagcggcucugcuuguucgugugugugucguugcaggccuuauucaagcuuaccaugggccagaucauuaccuucuuucaagaggugccccacgucaucgaagagguuaugaacauugugcugaucgcccucagccugcuugcuauucugaaggggaucuacaauguggccacaugcggacucuucggccuggucuccuuucuucugcucugugggagaucuugcagcacgaccuauaaaggaguguacgaacugcagacacuggagcucgacauggcgucccugaacauguguaugccucuuucuugcaccaagaauaacagccaucacuauaucaugguuggcaaugaaacagggcuggagcucacccugacaaacaccuccauuaucaaucauaaauucuguaaccuuucugaugcucacaagaaaaaucuguacgaccaugcccucaugagcauuaucuccacguuucaccugagcauuccgaacuucaaucaguaugaggccaugucuugcgauuuuaacggaggcaagaucuccgugcaguacaaucugagccacgcuuaugccgucgacgcugccaaccauuguggcaccauugcgaauggggugcuccaaacauucaugcggauggccuggggaggcucuuacaucgcucuggauuccgggaagggaagcugggacugcaucaugaccucuuaccaguaucuuauuauccagaacauuacaugggaagaucacugucaguuuucccgccccagcccuaucggcuaccuggggcuccugucccaaagaacccgggacauuuauaucucucgcagacggcgcggaacguucacauggacccuuagcgauuccgagggcaacgaaacacccggcggguacugccugaccagauggaugcucaucgaggccgagcugaaauguuuuggaaauaccgcuguugccaagugcaacgaaaaacaugacgaggaguucugcgauaugcugcggcucuuugacuucuguaagcaggcgauucgcagacugaaaacgccugcccagaugagcauccagcuuauuaauaaggcugugaacgcccugaucaaugaucaacucauuaugaagaaccaucugcgggacaucaugggcauccccuauugcaauuacucuaaauauuguuaccuuaaccacacagucaccgggaagacaucccugccucgcugcugucucgugagcaauggaucuuaccugaacgaaacccacuucagcgacgauauugaacagcaggcugacaauaugaucacagagcugcuccaaaaagaguauauugauagacagggcaagaccccgcuggggcuuguggaccuguuugucuucuccacgucuuuuuaccucaucagcauuuuccugcaccugguuaaaauccccacacaucggcacguggugggaaagccuugccccaaaccucaucgccuuaaccacaugggcauuuguuccugcggccucuauaagcaccccggggucccggugaaguggaaaagaugaggacuagucccuguucccagagcccacuuuuuuuucuuuuuuugaaauaaaauagccugucuuucagaucuaaaaaaaaaaaaaaaaaaaaaaaaaaaaaaaaaaaaaaaaaaaaaaaaaaaaaaaaaaaaaaaaaaaaaaaaaaaaaaaaaaaaaaaaaaaaaaaaaaaa

SEQ ID NO: 26863 - RNA, 1721 nt, Artificial Sequence
  mRNA product Design a-1 (A100) comprising derived and/or modified sequence from LASV(Lassa virus/H.sapiens-wt/NGA/2015/ISTH_0543;Clade II)__AVO03639__GPCmut4 (opt5)
aggagagucccgcagucggcguccagcggcucugcuuguucgugugugugucguugcaggccuuauucaagcuuaccaugggccagaucauuaccuucuuucaagaggugccccacgucaucgaagagguuaugaacauugugcugaucgcccucagccugcuugcuauucugaaggggaucuacaauguggccacaugcggacucuucggccuggucuccuuucuucugcucugugggagaucuugcagcacgaccuauaaaggaguguacgaacugcagacacuggagcucgacauggcgaaccugaauauguguaugccucuuuccugcaccaagaacaauucucaucacuauaucaugguuggcaacgaaacagggcuggagcucacccugacaaauaccagcauuaucaaccauaaauucuguaaucuuuccgaugcucacaagaaaaaccuguacgaccaugcccucaugucuauuaucagcacguuucaccuguccauuccgaauuucaaccaguaugaggccaugagcugcgauuuuaauggaggcaagaucucugugcaguacaaccugucccacaccuaugcugucgacgccgcuaaucauuguggcacaauugccaacggggugcuccaaaccuucaugcggauggcguggggaggcagcuacaucgcccuggauucugggaagggauccugggacugcaucaugacaagcuaccaguaucuuguuauucagaacaccacgugggaagaucacugucaguuuucucgccccuccccuaucggcuaccuggggcuccugagccaaagaacacgggacauuuauaucucccgcagacggcgcggaaccuucacauggacccuuucugauagcgagggcaaugaaacccccggcggguacugccugacaagauggaugcucauugaggcugagcugaaauguuuuggaaacacggccguggcuaagugcaaugaaaaacaugacgaggaguucugcgauaugcugcggcucuuugacuucuguaagcaggccauccgcagacugaaaaccccugcgcagauguccauccagcuuauuaacaaggccgucaaugcucugaucaacgaucaacucauuaugaagaaucaucugcgggacaucaugggcauucccuauugcaacuacagcaaauauuguuaccuuaaucacacagugaccgggaagacaucucugccucgcugcugucucguguccaacggaagcuaccugaaugaaacccacuucucugacgauaucgaacagcaggccgacaacaugaucacggagcugcuccaaaaagaguauauugauagacagggcaagacaccgcuggggcuugucgaccuguuuguuuucagcaccuccuuuuaccucaucucuauuuuccugcaccuggugaaaauccccacccaucggcacauuacaggaaagccuugccccaaaccucaucgccuuaaucacaugggcaucuguagcugcggccucuauaagcaccccggggugccggucaaguggaaaagaugaggacuagucccuguucccagagcccacuuuuuuuucuuuuuuugaaauaaaauagccugucuuucagaucuaaaaaaaaaaaaaaaaaaaaaaaaaaaaaaaaaaaaaaaaaaaaaaaaaaaaaaaaaaaaaaaaaaaaaaaaaaaaaaaaaaaaaaaaaaaaaaaaaaaa

SEQ ID NO: 26864 - RNA, 1721 nt, Artificial Sequence
  mRNA product Design a-1 (A100) comprising derived and/or modified sequence from LASV(Lassa virus/H.sapiens-wt/NGA/2016/ISTH_0009;Clade II)__AVO03571__GPCmut4 (opt5)
aggagagucccgcagucggcguccagcggcucugcuuguucgugugugugucguugcaggccuuauucaagcuuaccaugggccagaucauuaccuucuuucaagaggugccccacgucaucgaagagguuaugaacauugugcugaucgcccucagccugcuugcuauucugaaggggaucuacaauguggccacaugcggacuccugggccuugucuccuuccugcuccugugugggagaucuugcagcacgaccuauaaaggaguguacgaacugcagacacucgagcuggacauggcgucccuuaacauguguaugccucugucuugcaccaagaauaacagccaucacuauaucaugguuggcaaugaaacagggcucgagcugacccuuacaaacaccuccauuaucaaucauaaauuuuguaaccugucugaugcucacaagaaaaaucucuacgaccaugcccugaugagcauuaucuccacguuccaccugagcauuccgaacuuuaaucaguaugaggccaugucuugcgauuucaacggaggccggaucuccgugcaguacaaucucagccacucuuaugcugucgacgccgcuaaccauuguggcaccauugccaauggggugcugcaaacauuuaugcgcauggcguggggaggcuccuacaucgcccuugauagcgggaagggaucuugggacugcaucaugaccuccuaccaguaucugauuauccagaacacaaccugggaagaucacugucaguucagcagacccuccccuauuggcuaccucgggcugcuuucucaacggacgcgcgacaucuauauuagcagacggcgcagaggaacauuuaccuggacacuguccgauagcgagggcaacgaaacccccggcggguacugccucacccgguggaugcugaucgaggcugagcugaaguguuucggaaauacagccguugcuaaaugcaacgaaaagcaugacgaggaauuuugcgauaugcuccgccuguucgacuuuuguaaacaggccaucagacggcuuaagacgccugcgcagaugucuauucagcugaucaauaaagccgugaacgcucucauuaaugaucaacugaucaugaagaaccaccuucgcgacauuaugggcauccccuauugcaauuacuccaaguauuguuaccugaaccacaccgucacagggaaaaccagccucccuagaugcugucuggugucuaauggaagcuaccugaacgagacacauuucuccgacgauaucgaacagcaggccgacaauaugauuaccgagcuccugcaaaaggaguauaucgaucggcagggcaaaacgccgcuugggcugguggaccucuucgucuuuucuaccagcuucuaccugauuuccaucuuucugcaccuuguuaagauucccacacaucgccacaucaccggaaaaccuugccccaagccucauagacucaaccacaugggcauuuguagcugcggccuguauaaucaccccggggugccggugaaauggaagcggugaggacuagucccuguucccagagcccacuuuuuuuucuuuuuuugaaauaaaauagccugucuuucagaucuaaaaaaaaaaaaaaaaaaaaaaaaaaaaaaaaaaaaaaaaaaaaaaaaaaaaaaaaaaaaaaaaaaaaaaaaaaaaaaaaaaaaaaaaaaaaaaaaaaaa

SEQ ID NO: 26865 - RNA, 1721 nt, Artificial Sequence
  mRNA product Design a-1 (A100) comprising derived and/or modified sequence from LASV(Lassa virus/H.sapiens-wt/NGA/2016/ISTH_0017;Clade II)__AVO03567__GPCmut4 (opt5)
aggagagucccgcagucggcguccagcggcucugcuuguucgugugugugucguugcaggccuuauucaagcuuaccaugggccagaucauuaccuucuuucaagaggugccccacgucaucgaagagguuaugaacauugugcugaucgcccucagccugcuugcuauucugaaggggaucuacaauguggccacaugcggacucuucggccuggucuccuuucuucugcucugugggagaucuugcagcacgaccuauaaaggaguguacgaacugcagacacuggagcucgacauggcgucccugaacauguguaugccucuuucuugcaccaagaauaacagccaucacuauaucaugguuggcaaugaaacagggcuggagcucacccugacaaacaccuccauuaucaaucauaaauucuguaaccuuucugaugcucacaagaaaaaucuguacgaccaugcccucaugagcauuaucuccacguuucaccugagcauuccgaacuucaaucaguaugaggccaugucuugcgauuuuaacggaggcaagaucuccgugcaguacaaucugagccacaccuaugcuauugacgccgcuaaccauuguggcacaaucgccaaugggguccuccaaaccuucaugcggauggcguggggaggcucuuacaucgcccuggauuccgggaagggaagcugggacugcauuaugacaucuuaccaguaucuuaucauucagaacaccacgugggaagaucacugucaguuuucccgccccagcccuaucggcuaccuggggcuccugucccaaagaacacgggacauuuauaucucucgcagacggcgcggaaccuucacauggacccuuagcgauuccgagggcaacgaaacccccggcggguacugccugacaagauggaugcucaucgaggcugagcugaaauguuuuggaaauacggccguggcuaagugcaacgaaaaacaugacgaggaguucugcgauaugcugcggcucuuugacuucuguaagcaggccauucgcagacugaaaaccccugcgcagaugagcauccagcuuauuaauaaggccguuaacgcucugaucaaugaucaacucauuaugaagaaccaucugcgggacaucaugggcauccccuauugcaauuacucuaaauauuguuaccuuaaccacacagugaccgggaagacaucccugccucgcugcugucucgucagcaauggaucuuaccugaacgaaacccacuucagcgacgauauugaacagcaggccgacaauaugaucacggagcugcuccaaaaagaguauauggauagacagggcaagacaccgcuggggcuuguggaccuguuuguguucuccaccucuuuuuaccucauuagcaucuuccugcaccugguccggauucccacccaucgccacguuaucggaaaaccuugccccaagccucauagacuuaaccacaugggcauuuguuccugcggccucuauaaacaccccggggugccggugaaguggaagcggugaggacuagucccuguucccagagcccacuuuuuuuucuuuuuuugaaauaaaauagccugucuuucagaucuaaaaaaaaaaaaaaaaaaaaaaaaaaaaaaaaaaaaaaaaaaaaaaaaaaaaaaaaaaaaaaaaaaaaaaaaaaaaaaaaaaaaaaaaaaaaaaaaaaaa

SEQ ID NO: 26866 - RNA, 1721 nt, Artificial Sequence
  mRNA product Design a-1 (A100) comprising derived and/or modified sequence from LASV(Lassa virus/H.sapiens-wt/NGA/2018/ISTH_0959;Clade II)__AVV65099__GPCmut4 (opt5)
aggagagucccgcagucggcguccagcggcucugcuuguucgugugugugucguugcaggccuuauucaagcuuaccaugggccagaucauuaccuucuuucaagaggugccccacgucaucgaagagguuaugaacauugugcugaucgcccucagccugcuugcuauucugaaggggaucuacaauguggucacaugcggacucuucggccugguguccuuucuucugcucugugggagaucuugcagcacgaccuauaaaggaguuuacgaacugcagacacuggagcucgacauggccucccugaacauguguaugccucuuucuugcaccaagaauaacagccaucacuauaucauggugggcaaugaaacagggcuggagcucacccugacaaacaccuccauuaucaaucauaaauucuguaaccuuucugaugcgcacaagaaaaaucuguacgaccaugcucucaugagcauuaucuccacguuucaccugagcauuccgaacuucaaucaguaugaggccaugucuugcgauuuuaacggaggcaagaucuccguccaguacaaucugagccacgccuaugcuauugacgccgcuaaccauuguggcaccaucgccaauggggugcuccaaacauucaugcggauggcguggggaggcucuuacaucgcccuggauuccgggaagggaagcugggacugcauuaugaccucuuaccaguaucuuaucauucagaacacaaccugggaagaucacugucaguuuucccgccccagcccuaucggcuaccuggggcuccugucccaaagaacgcgggacauuuauaucucucgcagacggcgcggaacauucaccuggacacuuagcgauuccgagggcaacgaaacccccggcggguacugccugaccagauggaugcucaucgaggcugagcugaaauguuuuggaaauacagccguugcuaagugcaacgaaaaacaugacgaggaguucugcgauaugcugcggcucuuugacuucuguaagcaggccauucgcagacugaaaacgccugcgcagaugagcauccagcuuauuaauaaggccgugaacgcucugaucaaugaucaacucauuaugaagaaccaucugcgggacaucaugggcauccccuauugcaauuacucuaaauauuguuaccuuaaccacaccgucacagggaagaccucccugccucgcugcugucucgugagcaauggaucuuaccugaacgaaacacacuucagcgacgauauugaacagcaggccgacaauaugaucaccgagcugcuccaaaaagaguauauugauagacagggcaagacgccgcuggggcuuguggaccuguuugucuucuccacaucuuuuuaccucaucagcauuuuccugcaccugguuaaaauccccacccaucggcacgugauuggaaagccuugccccaaaccucaucgccuuaaccacaugggcaucuguuccugcggccucuauaagcaccccggggugccggucaaguggaaaagaugaggacuagucccuguucccagagcccacuuuuuuuucuuuuuuugaaauaaaauagccugucuuucagaucuaaaaaaaaaaaaaaaaaaaaaaaaaaaaaaaaaaaaaaaaaaaaaaaaaaaaaaaaaaaaaaaaaaaaaaaaaaaaaaaaaaaaaaaaaaaaaaaaaaaa

SEQ ID NO: 26867 - RNA, 1721 nt, Artificial Sequence
  mRNA product Design a-1 (A100) comprising derived and/or modified sequence from LASV(LASV003-NIG-2008;Clade II)__AIT17580__GPCmut4 (opt5)
aggagagucccgcagucggcguccagcggcucugcuuguucgugugugugucguugcaggccuuauucaagcuuaccaugggccagaucauuaccuucuuucaagaggugccccacgucaucgaagagguuaugaacauugugcugaucgcccucagccugcuugcuauucugaaggggaucuacaauguggccacaugcggacucuucggccuggucuccuuucuucugcucugugggagaucuugcagcacgaccuauaaaggaguguacgaacugcagacacuggagcucgacauggcgucccugaacauguguaugccucuuucuugcaccaagaauaacagccaucacuauaucaugguuggcaaugaaacagggcuggagcucacccugacaaacaccuccauuaucaaucauaaauucuguaaccuuucugaugcucacaagaaaaaucuguacgaccaugcccucaugagcauuaucuccacguuucaccugagcauuccgaacuucaaucaguaugaggccaugucuugcgauuuuaacggaggcaagaucuccgugcaguacaaucugagccacaccuaugcugucgacgccgcuaaccauuguggcacaauugccaauggggugcuccaaaccuucaugcggauggcguggggaggcucuuacaucgcccuggauuccgggaagggaagcugggacugcaucaugacaucuuaccaguaucuuauuauccagaacaccacgugggaagaucacugucaguuuucccgccccagcccuauuggcuaccuggggcuccugucccaaagaacacgggacaucuauauuucucgcagacggcgcggaaccuucacauggacccuuagcgauuccgagagcaacgaaacccccggcggcuacugccugacaagauggaugcucaucgaggcugagcugaaauguuuugggaauacggccguugcuaagugcaacgaaaaacaugacgaggaguucugcgauaugcugcggcucuuugacuucuguaagcaggccauccgcagacugaaagcgccugcccagaugucuauucagcuuaucaauaaggcugugaacgcccugauuaaugaucaacucaucaugaagaaccaucugcgggacauuaugggaauccccuauugcaauuacuccaaauauuguuaccuuaaccacaccgucacaggccgcaccagccugccuagaugcugucucgugucuaaugggagcuaccugaacgaaacacacuucuccgacgauaucgaacagcaggcugacaauaugauuaccgagcugcuccaaaaggaguauauggaucggcagggaaaaacgccgcugggccuuguggaccuguuugucuucucuaccagcuuuuaccucaucuccauuuuccugcaccugguuaagauccccacacaucgccacgugauugggaaaccuugccccaagccucauagacuuaaccacaugggaaucuguagcugcggccucuauaaacaccccggcgugccggucaaguggaagcggugaggacuagucccuguucccagagcccacuuuuuuuucuuuuuuugaaauaaaauagccugucuuucagaucuaaaaaaaaaaaaaaaaaaaaaaaaaaaaaaaaaaaaaaaaaaaaaaaaaaaaaaaaaaaaaaaaaaaaaaaaaaaaaaaaaaaaaaaaaaaaaaaaaaaa

SEQ ID NO: 26868 - RNA, 1721 nt, Artificial Sequence
  mRNA product Design a-1 (A100) comprising derived and/or modified sequence from LASV(LASV035-NIG-2009;Clade II)__AIT17588__GPCmut4 (opt5)
aggagagucccgcagucggcguccagcggcucugcuuguucgugugugugucguugcaggccuuauucaagcuuaccaugggccagaucauuaccuucuuucaagaggugccccacgucaucgaagagguuaugaacauugugcugaucgcccucagccugcuugcuauucugaaggggaucuacaauguggccacaugcggacucuucggccuggucuccuuucuucugcucugugggagaucuugcagcacgaccuauaaaggaguguacgaacugcagacacuggagcucgacauggcgucccugaacauguguaugccucuuucuugcaccaagaauaacagccaucacuauaucaugguuggcaaugaaacagggcuggagcucacccugacaaacaccuccauuaucaaucauaaauucuguaaccuuucugaugcucacaagaaaaaucuguacgaccaugcccucaugagcauuaucuccacguuucaccugagcauuccgaacuucaaucaguaugaggccaugucuugcgauuuuaacggaggcaagaucuccgugcaguacaaucugagccacgcuuaugccgucgacgcugccaaccauuguggcaccauugcgaauggggugcuccaaacauucaugcggauggccuggggaggcucuuacaucgcucuggauuccgggaagggaagcugggacugcaucaugaccucuuaccaguaucuuauuauccagaacacaaccugggaagaucacugucaguuuucccgccccagcccuauuggcuaccuggggcuccugucccaaagaacgcgggacaucuauauuucucgcagacggcgcggaacauucaccuggacacuuagcgauuccgagggcaacgaaacccccggcggguacugccugaccagauggaugcucaucgaggccgagcugaaauguuuuggaaauacagcuguugccaagugcaacgaaaaacaugacgaggaguucugcgauaugcugcggcucuuugacuucuguaagcaggcgauccgcagacugaaagccccugcucagaugagcauucagcuuaucaauaaggccgugaacgcucugauuaaugaucaacucaucaugaagaaccaucugcgggacauuaugggcauccccuauugcaauuacucuaaauauuguuaccuuaaccacacggucaccgggaagacaucccugccucgcugcugucucgugagcaauggaucuuaccugaacgaaacccacuucagcgacgauaucgaacagcaggccgacaauaugauuacagagcugcuccaaaaagaguauaucgauagacagggcaagaccccgcuggggcuuguggaccuguuugucuucuccacgucuuuuuaccucauuagcaucuuccugcaccugguuaaaauucccacacaucggcacgugaucggaaagccuugccccaaaccucaucgccuuaaccacaugggcauuuguuccugcggccucuauaagcaccccggggugccggucaaguggaaaagaugaggacuagucccuguucccagagcccacuuuuuuuucuuuuuuugaaauaaaauagccugucuuucagaucuaaaaaaaaaaaaaaaaaaaaaaaaaaaaaaaaaaaaaaaaaaaaaaaaaaaaaaaaaaaaaaaaaaaaaaaaaaaaaaaaaaaaaaaaaaaaaaaaaaaa

SEQ ID NO: 26869 - RNA, 1721 nt, Artificial Sequence
  mRNA product Design a-1 (A100) comprising derived and/or modified sequence from LASV(LASV1000-NIG-2009;Clade II)__AIT17782__GPCmut4 (opt5)
aggagagucccgcagucggcguccagcggcucugcuuguucgugugugugucguugcaggccuuauucaagcuuaccaugggccagaucauuaccuucuuucaagaggugccccacgucaucgaagagguuaugaacauugugcugaucgcccucagccugcuugcuauucugaaggggaucuacaauguggccacaugcggacucuucggccuggucuccuuucuucugcucugugggagaucuugcagcacgaccuauaaaggaguguacgaacugcagacacuggagcucgacauggcgucccugaacauguguaugccucuuucuugcaccaagaauaacagccaucacuauaucaugguuggcaaugaaacagggcuggagcucacccugacaaacaccuccauuaucaaucauaaauucuguaaccuuucugaugcucacaagaaaaaucuguacgaccaugcccucaugagcauuaucuccacguuucaccugagcauuccgaacuucaaucaguaugaggccaugucuugcgauuuuaacggaggcaagaucuccgugcaguacaaucugagccacaccuaugcugucgacgccgcuaaccauuguggcacaauugccaauggggugcuccaaaccuucaugcggauggcguggggaggcucuuacaucgcccuggauuccgggaagggaagcugggacugcaucaugacaucuuaccaguaucuuauuauccagaacaccacgugggaagaucacugucaguuuucccgccccagcccuauuggcuaccuggggcuccugucccaaagaacacgggacaucuauauuucucgcagacggcgcggaaccuucacauggacccuuagcgauuccgagggcaacgaaacccccggcggguacugccugacaagauggaugcucaucgaggcugagcugaaauguuuuggaaauacggccguugcuaagugcaacgaaaaacaugacgaggaguucugcgauaugcugcggcucuuugacuucuguaagcaggccaucaaacgccugaagaccccugcgcagaugagcauucagcuuaucaauaaggccgugaacgcucugauuaaugaucaacucaucaugaaaaaccaccugagagacauuaugggcauccccuauugcaauuacucuaaguauuguuaccuuaaccacacagucaccgggaaaacaucccugccucggugcugucucgugagcaauggaucuuaccugaacgaaacccauuucagcgacgauaucgaacagcaggccgacaauaugauuacggagcugcuccaaaaggaguauaucgaucgccagggcaaaacaccgcuggggcuuguggaccuguuugucuucuccaccucuuuuuaccucauuagcaucuuccugcaccugguuaagauucccacccauagacacguggugggaaaaccuugccccaagccucaucggcuuaaccacaugggcaucuguuccugcggccucuauaagcaccccggggucccggugaaauggaagcgcugaggacuagucccuguucccagagcccacuuuuuuuucuuuuuuugaaauaaaauagccugucuuucagaucuaaaaaaaaaaaaaaaaaaaaaaaaaaaaaaaaaaaaaaaaaaaaaaaaaaaaaaaaaaaaaaaaaaaaaaaaaaaaaaaaaaaaaaaaaaaaaaaaaaaa

SEQ ID NO: 26870 - RNA, 1721 nt, Artificial Sequence
  mRNA product Design a-1 (A100) comprising derived and/or modified sequence from LASV(LASV221-NIG-2010;Clade II)__AIT17624__GPCmut4 (opt5)
aggagagucccgcagucggcguccagcggcucugcuuguucgugugugugucguugcaggccuuauucaagcuuaccaugggccagaucauuaccuucuuucaagaggugccccacgucaucgaagagguuaugaacauugugcugaucgcccucagccugcuugcuauucugaaggggaucuacaauguggccacaugcggacucuucggccuggucuccuuucuucugcucugugggagaucuugcagcacgaccuauaaaggaguguacgaacugcagacacuggagcucgacauggcgucccugaacauguguaugccucuuucuugcaccaagaauaacagccaucacuauaucaugguuggcaaugaaacagggcuggagcucacccugacaaacaccuccauuaucaaucauaaauucuguaaccuuucugaugcucacaagaaaaaucuguacgaccaugcccucaugagcauuaucuccacguuucaccugagcauuccgaacuucaaucaguaugaggccaugucuugcgauuuuaacggaggcaagaucuccgugcaguacaaucugagccacaccuaugcuauugacgccgcuaaccauuguggcacaaucgccaaugggguccuccaaaccuucaugcggauggcguggggaggcucuuacaucgcccuggauuccgggaagggaagcugggacugcauuaugacaucuuaccaguaucuuaucauucagaacaccacgugggaagaucacugucaguuuucccgccccagcccuaucggcuaccuggggcuccugucccaaagaacacgggacauuuauaucucucgcagacggcgcggaaccuucacauggacccuuagcgauuccgagggcaacgaaacccccggcggguacugccugacaagauggaugcucaucgaggcugagcugaaauguuuuggaaauacggccguggcuaagugcaacgaaaaacaugacgaggaguucugcgauaugcugcggcucuuugacuucuguaagcaggccauucgcagacugaaaaccccugcgcagaugagcauccagcuuauuaauaaggccguuaacgcucugaucaaugaucaacucauuaugaagaaccaucugcgggacaucaugggcauccccuauugcaauuacucuaaauauuguuaccuuaaccacacagugaccgggaagacaucccugccucgcugcugucucgucagcaauggaucuuaccugaacgaaacccacuucagcgacgauauugaacagcaggccgacaauaugaucacggagaugcugcaaaaagaguauauggauagacagggcaagacaccgcucgggcugguggaccuuuuuguguucuccaccucuuuuuaccugauuagcaucuuccuccaccuggucaaaauucccacccaucggcacguuaucggaaagccuugccccaaaccucaucgccugaaccacaugggcauuuguuccugcggccuuuauaagcaccccggggugccggugaaguggaaaagaugaggacuagucccuguucccagagcccacuuuuuuuucuuuuuuugaaauaaaauagccugucuuucagaucuaaaaaaaaaaaaaaaaaaaaaaaaaaaaaaaaaaaaaaaaaaaaaaaaaaaaaaaaaaaaaaaaaaaaaaaaaaaaaaaaaaaaaaaaaaaaaaaaaaaa

SEQ ID NO: 26871 - RNA, 1721 nt, Artificial Sequence
  mRNA product Design a-1 (A100) comprising derived and/or modified sequence from LASV(LASV237-NIG-2010;Clade II)__AIT17638__GPCmut4 (opt5)
aggagagucccgcagucggcguccagcggcucugcuuguucgugugugugucguugcaggccuuauucaagcuuaccaugggccagaucauuaccuucuuucaagaggugccccacgucaucgaagagguuaugaacauugugcugaucgcccucagccugcuugcuauucugaaggggaucuacaauguggccacaugcggacucuucggccuggucuccuuucuucugcucugugggagaucuugcagcacgaccuauaaaggaguguacgaacugcagacacuggagcucgacauggcgucccugaacauguguaugccucuuucuugcaccaagaauaacagccaucacuauaucaugguuggcaaugaaacagggcuggagcucacccugacaaacaccuccauuaucaaucauaaauucuguaaccuuucugaugcucacaagaaagaccuguacgaucaugcccucaugagcauuaucuccacguuucaccugagcauuccgaauuucaaccaguaugaggccaugucuugcgacuuuaauggaggcaagaucuccgugcaguacaaccugagccacaccuaugcugucgaugccgcuaaucauuguggcacaauugccaacggggugcuccaaaccuucaugcggauggcguggggaggcucuuacaucgcccuggacuccgggaagggaagcugggauugcaucaugacaucuuaccaguaucuuauuauccagaauaccacgugggaagaccacugucaguuuucccgccccagcccuauuggcuaccuggggcuccugucccaaagaacacgggauaucuauauuucucgcagacggcgcggaaccuucacauggacccuuagcgacuccgagggcaacgaaacccccggcggguacugccugacaagauggaugcucaucgaggcugagcugaaauguuuuggaaacacggccguugcuaagugcaaugaaaaacaugaugaggaguucugcgacaugcugcggcucuuugauuucuguaagcaggccauccgcagacugaaaaccccugcgcagaugagcauucagcuuaucaacaaggccgugaaugcucugauuaacgaccaacucaucaugaagaaucaucugcgggacauuaugggcauccccuauugcaacuacucuaaauauuguuaccuuaaucacacagucaccgggaagacaucccugccucgcugcugucucgugagcaacggaucuuaccugaaugaaacccacuucagcgaugacaucgaacagcaggccgauaacaugauuacggagcugcuccaaaaagaguauauggacagacagggcaagacaccgcuggggcuuguggaucuguuugucuucuccaccucuuuuuaccucaucagcauuuuccugcaccugaucaaaauucccacccaucggcacaucacaggaaagccuugccccaaaccucaucgccuuaaucacaugggcauuuguuccugcggccucuauaagcaccccgggguuccggugaaguggaaaagaugaggacuagucccuguucccagagcccacuuuuuuuucuuuuuuugaaauaaaauagccugucuuucagaucuaaaaaaaaaaaaaaaaaaaaaaaaaaaaaaaaaaaaaaaaaaaaaaaaaaaaaaaaaaaaaaaaaaaaaaaaaaaaaaaaaaaaaaaaaaaaaaaaaaaa

SEQ ID NO: 26872 - RNA, 1721 nt, Artificial Sequence
  mRNA product Design a-1 (A100) comprising derived and/or modified sequence from LASV(LASV253-NIG-2011;Clade II)__AIT17670__GPCmut4 (opt5)
aggagagucccgcagucggcguccagcggcucugcuuguucgugugugugucguugcaggccuuauucaagcuuaccaugggccagaucauuaccuucuuucaagaggugccccacgucaucgaagagguuaugaacauugugcugaucgcccucagccugcuugcuauucugaaggggaucuacaauguggccacaugcggacucuucggccuggucuccuuucuucugcucugugggagaucuugcagcacgaccuauaaaggaguguacgaacugcagacacuggagcucgacauggcgucccugaacauguguaugccucuuucuugcaccaagaauaacagccaucacuauaucaugguuggcaaugaaacagggcuggagcucacccugacaaacaccuccauuaucaaucauaaauucuguaaccuuucugaugcucacaagaaaaaucuguacgaccaugcccucaugagcauuaucuccacguuucaccugagcauuccgaacuucaaucaguaugaggccaugucuugcgauuuuaacggaggcaagaucuccgugcaguacaaucugagccacaccuaugcugucgacgccgcuaaccauuguggcacaauugccaauggggugcuccaaaccuucaugcggauggcguggggaggcucuuacaucgcccuggauuccgggaagggaagcugggacugcaucaugacaucuuaccaguaucuuauuauccagaacaccacgugggaagaucacugucaguuuucccgccccagcccuauuggcuaccuggggcuccugucccaaagaacacgggacaucuauauuucucgcagacggcgcggaaccuucacauggacccuuagcgauuccgagggcaacgaaacccccggcggguacugccugacaagauggaugcucaucgaggcugagcugaaauguuuuggaaauacggccguugcuaagugcaacgaaaaacaugacgaggaguucugcgauaugcugcggcucuuugacuucuguaagcaggccauccgcagacugaaagcgccugcccagaugagcauucagcuuaucaauaaggcugugaacgcccugauuaaugaucaacucaucaugaagaaccaucugcgggacauuaugggcauccccuauugcaauuacucuaaauauuguuaccuuaaccacaccgucacagggcgcaccucccugccuagaugcugucucgugagcaauggaucuuaccugaacgaaacacacuucagcgacgauaucgaacagcaggcugacaauaugauuaccgagcugcuccaaaaggaguauaucgaucggcagggcaaaacgccgcuggggcuuguggaccuguuugucuucuccacaucuuuuuaccucauuagcaucuuccugcaccugguuaagauucccacccaucgccacaucauuggaaaaccuugccccaagccucauagacuuaaccacaugggcaucuguuccugcggccucuauaaacaccccggggugccggugaaguggaagcggugaggacuagucccuguucccagagcccacuuuuuuuucuuuuuuugaaauaaaauagccugucuuucagaucuaaaaaaaaaaaaaaaaaaaaaaaaaaaaaaaaaaaaaaaaaaaaaaaaaaaaaaaaaaaaaaaaaaaaaaaaaaaaaaaaaaaaaaaaaaaaaaaaaaaa

SEQ ID NO: 26873 - RNA, 1721 nt, Artificial Sequence
  mRNA product Design a-1 (A100) comprising derived and/or modified sequence from LASV(LASV254-NIG-2011;Clade II)__AIT17674__GPCmut4 (opt5)
aggagagucccgcagucggcguccagcggcucugcuuguucgugugugugucguugcaggccuuauucaagcuuaccaugggccagaucauuaccuucuuucaagaggugccccacgucaucgaagagguuaugaacauugugcugaucgcccucagccugcuugcuauucugaaggggaucuacaauguggccacaugcggacucuucggccuggucuccuuucuucugcucugugggagaucuugcagcacgaccuauaaaggaguguacgaacugcagacacuggagcucgacaugaccaaccugaauauguguaugccucuuuccugcacaaagaacaauucucaucacuauaucaugguuggcaacgaaaccgggcuggagcucacacugaccaauacgagcauuaucaaccauaaauucuguaaucuuuccgaugcgcacaagaaaaaccuguacaaucaugcucucaugucuauuaucagcaccuuucaccuguccauuccgaacuucaaucaguaugaggccaugagcugcgacuuuaacggaggcaagaucucugugcaguacaaucugucccacagcuaugccgucgaugcugccaaccauuguggcacaauugcuaacggggugcuccaaaccuucaugcggauggccuggggaggcucuuacaucgcgcuggacuccgggaagggaaauugggauugcaucaugacaagcuaccaguaucuuauuauccagaacaccacgugggaagaccacugucaguuuucucgccccuccccuauuggcuaccuggggcuccugagccaaagaacacgggauaucuauauuucccgcagacggcgcggaaccuucacauggacccuuucugacagcgagggcaaugaaacccccggcggguacugccugacaagauggaugcucaucgaggccgagcugaaauguuuuggaaacacggcuguugccaagugcaaugaaaaacaugaugaggaguucugcgacaugcugcggcucuuugauuucuguaagcaggcuauccgcagacugaaaaccccugcccaggcgaacauucagcuuaucaauaaggccgugaacgcucugauuaaugaccaacucaucaugaagaaccaucugcgggauauuaugggcauccccuauugcaauuacuccaaauauuguuaccuuaaccacacagucaccgggaagacaagccugccucgcugcugucucgugucuaauggauccuaccugaacgaaacccacuucagcgacgacaucgaacagcaggccgauaauaugauuacggagcugcuccaaaaagaguauauggacagacagggcaagacaccgcuggggcuuguggaucuguuugucuucucuaccagcuuuuaccucaucuccauuuuccugcaccugguuaaaauccccacccaucggcacgugauuggaaagccuugccccaaaccucaucgccuuaaccacaugggcaucuguucuugcggccucuauaagcaccccggggugccggucaaguggaaaagaugaggacuagucccuguucccagagcccacuuuuuuuucuuuuuuugaaauaaaauagccugucuuucagaucuaaaaaaaaaaaaaaaaaaaaaaaaaaaaaaaaaaaaaaaaaaaaaaaaaaaaaaaaaaaaaaaaaaaaaaaaaaaaaaaaaaaaaaaaaaaaaaaaaaaa

SEQ ID NO: 26874 - RNA, 1721 nt, Artificial Sequence
  mRNA product Design a-1 (A100) comprising derived and/or modified sequence from LASV(Nig08-A19;Clade III)__ADU56618__GPCmut4 (opt5)
aggagagucccgcagucggcguccagcggcucugcuuguucgugugugugucguugcaggccuuauucaagcuuaccaugggccagaucgugaccuucuuucaagaggucccccacguuauugaagaggugaugaacaucgugcugauugcccucagcauccuggcuauucuuaaggggcuguacaauaucgccacaugcggacucaucggccuggucacguuccuucugcucuccgggagaucuuguagcaugaccuauaaaggaguguacgaacugcagacacuggagcucaacaugaauacccugaacaugugcaugccucuuuccuguacaaagaauaacucucaucacuauauuaugguuggcaaugaaaccgggcuggagcucacacugaccaacacgagccuucugcaucacaaauuuugcaaucucuccgacgcgcauaagaaaaaccuguacgaucacacccugaugucuaucauuagcacauuccaccucuccaucccgaauuuuaaccaguaugaggcuaugagcugugacuucaauggaggcaagauuaccgugcaguacaaccugucucauuccuaugccaucgaugccgcuaaucacugcggcacagucgccaacggggugcuucaaaccuuuaugcggauggcuuggggaggcagcuacauugcccuggacucugggcgcggaaagugggauuguaucaugacguccuaccaguaucucaucauucagaacacaaccugggaagaccauugccaguucagcagacccucuccuaucggcuaccuggggcuucugucccaacggacacgcgauauuuauaucagcagacggcgcagaggaaccuuuaccuggacacucuccgacucugagggcaaugaaacgcccggcggguacugucugacccgguggaugcugauugaggcggagcucaaaugcuucggaaacacagccguugcuaaguguaaugaaaaacacgaugaggaauuuugcgacaugcugcgccuuuucgauuuuugcaagcaggccaucagacggcugaaagcuccugcccagaugagcauccagcucauuaacaaggcggugaaugcccugaucaacgaccaacuuauuaugaagaaucaucugcgcgauaucaugggcauucccuauuguaacuacuccaaauauugcuaccucaaucacaccagcacagggagaaccucucugccucgguguugccuggucuccaacggaagcuaccucaaugagacgcacuucucugacgacaucgaacagcaggcugauaacaugaucacagagaugcugcaaaaggaguaucuugaccgccagggcaaaaccccgcuggggcucguggaucuguucguguuuagcaccuccuucuaccugauuucuaucuuucuucaucucgucaagauucccacacacagacauaucguuggaaaaccuugucccaagccucaccggcugaaucacaugggcauuugcagcuguggccuguauaaacagcccggggugccggugagauggaagcgcugaggacuagucccuguucccagagcccacuuuuuuuucuuuuuuugaaauaaaauagccugucuuucagaucuaaaaaaaaaaaaaaaaaaaaaaaaaaaaaaaaaaaaaaaaaaaaaaaaaaaaaaaaaaaaaaaaaaaaaaaaaaaaaaaaaaaaaaaaaaaaaaaaaaaa

SEQ ID NO: 26875 - RNA, 1724 nt, Artificial Sequence
  mRNA product Design a-1 (A100) comprising derived and/or modified sequence from LASV(G1180-SLE-2010;Clade IV)__AIT17168__GPCmut4 (opt5)
aggagagucccgcagucggcguccagcggcucugcuuguucgugugugugucguugcaggccuuauucaagcuuaccaugggccagaucgugaccuucuuucaagaggucccccacguuauugaagaggugaugaacaucgugcugauugcccucagcauccuggcuguccuuaaggggcuguacaauuucgccacaugcggacucgugggccugcuuacguuucugcuccugugugggagauccugcaccgcgucucgguauaaaggaguuuacgaacugcagacacucgagcugaacauggaaacccuuaauauguguaugccucugagcugcacaaagaacaauucccaucacuauauuauggugggcaacgagaccgggcucgagcugacacuuaccaauacgucuaucaucaaccauaaauucuguaaucugagcgacgcucacaagaaaaaccucuacgaucaugcccugauguccauuaucucuaccuuucaccugagcauuccgaauuucaaccaguaugaagccauguccugcgacuuuaauggaggcaagaucagcguccaguacaaccucucucacuccuaugcuggcgaugccgcuaaucauugugggacaguggccaacggaguucugcaaaccuucaugcgcauggcguggggcgggagcuacauugcccuugacucuggacacggcuccugggauugcaucaugacaagcuaccaguaucugauuauccagaacaccacgugggaggaccauugucaguuuucuagacccuccccuaucggguaccucggacugcuuagccaacggacacgcgauauuuauaucuccagacggcgcagaggcaccuucacauggacccugucugacagcgaaggcaaggauacccccgggggauacugccucacacgguggaugcugauugaggcugagcugaaauguuuuggcaauacggccguggcuaagugcaacgaaaaacacgacgaggaguucugcgauaugcuccgccuguuugacuucuguaagcaggccauccagagacuuaaagcgccugcccagauguccauucaacugaucaauaaggcugucaacgcccucaucaaugaucagcugauuaugaagaaccaccuucgggacaucauggggauucccuauugcaauuacagcaaauauuguuaccugaaccauaccacaaccggaaagacaucucucccuaaaugcugucugguguccaauggcagcuaccugaacgaaacccacuucucugacgauaucgaacagcaagcugacaauaugauuacggagaugcuccagaaggaguauauggaacgccaggggaaaacaccgcugggacuuguggaucuguuugucuucagcaccuccuuuuaccucaucucuaucuuccugcaucugguuaagauucccacccacagacauaucgugggcaaaagcugcccuaagccccaccggcuuaaccacaugggcauuuguuccugcgggcucuauaagcagccuggagugcccgucaaauggaagcgcugaggacuagucccuguucccagagcccacuuuuuuuucuuuuuuugaaauaaaauagccugucuuucagaucuaaaaaaaaaaaaaaaaaaaaaaaaaaaaaaaaaaaaaaaaaaaaaaaaaaaaaaaaaaaaaaaaaaaaaaaaaaaaaaaaaaaaaaaaaaaaaaaaaaaa

SEQ ID NO: 26876 - RNA, 1724 nt, Artificial Sequence
  mRNA product Design a-1 (A100) comprising derived and/or modified sequence from LASV(G1442-SLE-2011;Clade IV)__AIT17180__GPCmut4 (opt5)
aggagagucccgcagucggcguccagcggcucugcuuguucgugugugugucguugcaggccuuauucaagcuuaccaugggccagaucgugaccuucuuucaagaggucccccacguuauugaagaggugaugaacaucgugcugauugcccucagcauccuggcuguccuuaaggggcuguacaauguggccacaugcggacucauuggccugguuacguuccuucugcucugugggagauccugcaccacaacccuguauaaaggaguguacgaacugcagacacucgagcugaacauggaaacccuuaauauguguaugccucugucuugcacaaagaacaauagccaucacuauauccgggucggcaacgagaccgggcucgagcugacgcuuaccaauacauccaucauuaaccauaaauuuuguaaucugucugacgcgcacaagaaaaaccucuacgaucaugcucugaugagcaucauuuccaccuuccaccugucuaucccgaauuuuaaccaguaugaagccaugagcugcgacuucaauggaggcaagauuuccgugcaguacaaccucagccacucuuaugccggcgaugcugccaaucauugugggacaguugcuaacggagugcugcaaaccuuuaugcgcauggccuggggcggguccuacaucgcgcuugacagcggaagaggcaacugggauugcauuaugacgucuuaccaguaucugaucauccagaauacaaccugggacgaucacugucaguucucccggcccagcccuauuggguaccucggacugcuuucucaacgcacaagagacgucuauaucucccggcgcagacggggcaccuuuaccuggacacugagcgauuccgagggcaaggacacgcccgggggauacugccucacccgcuggaugcugauugaagccgagcugaaauguuucggcaacacagcuguggccaagugcaaugagaaacaugaugaagaguuuugcgacaugcucagacuguucgauuuuuguaagcaggcuauccagcggcuuaaagccccugcgcagaugucuauucaacugaucaacaaggccgugaaugcucucaucaacgaccagcugauuaugaagaaucaccuucgcgacaucauggggauucccuauugcaacuacagcaaauauuguuaccugaauaacaccgccacaggaaagaccucccucccuaaaugcugucugaucagcaauggcucuuaccugaacgaaacgcacuucuccgaugacauugagcaggaagcugauaauaugaucacagagaugcuccaaaaggaguauauggaaagacaggggaaaaccccgcugggacuugucgaccuguucguuuuuagcaccucuuucuaccucaucagcauuuuucugcaucuggugaagauccccacacaccggcauauugugggcaaauccugcccuaagccccaccgccuuaaccauaugggcaucuguucuugcgggcucuauaagcagccuggaguccccgugagauggaaacggugaggacuagucccuguucccagagcccacuuuuuuuucuuuuuuugaaauaaaauagccugucuuucagaucuaaaaaaaaaaaaaaaaaaaaaaaaaaaaaaaaaaaaaaaaaaaaaaaaaaaaaaaaaaaaaaaaaaaaaaaaaaaaaaaaaaaaaaaaaaaaaaaaaaaa

SEQ ID NO: 26877 - RNA, 1724 nt, Artificial Sequence
  mRNA product Design a-1 (A100) comprising derived and/or modified sequence from LASV(G3010-SLE-2013;Clade IV)__AIT17344__GPCmut4 (opt5)
aggagagucccgcagucggcguccagcggcucugcuuguucgugugugugucguugcaggccuuauucaagcuuaccaugggccagaucgugaccuucuuucaagaggucccccacguuauugaagaggugaugaacaucgugcugauugcccucagcauccuggcuguccuuaaggggcuguacaauuucgccacaugcggacucgugggccugguuacguuucuucugcucugugggagauccugcaccacaucucuguauaaaggaguguacgaacugcagacccucgagcugaacauggaaacacuuaauauguguaugccucugagcugcaccaagaacaauucccaucacuauauuauggucggcaacgagacagggcucgagcugacccuuacgaauaccucuaucaucaaccauaaauucuguaaucugagcgacgcgcacaagaaaaaccucuacaaucaugcucugauguccauuaucucuacauuucaccugagcauuccgaacuucaaucaguaugaagccauguccugcgauuuuaacggaggcaagaucagcgugcaguacaaucucucucacuccuaugccggcgacgcugccagccauugugggaccguugcuaacggagugcugcaaacauucaugcggauggccuggggcgggucuuacauugcgcuugauuccggauacggcaagugggacugcaucaugaccagcuaucaguaccugauuauccagaacacgacaugggaggaucacugucaguuuucucgccccuccccuaucggguaucucggacugcuuagccaaagaacccgggacauuuacaucucccgcagacggcgcggcacauucaccuggacccugucugauagcgaaggcaaagacacacccgggggauauugccucacgagauggaugcugauugaggccgagcugaaguguuuuggcaauaccgcugucgccaaaugcaacgaaaagcaugaugaggaguucugcgacaugcuccggcuguuugauuucuguaaacaggcuauccagcgccuuaagaccccugcccagauguccauucaacugaucaauaaggcggugaacgcccucaucaaugaccagcugauuaugaaaaaccaccuuagagauaucauggggauucccuacugcaauuauagcaaguacuguuaccugaaccacacaacaaccggaaaaacgucucucccuaagugcugucugguguccaauggcagcuaucugaacgaaacacauuucucugacgacaucgaacagcaagcugauaauaugauuaccgagaugcuccagaaagaguacauggaacggcaggggaagaccccgcugggacuugucgaccuguuuguuuucagcacauccuuuuaucucaucucuaucuuccugcaccuggugaaaauucccacccaucgccacaucgugggcaagagcugcccuaagccccauagacuuaaccacaugggcauuuguuccugcgggcucuacaaacagccuggaguccccgugcgguggaagcgcugaggacuagucccuguucccagagcccacuuuuuuuucuuuuuuugaaauaaaauagccugucuuucagaucuaaaaaaaaaaaaaaaaaaaaaaaaaaaaaaaaaaaaaaaaaaaaaaaaaaaaaaaaaaaaaaaaaaaaaaaaaaaaaaaaaaaaaaaaaaaaaaaaaaaa

SEQ ID NO: 26878 - RNA, 1724 nt, Artificial Sequence
  mRNA product Design a-1 (A100) comprising derived and/or modified sequence from LASV(G502-SLE-2009;Clade IV)__AIT17126__GPCmut4 (opt5)
aggagagucccgcagucggcguccagcggcucugcuuguucgugugugugucguugcaggccuuauucaagcuuaccaugggccagaucgugaccuucuuucaagaggucccccacguuauugaagaggugaugaacaucgugcugauugcccucagcauccuggcuguccuuaaggggcuguacaauuucgccacaugcggacucgugggccugcuuacguuucugcuccugugugggagauccugcaccacaggacuguauaaaggcguuuacgaacuccagacccuggagcuuaacauggaaacacugaauauguguaugccucucucuugcaccaagaacaauagccaucacuauauuaugguggggaacgagacaggacuggagcuuacccugacgaauaccuccaucaucaaccauaaauucuguaaucucucugacgcgcacaagaaaaaccuguacgaucaugcucugaugagcauuaucuccacauuucaccucucuauuccgaauuucaaccaguaugaagccaugagcugcgacuuuaauggcggcaagaucuccguccaguacaaccugagccacucuuaugccggggaugcugccgaccauuguggaaccguggcuaauggcguucuucaaacauucaugcggauggccuggggaggguccuacauugcgcuggauagcggccgcgggagaugggacugcaucaugaccucuuaccaguaucucauuauccagaacacgacaugggaggaucacugucaguuuucccggcccagcccuaucggauaccugggccuucugucucaacgcaccagagacauuuauaucucccggcgcagacggggcacauucaccuggacccucagcgauuccgaagggaaggacacacccggaggcuacugccugacgcgcuggaugcugauugaggccgagcucaaauguuuugggaacaccgcuguggccaagugcaaugaaaaacaugaugaggaguucugcgacaugcugagacuuuuugauuucuguaagcaggcuauccagcggcugaaagccccugcgcagaugucuauucaacucaucaacaaggccgucaaugcucugaucaacgaccagcuugugaugaagaaucaucugcgcgacauuaugggaauccccuauugcaacuacagcagauauuguuaccucaaucacacaaccacaggccggaccucccugccuaaaugcugucuggugagcaacgggucuuaccucaaugaaacgcacuucuccgaugacauugaacagcaagccgauaacaugaucacagagaugcugcagaaggaguauauggaacgccagggaaaaaccccgcuuggccuggucgaccucuuuguuuucagcaccucuuuuuaccugauuagcaucuuccugcaccuugugaagauccccacacauagacacauugugggcaaauccugcccuaagccccaucggcucaaucacauggggaucuguucuugcggacuguauaaacagccuggcguccccgugaaguggaagagaugaggacuagucccuguucccagagcccacuuuuuuuucuuuuuuugaaauaaaauagccugucuuucagaucuaaaaaaaaaaaaaaaaaaaaaaaaaaaaaaaaaaaaaaaaaaaaaaaaaaaaaaaaaaaaaaaaaaaaaaaaaaaaaaaaaaaaaaaaaaaaaaaaaaaa

SEQ ID NO: 26879 - RNA, 1724 nt, Artificial Sequence
  mRNA product Design a-1 (A100) comprising derived and/or modified sequence from LASV(G733-SLE-2010;Clade IV)__AIT17154__GPCmut4 (opt5)
aggagagucccgcagucggcguccagcggcucugcuuguucgugugugugucguugcaggccuuauucaagcuuaccaugggccagaucgugaccuucuuucaagaggucccccacguuauugaagaggugaugaacaucgugcugauugcccucagcauccuggcuguccuuaaggggcuguacaauuucgccacaugcggaauugugggccucguuuccuuucugcuucugugugggagaucuugcacgaccagccucuauaaaggaguguacgaacugcagacacuggagcucaacauggaaacccugaauauguguaugccucuuuccugcacaaagaacaauucucaucacuauaucauggucggcaacgagaccgggcuggagcucacacugaccaauacgagcaucauuaaccauaaauucuguaaucuuuccgacgcgcacaagaaaaaccuguacgaucaugcucucaugucuaucauuagcaccuuucaccuguccaucccgaauuucaaccaguaugaagccaugagcugcgacuuuaauggaggcaagauuucugugcaguacaaccugucccacagcuaugccggcgaugcugccaaucauugugggacaaucgcuaacggaguucuccaaaccuucaugcggauggccuggggcgggucuuacauugcgcuggacuccggacgcgauagaugggacugcaucaugacaagcuaccaguaucuuaucauucagaacaccacgugggaggaucacugucaguuuucucggcccuccccuaucggcuaccuggggcuccugagccaacgcacaagagacauuuauaucucccggcgcagacggggaaccuucacauggacccuuucugauagcgaaggcaaggacacccccggcggguacugccugacacgcuggaugcucauugaggccgagcugaaauguuuuggaaauacggcuguggccaagugcaacgaaaaacaugaugaggaguucugcgacaugcugagacucuuugauuucuguaagcaggcuauccagcggcugaaagccccugcgcagauguccauccaacuuauuaauaaggccgucaacgcucugaucaaugaccagcucauuaugaagaaccaucugcgcgacaucaugggcauucccuauugcaauuacagcaaauauuguuaccuuaaccacaccacaaccgggaagacaucucugccuaaaugcugucucguguccaauggaagcuaccugaacgaaacccacuucucugaugacaucgaacagcaagccgauaauaugaucacggagaugcugcagaaggaguauauggaaagacagggcaaaacaccgcucgggcugguggaccuuuuugucuucagcaccuccuuuuaccugauuucuaucuuccuccaccugguuaagauucccacccaucggcacguggugggaaaaagcugcccuaagccccaucgccugaaccacaugggcaucuguuccugcggccuuuaugggcagccuggaguccccgugaaguggaaaagaugaggacuagucccuguucccagagcccacuuuuuuuucuuuuuuugaaauaaaauagccugucuuucagaucuaaaaaaaaaaaaaaaaaaaaaaaaaaaaaaaaaaaaaaaaaaaaaaaaaaaaaaaaaaaaaaaaaaaaaaaaaaaaaaaaaaaaaaaaaaaaaaaaaaaa

SEQ ID NO: 26880 - RNA, 1724 nt, Artificial Sequence
  mRNA product Design a-1 (A100) comprising derived and/or modified sequence from MOPV/LASV reassortant(IGS-1;Clade IV)__AFY05576__GPCmut4 (opt5)
aggagagucccgcagucggcguccagcggcucugcuuguucgugugugugucguugcaggccuuauucaagcuuaccaugggccagaucgugaccuucuuucaagaggucccccacguuauugaagaggugaugaacaucgugcugauugcccucagcguccuggcugugcuuaaggggcuguacaauuucgccacaugcggacucguuggccuggugacguuucuucugcucugugggagauccugcaccacaucucuguauaaaggagucuacgaacugcagacccucgagcugaacauggaaacacuuaauauguguaugccucugagcugcaccaagaacaauucccaucacuauaucauggugggcaacgagacagggcucgagcugacccuuacgaauaccucuauuaucaaccauaaauucuguaaucugagcgacgcgcacaagaaaaaccucuacgaucaugcucugauguccaucauuucuacauuucaccugagcaucccgaauuucaaccaguaugaagccauguccugcgacuuuaauggaggcaagauuagcguucaguacaaccucucucacuccuaugccggcgaugcugccaaucauugugggaccguggcuaacggaguccugcaaacauucaugcggauggccuggggcgggagcuacaucgcgcuugacucuggacgcggcaacugggauugcauuaugaccuccuaccaguaucugaucauucagaauacgacaugggaggaccacugucaguuuagcagacccucuccuaucggguaccucggacugcuuucccaacggacccgcgauaucuauauuagcagacggcgcagaggcacauucaccuggacccuguccgacucugaaggcgaggauacacccgggggauacugccucacgcgguggaugcugaucgaggccgaacugaaguguuuuggcaacaccgcuguggccaaaugcaaugagaagcaugacgaagaguucugcgauaugcuccgccuguuugacuucuguaaacaggcuauucagagacuuaaggccccugcgcagaugagcauccaacugauuaacaaagccgugaaugcucucaucaacgaucagcugaucaugaagaaucaccuucgggacauuauggggauccccuauugcaacuacuccaaguauuguuaccugaaucacacaaccacaggacgcaccagccucccuaaaugcugucuggucucuaacggcuccuaccugaaugaaacgcauuucagcgacgauauugagcagcaagccgacaacaugaucacagagaugcuccagaaggaauauauggagagacaggggaaaaccccgcugggacuuguugaucuguuuguguucucuaccagcuuuuaccucauuuccaucuuccugcaccuggugaagauccccacacaucggcacauugucggcaaaucuugcccuaagccccaucgccuuaaucacaugggcaucuguagcugcgggcucuauaaacagccuggagugcccguuaaguggaagagaugaggacuagucccuguucccagagcccacuuuuuuuucuuuuuuugaaauaaaauagccugucuuucagaucuaaaaaaaaaaaaaaaaaaaaaaaaaaaaaaaaaaaaaaaaaaaaaaaaaaaaaaaaaaaaaaaaaaaaaaaaaaaaaaaaaaaaaaaaaaaaaaaaaaaa

SEQ ID NO: 26881 - RNA, 1724 nt, Artificial Sequence
  mRNA product Design a-1 (A100) comprising derived and/or modified sequence from LASV(LM765-SLE-2012;Clade IV)__AIT17814__GPCmut4 (opt5)
aggagagucccgcagucggcguccagcggcucugcuuguucgugugugugucguugcaggccuuauucaagcuuaccaugggccagaucgugaccuucuuucaagaggucccccacguuauugaagaggugaugaacaucgugcugauugcccucagcauccuggcuguccuuaaggggcuguacaauuucgccacaugcggacucgugggccugguuacguuucuucugcucugugggagauccugcaccacaucucuguauaaaggaguguacgaacugcagacccucgagcugaacauggaaacacuuaauauguguaugccucugagcugcaccaagaacaauucccaucacuauauuauggucggcaacgagacagggcucgagcugacccuuacgaauaccucuaucaucgaccauaaauucuguaaccugagcgaugcgcaccggaagaaucucuacgaccaugcucugauguccauuaucucuacauuucaccugagcauuccgaacuucaaucaguaugaagccauguccugcgauuuuaacggaggcaaaaucagcgugcaguacaaucucucucacuccuaugccaaggacgcugccgaucauuguggcaccguugcuaacggggugcugcaaacauucaugcgcauggccuggggaggcagcuacauugcgcuugacucugggagaggacggugggauugcaucaugaccuccuaccaguaucugauuauccagaauacgacaugggaggaccacugucaguuuagccgccccucuccuaucggcuaccucgggcugcuuucccaaagaacccgggauauuuauaucagccgcagacggcgcggaacauucaccuggacccuguccgacucugaaggcaaggauacacccggcggguacugccucacgagauggaugcugauugaggccgagcugaaauguuuuggaaacaccgcugucgccaagugcaacgaaaaacaugacgaggaguucugcgauaugcuccggcuguuugacuucuguaagcaggcuauccagcgccuuaaagccccugcgcagaugagcauucaacugaucaauaaggccgugaacgcucucaucaaugaccagcugauuaugaagaaccaccuuagagauaucaugggcauucccuauugcaauuacuccaaauauuguuaccugaaccacacaaccacagggaagaccagccucccuaaaugcugucuggugucuaauggauccuaccugaacgaaacgcauuucagcgacgauaucgaacagcaagccgacaauaugauuacagagaugcuccagaaggaguauauggaacggcagggcaaaaccccgcuggggcuugucgaucuguuuguuuucucuaccagcuuuuaccucaucuccaucuuccugcaccuggugaagauucccacacaucgccacaucgugggaaaaccuugccccaagccucauagacuuaaccacaugggcauuuguucuugcggccucuauaagcagcccggggucccggugaaauggaagcggugaggacuagucccuguucccagagcccacuuuuuuuucuuuuuuugaaauaaaauagccugucuuucagaucuaaaaaaaaaaaaaaaaaaaaaaaaaaaaaaaaaaaaaaaaaaaaaaaaaaaaaaaaaaaaaaaaaaaaaaaaaaaaaaaaaaaaaaaaaaaaaaaaaaaa

SEQ ID NO: 26882 - RNA, 1724 nt, Artificial Sequence
  mRNA product Design a-1 (A100) comprising derived and/or modified sequence from LASV(LM776-SLE-2012;Clade IV)__AIT17824__GPCmut4 (opt5)
aggagagucccgcagucggcguccagcggcucugcuuguucgugugugugucguugcaggccuuauucaagcuuaccaugggccagaucgugaccuucuuucaagaggucccccacguuauugaagaggugaugaacaucgugcugauugcccucagcauccuggcuguccuuaaggggcuguacaauuucgccacaugcggacucgugggccugguuacguuucuucugcucugugggagauccugcaccacaucuguguauaaaggagucuacgaacugcagacccuggagcucaacauggaaacacugaauauguguaugccucuuagcugcaccaagaacaauucccaucacuauauuauggugggcaacgagacagggcuggagcucacccugacgaauaccucuaucaucaaccauaaauucuguaaucuuagcgacgcgcacaagaaaaaccuguacgaucaugcucucauguccauuaucucuacauuucaccugagcauuccgaauuucaaccaguaugaagccauguccugcgacuuuaauggaggcaagaucagcguucaguacaaccugucucacuccuaugccggcgaugcugccaaucauugugggaccguggcuaacggaguccuccaaacauucaugcggauggccuggggcgggagcuacauugcgcuggacucuggacacggcaagugggauugcaucaugaccuccuaccaguaucuuauuauccagaacacgacaugggaggaccauugucaguuuagccgccccucuccuaucggguaccugggacuccugucccaaagaacccgggauauuuauaucagccgcagacggcgcggcacauucaccuggacccuuuccgacucugaaggcaaagauacacccgggggauacugccugacgagauggaugcucauugaggccgagcugaaguguuuuggcaauaccgcuguggccaaaugcaacgaaaagcacgacgaggaguucugcgauaugcugcggcucuuugacuucuguaaacaggcuauccagcgccugaaggccccugcgcagaugagcauucaacuuaucaauaaggccgugaacgcucugaucaaugaucagcucauuaugaaaaaccaccugagagacaucauggggauucccuauugcaauuacuccaaguauuguuaccuuaaccauacaaccacaggaaaaaccagccugccuaagugcugucucgucucuaauggcuccuaccugaacgaaacgcacuucagcgacgauaucgaacagcaagccgacaauaugauuacagagaugcugcagaaagaguauauggaacggcaggggaagaccccgcucggacugguugaucuuuuuguguucucuaccagcuuuuaccugaucuccaucuuccuccaucuggugaaaauucccacacaccgccauaucgucggcaagucuugcccuaagccccacagacugaaccacaugggcauuuguagcugcgggcuuuauaaacagccuggagugcccguucgguggaagcgcugaggacuagucccuguucccagagcccacuuuuuuuucuuuuuuugaaauaaaauagccugucuuucagaucuaaaaaaaaaaaaaaaaaaaaaaaaaaaaaaaaaaaaaaaaaaaaaaaaaaaaaaaaaaaaaaaaaaaaaaaaaaaaaaaaaaaaaaaaaaaaaaaaaaaa

SEQ ID NO: 26883 - RNA, 1724 nt, Artificial Sequence
  mRNA product Design a-1 (A100) comprising derived and/or modified sequence from LASV(Mad39;Clade IV)__ANH09722__GPCmut4 (opt5)
aggagagucccgcagucggcguccagcggcucugcuuguucgugugugugucguugcaggccuuauucaagcuuaccaugggccagaucgugaccuucuuucaagaggucccccacguuauugaagaggugaugaacaucgugcugauugcccucagcauccuggcuguccuuaaggggcuguacaauguggccacaugcggacucauuggccugguuacguuccuucugcucugugggagauccugcaccacaacccuguauaaaggaguguacgaacugcaggcgcucgagcugaacauggaaacacuuaauauguguaugccucugucuugcaccaagaacaauagccaucacuauauccgggucggcaacgagacagggcucgagcugacccuuacgaauaccucccugaucaaccauaaauuuuguaaucucucugacgcucacaagaaaaaccuguacgaucaugcccugaugagcauuaucuccacauuccaccucucuauuccgaauuuuaaccaguaugaagccaugagcugcgacuucaaugauggaaagaucuccgugcaguacaaccugagccacaccuaugcuggcgacacagccaaucauuguggcaccguugcuaacggggugcuucaaacguuuaugcgcauggccuggggaggcucuuacauugcgcuggauuccgggagaggaggcugggacugcaucaugacaagcuaccaguaucucauuauccagaacaccacaugggaggaucacugucaguucucucggcccuccccuaucggguaccugggacuucugagccaacgcaccagagacauuuauaucucucggcgcagacggggcaccuuuacauggacgcucuccgauagcgaaggcaaggacacccccgggggauacugccugacacgcuggaugcugauugaggccgagcucaaauguuucggcaauaccgcugucgccaagugcaacgaaaaacaugaugaggaauuuugcgacaugcugagacuuuucgauuuuuguaagcaggcuauccagcggcugaaagccccugcgcagauguccauucaacucaucaauaaggccgugaacgcucugaucaaugaccagcuuauuaugaagaaccaucugcgcgacaucauggggauucccuauugcaauuacucuaaauauuguuaccucaaccacacagugaccggaaagacgagccugccuaaaugcugucuggucuccaauggcagcuaccucaacgagacacacuucucugaugacaucgaacagcaagccgauaauaugauuaccgagaugcugcagaaggaguauauggaaagacaggggaaaaccccgcuuggacugguugaccucuucguguuuuccaccagcuucuaccugaucucuaucuuucugcaccuugugaagauucccacacaucggcacgucgugggcaaaccuugccccaagccucaucgccucaaccacaugggcaucuguagcugcggguucuauaagcagcccggaguuccggugagauggaaacggugaggacuagucccuguucccagagcccacuuuuuuuucuuuuuuugaaauaaaauagccugucuuucagaucuaaaaaaaaaaaaaaaaaaaaaaaaaaaaaaaaaaaaaaaaaaaaaaaaaaaaaaaaaaaaaaaaaaaaaaaaaaaaaaaaaaaaaaaaaaaaaaaaaaaa

SEQ ID NO: 26884 - RNA, 1724 nt, Artificial Sequence
  mRNA product Design a-1 (A100) comprising derived and/or modified sequence from LASV(Z0947-SLE-2011;Clade IV)__AIT17840__GPCmut4 (opt5)
aggagagucccgcagucggcguccagcggcucugcuuguucgugugugugucguugcaggccuuauucaagcuuaccaugggccagaucgugaccuucuuucaagaggucccccacguuauugaagaggugaugaacaucgugcugauugcccucagcauccuggcuguccuuaaggggcuguacaauuucgccacaugcggacucgugggccugguuacguuucuucugcucugugggagauccugcaccauuucucuguauaaaggaguguacgaacugcagacacucgagcugaacauggaaacccuuaauauguguaugccucugagcugcacaaagaacaauucccaucacuauaucauggucggcaacgagaccgggcucgagcugacacuuaccaauacgucuaucauuaaccauaaauucuguaaucugagcgacgcgcacaagaaaaaccucuacgaucaugcucugauguccaucauuucuaccuuucaccugagcaucccgaauuucaaccaguaugaagccauguccugcgacuuuaauggaggcaagauuagcgugcaguacaaccucucucacuccuaugccggcgaugcugccaaucauugugggacaguugcuaacggagugcugcaaaccuucaugcggauggccuggggcgggagcuacaucgcgcuugacucuggacgcgauagaugggacugcauuaugacauccuaccaguaucugaucauccagaacaccacgugggaggaucacugucaguuuagccggcccucuccuauuggcuaccucgggcugcuuucccaacgcacaagagacaucuauauuagccggcgcagacggggaaccuucacauggacccuguccgauucugaaggcaaggacacccccggcggguacugccucacacgcuggaugcugaucgaggccgagcugaaauguuuuggaaauacggcugucgccaagugcaacgaaaaacaugaugaggaguucugcgacaugcucagacuguuugauuucuguaagcaggcuauucagcggcuuaaagccccugcgcagaugagcauccaacugaucaauaaggccgugaacgcucucauuaaugaccagcugaucaugaagaaccaccuucgcgacauuaugggcauccccuauugcaauuacuccaaauauuguuaccugaaccacaccacaaccgggaagacaagccucccuaaaugcugucuggugucuaauggauccuaccugaacgaaacccauuucagcgaugacauugaacagcaagccgauaauaugaucacggagaugcuccagaaggaguauauggaaagacagggcaaaacaccgcuggggcuugucgaccuguuuguuuucucuaccagcuuuuaccucaucuccauuuuccugcaccuggugaagauccccacccaucggcacauugugggaaaaccuugccccaagccucaucgccuuaaccacaugggcaucuguucuugcggccucuauaagcagcccggggucccggugaaauggaagagaugaggacuagucccuguucccagagcccacuuuuuuuucuuuuuuugaaauaaaauagccugucuuucagaucuaaaaaaaaaaaaaaaaaaaaaaaaaaaaaaaaaaaaaaaaaaaaaaaaaaaaaaaaaaaaaaaaaaaaaaaaaaaaaaaaaaaaaaaaaaaaaaaaaaaa

SEQ ID NO: 26885 - RNA, 1736 nt, Artificial Sequence
  mRNA product Design a-2 (hSL-A64-N5) comprising derived and/or modified sequence from LASV(Josiah;Clade IV)__NP_694870__GPCmut4 (opt1)
aggagaguccgcucagccagguugcagaagcggcuuagcguguguccuaaucuucucucugcguguagguaggccugugccgcaaacaagcuuaccaugggccagaucgugaccuucuuccaggaggucccccacgugaucgaggaggugaugaacaucguccugaucgcccucagcgugcuggccgugcugaaggggcucuacaacuucgcgaccugcggccuggucgggcuggugacguuccuccugcugugcggccgcuccugcaccaccagccucuacaaggggguguacgagcugcagacccuggagcucaacauggagacgcugaacaugugcaugccgcuguccugcaccaagaacaacagccaccacuacaucauggucggcaacgagaccggccucgagcugacgcugaccaacaccuccaucaucaaccacaaguucugcaaccucagcgacgcccacaagaagaaccuguacgaccacgcccugauguccaucaucagcaccuuccaccucuccauccccaacuucaaccaguacgaggccaugagcugcgacuucaacgggggcaagaucuccgugcaguacaaccugagccacuccuacgccggggacgcggccaaccacugcggcacgguggccaacgggguccugcagaccuucaugcggauggccuggggcggcagcuacaucgcgcucgacuccgggcgcggcaacugggacugcaucaugaccagcuaccaguaccugaucauccagaacaccacgugggaggaccacugccaguucucccggcccagccccaucggguaccugggccuccugucccagcgcacccgggacaucuacaucagccgccggcgccggggcaccuucaccuggacgcugagcgacuccgaggggaaggacaccccgggcggguacugccugacccgcuggaugcucaucgaggccgagcugaagugcuucggcaacaccgccguggccaagugcaacgagaagcacgacgaggaguucugcgacaugcugcggcuguucgacuucugcaagcaggccauccagcgccugaaggcgcccgcccagaugagcauccagcugaucaacaaggccgugaacgcccucaucaacgaccagcugaucaugaagaaccaccuccgggacaucauggggauccccuacugcaacuacuccaaguacugcuaccucaaccacacgaccaccggccgcaccagccugcccaagugcugccuggucuccaacggcagcuaccucaacgagacgcacuucuccgacgacaucgagcagcaggccgacaacaugaucaccgagaugcugcagaaggaguacauggagcggcaggggaagacgccccugggccucguggaccuguucguguucagcaccuccuucuaccugaucagcaucuuccugcaccucgucaagaucccgacccaccgccacaucguggggaaguccugccccaagccccaccggcugaaccacaugggcaucugcagcugcgggcuguacaagcagcccggcgugccggucaaguggaagcgcugaggacuagucccuguucccagagcccacuuuuuuuucuuuuuuugaaauaaaauagccugucuuucagaucucaaaggcucuuuucagagccaccaaaaaaaaaaaaaaaaaaaaaaaaaaaaaaaaaaaaaaaaaaaaaaaaaaaaaaaaaaaaaaaaagaauu

SEQ ID NO: 26886 - RNA, 1733 nt, Artificial Sequence
  mRNA product Design a-2 (hSL-A64-N5) comprising derived and/or modified sequence from LASV(LP;Clade I)__AAF86701__GPCmut4 (opt1)
aggagaguccgcucagccagguugcagaagcggcuuagcguguguccuaaucuucucucugcguguagguaggccugugccgcaaacaagcuuaccaugggccagaucaucaccuucuuccaggaggugccccacgucaucgaggaggugaugaacaucgugcugaucgcccucagccugcuggccauccucaaggggcuguacaacaucgcgaccugcggcaucaucgggcuggucgccuuccucuuccugugcggcaaguccugcagccugacgcucaagggcggguacgagcugcagacccuggagcucaacauggagacccugaacaugugcaugccgcuguccugcacgaagaacagcucccaccacuacauccgcgugggcaacgagaccgggcucgagcugacccugaccaacacgagcaucaucaaccacaaguucugcaaccucuccgacgcccacaagaagaaccuguacgaccacgcccugaugagcaucaucuccaccuuccaccucagcauccccaacuucaaccaguacgaggccauguccugcgacuucaacggcgggaagaucagcgugcaguacaaccugucccacagcuacgcgggcgacgccgccgagcacugcgggaccgucgccaacggcgugcugcagaccuucaugcggauggcguggggcgggcgcuacaucgcccucgacuccggcaaggggaacugggacugcaucaugacgagcuaccaguaccugaucauccagaacaccaccugggaggaccacugccaguucucccggcccagccccaucggcuaccugggccuccugucccagcgcacccgggacaucuacaucagccgccggcgccgggggacguucaccuggacccugagcgacuccgagggcaacgagacccccgggggcuacugccugacgcgcuggaugcucaucgaggccgagcugaagugcuucgggaacaccgccguggccaagugcaacgagaagcacgacgaggaguucugcgacaugcugcggcuguucgacuucugcaagcaggcgauccgccggcugaaggcccccgcccagaugagcauccagcugaucaacaaggccgucaacgcccucaucaacgaccagcugaucaugaagaaccaccuccgcgacaucaugggcauccccuacugcaacuacuccaaguacugcuaccucaaccacaccagcuccggccggaccagccugcccaagugcugccugaucuccaacgggagcuaccucaacgagacgcaguucuccgacgacaucgagcagcaggcggacaacaugaucaccgagaugcugcagaaggaguacaucgagcgccagggcaagaccccgcuggggcucguggacaucuucaucuucagcaccuccuucuaccugaucagcaucuuccugcaccugaucaagaucccgacgcaccggcacaucgugggcaagcccugccccaagccccaccgccucaaccacaugggggucugcuccugcggccuguacaagcacccgggcgugcccaccaaguggaagcggugaggacuagucccuguucccagagcccacuuuuuuuucuuuuuuugaaauaaaauagccugucuuucagaucucaaaggcucuuuucagagccaccaaaaaaaaaaaaaaaaaaaaaaaaaaaaaaaaaaaaaaaaaaaaaaaaaaaaaaaaaaaaaaaaagaauu

SEQ ID NO: 26887 - RNA, 1733 nt, Artificial Sequence
  mRNA product Design a-2 (hSL-A64-N5) comprising derived and/or modified sequence from LASV(803213;Clade II)__AAF86703__GPCmut4 (opt1)
aggagaguccgcucagccagguugcagaagcggcuuagcguguguccuaaucuucucucugcguguagguaggccugugccgcaaacaagcuuaccaugggccagaucaucaccuucuuccaggaggugccccacgucaucgaggaggugaugaacaucgugcugaucgcccucagccugcuggccauccucaaggggaucuacaacgucgcgaccugcggccuguucgggcugaucuccuuccuccugcugugcggccgcagcugcuccgugacguacaaggggguguacgagcuccagacccuggagcugaacauggccaaccucaacaugugcaugccgcugagcugcaccaagaacaacucccaccacuacaucauggucggcaacgagacgggccuggagcucacccugaccaacaccagcaucaucaaccacaaguucugcaaccuguccgacgcccacaagaagaaccucuacgaccacgcccugaugagcaucaucuccacguuccaccugagcauccccaacuucaaccaguacgaggccauguccugcgacuucaacgggggcaagaucagcgugcaguacaaccucucccacagcuucgcgguggacgccgccaaccacugcgggaccaucgccaacggcguccugcagaccuucaugcggauggcguggggcggguccuacaucgcccuggacagcggcaaggggaacugggacugcaucaugaccuccuaccaguaccucaucauccagaacacgaccugggaggaccacugccaguucagccgccccucccccaucggcuaccuggggcugcucagccagcggacccgcgacaucuacaucagccggcgccgccggggcaccuucacguggacccucuccgacagcgagggcaacgaggcccccgggggcuacugccugacccgguggaugcugaucgaggccgagcucaagugcuucgggaacaccgccguggcgaagugcaacgagaagcacgacgaggaguucugcgacaugcugcgccuguucgacuucugcaagcaggccaucaagcggcucaagacgcccgcccagauguccauccagcugaucaacaaggccgugaacgcccugaucaacgaccagcucaucaugaagaaccaccuccgcgacaucaugggcauccccuacugcaacuacagccgguacugcuaccugaaccacaccgucaccgggaagaccucccugccccgcugcugccuggugagcaacggcuccuaccugaacgagacgcacuucagcgacgacaucgagcagcaggcggacaacaugaucaccgagaugcuccagaaggaguacauggaccggcagggcaagaccccgcuggggcugguggaccucuucgucuucuccaccagcuucuaccugaucuccaucuuccugcaccuggugaagaucccgacgcaccgccacaucgugggcaagcccugccccaagccccaccggcucaaccacauggggaucugcagcugcggccuguacaagcacccggggguccccgugaaguggaagcgcugaggacuagucccuguucccagagcccacuuuuuuuucuuuuuuugaaauaaaauagccugucuuucagaucucaaaggcucuuuucagagccaccaaaaaaaaaaaaaaaaaaaaaaaaaaaaaaaaaaaaaaaaaaaaaaaaaaaaaaaaaaaaaaaaagaauu

SEQ ID NO: 26888 - RNA, 1733 nt, Artificial Sequence
  mRNA product Design a-2 (hSL-A64-N5) comprising derived and/or modified sequence from LASV(GA391;Clade III)__CAA36645__GPCmut4 (opt1)
aggagaguccgcucagccagguugcagaagcggcuuagcguguguccuaaucuucucucugcguguagguaggccugugccgcaaacaagcuuaccaugggccagaucgugaccuucuuccaggaggucccccacgugaucgaggaggugaugaacaucguccugaucgcccucagcauccuggccauccugaaggggcucuacaacguggcgaccugcggccugaucgggcuggugacguuccuccugcuguccggccgcagcugcucccucaucuacaaggggaccuacgagcugcagacccuggagcucaacauggagacccugaacaugugcaugccgcugagcugcaccaagaacaacucccaccacuacauccgggucggcaacgagaccggccucgagcugacccugacgaacaccagcauccucaaccacaaguucugcaaccuguccgacgcccacaagcgcaaccuguacgaccacagccucauguccaucaucagcaccuuccaccuguccauccccaacuucaaccaguacgaggccaugagcugcgacuucaacgggggcaagaucaccgugcaguacaaccugucccacagcuucgccguggacgccgcggggcacugcggcacgcucgccaacgggguccugcagaccuucaugcggauggccuggggcggcuccuacaucgcccuggacagcgggcgcggcaacugggacugcaucaugaccuccuaccaguaccucaucauccagaacaccacgugggacgaccacugccaguucagccggcccucccccaucggguaccugggccugcucagccagcgcacccgggacaucuacaucagccgccggcgccggggcaccuucaccuggacgcucuccgacagcgaggggaacgagaccccgggcggguacugccugacccgcuggaugcugaucgaggcggagcucaagugcuucggcaacaccgccguggccaagugcaacgagaagcacgacgaggaguucugcgacaugcugcggcuguucgacuucugcaagcaggccauccgccggcucaagacgcccgcccagauguccauccagcugaucaacaaggcggugaacgcccugaucaacgaccagcucaucaugaagaaccaccuccgcgacaucauggggauccccuacugcaacuacagccgguacugcuaccugaaccacaccuccaccggcaagaccagccugccccgcugcugccugaucuccaacggcagcuaccugaacgagacgaaguucuccgacgacaucgagcagcaggccgacaacaugaucaccgagaugcuccagaaggaguacaucgaccggcaggggaagacgccccugggccuggucgaccuguucguguucagcaccuccuucuaccucaucagcaucuuccugcaccuggugaagaucccgacccaccgccacaucgucgggaagcccugccccaagccccaccggcucaaccacaugggcaucugcuccugcgggcuguacaagcagccgggcgugcccgugcgcuggaagcggugaggacuagucccuguucccagagcccacuuuuuuuucuuuuuuugaaauaaaauagccugucuuucagaucucaaaggcucuuuucagagccaccaaaaaaaaaaaaaaaaaaaaaaaaaaaaaaaaaaaaaaaaaaaaaaaaaaaaaaaaaaaaaaaaagaauu

SEQ ID NO: 26889 - RNA, 1736 nt, Artificial Sequence
  mRNA product Design a-2 (hSL-A64-N5) comprising derived and/or modified sequence from LASV(AV;Clade V)__CCA30314__GPCmut4 (opt1)
aggagaguccgcucagccagguugcagaagcggcuuagcguguguccuaaucuucucucugcguguagguaggccugugccgcaaacaagcuuaccaugggccagaucgugaccuucuuccaggaggucccccacgugaucgaggaggugaugaacaucguccugaucgcccucagcauccuggccgugcugaaggggcucuacaacaucgcgaccugcggccugaucgggcugaucacguuccuccugcugugcggccgcuccugcagcuccaaccucuacaaggggguguacgagcugcagagccuggaccucaacauggagacccugaacaugugcaugccgcuguccugcaccaagaacaacagccaccacuacauccgggucggcaacgacacgggccucgagcugacccugaccaacaccuccauccucaaccacaaguucugcaaccugagcgacgcccacaagaaggaccuguacgaccacgcccucauguccaucaucagcacguuccaccuguccauccccaacuucaaccaguacgaggccaugagcugcgacuucaacgggggcaagaucuccgugcaguacaaccugagccacuccuacgccaucgacgcggccaaccacugcgggaccguggccaacggcauccuccagaccuucaugcgcauggccuggggcgggagcuacaucgcgcuggacuccggccgggggaacugggacugcaucaugaccagcuaccaguaccugaucauccagaacacgaccugggagaaccacugccaguucucccgccccagccccaucggcuaccucgggcugcugagccagcggacccgcgacaucuacaucucccggcgccgccggggcaccuucacguggacccugagcgacuccgagggcaacgccacccccgggggcuacugccucacccgguggaugcugaucgaggccgagcugaagugcuucgggaacacggccgucgccaagugcaacgagaagcacgacgaggaguucugcgacaugcuccgccuguucgacuucugcaagcaggcgaucagccggcugaagucccccgcccagaugagcauccagcucaucaacaaggccgugaacgcccugaucaacgaccagcugaucaugaagaaccaccuccgcgacaucaugggcauccccuacugcaacuacuccaaguacugcuaccugaaccacaccaucaccgggaagaccagccugcccaagugcugccucguguccaacggcagcuaccugaacgagacgcacuucuccgacgacaucgagcagcaggccgacaacaugaucaccgagaugcugcagaaggaguacauggagcggcagggcaagaccccgcucgggcuggucgaccuguucguguucagcaccuccuucuaccugaucagcaucuuccuccgccuggugaagaucccgacgcaccggcacaucgucggcaagcccugccccaagccccaccgccugaaccacauggggaucugcuccugcggccucuacaagcagccgggggugcccgugcgguggaagcgcugaggacuagucccuguucccagagcccacuuuuuuuucuuuuuuugaaauaaaauagccugucuuucagaucucaaaggcucuuuucagagccaccaaaaaaaaaaaaaaaaaaaaaaaaaaaaaaaaaaaaaaaaaaaaaaaaaaaaaaaaaaaaaaaaagaauu

SEQ ID NO: 26890 - RNA, 1733 nt, Artificial Sequence
  mRNA product Design a-2 (hSL-A64-N5) comprising derived and/or modified sequence from LASV(Togo/2016/7082;Clade VI)__AMR44577__GPCmut4 (opt1)
aggagaguccgcucagccagguugcagaagcggcuuagcguguguccuaaucuucucucugcguguagguaggccugugccgcaaacaagcuuaccaugggccagaucaucaccuucuuccaggaggugccccacgucaucgaggaggugaugaacaucgugcugaucgcccucagccugcuggccauccucaagggggucuacaacguggcgaccugcggcaucaucgggcuggugacguuccuguuccucugcggccgcuccugcagccugaucuacaagggguccuacgagcugcagacccucgagcugaacauggagacccugaacaugugcaugccgcucagcugcacgaagaacuccagccaccacuacauccgggucggcaacgagaccggccuggagcugacccucaccaacacguccaucaucaaccacaaguucugcaaccugagcgacgcccacaagcgcaaccuguacgaccacgcccucauguccauccugagcaccuuccaccuguccauccccaacuucaaccaguacgaggccaugagcugcgacuucaacgggggcaagaucuccgugcaguacaaccucagccacgccuacgcgguggacgccgccgagcacugcgggaccgucgccaacggcgugcugcagaccuucaugcggauggcguggggcggguccuacaucgcccuggacagcggccgcgggaacugggacugcaucaugacguccuaccaguaccucaucauccagaacaccaccugggaggaccacugccaguucagccggcccucccccaucggcuaccuggggcugcucagccagcgcacccgggacaucuacaucagccgccggcgccggggcacguucaccuggacccucuccgacagcgagggcaacgagacccccgggggcuacugccugacgcgcuggaugcugaucgaggccgagcucaagugcuucgggaacaccgccguggccaagugcaacgagaagcacgacgaggaguucugcgacaugcugcggcuguucgacuucugcaagcaggcgauccagcgccucaagucccccgcccagaugagcauccagcugaucaacaaggccgucaacgcccugaucaacgaccagcucaucaugaagaaccaccuccgggacaugaugggcauccccuacugcaacuacuccaaguacugcuaccugaaccacaccagcuccgggcgcaccagccugcccaagugcugccugguguccaacggcagcuaccugaacgagacgcacuucuccgacgacaucgagcagcaggccgacaacaugaucaccgagaugcuccagaaggaguacaucgaccggcagggcaagaccccgcuggggcugguggaccucuucgucuucagcaccuccuucuaccugaucagcaucuuccugcaccugaucaagaucccgacgcaccgccacaucgugggcaagcccugccccaagccccaccggcucaaccacauggggaucugcuccugcggccuguacaagcagccgggggugcccacccgcuggaagcggugaggacuagucccuguucccagagcccacuuuuuuuucuuuuuuugaaauaaaauagccugucuuucagaucucaaaggcucuuuucagagccaccaaaaaaaaaaaaaaaaaaaaaaaaaaaaaaaaaaaaaaaaaaaaaaaaaaaaaaaaaaaaaaaaagaauu

SEQ ID NO: 26891 - RNA, 1733 nt, Artificial Sequence
  mRNA product Design a-2 (hSL-A64-N5) comprising derived and/or modified sequence from LASV(KAK-428;Clade n.d. (VII))__ANH09740__GPCmut4 (opt1)
aggagaguccgcucagccagguugcagaagcggcuuagcguguguccuaaucuucucucugcguguagguaggccugugccgcaaacaagcuuaccaugggccagaucgugaccuucuuccaggaggucccccacgugaucgaggaggugaugaacaucguccugaucgcccucagccugcuggccauccucaaggggcuguacaacuucgcgaccugcggcgugaucgggcugaucacguuccuccugcugugcggccgcuccugcagcgccaccuacaaggggcaguacgagcuccagacccuggagcugaacauggagucccucaacaugugcaugccgcugagcugcacgaagaacaacucccaccacuacauccgggccggcaacaacaccggccuggagcucacccugaccaacacgagcaucaucucccacaaguucugcaaccugagcgacgcccacaagaagaaccucuacgaccacacccugauguccaucaucaccaccuuccaccugagcauccccaacuucaaccaguacgaggccauguccugcgacuucaacgggggcaagaucagcauccaguacaaccucucccacagcuacgcgggggacgccgcccagcacugcggcacgguggccaacgggguccugcagaccuucaugcgcauggcguggggcggcuccuaccuggcccucgacagcgggcggcgcggcugggacugcaucaucuccagcuaccaguaccugaucauccagaacaccaccugggacgaccacugccaguucucccggcccagccccaucggguaccugggcuucgugagccagaagacgcgcgacaucuacaucucccggcgccgccggggcaccuucaccuggacccugagcgacuccgaggggcacgacaugccgggcggguacugccucacgcgguggaugcugaucgaggccgaccugaagugcuucggcaacaccgccguggccaagugcaacgagaagcacgacgaggaguucugcgacauguggcgccucuucgacuucugcaagcaggcgauccagcggcugaaggcccccgcccagaugaacauccagcugaucaacaaggccgucaacgcccucaucaacgaccagcugaugaugaagaaccaccuccgcgacaucauggggauccccuacugcaacuacagcaaguucugcuaccugaacaacaccaccacgggccggaccucccugccccgcugcugccugaucagcaacggcuccuaccucaacgagacccacuucagcgacgacaucgagcagcaggcggacaacaugaucaccgagaugcugcagaaggaguacauggaccggcaggggaagacgccccugggccucguggaccuguucguguucuccaccagcuucuaccugaucaccaucuuccuccaccuggucaagaucccgacccaccgccacaucguggggaagcccugccccaagccccaccggcugaaccacaugggcaucugcuccugcgggcuguacaagcagccgggcgugcccguccgcuggaagcggugaggacuagucccuguucccagagcccacuuuuuuuucuuuuuuugaaauaaaauagccugucuuucagaucucaaaggcucuuuucagagccaccaaaaaaaaaaaaaaaaaaaaaaaaaaaaaaaaaaaaaaaaaaaaaaaaaaaaaaaaaaaaaaaaagaauu

SEQ ID NO: 26892 - RNA, 1733 nt, Artificial Sequence; identical to SEQ ID NO: 26886
  mRNA product Design a-2 (hSL-A64-N5) comprising derived and/or modified sequence from LASV(Pinneo-NIG-1969;Clade I)__AIT17836__GPCmut4 (opt1)

SEQ ID NO: 26893 - RNA, 1733 nt, Artificial Sequence
  mRNA product Design a-2 (hSL-A64-N5) comprising derived and/or modified sequence from LASV(ISTH0009-NIG-2011;Clade II)__AIT17404__GPCmut4 (opt1)
aggagaguccgcucagccagguugcagaagcggcuuagcguguguccuaaucuucucucugcguguagguaggccugugccgcaaacaagcuuaccaugggccagaucaucaccuucuuccaggaggugccccacgucaucgaggaggugaugaacaucgugcugaucgcccucagccugcuggccauccucaaggggaucuacaacgucgcgaccugcggccuguucgggcugguguccuuccuccugcugugcggccgcagcugcuccacgaccuacaaggggguguacgagcuccagacccuggagcuggacauggccagccucaacaugugcaugccgcuguccugcacgaagaacaacagccaccacuacaucauggucggcaacgagaccggccuggagcucacccugaccaacacguccaucaucaaccacaaguucugcaaccugagcgacgcccacaagaagaaccucuacgaccacgcccugauguccaucaucagcaccuuccaccuguccauccccaacuucaaccaguacgaggccaugagcugcgacuucaacgggggcaagaucuccgugcaguacaaccucagccacgcguacgccguggacgccgccaaccacugcgggaccaucgcgaacggcguccugcagaccuucaugcggauggccuggggcggguccuacaucgcccuggacagcggcaagggguccugggacugcaucaugacgagcuaccaguaccucaucauccagaacaccaccugggaggaccacugccaguucucccgccccagccccaucggcuaccuggggcugcucagccagcggacccgcgacaucuacaucucccggcgccgccggggcacguucaccuggacccucagcgacuccgagggcaacgagacccccgggggcuacugccugacgcgguggaugcugaucgaggccgagcucaagugcuucgggaacaccgccguggcgaagugcaacgagaagcacgacgaggaguucugcgacaugcugcgccuguucgacuucugcaagcaggccauccggcgccucaagacccccgcccagaugagcauccagcugaucaacaaggccgugaacgcccugaucaacgaccagcucaucaugaagaaccaccuccgggacaucaugggcaucccguacugcaacuacuccaaguacugcuaccugaaccacaccgucacggggaagaccagccugccccgcugcugccugguguccaacggcagcuaccugaacgagacccacuucuccgacgacaucgagcagcaggcggacaacaugaucaccgagcuccugcagaaggaguacauggaccggcagggcaagacgccccuggggcucguggaccuguucgucuucagcaccuccuucuaccugaucagcaucuuccugcaccucaucaagaucccgacccaccgccacaucaccggcaagcccugccccaagccccaccggcugaaccacauggggaucugcuccugcggccuguacaagcacccgggggugcccgugaaguggaagcgcugaggacuagucccuguucccagagcccacuuuuuuuucuuuuuuugaaauaaaauagccugucuuucagaucucaaaggcucuuuucagagccaccaaaaaaaaaaaaaaaaaaaaaaaaaaaaaaaaaaaaaaaaaaaaaaaaaaaaaaaaaaaaaaaaagaauu

SEQ ID NO: 26894 - RNA, 1733 nt, Artificial Sequence
  mRNA product Design a-2 (hSL-A64-N5) comprising derived and/or modified sequence from LASV(ISTH2010-NIG-2012;Clade II)__AIT17482__GPCmut4 (opt1)
aggagaguccgcucagccagguugcagaagcggcuuagcguguguccuaaucuucucucugcguguagguaggccugugccgcaaacaagcuuaccaugggccagaucaucaccuucuuccaggaggugccccacgucaucgaggaggugaugaacaucgugcugaucgcccucagccugcuggccauccucaaggggaucuacaacgucgcgaccugcggccuguucgggcugguguccuuccuccugcugugcggccgcagcugcuccacgaccuacaaggggguguacgagcuccagacccuggagcuggacauggccagccucaacaugugcaugccgcuguccugcacgaagaacaacagccaccacuacaucauggucggcaacgagaccggccuggagcucacccugaccaacacguccaucaucaaccacaaguucugcaaccugagcgacgcccacaagaagaaccucuacgaccacgcccugauguccaucaucagcaccuuccaccuguccauccccaacuucaaccaguacgaggccaugagcugcgacuucaacgggggcaagaucuccgugcaguacaaccucagccacgcguacgccguggacgccgccaaccacugcgggaccaucgcgaacggcguccugcagaccuucaugcggauggccuggggcggguccuacaucgcccuggacagcggcaagggguccugggacugcaucaugacgagcuaccaguaccucaucauccagaacaucaccugggaggaccacugccaguucucccgccccagccccaucggcuaccuggggcugcucagccagcggacccgcgacaucuacaucucccggcgccgccggggcaccuucacguggacccucagcgacuccgagggcaacgagacccccgggggcuacugccugacccgguggaugcugaucgaggccgagcucaagugcuucgggaacacggccguggcgaagugcaacgagaagcacgacgaggaguucugcgacaugcugcgccuguucgacuucugcaagcaggccauccggcgccucaagacccccgcccagaugagcauccagcugaucaacaaggccgugaacgcccugaucaacgaccagcucaucaugaagaaccaccuccgggacaucaugggcauccccuacugcaacuacuccaaguacugcuaccugaaccacaccgucaccgggaagacgagccugccccgcugcugccugguguccaacggcagcuaccugaacgagacccacuucuccgacgacaucgagcagcaggcggacaacaugaucaccgagcuccugcagaaggaguacaucgaccggcagggcaagaccccgcuggggcucguggaccuguucgucuucagcacguccuucuaccugaucagcaucuuccugcaccucgugaagaucccgacccaccgccacguggucggcaagcccugccccaagccccaccggcugaaccacauggggaucugcuccugcggccuguacaagcacccgggggugcccgugaaguggaagcgcugaggacuagucccuguucccagagcccacuuuuuuuucuuuuuuugaaauaaaauagccugucuuucagaucucaaaggcucuuuucagagccaccaaaaaaaaaaaaaaaaaaaaaaaaaaaaaaaaaaaaaaaaaaaaaaaaaaaaaaaaaaaaaaaaagaauu

SEQ ID NO: 26895 - RNA, 1733 nt, Artificial Sequence
  mRNA product Design a-2 (hSL-A64-N5) comprising derived and/or modified sequence from LASV(Lassa virus/H.sapiens-wt/NGA/2015/ISTH_0543;Clade II)__AVO03639__GPCmut4 (opt1)
aggagaguccgcucagccagguugcagaagcggcuuagcguguguccuaaucuucucucugcguguagguaggccugugccgcaaacaagcuuaccaugggccagaucaucaccuucuuccaggaggugccccacgucaucgaggaggugaugaacaucgugcugaucgcccucagccugcuggccauccucaaggggaucuacaacgucgcgaccugcggccuguucgggcugguguccuuccuccugcugugcggccgcagcugcuccacgaccuacaaggggguguacgagcuccagacccuggagcuggacauggccaaccucaacaugugcaugccgcugagcugcacgaagaacaacucccaccacuacaucauggucggcaacgagaccggccuggagcucacccugaccaacacgagcaucaucaaccacaaguucugcaaccuguccgacgcccacaagaagaaccucuacgaccacgcccugaugagcaucaucuccaccuuccaccugagcauccccaacuucaaccaguacgaggccauguccugcgacuucaacgggggcaagaucagcgugcaguacaaccucucccacaccuacgcgguggacgccgccaaccacugcgggaccaucgccaacggcguccugcagacguucaugcggauggcguggggcgggagcuacaucgcccuggacuccggcaaggggagcugggacugcaucaugaccuccuaccaguaccucgugauccagaacaccaccugggaggaccacugccaguucagccgccccucccccaucggcuaccuggggcugcucagccagcggacgcgcgacaucuacaucagccggcgccgccggggcaccuucaccuggacccucuccgacagcgagggcaacgagacgcccgggggcuacugccugacccgguggaugcugaucgaggccgagcucaagugcuucgggaacaccgccguggccaagugcaacgagaagcacgacgaggaguucugcgacaugcugcgccuguucgacuucugcaagcaggcgauccggcgccucaagacccccgcccagauguccauccagcugaucaacaaggccgucaacgcccugaucaacgaccagcucaucaugaagaaccaccuccgggacaucaugggcauccccuacugcaacuacagcaaguacugcuaccugaaccacacggugaccgggaagaccucccugccccgcugcugccuggugagcaacggcuccuaccugaacgagacccacuucagcgacgacaucgagcagcaggccgacaacaugaucacggagcuccugcagaaggaguacaucgaccggcagggcaagaccccgcuggggcucgucgaccuguucguguucuccaccagcuucuaccugaucuccaucuuccugcaccucgugaagaucccgacccaccgccacaucacgggcaagcccugccccaagccccaccggcugaaccacauggggaucugcagcugcggccuguacaagcacccggggguccccgugaaguggaagcgcugaggacuagucccuguucccagagcccacuuuuuuuucuuuuuuugaaauaaaauagccugucuuucagaucucaaaggcucuuuucagagccaccaaaaaaaaaaaaaaaaaaaaaaaaaaaaaaaaaaaaaaaaaaaaaaaaaaaaaaaaaaaaaaaaagaauu

SEQ ID NO: 26896 - RNA, 1733 nt, Artificial Sequence
  mRNA product Design a-2 (hSL-A64-N5) comprising derived and/or modified sequence from LASV(Lassa virus/H.sapiens-wt/NGA/2016/ISTH_0009;Clade II)__AVO03571__GPCmut4 (opt1)
aggagaguccgcucagccagguugcagaagcggcuuagcguguguccuaaucuucucucugcguguagguaggccugugccgcaaacaagcuuaccaugggccagaucaucaccuucuuccaggaggugccccacgucaucgaggaggugaugaacaucgugcugaucgcccucagccugcuggccauccucaaggggaucuacaacgucgcgaccugcggccugcuggggcucguguccuuccugcugcucugcggccgcagcugcuccacgaccuacaaggggguguacgagcugcagacccuggagcucgacauggccagccugaacaugugcaugccgcuguccugcacgaagaacaacagccaccacuacaucauggucggcaacgagaccggccucgagcugacccugaccaacacguccaucaucaaccacaaguucugcaaccucagcgacgcccacaagaagaaccuguacgaccacgcccugauguccaucaucagcaccuuccaccucuccauccccaacuucaaccaguacgaggccaugagcugcgacuucaacgggggccggaucuccgugcaguacaaccugagccacuccuacgcgguggacgccgccaaccacugcgggaccaucgccaacggcguccugcagaccuucaugcgcauggcguggggcgggagcuacaucgcccucgacuccggcaaggggagcugggacugcaucaugacguccuaccaguaccugaucauccagaacaccaccugggaggaccacugccaguucagccggcccagccccaucggcuaccuggggcuccugucccagcgcacccgggacaucuacaucagccgccggcgccggggcacguucaccuggacccuguccgacagcgagggcaacgagacccccgggggcuacugccugacgcgcuggaugcucaucgaggccgagcugaagugcuucgggaacaccgccguggccaagugcaacgagaagcacgacgaggaguucugcgacaugcugcggcuguucgacuucugcaagcaggcgauccgccggcugaagacccccgcccagauguccauccagcugaucaacaaggccgugaacgcccucaucaacgaccagcugaucaugaagaaccaccuccgcgacaucaugggcaucccguacugcaacuacagcaaguacugcuaccucaaccacaccgucacggggaagaccucccugccccggugcugccuggugagcaacggcuccuaccucaacgagacccacuucagcgacgacaucgagcagcaggccgacaacaugaucaccgagcugcugcagaaggaguacaucgaccgccagggcaagacgccccucgggcugguggaccuguucgucuucuccaccagcuucuaccugaucuccaucuuccuccaccuggugaagaucccgacccaccggcacaucaccggcaagcccugccccaagccccaccgccugaaccacauggggaucugcagcugcggccucuacaaccacccgggggugcccgucaaguggaagcggugaggacuagucccuguucccagagcccacuuuuuuuucuuuuuuugaaauaaaauagccugucuuucagaucucaaaggcucuuuucagagccaccaaaaaaaaaaaaaaaaaaaaaaaaaaaaaaaaaaaaaaaaaaaaaaaaaaaaaaaaaaaaaaaaagaauu

SEQ ID NO: 26897 - RNA, 1733 nt, Artificial Sequence
  mRNA product Design a-2 (hSL-A64-N5) comprising derived and/or modified sequence from LASV(Lassa virus/H.sapiens-wt/NGA/2016/ISTH_0017;Clade II)__AVO03567__GPCmut4 (opt1)
aggagaguccgcucagccagguugcagaagcggcuuagcguguguccuaaucuucucucugcguguagguaggccugugccgcaaacaagcuuaccaugggccagaucaucaccuucuuccaggaggugccccacgucaucgaggaggugaugaacaucgugcugaucgcccucagccugcuggccauccucaaggggaucuacaacgucgcgaccugcggccuguucgggcugguguccuuccuccugcugugcggccgcagcugcuccacgaccuacaaggggguguacgagcuccagacccuggagcuggacauggccagccucaacaugugcaugccgcuguccugcacgaagaacaacagccaccacuacaucauggucggcaacgagaccggccuggagcucacccugaccaacacguccaucaucaaccacaaguucugcaaccugagcgacgcccacaagaagaaccucuacgaccacgcccugauguccaucaucagcaccuuccaccuguccauccccaacuucaaccaguacgaggccaugagcugcgacuucaacgggggcaagaucuccgugcaguacaaccucagccacaccuacgcgaucgacgccgccaaccacugcgggaccaucgccaacggcgugcugcagacguucaugcggauggcguggggcggguccuacaucgcccuggacagcggcaagggguccugggacugcaucaugaccagcuaccaguaccucaucauccagaacaccaccugggaggaccacugccaguucucccgccccagccccaucggcuaccuggggcugcucagccagcggacgcgcgacaucuacaucucccggcgccgccggggcaccuucaccuggacccucagcgacuccgagggcaacgagacgcccgggggcuacugccugacccgguggaugcugaucgaggccgagcucaagugcuucgggaacaccgccgucgccaagugcaacgagaagcacgacgaggaguucugcgacaugcugcgccuguucgacuucugcaagcaggcgauccggcgccucaagacccccgcccagaugagcauccagcugaucaacaaggccgugaacgcccugaucaacgaccagcucaucaugaagaaccaccuccgggacaucaugggcauccccuacugcaacuacuccaaguacugcuaccugaaccacacggugaccgggaagaccagccugccccgcugcugccuggucuccaacggcagcuaccugaacgagacccacuucuccgacgacaucgagcagcaggccgacaacaugaucacggagcuccugcagaaggaguacauggaccggcagggcaagaccccgcuggggcucguggaccuguucguguucagcaccuccuucuaccugaucagcaucuuccugcaccucguccgcaucccgacccaccggcacgugaucggcaagcccugccccaagccccaccgccugaaccacauggggaucugcuccugcggccuguacaagcacccgggggugcccgucaaguggaagcggugaggacuagucccuguucccagagcccacuuuuuuuucuuuuuuugaaauaaaauagccugucuuucagaucucaaaggcucuuuucagagccaccaaaaaaaaaaaaaaaaaaaaaaaaaaaaaaaaaaaaaaaaaaaaaaaaaaaaaaaaaaaaaaaaagaauu

SEQ ID NO: 26898 - RNA, 1733 nt, Artificial Sequence
  mRNA product Design a-2 (hSL-A64-N5) comprising derived and/or modified sequence from LASV(Lassa virus/H.sapiens-wt/NGA/2018/ISTH_0959;Clade II)__AVV65099__GPCmut4 (opt1)
aggagaguccgcucagccagguugcagaagcggcuuagcguguguccuaaucuucucucugcguguagguaggccugugccgcaaacaagcuuaccaugggccagaucaucaccuucuuccaggaggugccccacgucaucgaggaggugaugaacaucgugcugaucgcccucagccugcuggccauccucaaggggaucuacaacgucgugaccugcggccuguucgggcugguguccuuccuccugcugugcggccgcagcugcuccacgaccuacaagggggucuacgagcuccagacccuggagcuggacauggcgagccucaacaugugcaugccgcuguccugcacgaagaacaacagccaccacuacaucauggugggcaacgagaccggccuggagcucacccugaccaacacguccaucaucaaccacaaguucugcaaccugagcgacgcccacaagaagaaccucuacgaccacgcccugauguccaucaucagcaccuuccaccuguccauccccaacuucaaccaguacgaggccaugagcugcgacuucaacgggggcaagaucuccgugcaguacaaccucagccacgccuacgcgaucgacgccgccaaccacugcgggaccaucgccaacggcguccugcagaccuucaugcggauggcguggggcggguccuacaucgcccuggacagcggcaagggguccugggacugcaucaugacgagcuaccaguaccucaucauccagaacaccaccugggaggaccacugccaguucucccgccccagccccaucggcuaccuggggcugcucagccagcggacccgcgacaucuacaucucccggcgccgccggggcacguucaccuggacccucagcgacuccgagggcaacgagacccccgggggcuacugccugacgcgguggaugcugaucgaggccgagcucaagugcuucgggaacaccgccguggccaagugcaacgagaagcacgacgaggaguucugcgacaugcugcgccuguucgacuucugcaagcaggcgauccggcgccucaagacccccgcccagaugagcauccagcugaucaacaaggccgugaacgcccugaucaacgaccagcucaucaugaagaaccaccuccgggacaucaugggcaucccguacugcaacuacuccaaguacugcuaccugaaccacaccgucacggggaagaccagccugccccgcugcugccugguguccaacggcagcuaccugaacgagacccacuucuccgacgacaucgagcagcaggccgacaacaugaucaccgagcuccugcagaaggaguacaucgaccggcagggcaagacgccccuggggcucguggaccuguucgucuucagcaccuccuucuaccugaucagcaucuuccugcaccucgugaagaucccgacccaccgccacgugaucggcaagcccugccccaagccccaccggcugaaccacauggggaucugcuccugcggccuguacaagcacccggggguccccgugaaguggaagcgcugaggacuagucccuguucccagagcccacuuuuuuuucuuuuuuugaaauaaaauagccugucuuucagaucucaaaggcucuuuucagagccaccaaaaaaaaaaaaaaaaaaaaaaaaaaaaaaaaaaaaaaaaaaaaaaaaaaaaaaaaaaaaaaaaagaauu

SEQ ID NO: 26899 - RNA, 1733 nt, Artificial Sequence
  mRNA product Design a-2 (hSL-A64-N5) comprising derived and/or modified sequence from LASV(LASV003-NIG-2008;Clade II)__AIT17580__GPCmut4 (opt1)
aggagaguccgcucagccagguugcagaagcggcuuagcguguguccuaaucuucucucugcguguagguaggccugugccgcaaacaagcuuaccaugggccagaucaucaccuucuuccaggaggugccccacgucaucgaggaggugaugaacaucgugcugaucgcccucagccugcuggccauccucaaggggaucuacaacgucgcgaccugcggccuguucgggcugguguccuuccuccugcugugcggccgcagcugcuccacgaccuacaaggggguguacgagcuccagacccuggagcuggacauggccagccucaacaugugcaugccgcuguccugcacgaagaacaacagccaccacuacaucauggucggcaacgagaccggccuggagcucacccugaccaacacguccaucaucaaccacaaguucugcaaccugagcgacgcccacaagaagaaccucuacgaccacgcccugauguccaucaucagcaccuuccaccuguccauccccaacuucaaccaguacgaggccaugagcugcgacuucaacgggggcaagaucuccgugcaguacaaccucagccacaccuacgcgguggacgccgccaaccacugcgggaccaucgccaacggcguccugcagacguucaugcggauggcguggggcggguccuacaucgcccuggacagcggcaagggguccugggacugcaucaugaccagcuaccaguaccucaucauccagaacaccaccugggaggaccacugccaguucucccgccccagccccaucggcuaccuggggcugcucagccagcggacgcgcgacaucuacaucucccggcgccgccggggcaccuucaccuggacccucagcgacuccgagagcaacgagacgccgggcggguacugccugacccgguggaugcugaucgaggccgagcucaagugcuucggcaacaccgccguggccaagugcaacgagaagcacgacgaggaguucugcgacaugcugcgccuguucgacuucugcaagcaggcgauccggcgccucaaggcccccgcccagauguccauccagcugaucaacaaggccgugaacgcccugaucaacgaccagcucaucaugaagaaccaccuccgggacaucauggggauccccuacugcaacuacagcaaguacugcuaccugaaccacaccgucacgggccgcaccucccugccccggugcugccuggugagcaacggguccuaccugaacgagacccacuucagcgacgacaucgagcagcaggcggacaacaugaucaccgagcuccugcagaaggaguacauggaccgccagggcaagacgccccugggccucguggaccuguucgucuucuccaccagcuucuaccugaucuccaucuuccugcaccucgugaagaucccgacccaccggcacgugaucgggaagcccugccccaagccccaccgccugaaccacaugggcaucugcagcugcgggcuguacaagcacccgggcguccccgugaaguggaagcggugaggacuagucccuguucccagagcccacuuuuuuuucuuuuuuugaaauaaaauagccugucuuucagaucucaaaggcucuuuucagagccaccaaaaaaaaaaaaaaaaaaaaaaaaaaaaaaaaaaaaaaaaaaaaaaaaaaaaaaaaaaaaaaaaagaauu

SEQ ID NO: 26900 - RNA, 1733 nt, Artificial Sequence
  mRNA product Design a-2 (hSL-A64-N5) comprising derived and/or modified sequence from LASV(LASV035-NIG-2009;Clade II)__AIT17588__GPCmut4 (opt1)
aggagaguccgcucagccagguugcagaagcggcuuagcguguguccuaaucuucucucugcguguagguaggccugugccgcaaacaagcuuaccaugggccagaucaucaccuucuuccaggaggugccccacgucaucgaggaggugaugaacaucgugcugaucgcccucagccugcuggccauccucaaggggaucuacaacgucgcgaccugcggccuguucgggcugguguccuuccuccugcugugcggccgcagcugcuccacgaccuacaaggggguguacgagcuccagacccuggagcuggacauggccagccucaacaugugcaugccgcuguccugcacgaagaacaacagccaccacuacaucauggucggcaacgagaccggccuggagcucacccugaccaacacguccaucaucaaccacaaguucugcaaccugagcgacgcccacaagaagaaccucuacgaccacgcccugauguccaucaucagcaccuuccaccuguccauccccaacuucaaccaguacgaggccaugagcugcgacuucaacgggggcaagaucuccgugcaguacaaccucagccacgcguacgccguggacgccgccaaccacugcgggaccaucgcgaacggcguccugcagaccuucaugcggauggccuggggcggguccuacaucgcccuggacagcggcaagggguccugggacugcaucaugacgagcuaccaguaccucaucauccagaacaccaccugggaggaccacugccaguucucccgccccagccccaucggcuaccuggggcugcucagccagcggacccgcgacaucuacaucucccggcgccgccggggcacguucaccuggacccucagcgacuccgagggcaacgagacccccgggggcuacugccugacgcgguggaugcugaucgaggccgagcucaagugcuucgggaacaccgccguggcgaagugcaacgagaagcacgacgaggaguucugcgacaugcugcgccuguucgacuucugcaagcaggccauccggcgccucaaggcccccgcccagaugagcauccagcugaucaacaaggccgugaacgcgcugaucaacgaccagcucaucaugaagaaccaccuccgggacaucaugggcauccccuacugcaacuacuccaaguacugcuaccugaaccacaccgucaccgggaagacgagccugccccgcugcugccugguguccaacggcagcuaccugaacgagacccacuucuccgacgacaucgagcagcaggccgacaacaugaucaccgagcuccugcagaaggaguacaucgaccggcagggcaagaccccgcuggggcucguggaccuguucgucuucagcacguccuucuaccugaucagcaucuuccugcaccucgugaagaucccgacccaccgccacgugaucggcaagcccugccccaagccccaccggcugaaccacauggggaucugcuccugcggccuguacaagcacccggggguccccgugaaguggaagcgcugaggacuagucccuguucccagagcccacuuuuuuuucuuuuuuugaaauaaaauagccugucuuucagaucucaaaggcucuuuucagagccaccaaaaaaaaaaaaaaaaaaaaaaaaaaaaaaaaaaaaaaaaaaaaaaaaaaaaaaaaaaaaaaaaagaauu

SEQ ID NO: 26901 - RNA, 1733 nt, Artificial Sequence
  mRNA product Design a-2 (hSL-A64-N5) comprising derived and/or modified sequence from LASV(LASV1000-NIG-2009;Clade II)__AIT17782__GPCmut4 (opt1)
aggagaguccgcucagccagguugcagaagcggcuuagcguguguccuaaucuucucucugcguguagguaggccugugccgcaaacaagcuuaccaugggccagaucaucaccuucuuccaggaggugccccacgucaucgaggaggugaugaacaucgugcugaucgcccucagccugcuggccauccucaaggggaucuacaacgucgcgaccugcggccuguucgggcugguguccuuccuccugcugugcggccgcagcugcuccacgaccuacaaggggguguacgagcuccagacccuggagcuggacauggccagccucaacaugugcaugccgcuguccugcacgaagaacaacagccaccacuacaucauggucggcaacgagaccggccuggagcucacccugaccaacacguccaucaucaaccacaaguucugcaaccugagcgacgcccacaagaagaaccucuacgaccacgcccugauguccaucaucagcaccuuccaccuguccauccccaacuucaaccaguacgaggccaugagcugcgacuucaacgggggcaagaucuccgugcaguacaaccucagccacaccuacgcgguggacgccgccaaccacugcgggaccaucgccaacggcguccugcagacguucaugcggauggcguggggcggguccuacaucgcccuggacagcggcaagggguccugggacugcaucaugaccagcuaccaguaccucaucauccagaacaccaccugggaggaccacugccaguucucccgccccagccccaucggcuaccuggggcugcucagccagcggacgcgcgacaucuacaucucccggcgccgccggggcaccuucaccuggacccucagcgacuccgagggcaacgagacgcccgggggcuacugccugacccgguggaugcugaucgaggccgagcucaagugcuucgggaacaccgccguggccaagugcaacgagaagcacgacgaggaguucugcgacaugcugcgccuguucgacuucugcaagcaggcgaucaagcggcucaagacccccgcccagaugagcauccagcugaucaacaaggccgugaacgcccugaucaacgaccagcucaucaugaagaaccaccuccgcgacaucaugggcauccccuacugcaacuacuccaaguacugcuaccugaaccacacggucaccgggaagaccagccugccccggugcugccugguguccaacggcagcuaccugaacgagacccacuucuccgacgacaucgagcagcaggccgacaacaugaucacggagcuccugcagaaggaguacaucgaccgccagggcaagaccccgcuggggcucguggaccuguucgucuucagcaccuccuucuaccugaucagcaucuuccugcaccucgugaagaucccgacccaccggcacguggucggcaagcccugccccaagccccaccgccugaaccacauggggaucugcuccugcggccuguacaagcacccgggggugcccgugaaguggaagcggugaggacuagucccuguucccagagcccacuuuuuuuucuuuuuuugaaauaaaauagccugucuuucagaucucaaaggcucuuuucagagccaccaaaaaaaaaaaaaaaaaaaaaaaaaaaaaaaaaaaaaaaaaaaaaaaaaaaaaaaaaaaaaaaaagaauu

SEQ ID NO: 26902 - RNA, 1733 nt, Artificial Sequence
  mRNA product Design a-2 (hSL-A64-N5) comprising derived and/or modified sequence from LASV(LASV221-NIG-2010;Clade II)__AIT17624__GPCmut4 (opt1)
aggagaguccgcucagccagguugcagaagcggcuuagcguguguccuaaucuucucucugcguguagguaggccugugccgcaaacaagcuuaccaugggccagaucaucaccuucuuccaggaggugccccacgucaucgaggaggugaugaacaucgugcugaucgcccucagccugcuggccauccucaaggggaucuacaacgucgcgaccugcggccuguucgggcugguguccuuccuccugcugugcggccgcagcugcuccacgaccuacaaggggguguacgagcuccagacccuggagcuggacauggccagccucaacaugugcaugccgcuguccugcacgaagaacaacagccaccacuacaucauggucggcaacgagaccggccuggagcucacccugaccaacacguccaucaucaaccacaaguucugcaaccugagcgacgcccacaagaagaaccucuacgaccacgcccugauguccaucaucagcaccuuccaccuguccauccccaacuucaaccaguacgaggccaugagcugcgacuucaacgggggcaagaucuccgugcaguacaaccucagccacaccuacgcgaucgacgccgccaaccacugcgggaccaucgccaacggcgugcugcagacguucaugcggauggcguggggcggguccuacaucgcccuggacagcggcaagggguccugggacugcaucaugaccagcuaccaguaccucaucauccagaacaccaccugggaggaccacugccaguucucccgccccagccccaucggcuaccuggggcugcucagccagcggacgcgcgacaucuacaucucccggcgccgccggggcaccuucaccuggacccucagcgacuccgagggcaacgagacgcccgggggcuacugccugacccgguggaugcugaucgaggccgagcucaagugcuucgggaacaccgccgucgccaagugcaacgagaagcacgacgaggaguucugcgacaugcugcgccuguucgacuucugcaagcaggcgauccggcgccucaagacccccgcccagaugagcauccagcugaucaacaaggccgugaacgcccugaucaacgaccagcucaucaugaagaaccaccuccgggacaucaugggcauccccuacugcaacuacuccaaguacugcuaccugaaccacacggugaccgggaagaccagccugccccgcugcugccuggucuccaacggcagcuaccugaacgagacccacuucuccgacgacaucgagcagcaggccgacaacaugaucacggagaugcuccagaaggaguacauggaccggcagggcaagaccccgcuggggcugguggaccucuucguguucagcaccuccuucuaccugaucagcaucuuccugcaccuggucaagaucccgacccaccgccacgugaucggcaagcccugccccaagccccaccggcucaaccacauggggaucugcuccugcggccuguacaagcacccgggggugcccgucaaguggaagcgcugaggacuagucccuguucccagagcccacuuuuuuuucuuuuuuugaaauaaaauagccugucuuucagaucucaaaggcucuuuucagagccaccaaaaaaaaaaaaaaaaaaaaaaaaaaaaaaaaaaaaaaaaaaaaaaaaaaaaaaaaaaaaaaaaagaauu

SEQ ID NO: 26903 - RNA, 1733 nt, Artificial Sequence
  mRNA product Design a-2 (hSL-A64-N5) comprising derived and/or modified sequence from LASV(LASV237-NIG-2010;Clade II)__AIT17638__GPCmut4 (opt1)
aggagaguccgcucagccagguugcagaagcggcuuagcguguguccuaaucuucucucugcguguagguaggccugugccgcaaacaagcuuaccaugggccagaucaucaccuucuuccaggaggugccccacgucaucgaggaggugaugaacaucgugcugaucgcccucagccugcuggccauccucaaggggaucuacaacgucgcgaccugcggccuguucgggcugguguccuuccuccugcugugcggccgcagcugcuccacgaccuacaaggggguguacgagcuccagacccuggagcuggacauggccagccucaacaugugcaugccgcuguccugcacgaagaacaacagccaccacuacaucauggucggcaacgagaccggccuggagcucacccugaccaacacguccaucaucaaccacaaguucugcaaccugagcgacgcccacaagaaggaccucuacgaccacgcccugauguccaucaucagcaccuuccaccuguccauccccaacuucaaccaguacgaggccaugagcugcgacuucaacgggggcaagaucuccgugcaguacaaccucagccacaccuacgcgguggacgccgccaaccacugcgggaccaucgccaacggcguccugcagacguucaugcggauggcguggggcggguccuacaucgcccuggacagcggcaagggguccugggacugcaucaugaccagcuaccaguaccucaucauccagaacaccaccugggaggaccacugccaguucucccgccccagccccaucggcuaccuggggcugcucagccagcggacgcgcgacaucuacaucucccggcgccgccggggcaccuucaccuggacccucagcgacuccgagggcaacgagacgcccgggggcuacugccugacccgguggaugcugaucgaggccgagcucaagugcuucgggaacaccgccguggccaagugcaacgagaagcacgacgaggaguucugcgacaugcugcgccuguucgacuucugcaagcaggcgauccggcgccucaagacccccgcccagaugagcauccagcugaucaacaaggccgugaacgcccugaucaacgaccagcucaucaugaagaaccaccuccgggacaucaugggcauccccuacugcaacuacuccaaguacugcuaccugaaccacacggucaccgggaagaccagccugccccgcugcugccugguguccaacggcagcuaccugaacgagacccacuucuccgacgacaucgagcagcaggccgacaacaugaucacggagcuccugcagaaggaguacauggaccggcagggcaagaccccgcuggggcucguggaccuguucgucuucagcaccuccuucuaccugaucagcaucuuccugcaccucaucaagaucccgacccaccgccacaucacgggcaagcccugccccaagccccaccggcugaaccacauggggaucugcuccugcggccuguacaagcacccgggggugcccgugaaguggaagcgcugaggacuagucccuguucccagagcccacuuuuuuuucuuuuuuugaaauaaaauagccugucuuucagaucucaaaggcucuuuucagagccaccaaaaaaaaaaaaaaaaaaaaaaaaaaaaaaaaaaaaaaaaaaaaaaaaaaaaaaaaaaaaaaaaagaauu

SEQ ID NO: 26904 - RNA, 1733 nt, Artificial Sequence
  mRNA product Design a-2 (hSL-A64-N5) comprising derived and/or modified sequence from LASV(LASV253-NIG-2011;Clade II)__AIT17670__GPCmut4 (opt1)
aggagaguccgcucagccagguugcagaagcggcuuagcguguguccuaaucuucucucugcguguagguaggccugugccgcaaacaagcuuaccaugggccagaucaucaccuucuuccaggaggugccccacgucaucgaggaggugaugaacaucgugcugaucgcccucagccugcuggccauccucaaggggaucuacaacgucgcgaccugcggccuguucgggcugguguccuuccuccugcugugcggccgcagcugcuccacgaccuacaaggggguguacgagcuccagacccuggagcuggacauggccagccucaacaugugcaugccgcuguccugcacgaagaacaacagccaccacuacaucauggucggcaacgagaccggccuggagcucacccugaccaacacguccaucaucaaccacaaguucugcaaccugagcgacgcccacaagaagaaccucuacgaccacgcccugauguccaucaucagcaccuuccaccuguccauccccaacuucaaccaguacgaggccaugagcugcgacuucaacgggggcaagaucuccgugcaguacaaccucagccacaccuacgcgguggacgccgccaaccacugcgggaccaucgccaacggcguccugcagacguucaugcggauggcguggggcggguccuacaucgcccuggacagcggcaagggguccugggacugcaucaugaccagcuaccaguaccucaucauccagaacaccaccugggaggaccacugccaguucucccgccccagccccaucggcuaccuggggcugcucagccagcggacgcgcgacaucuacaucucccggcgccgccggggcaccuucaccuggacccucagcgacuccgagggcaacgagacgcccgggggcuacugccugacccgguggaugcugaucgaggccgagcucaagugcuucgggaacaccgccguggccaagugcaacgagaagcacgacgaggaguucugcgacaugcugcgccuguucgacuucugcaagcaggcgauccggcgccucaaggcccccgcccagaugagcauccagcugaucaacaaggccgugaacgcccugaucaacgaccagcucaucaugaagaaccaccuccgggacaucaugggcaucccguacugcaacuacuccaaguacugcuaccugaaccacaccgucacggggcgcaccagccugccccggugcugccugguguccaacggcagcuaccugaacgagacccacuucuccgacgacaucgagcagcaggcggacaacaugaucaccgagcuccugcagaaggaguacaucgaccgccagggcaagacgccccuggggcucguggaccuguucgucuucagcaccuccuucuaccugaucagcaucuuccugcaccucgugaagaucccgacccaccggcacaucaucggcaagcccugccccaagccccaccgccugaaccacauggggaucugcuccugcggccuguacaagcacccgggggugcccgucaaguggaagcggugaggacuagucccuguucccagagcccacuuuuuuuucuuuuuuugaaauaaaauagccugucuuucagaucucaaaggcucuuuucagagccaccaaaaaaaaaaaaaaaaaaaaaaaaaaaaaaaaaaaaaaaaaaaaaaaaaaaaaaaaaaaaaaaaagaauu

SEQ ID NO: 26905 - RNA, 1733 nt, Artificial Sequence
  mRNA product Design a-2 (hSL-A64-N5) comprising derived and/or modified sequence from LASV(LASV254-NIG-2011;Clade II)__AIT17674__GPCmut4 (opt1)
aggagaguccgcucagccagguugcagaagcggcuuagcguguguccuaaucuucucucugcguguagguaggccugugccgcaaacaagcuuaccaugggccagaucaucaccuucuuccaggaggugccccacgucaucgaggaggugaugaacaucgugcugaucgcccucagccugcuggccauccucaaggggaucuacaacgucgcgaccugcggccuguucgggcugguguccuuccuccugcugugcggccgcagcugcuccacgaccuacaaggggguguacgagcuccagacccuggagcuggacaugaccaaccucaacaugugcaugccgcugagcugcaccaagaacaacucccaccacuacaucauggucggcaacgagaccggccuggagcucacccugacgaacaccagcaucaucaaccacaaguucugcaaccuguccgacgcccacaagaagaaccucuacaaccacgcccugaugagcaucaucuccaccuuccaccugagcauccccaacuucaaccaguacgaggccauguccugcgacuucaacgggggcaagaucagcgugcaguacaaccucucccacagcuacgccguggacgcggccaaccacugcgggaccaucgccaacggcguccugcagacguucaugcggauggccuggggcggguccuacaucgcgcuggacagcggcaaggggaacugggacugcaucaugaccuccuaccaguaccucaucauccagaacaccaccugggaggaccacugccaguucagccgccccucccccaucggcuaccuggggcugcucagccagcggacgcgcgacaucuacaucagccggcgccgccggggcaccuucaccuggacccucuccgacagcgagggcaacgagacgcccgggggcuacugccugacccgguggaugcugaucgaggccgagcucaagugcuucgggaacaccgccguggccaagugcaacgagaagcacgacgaggaguucugcgacaugcugcgccuguucgacuucugcaagcaggccauccggcgccucaagacccccgcgcaggccaacauccagcugaucaacaaggccgugaacgcccugaucaacgaccagcucaucaugaagaaccaccuccgggacaucaugggcauccccuacugcaacuacuccaaguacugcuaccugaaccacacggucaccgggaagaccagccugccccgcugcugccugguguccaacggcagcuaccugaacgagacccacuucuccgacgacaucgagcagcaggccgacaacaugaucacggagcuccugcagaaggaguacauggaccggcagggcaagaccccgcuggggcucguggaccuguucgucuucagcaccuccuucuaccugaucagcaucuuccugcaccucgugaagaucccgacccaccgccacgugaucggcaagcccugccccaagccccaccggcugaaccacauggggaucugcuccugcggccuguacaagcacccggggguccccgugaaguggaagcgcugaggacuagucccuguucccagagcccacuuuuuuuucuuuuuuugaaauaaaauagccugucuuucagaucucaaaggcucuuuucagagccaccaaaaaaaaaaaaaaaaaaaaaaaaaaaaaaaaaaaaaaaaaaaaaaaaaaaaaaaaaaaaaaaaagaauu

SEQ ID NO: 26906 - RNA, 1733 nt, Artificial Sequence
  mRNA product Design a-2 (hSL-A64-N5) comprising derived and/or modified sequence from LASV(Nig08-A19;Clade III)__ADU56618__GPCmut4 (opt1)
aggagaguccgcucagccagguugcagaagcggcuuagcguguguccuaaucuucucucugcguguagguaggccugugccgcaaacaagcuuaccaugggccagaucgugaccuucuuccaggaggucccccacgugaucgaggaggugaugaacaucguccugaucgcccucagcauccuggccauccugaaggggcucuacaacaucgcgaccugcggccugaucgggcuggugacguuccuccugcuguccggccgcagcugcuccaugaccuacaaggggguguacgagcuccagacccuggagcugaacaugaacacccucaacaugugcaugccgcugagcugcaccaagaacaacucccaccacuacaucauggucggcaacgagaccggccuggagcucacccugacgaacaccagccugcuccaccacaaguucugcaaccuguccgacgcccacaagaagaaccuguacgaccacacccucaugagcaucaucuccaccuuccaccugagcauccccaacuucaaccaguacgaggccauguccugcgacuucaacgggggcaagaucacggugcaguacaaccugagccacuccuacgccaucgacgccgcgaaccacugcgggaccguggccaacggcguccuccagaccuucaugcggauggccuggggcgggagcuacaucgcccuggacuccggccgcgggaagugggacugcaucaugaccagcuaccaguaccugaucauccagaacacgaccugggaggaccacugccaguucucccggcccagccccaucggcuaccucgggcugcugucccagcgcacccgggacaucuacaucagccgccggcgccggggcaccuucacguggacccugagcgacuccgagggcaacgagacccccgggggcuacugccucacccgcuggaugcugaucgaggcggagcugaagugcuucgggaacacggccguggccaagugcaacgagaagcacgacgaggaguucugcgacaugcuccggcuguucgacuucugcaagcaggccauccgccggcugaaggcccccgcgcagaugagcauccagcucaucaacaaggccgugaacgcccugaucaacgaccagcugaucaugaagaaccaccuccgcgacaucaugggcauccccuacugcaacuacuccaaguacugcuaccugaaccacaccagcaccgggcggaccucccugccccgcugcugccucgucagcaacggcuccuaccugaacgagacgcacuucagcgacgacaucgagcagcaggccgacaacaugaucaccgagaugcugcagaaggaguaccucgaccggcagggcaagaccccgcuggggcugguggaccuguucguguucuccaccagcuucuaccucaucuccaucuuccugcaccuggucaagaucccgacgcaccgccacaucgugggcaagcccugccccaagccccaccggcucaaccacauggggaucugcagcugcggccuguacaagcagccgggggugcccguccgcuggaagcggugaggacuagucccuguucccagagcccacuuuuuuuucuuuuuuugaaauaaaauagccugucuuucagaucucaaaggcucuuuucagagccaccaaaaaaaaaaaaaaaaaaaaaaaaaaaaaaaaaaaaaaaaaaaaaaaaaaaaaaaaaaaaaaaaagaauu

SEQ ID NO: 26907 - RNA, 1736 nt, Artificial Sequence
  mRNA product Design a-2 (hSL-A64-N5) comprising derived and/or modified sequence from LASV(G1180-SLE-2010;Clade IV)__AIT17168__GPCmut4 (opt1)
aggagaguccgcucagccagguugcagaagcggcuuagcguguguccuaaucuucucucugcguguagguaggccugugccgcaaacaagcuuaccaugggccagaucgugaccuucuuccaggaggucccccacgugaucgaggaggugaugaacaucguccugaucgcccucagcauccuggccgugcugaaggggcucuacaacuucgcgaccugcggccugguggggcugcucaccuuccugcugcucugcggccgcuccugcaccgccagccgguacaagggggucuacgagcugcagacccuggagcucaacauggagacccugaacaugugcaugccgcuguccugcaccaagaacaacagccaccacuacaucauggugggcaacgagaccggccucgagcugacccugacgaacaccuccaucaucaaccacaaguucugcaaccucagcgacgcccacaagaagaaccuguacgaccacgcccugauguccaucaucagcaccuuccaccucuccauccccaacuucaaccaguacgaggccaugagcugcgacuucaacgggggcaagaucuccgugcaguacaaccugagccacuccuacgcgggggacgccgccaaccacugcggcaccgucgccaacggggugcugcagacguucaugcgcauggcguggggcggcagcuacaucgcccucgacuccgggcacggcagcugggacugcaucaugaccuccuaccaguaccugaucauccagaacaccaccugggaggaccacugccaguucagccggcccucccccaucggguaccugggccuccugagccagcgcacgcgggacaucuacaucagccgccggcgccggggcaccuucaccuggacccuguccgacagcgaggggaaggacacgccgggcggguacugccugacccgcuggaugcucaucgaggccgagcugaagugcuucggcaacaccgccguggccaagugcaacgagaagcacgacgaggaguucugcgacaugcugcggcuguucgacuucugcaagcaggcgauccagcgccugaaggcccccgcccagauguccauccagcugaucaacaaggccgucaacgcccucaucaacgaccagcugaucaugaagaaccaccuccgggacaucauggggauccccuacugcaacuacagcaaguacugcuaccucaaccacaccacgaccggcaagaccucccugcccaagugcugccuggugagcaacggcuccuaccucaacgagacccacuucagcgacgacaucgagcagcaggcggacaacaugaucacggagaugcugcagaaggaguacauggagcgccaggggaagacgccccugggccucguggaccuguucgucuucuccaccagcuucuaccugaucuccaucuuccugcaccucgugaagaucccgacccaccggcacaucgugggcaagagcugccccaagccccaccgccugaaccacauggggaucugcuccugcgggcuguacaagcagcccggcgucccggugaaguggaagcggugaggacuagucccuguucccagagcccacuuuuuuuucuuuuuuugaaauaaaauagccugucuuucagaucucaaaggcucuuuucagagccaccaaaaaaaaaaaaaaaaaaaaaaaaaaaaaaaaaaaaaaaaaaaaaaaaaaaaaaaaaaaaaaaaagaauu

SEQ ID NO: 26908 - RNA, 1736 nt, Artificial Sequence
  mRNA product Design a-2 (hSL-A64-N5) comprising derived and/or modified sequence from LASV(G1442-SLE-2011;Clade IV)__AIT17180__GPCmut4 (opt1)
aggagaguccgcucagccagguugcagaagcggcuuagcguguguccuaaucuucucucugcguguagguaggccugugccgcaaacaagcuuaccaugggccagaucgugaccuucuuccaggaggucccccacgugaucgaggaggugaugaacaucguccugaucgcccucagcauccuggccgugcugaaggggcucuacaacguggcgaccugcggccugaucgggcuggucacguuccuccugcugugcggccgcuccugcaccaccacccucuacaaggggguguacgagcugcagacgcuggagcucaacauggagacccugaacaugugcaugccgcugagcugcaccaagaacaacucccaccacuacauccgggugggcaacgagacgggccucgagcugacccugaccaacaccagcaucaucaaccacaaguucugcaaccucuccgacgcccacaagaagaaccuguacgaccacgcccugaugagcaucaucuccacguuccaccucagcauccccaacuucaaccaguacgaggccauguccugcgacuucaacgggggcaagaucagcguccaguacaaccugucccacagcuacgccggggacgcggccaaccacugcggcaccguggccaacggggugcugcagaccuucaugcgcauggccuggggcggcuccuacaucgcgcucgacagcgggcggggcaacugggacugcaucaugaccuccuaccaguaccugaucauccagaacacgaccugggacgaccacugccaguucagccgccccucccccaucggguaccugggccuccugagccagcggacccgcgacgucuacaucucccggcgccgccggggcaccuucacguggacccugagcgacagcgaggggaaggacaccccgggcggguacugccugacccgguggaugcucaucgaggccgagcugaagugcuucggcaacacggccguggccaagugcaacgagaagcacgacgaggaguucugcgacaugcugcgccucuucgacuucugcaagcaggccauccagcggcugaaggcgcccgcccagauguccauccagcugaucaacaaggccgugaacgcccucaucaacgaccagcugaucaugaagaaccaccuccgcgacaucauggggauccccuacugcaacuacagcaaguacugcuaccugaacaacaccgccaccggcaagaccucccugcccaagugcugccugaucagcaacggcuccuaccucaacgagacgcacuucagcgacgacaucgagcaggaggcggacaacaugaucaccgagaugcugcagaaggaguacauggagcggcaggggaagacgccccugggccucgucgaccuguucguguucuccaccagcuucuaccugaucuccaucuuccugcaccucgugaagaucccgacccaccgccacaucgucggcaagagcugccccaagccccaccggcugaaccacauggggaucugcuccugcgggcuguacaagcagcccggcgugccggugcgcuggaagcggugaggacuagucccuguucccagagcccacuuuuuuuucuuuuuuugaaauaaaauagccugucuuucagaucucaaaggcucuuuucagagccaccaaaaaaaaaaaaaaaaaaaaaaaaaaaaaaaaaaaaaaaaaaaaaaaaaaaaaaaaaaaaaaaaagaauu

SEQ ID NO: 26909 - RNA, 1736 nt, Artificial Sequence
  mRNA product Design a-2 (hSL-A64-N5) comprising derived and/or modified sequence from LASV(G3010-SLE-2013;Clade IV)__AIT17344__GPCmut4 (opt1)
aggagaguccgcucagccagguugcagaagcggcuuagcguguguccuaaucuucucucugcguguagguaggccugugccgcaaacaagcuuaccaugggccagaucgugaccuucuuccaggaggucccccacgugaucgaggaggugaugaacaucguccugaucgcccucagcauccuggccgugcugaaggggcucuacaacuucgcgaccugcggccugguggggcuggucacguuccuccugcugugcggccgcuccugcaccaccagccucuacaaggggguguacgagcugcagacccuggagcucaacauggagacgcugaacaugugcaugccgcuguccugcaccaagaacaacagccaccacuacaucauggugggcaacgagaccggccucgagcugacgcugaccaacaccuccaucaucaaccacaaguucugcaaccucagcgacgcccacaagaagaaccuguacaaccacgcccugauguccaucaucagcaccuuccaccucuccauccccaacuucaaccaguacgaggccaugagcugcgacuucaacgggggcaagaucuccguccaguacaaccugagccacuccuacgccggggacgcggccagccacugcggcacgguggccaacggggugcugcagaccuucaugcggauggccuggggcggcuccuacaucgcgcucgacagcggguacggcaagugggacugcaucaugaccuccuaccaguaccugaucauccagaacaccacgugggaggaccacugccaguucagccgccccucccccaucggguaccugggccuccugagccagcggacccgcgacaucuacaucagccggcgccgccggggcaccuucaccuggacgcuguccgacagcgaggggaaggacaccccgggcggguacugccugacccgguggaugcucaucgaggccgagcugaagugcuucggcaacaccgccgucgccaagugcaacgagaagcacgacgaggaguucugcgacaugcugcgccucuucgacuucugcaagcaggccauccagcggcugaagacgcccgcgcagauguccauccagcugaucaacaaggccgugaacgcccucaucaacgaccagcugaucaugaagaaccaccuccgcgacaucauggggauccccuacugcaacuacagcaaguacugcuaccugaaccacaccaccaccggcaagacgucccugcccaagugcugccuggugagcaacggcuccuaccucaacgagacccacuucagcgacgacaucgagcagcaggccgacaacaugaucaccgagaugcugcagaaggaguacauggagcggcaggggaagacgccccugggccucgucgaccuguucguguucuccaccagcuucuaccugaucuccaucuuccugcaccucgugaagaucccgacccaccgccacaucgucggcaagagcugccccaagccccaccggcugaaccacauggggaucugcuccugcgggcuguacaagcagcccggcgugccggugcgcuggaagcggugaggacuagucccuguucccagagcccacuuuuuuuucuuuuuuugaaauaaaauagccugucuuucagaucucaaaggcucuuuucagagccaccaaaaaaaaaaaaaaaaaaaaaaaaaaaaaaaaaaaaaaaaaaaaaaaaaaaaaaaaaaaaaaaaagaauu

SEQ ID NO: 26910 - RNA, 1736 nt, Artificial Sequence
  mRNA product Design a-2 (hSL-A64-N5) comprising derived and/or modified sequence from LASV(G502-SLE-2009;Clade IV)__AIT17126__GPCmut4 (opt1)
aggagaguccgcucagccagguugcagaagcggcuuagcguguguccuaaucuucucucugcguguagguaggccugugccgcaaacaagcuuaccaugggccagaucgugaccuucuuccaggaggucccccacgugaucgaggaggugaugaacaucguccugaucgcccucagcauccuggccgugcugaaggggcucuacaacuucgcgaccugcggccugguggggcugcucacguuccugcugcucugcggccgcuccugcaccaccgggcuguacaagggcgucuacgagcugcagacccucgagcugaacauggagacgcugaacaugugcaugccgcucagcugcaccaagaacaacucccaccacuacaucauggugggcaacgagaccgggcuggagcugacgcucaccaacaccagcaucaucaaccacaaguucugcaaccuguccgacgcccacaagaagaaccuguacgaccacgcccucaugagcaucaucuccaccuuccaccugagcauccccaacuucaaccaguacgaggccauguccugcgacuucaacggcgggaagaucagcgugcaguacaaccugucccacagcuacgccggcgacgcggccgaccacugcgggacggucgccaacggcgugcuccagaccuucaugcggauggccuggggcggguccuacaucgcgcuggacagcggccgcgggcggugggacugcaucaugaccuccuaccaguaccugaucauccagaacaccacgugggaggaccacugccaguucagccgccccucccccaucggcuaccucggccugcugagccagcggacccgcgacaucuacaucucccggcgccgccgggggaccuucaccuggacgcugagcgacagcgagggcaaggacacccccgggggcuacugccucacccgguggaugcugaucgaggccgagcugaagugcuucgggaacaccgccguggccaagugcaacgagaagcacgacgaggaguucugcgacaugcuccgccuguucgacuucugcaagcaggccauccagcggcugaaggcgcccgcccagauguccauccagcucaucaacaaggccgucaacgcccugaucaacgaccagcuggugaugaagaaccaccuccgcgacaucaugggcauccccuacugcaacuacagccgguacugcuaccugaaccacacgaccaccggccgcaccucccugcccaagugcugccucgugagcaacggguccuaccugaacgagacgcacuucagcgacgacaucgagcagcaggccgacaacaugaucaccgagaugcugcagaaggaguacauggagcggcagggcaagaccccgcucgggcuggucgaccuguucguguucuccaccagcuucuaccugaucuccaucuuccuccaccuggugaagaucccgacgcaccgccacaucgucggcaagagcugccccaagccccaccggcugaaccacauggggaucugcuccugcggccucuacaagcagcccggcgugccggugaaguggaagcgcugaggacuagucccuguucccagagcccacuuuuuuuucuuuuuuugaaauaaaauagccugucuuucagaucucaaaggcucuuuucagagccaccaaaaaaaaaaaaaaaaaaaaaaaaaaaaaaaaaaaaaaaaaaaaaaaaaaaaaaaaaaaaaaaaagaauu

SEQ ID NO: 26911 - RNA, 1736 nt, Artificial Sequence
  mRNA product Design a-2 (hSL-A64-N5) comprising derived and/or modified sequence from LASV(G733-SLE-2010;Clade IV)__AIT17154__GPCmut4 (opt1)
aggagaguccgcucagccagguugcagaagcggcuuagcguguguccuaaucuucucucugcguguagguaggccugugccgcaaacaagcuuaccaugggccagaucgugaccuucuuccaggaggucccccacgugaucgaggaggugaugaacaucguccugaucgcccucagcauccuggccgugcugaaggggcucuacaacuucgcgaccugcggcaucguggggcuggucuccuuccugcuccugugcggccgcagcugcacgaccucccuguacaaggggguguacgagcuccagacccuggagcugaacauggagacccucaacaugugcaugccgcugagcugcaccaagaacaacucccaccacuacaucauggugggcaacgagaccggccuggagcucacccugacgaacaccagcaucaucaaccacaaguucugcaaccuguccgacgcccacaagaagaaccucuacgaccacgcccugaugagcaucaucuccaccuuccaccugagcauccccaacuucaaccaguacgaggccauguccugcgacuucaacgggggcaagaucagcguccaguacaaccucucccacagcuacgccggggacgcggccaaccacugcggcaccaucgccaacggggugcugcagacguucaugcggauggccuggggcggcuccuacaucgcgcuggacagcgggcgcgaccggugggacugcaucaugaccuccuaccaguaccucaucauccagaacaccaccugggaggaccacugccaguucagccgccccucccccaucggcuaccuggggcugcucagccagcggacgcgcgacaucuacaucagccggcgccgccggggcaccuucaccuggacccucuccgacagcgagggcaaggacacgcccgggggcuacugccugacccgguggaugcugaucgaggccgagcucaagugcuucgggaacaccgccguggccaagugcaacgagaagcacgacgaggaguucugcgacaugcugcgccuguucgacuucugcaagcaggccauccagcggcucaaggcgcccgcccagauguccauccagcugaucaacaaggccgucaacgcccugaucaacgaccagcucaucaugaagaaccaccuccgcgacaucaugggcauccccuacugcaacuacagcaaguacugcuaccugaaccacaccacgaccgggaagaccucccugcccaagugcugccuggugagcaacggcuccuaccugaacgagacccacuucagcgacgacaucgagcagcaggccgacaacaugaucacggagaugcuccagaaggaguacauggagcggcagggcaagaccccgcuggggcugguggaccucuucgucuucuccaccagcuucuaccugaucuccaucuuccugcaccuggugaagaucccgacccaccgccacguggucggcaagagcugccccaagccccaccggcucaaccacauggggaucugcuccugcggccuguacgggcagcccggcgugccggugaaguggaagcgcugaggacuagucccuguucccagagcccacuuuuuuuucuuuuuuugaaauaaaauagccugucuuucagaucucaaaggcucuuuucagagccaccaaaaaaaaaaaaaaaaaaaaaaaaaaaaaaaaaaaaaaaaaaaaaaaaaaaaaaaaaaaaaaaaagaauu

SEQ ID NO: 26912 - RNA, 1736 nt, Artificial Sequence
  mRNA product Design a-2 (hSL-A64-N5) comprising derived and/or modified sequence from MOPV/LASV reassortant(IGS-1;Clade IV)__AFY05576__GPCmut4 (opt1)
aggagaguccgcucagccagguugcagaagcggcuuagcguguguccuaaucuucucucugcguguagguaggccugugccgcaaacaagcuuaccaugggccagaucgugaccuucuuccaggaggucccccacgugaucgaggaggugaugaacaucguccugaucgcccucagcgugcuggccgugcugaaggggcucuacaacuucgcgaccugcggccuggucgggcuggugacguuccuccugcugugcggccgcuccugcaccaccagccucuacaaggggguguacgagcugcagacccuggagcucaacauggagacgcugaacaugugcaugccgcuguccugcaccaagaacaacagccaccacuacaucauggucggcaacgagaccggccucgagcugacgcugaccaacaccuccaucaucaaccacaaguucugcaaccucagcgacgcccacaagaagaaccuguacgaccacgcccugauguccaucaucagcaccuuccaccucuccauccccaacuucaaccaguacgaggccaugagcugcgacuucaacgggggcaagaucuccgugcaguacaaccugagccacuccuacgccggggacgcggccaaccacugcggcacgguggccaacgggguccugcagaccuucaugcggauggccuggggcggcagcuacaucgcgcucgacuccgggcgcggcaacugggacugcaucaugaccagcuaccaguaccugaucauccagaacaccacgugggaggaccacugccaguucucccggcccagccccaucggguaccugggccuccugucccagcgcacccgggacaucuacaucagccgccggcgccggggcaccuucaccuggacgcugagcgacuccgagggggaggacaccccgggcggguacugccugacccgcuggaugcucaucgaggccgagcugaagugcuucggcaacaccgccguggccaagugcaacgagaagcacgacgaggaguucugcgacaugcugcggcuguucgacuucugcaagcaggccauccagcgccugaaggcgcccgcccagaugagcauccagcugaucaacaaggccgugaacgcccucaucaacgaccagcugaucaugaagaaccaccuccgggacaucauggggauccccuacugcaacuacuccaaguacugcuaccucaaccacacgaccaccggccgcaccagccugcccaagugcugccuggucuccaacggcagcuaccucaacgagacgcacuucuccgacgacaucgagcagcaggccgacaacaugaucaccgagaugcugcagaaggaguacauggagcggcaggggaagacgccccugggccucguggaccuguucguguucagcaccuccuucuaccugaucagcaucuuccugcaccucgucaagaucccgacccaccgccacaucguggggaaguccugccccaagccccaccggcugaaccacaugggcaucugcagcugcgggcuguacaagcagcccggcgugccggucaaguggaagcgcugaggacuagucccuguucccagagcccacuuuuuuuucuuuuuuugaaauaaaauagccugucuuucagaucucaaaggcucuuuucagagccaccaaaaaaaaaaaaaaaaaaaaaaaaaaaaaaaaaaaaaaaaaaaaaaaaaaaaaaaaaaaaaaaaagaauu

SEQ ID NO: 26913 - RNA, 1736 nt, Artificial Sequence
  mRNA product Design a-2 (hSL-A64-N5) comprising derived and/or modified sequence from LASV(LM765-SLE-2012;Clade IV)__AIT17814__GPCmut4 (opt1)
aggagaguccgcucagccagguugcagaagcggcuuagcguguguccuaaucuucucucugcguguagguaggccugugccgcaaacaagcuuaccaugggccagaucgugaccuucuuccaggaggucccccacgugaucgaggaggugaugaacaucguccugaucgcccucagcauccuggccgugcugaaggggcucuacaacuucgcgaccugcggccugguggggcuggucacguuccuccugcugugcggccgcuccugcaccaccagccucuacaaggggguguacgagcugcagacccuggagcucaacauggagacgcugaacaugugcaugccgcuguccugcaccaagaacaacagccaccacuacaucauggugggcaacgagaccggccucgagcugacgcugaccaacaccuccaucaucgaccacaaguucugcaaccucagcgacgcccaccggaagaaccuguacgaccacgcccugauguccaucaucagcaccuuccaccucuccauccccaacuucaaccaguacgaggccaugagcugcgacuucaacgggggcaagaucuccguccaguacaaccugagccacuccuacgccaaggacgcggccgaccacugcgggacgguggccaacggcgugcugcagaccuucaugcgcauggccuggggcgggagcuacaucgcgcucgacuccggccgggggcgcugggacugcaucaugaccagcuaccaguaccugaucauccagaacaccacgugggaggaccacugccaguucucccggcccagccccaucggcuaccuggggcuccugucccagcgcacccgggacaucuacaucagccgccggcgccggggcaccuucaccuggacgcugagcgacuccgagggcaaggacacccccgggggcuacugccugacccgcuggaugcucaucgaggccgagcugaagugcuucgggaacaccgccgucgccaagugcaacgagaagcacgacgaggaguucugcgacaugcugcggcuguucgacuucugcaagcaggccauccagcgccugaaggcgcccgcccagaugagcauccagcugaucaacaaggccgugaacgcccucaucaacgaccagcugaucaugaagaaccaccuccgggacaucaugggcauccccuacugcaacuacuccaaguacugcuaccucaaccacacgaccaccgggaagaccagccugcccaagugcugccugguguccaacggcagcuaccucaacgagacgcacuucuccgacgacaucgagcagcaggccgacaacaugaucaccgagaugcugcagaaggaguacauggagcgccagggcaagaccccgcuggggcucgucgaccuguucguguucagcaccuccuucuaccugaucagcaucuuccugcaccucgugaagaucccgacgcaccggcacaucgucggcaagcccugccccaagccccaccgccugaaccacauggggaucugcuccugcggccuguacaagcagccgggggugcccgugaaguggaagcggugaggacuagucccuguucccagagcccacuuuuuuuucuuuuuuugaaauaaaauagccugucuuucagaucucaaaggcucuuuucagagccaccaaaaaaaaaaaaaaaaaaaaaaaaaaaaaaaaaaaaaaaaaaaaaaaaaaaaaaaaaaaaaaaaagaauu

SEQ ID NO: 26914 - RNA, 1736 nt, Artificial Sequence
  mRNA product Design a-2 (hSL-A64-N5) comprising derived and/or modified sequence from LASV(LM776-SLE-2012;Clade IV)__AIT17824__GPCmut4 (opt1)
aggagaguccgcucagccagguugcagaagcggcuuagcguguguccuaaucuucucucugcguguagguaggccugugccgcaaacaagcuuaccaugggccagaucgugaccuucuuccaggaggucccccacgugaucgaggaggugaugaacaucguccugaucgcccucagcauccuggccgugcugaaggggcucuacaacuucgcgaccugcggccugguggggcuggucacguuccuccugcugugcggccgcuccugcaccaccagcguguacaaggggguguacgagcuccagacccuggagcugaacauggagacgcucaacaugugcaugccgcuguccugcaccaagaacaacagccaccacuacaucauggucggcaacgagaccggccuggagcucacgcugaccaacaccuccaucaucaaccacaaguucugcaaccugagcgacgcccacaagaagaaccucuacgaccacgcccugauguccaucaucagcaccuuccaccuguccauccccaacuucaaccaguacgaggccaugagcugcgacuucaacgggggcaagaucuccgugcaguacaaccucagccacuccuacgccggggacgcggccaaccacugcggcacgguggccaacgggguccugcagaccuucaugcggauggccuggggcggcagcuacaucgcgcuggacuccgggcacggcaagugggacugcaucaugaccagcuaccaguaccucaucauccagaacaccacgugggaggaccacugccaguucucccgccccagccccaucggguaccugggccugcucucccagcggacccgcgacaucuacaucagccggcgccgccggggcaccuucaccuggacgcucagcgacuccgaggggaaggacaccccgggcggguacugccugacccgguggaugcugaucgaggccgagcucaagugcuucggcaacaccgccguggccaagugcaacgagaagcacgacgaggaguucugcgacaugcugcgccuguucgacuucugcaagcaggccauccagcggcucaaggcgcccgcccagaugagcauccagcugaucaacaaggccgugaacgcccugaucaacgaccagcucaucaugaagaaccaccuccgcgacaucauggggauccccuacugcaacuacuccaaguacugcuaccugaaccacacgaccaccggcaagaccagccugcccaagugcugccuggucuccaacggcagcuaccugaacgagacgcacuucuccgacgacaucgagcagcaggccgacaacaugaucaccgagaugcuccagaaggaguacauggagcggcaggggaagacgccccugggccugguggaccucuucguguucagcaccuccuucuaccugaucagcaucuuccugcaccuggucaagaucccgacccaccgccacaucguggggaaguccugccccaagccccaccggcucaaccacaugggcaucugcagcugcgggcuguacaagcagcccggcgugccgguccgcuggaagcggugaggacuagucccuguucccagagcccacuuuuuuuucuuuuuuugaaauaaaauagccugucuuucagaucucaaaggcucuuuucagagccaccaaaaaaaaaaaaaaaaaaaaaaaaaaaaaaaaaaaaaaaaaaaaaaaaaaaaaaaaaaaaaaaaagaauu

SEQ ID NO: 26915 - RNA, 1736 nt, Artificial Sequence
  mRNA product Design a-2 (hSL-A64-N5) comprising derived and/or modified sequence from LASV(Mad39;Clade IV)__ANH09722__GPCmut4 (opt1)
aggagaguccgcucagccagguugcagaagcggcuuagcguguguccuaaucuucucucugcguguagguaggccugugccgcaaacaagcuuaccaugggccagaucgugaccuucuuccaggaggucccccacgugaucgaggaggugaugaacaucguccugaucgcccucagcauccuggccgugcugaaggggcucuacaacguggcgaccugcggccugaucgggcuggucacguuccuccugcugugcggccgcuccugcaccaccacccucuacaaggggguguacgagcugcaggcccuggagcucaacauggagacgcugaacaugugcaugccgcugagcugcaccaagaacaacucccaccacuacauccgggugggcaacgagaccggccucgagcugacgcugaccaacaccagccucaucaaccacaaguucugcaaccuguccgacgcccacaagaagaaccuguacgaccacgcccucaugagcaucaucuccaccuuccaccugagcauccccaacuucaaccaguacgaggccauguccugcgacuucaacgacgggaagaucagcguccaguacaaccugucccacacguacgcgggcgacaccgccaaccacugcgggaccguggccaacggcgugcuccagaccuucaugcgcauggccuggggcgggagcuacaucgcgcuggacuccggccgcgggggcugggacugcaucaugacgagcuaccaguaccugaucauccagaacaccaccugggaggaccacugccaguucucccggcccagccccaucggguaccucggccugcugucccagcggacccgcgacaucuacaucagccggcgccgccggggcacguucaccuggacccuguccgacagcgaggggaaggacaccccgggcggguacugccucacgcgguggaugcugaucgaggccgagcugaagugcuucggcaacaccgccgucgccaagugcaacgagaagcacgacgaggaguucugcgacaugcuccgccuguucgacuucugcaagcaggccauccagcggcugaaggcgcccgcccagaugagcauccagcucaucaacaaggccgugaacgcccugaucaacgaccagcugaucaugaagaaccaccuccgcgacaucauggggauccccuacugcaacuacuccaaguacugcuaccugaaccacaccgugaccggcaagacgagccugcccaagugcugccucgucuccaacggcagcuaccugaacgagacccacuucuccgacgacaucgagcagcaggccgacaacaugaucaccgagaugcugcagaaggaguacauggagcggcaggggaagacgccccucggccugguggaccuguucguguucagcaccuccuucuaccugaucagcaucuuccuccaccuggucaagaucccgacccaccgccacgugguggggaagcccugccccaagccccaccggcugaaccacaugggcaucugcuccugcggguucuacaagcagccgggcguccccgugcgcuggaagcggugaggacuagucccuguucccagagcccacuuuuuuuucuuuuuuugaaauaaaauagccugucuuucagaucucaaaggcucuuuucagagccaccaaaaaaaaaaaaaaaaaaaaaaaaaaaaaaaaaaaaaaaaaaaaaaaaaaaaaaaaaaaaaaaaagaauu

SEQ ID NO: 26916 - RNA, 1736 nt, Artificial Sequence
  mRNA product Design a-2 (hSL-A64-N5) comprising derived and/or modified sequence from LASV(Z0947-SLE-2011;Clade IV)__AIT17840__GPCmut4 (opt1)
aggagaguccgcucagccagguugcagaagcggcuuagcguguguccuaaucuucucucugcguguagguaggccugugccgcaaacaagcuuaccaugggccagaucgugaccuucuuccaggaggucccccacgugaucgaggaggugaugaacaucguccugaucgcccucagcauccuggccgugcugaaggggcucuacaacuucgcgaccugcggccugguggggcuggucacguuccuccugcugugcggccgcuccugcaccaucagccucuacaaggggguguacgagcugcagacccuggagcucaacauggagacccugaacaugugcaugccgcuguccugcaccaagaacaacagccaccacuacaucauggugggcaacgagaccggccucgagcugacccugacgaacaccuccaucaucaaccacaaguucugcaaccucagcgacgcccacaagaagaaccuguacgaccacgcccugauguccaucaucagcaccuuccaccucuccauccccaacuucaaccaguacgaggccaugagcugcgacuucaacgggggcaagaucuccguccaguacaaccugagccacuccuacgccggggacgcggccaaccacugcggcaccguggccaacggggugcugcagacguucaugcggauggccuggggcggcagcuacaucgcgcucgacuccgggcgcgaccggugggacugcaucaugaccagcuaccaguaccugaucauccagaacaccaccugggaggaccacugccaguucucccgccccagccccaucggcuaccuggggcuccugucccagcggacgcgcgacaucuacaucagccggcgccgccggggcaccuucaccuggacccugagcgacuccgagggcaaggacacgcccgggggcuacugccugacccgguggaugcucaucgaggccgagcugaagugcuucgggaacaccgccgucgccaagugcaacgagaagcacgacgaggaguucugcgacaugcugcgccucuucgacuucugcaagcaggccauccagcggcugaaggcgcccgcccagaugagcauccagcugaucaacaaggccgugaacgcccucaucaacgaccagcugaucaugaagaaccaccuccgcgacaucaugggcauccccuacugcaacuacuccaaguacugcuaccugaaccacaccacgaccgggaagaccagccugcccaagugcugccugguguccaacggcagcuaccucaacgagacccacuucuccgacgacaucgagcagcaggccgacaacaugaucacggagaugcugcagaaggaguacauggagcggcagggcaagaccccgcuggggcucgucgaccuguucguguucagcaccuccuucuaccugaucagcaucuuccugcaccucgugaagaucccgacccaccgccacaucgucggcaagcccugccccaagccccaccggcugaaccacauggggaucugcuccugcggccuguacaagcagccgggggugcccgugaaguggaagcgcugaggacuagucccuguucccagagcccacuuuuuuuucuuuuuuugaaauaaaauagccugucuuucagaucucaaaggcucuuuucagagccaccaaaaaaaaaaaaaaaaaaaaaaaaaaaaaaaaaaaaaaaaaaaaaaaaaaaaaaaaaaaaaaaaagaauu

SEQ ID NO: 26917 - RNA, 1736 nt, Artificial Sequence
  mRNA product Design a-2 (hSL-A64-N5) comprising derived and/or modified sequence from LASV(Josiah;Clade IV)__NP_694870__GPCmut4 (opt1)
aggagaguccgcucagccagguugcagaagcggcuuagcguguguccuaaucuucucucugcguguagguaggccugugccgcaaacaagcuuaccaugggccagaucgugaccuucuuccaggaggucccccacgugaucgaggaggugaugaacaucguccugaucgcccucagcgugcuggccgugcugaaggggcucuacaacuucgcgaccugcggccuggucgggcuggugacguuccuccugcugugcggccgcuccugcaccaccagccucuacaaggggguguacgagcugcagacccuggagcucaacauggagacgcugaacaugugcaugccgcuguccugcaccaagaacaacagccaccacuacaucauggucggcaacgagaccggccucgagcugacccugacgaacaccuccaucaucaaccacaaguucugcaaccucagcgacgcccacaagaagaaccuguacgaccacgcccugauguccaucaucagcaccuuccaccucuccauccccaacuucaaccaguacgaggccaugagcugcgacuucaacgggggcaagaucuccgugcaguacaaccugagccacuccuacgccggggacgcggccaaccacugcggcaccguggccaacgggguccugcagacguucaugcggauggccuggggcggcagcuacaucgcgcucgacuccgggcgcggcaacugggacugcaucaugaccagcuaccaguaccugaucauccagaacaccaccugggaggaccacugccaguucucccggcccagccccaucggguaccugggccuccugucccagcgcacgcgggacaucuacaucagccgccggcgccggggcaccuucaccuggacccugagcgacuccgaggggaaggacacgccgggcggguacugccucacccgcuggaugcugaucgaggccgagcugaagugcuucggcaacaccgccguggccaagugcaacgagaagcacgacgaggaguucugcgacaugcuccggcuguucgacuucugcaagcaggccauccagcgccugaaggcgcccgcccagaugagcauccagcucaucaacaaggccgugaacgcccugaucaacgaccagcugaucaugaagaaccaccuccgggacaucauggggauccccuacugcaacuacuccaaguacugcuaccugaaccacaccacgaccggccgcaccagccugcccaagugcugccucgucuccaacggcagcuaccugaacgagacccacuucuccgacgacaucgagcagcaggccgacaacaugaucacggagaugcugcagaaggaguacauggagcggcaggggaagaccccgcucggccugguggaccuguucguguucagcaccuccuucuaccugaucagcaucuuccuccaccuggucaagauccccacccaccgccacaucguggggaaguccugccccaagccccaccggcugaaccacaugggcaucugcagcugcgggcucuacaagcagccgggcgugcccgucaaguggaagcgcugaggacuagucccuguucccagagcccacuuuuuuuucuuuuuuugaaauaaaauagccugucuuucagaucucaaaggcucuuuucagagccaccaaaaaaaaaaaaaaaaaaaaaaaaaaaaaaaaaaaaaaaaaaaaaaaaaaaaaaaaaaaaaaaaagaauu

SEQ ID NO: 26918 - RNA, 1733 nt, Artificial Sequence
  mRNA product Design a-2 (hSL-A64-N5) comprising derived and/or modified sequence from LASV(LP;Clade I)__AAF86701__GPCmut4 (opt1)
aggagaguccgcucagccagguugcagaagcggcuuagcguguguccuaaucuucucucugcguguagguaggccugugccgcaaacaagcuuaccaugggccagaucaucaccuucuuccaggaggugccccacgucaucgaggaggugaugaacaucgugcugaucgcccucagccugcuggccauccucaaggggcuguacaacaucgcgaccugcggcaucaucgggcuggucgccuuccucuuccugugcggcaaguccugcagccugacgcucaagggcggguacgagcugcagacccuggagcucaacauggagacccugaacaugugcaugccgcuguccugcaccaagaacagcucccaccacuacauccgcgugggcaacgagacggggcucgagcugacccugaccaacaccagcaucaucaaccacaaguucugcaaccucuccgacgcccacaagaagaaccuguacgaccacgcccugaugagcaucaucuccacguuccaccucagcauccccaacuucaaccaguacgaggccauguccugcgacuucaacggcgggaagaucagcgugcaguacaaccugucccacagcuacgcgggcgacgccgccgagcacugcgggaccgucgccaacggcgugcugcagaccuucaugcggauggcguggggcgggcgcuacaucgcccucgacuccggcaaggggaacugggacugcaucaugaccagcuaccaguaccugaucauccagaacacgaccugggaggaccacugccaguucucccggcccagccccaucggcuaccugggccuccugucccagcgcacccgggacaucuacaucagccgccggcgccgggggaccuucacguggacccugagcgacuccgagggcaacgagacccccgggggcuacugccucacccgcuggaugcugaucgaggccgagcugaagugcuucgggaacacggccguggccaagugcaacgagaagcacgacgaggaguucugcgacaugcuccggcuguucgacuucugcaagcaggcgauccgccggcugaaggccccggcccagaugagcauccagcucaucaacaaggccgucaacgcccugaucaacgaccagcugaucaugaagaaccaccuccgcgacaucaugggcauccccuacugcaacuacuccaaguacugcuaccugaaccacaccagcuccggccggaccagccugcccaagugcugccucaucuccaacgggagcuaccugaacgagacccaguucuccgacgacaucgagcagcaggcggacaacaugaucacggagaugcugcagaaggaguacaucgagcgccagggcaagaccccgcucgggcugguggacaucuucaucuucagcaccuccuucuaccugaucagcaucuuccugcaccucaucaagauccccacccaccggcacaucgugggcaagcccugccccaagccgcaccgccugaaccacaugggggucugcuccugcggccuguacaagcaccccggcgugcccacgaaguggaagcggugaggacuagucccuguucccagagcccacuuuuuuuucuuuuuuugaaauaaaauagccugucuuucagaucucaaaggcucuuuucagagccaccaaaaaaaaaaaaaaaaaaaaaaaaaaaaaaaaaaaaaaaaaaaaaaaaaaaaaaaaaaaaaaaaagaauu

SEQ ID NO: 26919 - RNA, 1733 nt, Artificial Sequence
  mRNA product Design a-2 (hSL-A64-N5) comprising derived and/or modified sequence from LASV(803213;Clade II)__AAF86703__GPCmut4 (opt1)
aggagaguccgcucagccagguugcagaagcggcuuagcguguguccuaaucuucucucugcguguagguaggccugugccgcaaacaagcuuaccaugggccagaucaucaccuucuuccaggaggugccccacgucaucgaggaggugaugaacaucgugcugaucgcccucagccugcuggccauccucaaggggaucuacaacgucgcgaccugcggccuguucgggcugaucuccuuccuccugcugugcggccgcagcugcuccgugacguacaaggggguguacgagcuccagacccuggagcugaacauggccaaccucaacaugugcaugccgcugagcugcaccaagaacaacucccaccacuacaucauggucggcaacgagaccggccuggagcucacgcugaccaacaccagcaucaucaaccacaaguucugcaaccuguccgacgcccacaagaagaaccucuacgaccacgcccugaugagcaucaucuccaccuuccaccugagcauccccaacuucaaccaguacgaggccauguccugcgacuucaacgggggcaagaucagcgugcaguacaaccucucccacagcuucgcgguggacgccgccaaccacugcgggacgaucgccaacggcguccugcagaccuucaugcggauggcguggggcggguccuacaucgcccuggacagcggcaaggggaacugggacugcaucaugaccuccuaccaguaccucaucauccagaacaccacgugggaggaccacugccaguucagccgccccucccccaucggcuaccuggggcugcucagccagcggacccgcgacaucuacaucagccggcgccggcgcggcaccuucaccuggacgcuguccgacagcgagggcaacgaggcccccgggggcuacugccugacccgguggaugcucaucgaggccgagcugaagugcuucgggaacaccgccguggcgaagugcaacgagaagcacgacgaggaguucugcgacaugcugcgccucuucgacuucugcaagcaggccaucaagcggcugaagaccccggcccagauguccauccagcugaucaacaaggccgugaacgcccucaucaacgaccagcugaucaugaagaaccaccuccgcgacaucaugggcauccccuacugcaacuacagccgguacugcuaccugaaccacacggucaccgggaagaccucccugccccgcugcugccuggugagcaacggcuccuaccucaacgagacccacuucagcgacgacaucgagcagcaggcggacaacaugaucacggagaugcugcagaaggaguacauggaccggcagggcaagaccccgcuggggcucguggaccuguucgucuucuccaccagcuucuaccugaucuccaucuuccugcaccucgugaagauccccacccaccgccacaucgugggcaagcccugccccaagccgcaccggcugaaccacauggggaucugcagcugcggccuguacaagcaccccgggguccccgugaaguggaagcgcugaggacuagucccuguucccagagcccacuuuuuuuucuuuuuuugaaauaaaauagccugucuuucagaucucaaaggcucuuuucagagccaccaaaaaaaaaaaaaaaaaaaaaaaaaaaaaaaaaaaaaaaaaaaaaaaaaaaaaaaaaaaaaaaaagaauu

SEQ ID NO: 26920 - RNA, 1733 nt, Artificial Sequence
  mRNA product Design a-2 (hSL-A64-N5) comprising derived and/or modified sequence from LASV(GA391;Clade III)__CAA36645__GPCmut4 (opt1)
aggagaguccgcucagccagguugcagaagcggcuuagcguguguccuaaucuucucucugcguguagguaggccugugccgcaaacaagcuuaccaugggccagaucgugaccuucuuccaggaggucccccacgugaucgaggaggugaugaacaucguccugaucgcccucagcauccuggccauccugaaggggcucuacaacguggcgaccugcggccugaucgggcuggugacguuccuccugcuguccggccgcagcugcucccucaucuacaaggggaccuacgagcugcagacccuggagcucaacauggagacccugaacaugugcaugccgcugagcugcacgaagaacaacucccaccacuacauccgggucggcaacgagaccggccucgagcugacccugaccaacacgagcauccucaaccacaaguucugcaaccuguccgacgcccacaagcgcaaccuguacgaccacagccucauguccaucaucagcaccuuccaccuguccauccccaacuucaaccaguacgaggccaugagcugcgacuucaacgggggcaagaucaccgugcaguacaaccugucccacagcuucgccguggacgccgcggggcacugcggcacccucgccaacgggguccugcagacguucaugcggauggccuggggcggcuccuacaucgcccuggacagcgggcgcggcaacugggacugcaucaugaccuccuaccaguaccucaucauccagaacaccaccugggacgaccacugccaguucagccggcccucccccaucggguaccugggccugcucagccagcgcacgcgggacaucuacaucagccgccggcgccggggcaccuucaccuggacccuguccgacagcgaggggaacgagacgccgggcggguacugccugacccgcuggaugcucaucgaggcggagcugaagugcuucggcaacaccgccguggccaagugcaacgagaagcacgacgaggaguucugcgacaugcugcggcuguucgacuucugcaagcaggccauccgccggcugaagacccccgcccagauguccauccagcugaucaacaaggcggugaacgcccucaucaacgaccagcugaucaugaagaaccaccuccgcgacaucauggggauccccuacugcaacuacagccgguacugcuaccucaaccacacguccaccggcaagaccagccugccccgcugcugccugaucuccaacggcagcuaccucaacgagaccaaguucuccgacgacaucgagcagcaggccgacaacaugaucacggagaugcugcagaaggaguacaucgaccggcaggggaagaccccgcugggccuggucgaccucuucguguucagcaccuccuucuaccugaucagcaucuuccugcaccucgugaagauccccacccaccgccacaucgucgggaagcccugccccaagccgcaccggcugaaccacaugggcaucugcuccugcgggcuguacaagcagcccggcgugcccgugcgcuggaagcgcugaggacuagucccuguucccagagcccacuuuuuuuucuuuuuuugaaauaaaauagccugucuuucagaucucaaaggcucuuuucagagccaccaaaaaaaaaaaaaaaaaaaaaaaaaaaaaaaaaaaaaaaaaaaaaaaaaaaaaaaaaaaaaaaaagaauu

SEQ ID NO: 26921 - RNA, 1736 nt, Artificial Sequence
  mRNA product Design a-2 (hSL-A64-N5) comprising derived and/or modified sequence from LASV(AV;Clade V)__CCA30314__GPCmut4 (opt1)
aggagaguccgcucagccagguugcagaagcggcuuagcguguguccuaaucuucucucugcguguagguaggccugugccgcaaacaagcuuaccaugggccagaucgugaccuucuuccaggaggucccccacgugaucgaggaggugaugaacaucguccugaucgcccucagcauccuggccgugcugaaggggcucuacaacaucgcgaccugcggccugaucgggcugaucacguuccuccugcugugcggccgcuccugcagcuccaaccucuacaaggggguguacgagcugcagagccuggaccucaacauggagacccugaacaugugcaugccgcuguccugcaccaagaacaacagccaccacuacauccgggucggcaacgacaccggccucgagcugacgcugaccaacaccuccauccucaaccacaaguucugcaaccugagcgacgcccacaagaaggaccuguacgaccacgcccucauguccaucaucagcaccuuccaccuguccauccccaacuucaaccaguacgaggccaugagcugcgacuucaacgggggcaagaucuccgugcaguacaaccugagccacuccuacgccaucgacgcggccaaccacugcgggacgguggccaacggcauccuccagaccuucaugcgcauggccuggggcgggagcuacaucgcgcuggacuccggccgggggaacugggacugcaucaugaccagcuaccaguaccugaucauccagaacaccacgugggagaaccacugccaguucucccgccccagccccaucggcuaccucgggcugcugagccagcggacccgcgacaucuacaucucccggcgccggcgcggcaccuucaccuggacgcucagcgacuccgagggcaacgccacccccgggggcuacugccugacccgguggaugcugaucgaggccgagcucaagugcuucgggaacaccgccgucgccaagugcaacgagaagcacgacgaggaguucugcgacaugcugcgccuguucgacuucugcaagcaggcgaucagccggcucaaguccccggcccagaugagcauccagcugaucaacaaggccgugaacgcccugaucaacgaccagcucaucaugaagaaccaccuccgcgacaucaugggcauccccuacugcaacuacuccaaguacugcuaccugaaccacacgaucaccgggaagaccagccugcccaagugcugccugguguccaacggcagcuaccugaacgagacccacuucuccgacgacaucgagcagcaggccgacaacaugaucacggagaugcuccagaaggaguacauggagcggcagggcaagaccccgcuggggcuggucgaccuguucguguucagcaccuccuucuaccucaucagcaucuuccugcgccuggugaagauccccacccaccggcacaucgucggcaagcccugccccaagccgcaccgccucaaccacauggggaucugcuccugcggccuguacaagcagcccggggugcccgugcgguggaagcgcugaggacuagucccuguucccagagcccacuuuuuuuucuuuuuuugaaauaaaauagccugucuuucagaucucaaaggcucuuuucagagccaccaaaaaaaaaaaaaaaaaaaaaaaaaaaaaaaaaaaaaaaaaaaaaaaaaaaaaaaaaaaaaaaaagaauu

SEQ ID NO: 26922 - RNA, 1733 nt, Artificial Sequence
  mRNA product Design a-2 (hSL-A64-N5) comprising derived and/or modified sequence from LASV(Togo/2016/7082;Clade VI)__AMR44577__GPCmut4 (opt1)
aggagaguccgcucagccagguugcagaagcggcuuagcguguguccuaaucuucucucugcguguagguaggccugugccgcaaacaagcuuaccaugggccagaucaucaccuucuuccaggaggugccccacgucaucgaggaggugaugaacaucgugcugaucgcccucagccugcuggccauccucaagggggucuacaacguggcgaccugcggcaucaucgggcuggugacguuccuguuccucugcggccgcuccugcagccugaucuacaagggguccuacgagcugcagacccucgagcugaacauggagacccugaacaugugcaugccgcucagcugcaccaagaacuccagccaccacuacauccgggucggcaacgagacgggccuggagcugacccucaccaacaccuccaucaucaaccacaaguucugcaaccugagcgacgcccacaagcgcaaccuguacgaccacgcccucauguccauccugagcacguuccaccuguccauccccaacuucaaccaguacgaggccaugagcugcgacuucaacgggggcaagaucuccgugcaguacaaccucagccacgccuacgcgguggacgccgccgagcacugcgggaccgucgccaacggcgugcugcagaccuucaugcggauggcguggggcggguccuacaucgcccuggacagcggccgcgggaacugggacugcaucaugaccuccuaccaguaccucaucauccagaacacgaccugggaggaccacugccaguucagccggcccucccccaucggcuaccuggggcugcucagccagcgcacccgggacaucuacaucagccgccggcgccggggcaccuucacguggacccuguccgacagcgagggcaacgagacccccgggggcuacugccugacccgcuggaugcucaucgaggccgagcugaagugcuucgggaacacggccguggccaagugcaacgagaagcacgacgaggaguucugcgacaugcugcggcuguucgacuucugcaagcaggcgauccagcgccugaaguccccggcccagaugagcauccagcugaucaacaaggccgucaacgcccucaucaacgaccagcugaucaugaagaaccaccuccgggacaugaugggcauccccuacugcaacuacuccaaguacugcuaccucaaccacaccagcuccgggcgcaccagccugcccaagugcugccugguguccaacggcagcuaccucaacgagacccacuucuccgacgacaucgagcagcaggccgacaacaugaucacggagaugcugcagaaggaguacaucgaccggcagggcaagaccccgcuggggcucguggaccuguucgucuucagcaccuccuucuaccugaucagcaucuuccugcaccucaucaagauccccacccaccgccacaucgugggcaagcccugccccaagccgcaccggcugaaccacauggggaucugcuccugcggccuguacaagcagcccggggugcccacgcgcuggaagcggugaggacuagucccuguucccagagcccacuuuuuuuucuuuuuuugaaauaaaauagccugucuuucagaucucaaaggcucuuuucagagccaccaaaaaaaaaaaaaaaaaaaaaaaaaaaaaaaaaaaaaaaaaaaaaaaaaaaaaaaaaaaaaaaaagaauu

SEQ ID NO: 26923 - RNA, 1733 nt, Artificial Sequence
  mRNA product Design a-2 (hSL-A64-N5) comprising derived and/or modified sequence from LASV(KAK-428;Clade n.d. (VII))__ANH09740__GPCmut4 (opt1)
aggagaguccgcucagccagguugcagaagcggcuuagcguguguccuaaucuucucucugcguguagguaggccugugccgcaaacaagcuuaccaugggccagaucgugaccuucuuccaggaggucccccacgugaucgaggaggugaugaacaucguccugaucgcccucagccugcuggccauccucaaggggcuguacaacuucgcgaccugcggcgugaucgggcugaucacguuccuccugcugugcggccgcuccugcagcgccaccuacaaggggcaguacgagcuccagacccuggagcugaacauggagucccucaacaugugcaugccgcugagcugcaccaagaacaacucccaccacuacauccgggccggcaacaacacgggccuggagcucacccugaccaacaccagcaucaucucccacaaguucugcaaccugagcgacgcccacaagaagaaccucuacgaccacacgcugauguccaucaucaccaccuuccaccugagcauccccaacuucaaccaguacgaggccauguccugcgacuucaacgggggcaagaucagcauccaguacaaccucucccacagcuacgcgggggacgccgcccagcacugcggcaccguggccaacgggguccugcagacguucaugcgcauggcguggggcggcuccuaccuggcccucgacagcgggcggcgcggcugggacugcaucaucuccagcuaccaguaccugaucauccagaacaccaccugggacgaccacugccaguucucccggcccagccccaucggguaccugggcuucgugagccagaagacccgcgacaucuacaucucccggcgccggcgcggcacguucaccuggacccucagcgacuccgaggggcacgacaugccgggcggguacugccugacccgguggaugcugaucgaggccgaccucaagugcuucggcaacacggccguggccaagugcaacgagaagcacgacgaggaguucugcgacauguggcgccuguucgacuucugcaagcaggcgauccagcggcugaaggcccccgcccagaugaacauccagcucaucaacaaggccgucaacgcccugaucaacgaccagcugaugaugaagaaccaccuccgcgacaucauggggauccccuacugcaacuacagcaaguucugcuaccugaacaacaccaccaccggccggacgucccugccccgcugcugccucaucagcaacggcuccuaccugaacgagacccacuucagcgacgacaucgagcagcaggcggacaacaugaucaccgagaugcugcagaaggaguacauggaccggcaggggaagaccccgcucggccugguggaccuguucguguucuccacgagcuucuaccucaucaccaucuuccugcaccuggucaagauccccacccaccgccacaucguggggaagcccugccccaagccgcaccggcugaaccacaugggcaucugcuccugcgggcucuacaagcagcccggcgugcccguccgcuggaagcggugaggacuagucccuguucccagagcccacuuuuuuuucuuuuuuugaaauaaaauagccugucuuucagaucucaaaggcucuuuucagagccaccaaaaaaaaaaaaaaaaaaaaaaaaaaaaaaaaaaaaaaaaaaaaaaaaaaaaaaaaaaaaaaaaagaauu

SEQ ID NO: 26924 - RNA, 1733 nt, Artificial Sequence; identical to SEQ ID NO: 26918
  mRNA product Design a-2 (hSL-A64-N5) comprising derived and/or modified sequence from LASV(Pinneo-NIG-1969;Clade I)__AIT17836__GPCmut4 (opt1)

SEQ ID NO: 26925 - RNA, 1733 nt, Artificial Sequence
  mRNA product Design a-2 (hSL-A64-N5) comprising derived and/or modified sequence from LASV(ISTH0009-NIG-2011;Clade II)__AIT17404__GPCmut4 (opt1)
aggagaguccgcucagccagguugcagaagcggcuuagcguguguccuaaucuucucucugcguguagguaggccugugccgcaaacaagcuuaccaugggccagaucaucaccuucuuccaggaggugccccacgucaucgaggaggugaugaacaucgugcugaucgcccucagccugcuggccauccucaaggggaucuacaacgucgcgaccugcggccuguucgggcugguguccuuccuccugcugugcggccgcagcugcuccacgaccuacaaggggguguacgagcuccagacccuggagcuggacauggccagccucaacaugugcaugccgcuguccugcaccaagaacaacagccaccacuacaucauggucggcaacgagacgggccuggagcucacccugaccaacaccuccaucaucaaccacaaguucugcaaccugagcgacgcccacaagaagaaccucuacgaccacgcccugauguccaucaucagcacguuccaccuguccauccccaacuucaaccaguacgaggccaugagcugcgacuucaacgggggcaagaucuccgugcaguacaaccucagccacgcguacgccguggacgccgccaaccacugcgggaccaucgcgaacggcguccugcagaccuucaugcggauggccuggggcggguccuacaucgcccuggacagcggcaagggguccugggacugcaucaugaccagcuaccaguaccucaucauccagaacacgaccugggaggaccacugccaguucucccgccccagccccaucggcuaccuggggcugcucagccagcggacccgcgacaucuacaucucccggcgccggcgcggcaccuucacguggacccugagcgacuccgagggcaacgagacccccgggggcuacugccugacccgguggaugcucaucgaggccgagcugaagugcuucgggaacacggccguggcgaagugcaacgagaagcacgacgaggaguucugcgacaugcugcgccucuucgacuucugcaagcaggccauccggcgccugaagaccccggcccagaugagcauccagcugaucaacaaggccgugaacgcccucaucaacgaccagcugaucaugaagaaccaccuccgggacaucaugggcauccccuacugcaacuacuccaaguacugcuaccugaaccacaccgucaccgggaagacgagccugccccgcugcugccugguguccaacggcagcuaccucaacgagacccacuucuccgacgacaucgagcagcaggcggacaacaugaucaccgagcugcugcagaaggaguacauggaccggcagggcaagaccccgcucgggcugguggaccuguucgucuucagcacguccuucuaccugaucagcaucuuccuccaccugaucaagauccccacccaccgccacaucaccggcaagcccugccccaagccgcaccggcugaaccacauggggaucugcuccugcggccucuacaagcaccccggggugcccgugaaguggaagcgcugaggacuagucccuguucccagagcccacuuuuuuuucuuuuuuugaaauaaaauagccugucuuucagaucucaaaggcucuuuucagagccaccaaaaaaaaaaaaaaaaaaaaaaaaaaaaaaaaaaaaaaaaaaaaaaaaaaaaaaaaaaaaaaaaagaauu

SEQ ID NO: 26926 - RNA, 1733 nt, Artificial Sequence
  mRNA product Design a-2 (hSL-A64-N5) comprising derived and/or modified sequence from LASV(ISTH2010-NIG-2012;Clade II)__AIT17482__GPCmut4 (opt1)
aggagaguccgcucagccagguugcagaagcggcuuagcguguguccuaaucuucucucugcguguagguaggccugugccgcaaacaagcuuaccaugggccagaucaucaccuucuuccaggaggugccccacgucaucgaggaggugaugaacaucgugcugaucgcccucagccugcuggccauccucaaggggaucuacaacgucgcgaccugcggccuguucgggcugguguccuuccuccugcugugcggccgcagcugcuccacgaccuacaaggggguguacgagcuccagacccuggagcuggacauggccagccucaacaugugcaugccgcuguccugcaccaagaacaacagccaccacuacaucauggucggcaacgagacgggccuggagcucacccugaccaacaccuccaucaucaaccacaaguucugcaaccugagcgacgcccacaagaagaaccucuacgaccacgcccugauguccaucaucagcacguuccaccuguccauccccaacuucaaccaguacgaggccaugagcugcgacuucaacgggggcaagaucuccgugcaguacaaccucagccacgcguacgccguggacgccgccaaccacugcgggaccaucgcgaacggcguccugcagaccuucaugcggauggccuggggcggguccuacaucgcccuggacagcggcaagggguccugggacugcaucaugaccagcuaccaguaccucaucauccagaacaucacgugggaggaccacugccaguucucccgccccagccccaucggcuaccuggggcugcucagccagcggacccgcgacaucuacaucucccggcgccggcgcggcaccuucaccuggacgcugagcgacuccgagggcaacgagacccccgggggcuacugccugacccgguggaugcucaucgaggccgagcugaagugcuucgggaacaccgccguggcgaagugcaacgagaagcacgacgaggaguucugcgacaugcugcgccucuucgacuucugcaagcaggccauccggcgccugaagacgccggcccagaugagcauccagcugaucaacaaggccgugaacgcccucaucaacgaccagcugaucaugaagaaccaccuccgggacaucaugggcauccccuacugcaacuacuccaaguacugcuaccugaaccacaccgucaccgggaagaccagccugccccgcugcugccugguguccaacggcagcuaccucaacgagacgcacuucuccgacgacaucgagcagcaggcggacaacaugaucaccgagcugcugcagaaggaguacaucgaccggcagggcaagaccccgcucgggcugguggaccuguucgucuucagcaccuccuucuaccugaucagcaucuuccuccaccuggugaagauccccacgcaccgccacguggucggcaagcccugccccaagccgcaccggcugaaccacauggggaucugcuccugcggccucuacaagcaccccggggugcccgugaaguggaagcgcugaggacuagucccuguucccagagcccacuuuuuuuucuuuuuuugaaauaaaauagccugucuuucagaucucaaaggcucuuuucagagccaccaaaaaaaaaaaaaaaaaaaaaaaaaaaaaaaaaaaaaaaaaaaaaaaaaaaaaaaaaaaaaaaaagaauu

SEQ ID NO: 26927 - RNA, 1733 nt, Artificial Sequence
  mRNA product Design a-2 (hSL-A64-N5) comprising derived and/or modified sequence from LASV(Lassa virus/H.sapiens-wt/NGA/2015/ISTH_0543;Clade II)__AVO03639__GPCmut4 (opt1)
aggagaguccgcucagccagguugcagaagcggcuuagcguguguccuaaucuucucucugcguguagguaggccugugccgcaaacaagcuuaccaugggccagaucaucaccuucuuccaggaggugccccacgucaucgaggaggugaugaacaucgugcugaucgcccucagccugcuggccauccucaaggggaucuacaacgucgcgaccugcggccuguucgggcugguguccuuccuccugcugugcggccgcagcugcuccacgaccuacaaggggguguacgagcuccagacccuggagcuggacauggccaaccucaacaugugcaugccgcugagcugcaccaagaacaacucccaccacuacaucauggucggcaacgagacgggccuggagcucacccugaccaacaccagcaucaucaaccacaaguucugcaaccuguccgacgcccacaagaagaaccucuacgaccacgcccugaugagcaucaucuccacguuccaccugagcauccccaacuucaaccaguacgaggccauguccugcgacuucaacgggggcaagaucagcgugcaguacaaccucucccacaccuacgcgguggacgccgccaaccacugcgggaccaucgccaacggcguccugcagaccuucaugcggauggcguggggcgggagcuacaucgcccuggacuccggcaaggggagcugggacugcaucaugacguccuaccaguaccucgugauccagaacaccaccugggaggaccacugccaguucagccgccccucccccaucggcuaccuggggcugcucagccagcggacccgcgacaucuacaucagccggcgccggcgcggcacguucaccuggacccuguccgacagcgagggcaacgagacccccgggggcuacugccugacgcgguggaugcucaucgaggccgagcugaagugcuucgggaacaccgccguggccaagugcaacgagaagcacgacgaggaguucugcgacaugcugcgccucuucgacuucugcaagcaggcgauccggcgccugaagaccccggcccagauguccauccagcugaucaacaaggccgucaacgcccucaucaacgaccagcugaucaugaagaaccaccuccgggacaucaugggcauccccuacugcaacuacagcaaguacugcuaccugaaccacaccgugacggggaagaccucccugccccgcugcugccuggugagcaacggcuccuaccucaacgagacccacuucagcgacgacaucgagcagcaggccgacaacaugaucaccgagcugcugcagaaggaguacaucgaccggcagggcaagacgccgcucgggcuggucgaccuguucguguucuccaccagcuucuaccugaucuccaucuuccuccaccuggugaagauccccacccaccgccacaucaccggcaagcccugccccaagccgcaccggcugaaccacauggggaucugcagcugcggccucuacaagcaccccgggguccccgugaaguggaagcgcugaggacuagucccuguucccagagcccacuuuuuuuucuuuuuuugaaauaaaauagccugucuuucagaucucaaaggcucuuuucagagccaccaaaaaaaaaaaaaaaaaaaaaaaaaaaaaaaaaaaaaaaaaaaaaaaaaaaaaaaaaaaaaaaaagaauu

SEQ ID NO: 26928 - RNA, 1733 nt, Artificial Sequence
  mRNA product Design a-2 (hSL-A64-N5) comprising derived and/or modified sequence from LASV(Lassa virus/H.sapiens-wt/NGA/2016/ISTH_0009;Clade II)__AVO03571__GPCmut4 (opt1)
aggagaguccgcucagccagguugcagaagcggcuuagcguguguccuaaucuucucucugcguguagguaggccugugccgcaaacaagcuuaccaugggccagaucaucaccuucuuccaggaggugccccacgucaucgaggaggugaugaacaucgugcugaucgcccucagccugcuggccauccucaaggggaucuacaacgucgcgaccugcggccugcuggggcucguguccuuccugcugcucugcggccgcagcugcuccacgaccuacaaggggguguacgagcugcagacccuggagcucgacauggccagccugaacaugugcaugccgcuguccugcaccaagaacaacagccaccacuacaucauggucggcaacgagacgggccucgagcugacccugaccaacaccuccaucaucaaccacaaguucugcaaccucagcgacgcccacaagaagaaccuguacgaccacgcccugauguccaucaucagcacguuccaccucuccauccccaacuucaaccaguacgaggccaugagcugcgacuucaacgggggccggaucuccgugcaguacaaccugagccacuccuacgcgguggacgccgccaaccacugcgggaccaucgccaacggcguccugcagaccuucaugcgcauggcguggggcgggagcuacaucgcccucgacuccggcaaggggagcugggacugcaucaugaccuccuaccaguaccugaucauccagaacacgaccugggaggaccacugccaguucagccggcccagccccaucggcuaccuggggcuccugucccagcgcacccgggacaucuacaucagccgccggcgccggggcaccuucacguggacccuguccgacagcgagggcaacgagacccccgggggcuacugccucacccgcuggaugcugaucgaggccgagcugaagugcuucgggaacacggccguggccaagugcaacgagaagcacgacgaggaguucugcgacaugcuccggcuguucgacuucugcaagcaggcgauccgccggcugaagaccccggcccagauguccauccagcucaucaacaaggccgugaacgcccugaucaacgaccagcugaucaugaagaaccaccuccgcgacaucaugggcauccccuacugcaacuacagcaaguacugcuaccugaaccacaccgucaccgggaagacgucccugccccggugcugccucgugagcaacggcuccuaccugaacgagacccacuucagcgacgacaucgagcagcaggccgacaacaugaucaccgagcugcuccagaaggaguacaucgaccgccagggcaagaccccgcuggggcugguggaccuguucgucuucuccacgagcuucuaccucaucuccaucuuccugcaccuggugaagauccccacccaccggcacaucaccggcaagcccugccccaagccgcaccgccucaaccacauggggaucugcagcugcggccuguacaaccaccccggggugcccgucaaguggaagcggugaggacuagucccuguucccagagcccacuuuuuuuucuuuuuuugaaauaaaauagccugucuuucagaucucaaaggcucuuuucagagccaccaaaaaaaaaaaaaaaaaaaaaaaaaaaaaaaaaaaaaaaaaaaaaaaaaaaaaaaaaaaaaaaaagaauu

SEQ ID NO: 26929 - RNA, 1733 nt, Artificial Sequence
  mRNA product Design a-2 (hSL-A64-N5) comprising derived and/or modified sequence from LASV(Lassa virus/H.sapiens-wt/NGA/2016/ISTH_0017;Clade II)__AVO03567__GPCmut4 (opt1)
aggagaguccgcucagccagguugcagaagcggcuuagcguguguccuaaucuucucucugcguguagguaggccugugccgcaaacaagcuuaccaugggccagaucaucaccuucuuccaggaggugccccacgucaucgaggaggugaugaacaucgugcugaucgcccucagccugcuggccauccucaaggggaucuacaacgucgcgaccugcggccuguucgggcugguguccuuccuccugcugugcggccgcagcugcuccacgaccuacaaggggguguacgagcuccagacccuggagcuggacauggccagccucaacaugugcaugccgcuguccugcaccaagaacaacagccaccacuacaucauggucggcaacgagacgggccuggagcucacccugaccaacaccuccaucaucaaccacaaguucugcaaccugagcgacgcccacaagaagaaccucuacgaccacgcccugauguccaucaucagcacguuccaccuguccauccccaacuucaaccaguacgaggccaugagcugcgacuucaacgggggcaagaucuccgugcaguacaaccucagccacaccuacgcgaucgacgccgccaaccacugcgggaccaucgccaacggcgugcugcagaccuucaugcggauggcguggggcggguccuacaucgcccuggacagcggcaagggguccugggacugcaucaugacgagcuaccaguaccucaucauccagaacaccaccugggaggaccacugccaguucucccgccccagccccaucggcuaccuggggcugcucagccagcggacccgcgacaucuacaucucccggcgccggcgcggcacguucaccuggacccugagcgacuccgagggcaacgagacccccgggggcuacugccugacgcgguggaugcucaucgaggccgagcugaagugcuucgggaacaccgccgucgccaagugcaacgagaagcacgacgaggaguucugcgacaugcugcgccucuucgacuucugcaagcaggcgauccggcgccugaagaccccggcccagaugagcauccagcugaucaacaaggccgugaacgcccucaucaacgaccagcugaucaugaagaaccaccuccgggacaucaugggcauccccuacugcaacuacuccaaguacugcuaccugaaccacaccgugacggggaagaccagccugccccgcugcugccuggucuccaacggcagcuaccucaacgagacccacuucuccgacgacaucgagcagcaggccgacaacaugaucaccgagcugcugcagaaggaguacauggaccggcagggcaagacgccgcucgggcugguggaccuguucguguucagcaccuccuucuaccugaucagcaucuuccuccaccugguccgcauccccacccaccggcacgugaucggcaagcccugccccaagccgcaccgccugaaccacauggggaucugcuccugcggccucuacaagcaccccggggugcccgucaaguggaagcggugaggacuagucccuguucccagagcccacuuuuuuuucuuuuuuugaaauaaaauagccugucuuucagaucucaaaggcucuuuucagagccaccaaaaaaaaaaaaaaaaaaaaaaaaaaaaaaaaaaaaaaaaaaaaaaaaaaaaaaaaaaaaaaaaagaauu

SEQ ID NO: 26930 - RNA, 1733 nt, Artificial Sequence
  mRNA product Design a-2 (hSL-A64-N5) comprising derived and/or modified sequence from LASV(Lassa virus/H.sapiens-wt/NGA/2018/ISTH_0959;Clade II)__AVV65099__GPCmut4 (opt1)
aggagaguccgcucagccagguugcagaagcggcuuagcguguguccuaaucuucucucugcguguagguaggccugugccgcaaacaagcuuaccaugggccagaucaucaccuucuuccaggaggugccccacgucaucgaggaggugaugaacaucgugcugaucgcccucagccugcuggccauccucaaggggaucuacaacgucgugaccugcggccuguucgggcugguguccuuccuccugcugugcggccgcagcugcuccacgaccuacaagggggucuacgagcuccagacccuggagcuggacauggcgagccucaacaugugcaugccgcuguccugcaccaagaacaacagccaccacuacaucauggugggcaacgagacgggccuggagcucacccugaccaacaccuccaucaucaaccacaaguucugcaaccugagcgacgcccacaagaagaaccucuacgaccacgcccugauguccaucaucagcacguuccaccuguccauccccaacuucaaccaguacgaggccaugagcugcgacuucaacgggggcaagaucuccgugcaguacaaccucagccacgccuacgcgaucgacgccgccaaccacugcgggaccaucgccaacggcguccugcagaccuucaugcggauggcguggggcggguccuacaucgcccuggacagcggcaagggguccugggacugcaucaugaccagcuaccaguaccucaucauccagaacacgaccugggaggaccacugccaguucucccgccccagccccaucggcuaccuggggcugcucagccagcggacccgcgacaucuacaucucccggcgccggcgcggcaccuucacguggacccugagcgacuccgagggcaacgagacccccgggggcuacugccugacccgguggaugcucaucgaggccgagcugaagugcuucgggaacacggccguggccaagugcaacgagaagcacgacgaggaguucugcgacaugcugcgccucuucgacuucugcaagcaggcgauccggcgccugaagaccccggcccagaugagcauccagcugaucaacaaggccgugaacgcccucaucaacgaccagcugaucaugaagaaccaccuccgggacaucaugggcauccccuacugcaacuacuccaaguacugcuaccugaaccacaccgucaccgggaagacgagccugccccgcugcugccugguguccaacggcagcuaccucaacgagacccacuucuccgacgacaucgagcagcaggccgacaacaugaucaccgagcugcugcagaaggaguacaucgaccggcagggcaagaccccgcucgggcugguggaccuguucgucuucagcacguccuucuaccugaucagcaucuuccuccaccuggugaagauccccacccaccgccacgugaucggcaagcccugccccaagccgcaccggcugaaccacauggggaucugcuccugcggccucuacaagcaccccgggguccccgugaaguggaagcgcugaggacuagucccuguucccagagcccacuuuuuuuucuuuuuuugaaauaaaauagccugucuuucagaucucaaaggcucuuuucagagccaccaaaaaaaaaaaaaaaaaaaaaaaaaaaaaaaaaaaaaaaaaaaaaaaaaaaaaaaaaaaaaaaaagaauu

SEQ ID NO: 26931 - RNA, 1733 nt, Artificial Sequence
  mRNA product Design a-2 (hSL-A64-N5) comprising derived and/or modified sequence from LASV(LASV003-NIG-2008;Clade II)__AIT17580__GPCmut4 (opt1)
aggagaguccgcucagccagguugcagaagcggcuuagcguguguccuaaucuucucucugcguguagguaggccugugccgcaaacaagcuuaccaugggccagaucaucaccuucuuccaggaggugccccacgucaucgaggaggugaugaacaucgugcugaucgcccucagccugcuggccauccucaaggggaucuacaacgucgcgaccugcggccuguucgggcugguguccuuccuccugcugugcggccgcagcugcuccacgaccuacaaggggguguacgagcuccagacccuggagcuggacauggccagccucaacaugugcaugccgcuguccugcaccaagaacaacagccaccacuacaucauggucggcaacgagacgggccuggagcucacccugaccaacaccuccaucaucaaccacaaguucugcaaccugagcgacgcccacaagaagaaccucuacgaccacgcccugauguccaucaucagcacguuccaccuguccauccccaacuucaaccaguacgaggccaugagcugcgacuucaacgggggcaagaucuccgugcaguacaaccucagccacaccuacgcgguggacgccgccaaccacugcgggaccaucgccaacggcguccugcagaccuucaugcggauggcguggggcggguccuacaucgcccuggacagcggcaagggguccugggacugcaucaugacgagcuaccaguaccucaucauccagaacaccaccugggaggaccacugccaguucucccgccccagccccaucggcuaccuggggcugcucagccagcggacccgcgacaucuacaucucccggcgccggcgcggcacguucaccuggacccugagcgacuccgagagcaacgagaccccgggcggguacugccugacgcgguggaugcucaucgaggccgagcugaagugcuucggcaacaccgccguggccaagugcaacgagaagcacgacgaggaguucugcgacaugcugcgccucuucgacuucugcaagcaggcgauccggcgccugaaggcccccgcccagauguccauccagcugaucaacaaggccgugaacgcccucaucaacgaccagcugaucaugaagaaccaccuccgggacaucauggggauccccuacugcaacuacagcaaguacugcuaccugaaccacaccgucaccggccgcacgucccugccccggugcugccuggugagcaacggguccuaccucaacgagacccacuucagcgacgacaucgagcagcaggcggacaacaugaucaccgagcugcugcagaaggaguacauggaccgccagggcaagaccccgcucggccugguggaccuguucgucuucuccacgagcuucuaccugaucuccaucuuccuccaccuggugaagauccccacccaccggcacgugaucgggaagcccugccccaagccgcaccgccugaaccacaugggcaucugcagcugcgggcucuacaagcaccccggcguccccgugaaguggaagcggugaggacuagucccuguucccagagcccacuuuuuuuucuuuuuuugaaauaaaauagccugucuuucagaucucaaaggcucuuuucagagccaccaaaaaaaaaaaaaaaaaaaaaaaaaaaaaaaaaaaaaaaaaaaaaaaaaaaaaaaaaaaaaaaaagaauu

SEQ ID NO: 26932 - RNA, 1733 nt, Artificial Sequence
  mRNA product Design a-2 (hSL-A64-N5) comprising derived and/or modified sequence from LASV(LASV035-NIG-2009;Clade II)__AIT17588__GPCmut4 (opt1)
aggagaguccgcucagccagguugcagaagcggcuuagcguguguccuaaucuucucucugcguguagguaggccugugccgcaaacaagcuuaccaugggccagaucaucaccuucuuccaggaggugccccacgucaucgaggaggugaugaacaucgugcugaucgcccucagccugcuggccauccucaaggggaucuacaacgucgcgaccugcggccuguucgggcugguguccuuccuccugcugugcggccgcagcugcuccacgaccuacaaggggguguacgagcuccagacccuggagcuggacauggccagccucaacaugugcaugccgcuguccugcaccaagaacaacagccaccacuacaucauggucggcaacgagacgggccuggagcucacccugaccaacaccuccaucaucaaccacaaguucugcaaccugagcgacgcccacaagaagaaccucuacgaccacgcccugauguccaucaucagcacguuccaccuguccauccccaacuucaaccaguacgaggccaugagcugcgacuucaacgggggcaagaucuccgugcaguacaaccucagccacgcguacgccguggacgccgccaaccacugcgggaccaucgcgaacggcguccugcagaccuucaugcggauggccuggggcggguccuacaucgcccuggacagcggcaagggguccugggacugcaucaugaccagcuaccaguaccucaucauccagaacacgaccugggaggaccacugccaguucucccgccccagccccaucggcuaccuggggcugcucagccagcggacccgcgacaucuacaucucccggcgccggcgcggcaccuucacguggacccugagcgacuccgagggcaacgagacccccgggggcuacugccugacccgguggaugcucaucgaggccgagcugaagugcuucgggaacacggccguggcgaagugcaacgagaagcacgacgaggaguucugcgacaugcugcgccucuucgacuucugcaagcaggccauccggcgccugaaggccccggcccagaugagcauccagcugaucaacaaggccgugaacgcgcucaucaacgaccagcugaucaugaagaaccaccuccgggacaucaugggcauccccuacugcaacuacuccaaguacugcuaccugaaccacaccgucaccgggaagaccagccugccccgcugcugccugguguccaacggcagcuaccucaacgagacgcacuucuccgacgacaucgagcagcaggccgacaacaugaucaccgagcugcugcagaaggaguacaucgaccggcagggcaagaccccgcucgggcugguggaccuguucgucuucagcaccuccuucuaccugaucagcaucuuccuccaccuggugaagauccccacgcaccgccacgugaucggcaagcccugccccaagccgcaccggcugaaccacauggggaucugcuccugcggccucuacaagcaccccgggguccccgugaaguggaagcgcugaggacuagucccuguucccagagcccacuuuuuuuucuuuuuuugaaauaaaauagccugucuuucagaucucaaaggcucuuuucagagccaccaaaaaaaaaaaaaaaaaaaaaaaaaaaaaaaaaaaaaaaaaaaaaaaaaaaaaaaaaaaaaaaaagaauu

SEQ ID NO: 26933 - RNA, 1733 nt, Artificial Sequence
  mRNA product Design a-2 (hSL-A64-N5) comprising derived and/or modified sequence from LASV(LASV1000-NIG-2009;Clade II)__AIT17782__GPCmut4 (opt1)
aggagaguccgcucagccagguugcagaagcggcuuagcguguguccuaaucuucucucugcguguagguaggccugugccgcaaacaagcuuaccaugggccagaucaucaccuucuuccaggaggugccccacgucaucgaggaggugaugaacaucgugcugaucgcccucagccugcuggccauccucaaggggaucuacaacgucgcgaccugcggccuguucgggcugguguccuuccuccugcugugcggccgcagcugcuccacgaccuacaaggggguguacgagcuccagacccuggagcuggacauggccagccucaacaugugcaugccgcuguccugcaccaagaacaacagccaccacuacaucauggucggcaacgagacgggccuggagcucacccugaccaacaccuccaucaucaaccacaaguucugcaaccugagcgacgcccacaagaagaaccucuacgaccacgcccugauguccaucaucagcacguuccaccuguccauccccaacuucaaccaguacgaggccaugagcugcgacuucaacgggggcaagaucuccgugcaguacaaccucagccacaccuacgcgguggacgccgccaaccacugcgggaccaucgccaacggcguccugcagaccuucaugcggauggcguggggcggguccuacaucgcccuggacagcggcaagggguccugggacugcaucaugacgagcuaccaguaccucaucauccagaacaccaccugggaggaccacugccaguucucccgccccagccccaucggcuaccuggggcugcucagccagcggacccgcgacaucuacaucucccggcgccggcgcggcacguucaccuggacccugagcgacuccgagggcaacgagacccccgggggcuacugccugacgcgguggaugcucaucgaggccgagcugaagugcuucgggaacaccgccguggccaagugcaacgagaagcacgacgaggaguucugcgacaugcugcgccucuucgacuucugcaagcaggcgaucaagcggcugaagaccccggcccagaugagcauccagcugaucaacaaggccgugaacgcccucaucaacgaccagcugaucaugaagaaccaccuccgcgacaucaugggcauccccuacugcaacuacuccaaguacugcuaccugaaccacaccgucacggggaagaccagccugccccggugcugccugguguccaacggcagcuaccucaacgagacccacuucuccgacgacaucgagcagcaggccgacaacaugaucaccgagcugcugcagaaggaguacaucgaccgccagggcaagacgccgcucgggcugguggaccuguucgucuucagcaccuccuucuaccugaucagcaucuuccuccaccuggugaagauccccacccaccggcacguggucggcaagcccugccccaagccgcaccgccugaaccacauggggaucugcuccugcggccucuacaagcaccccggggugcccgugaaguggaagcggugaggacuagucccuguucccagagcccacuuuuuuuucuuuuuuugaaauaaaauagccugucuuucagaucucaaaggcucuuuucagagccaccaaaaaaaaaaaaaaaaaaaaaaaaaaaaaaaaaaaaaaaaaaaaaaaaaaaaaaaaaaaaaaaaagaauu

SEQ ID NO: 26934 - RNA, 1733 nt, Artificial Sequence
  mRNA product Design a-2 (hSL-A64-N5) comprising derived and/or modified sequence from LASV(LASV221-NIG-2010;Clade II)__AIT17624__GPCmut4 (opt1)
aggagaguccgcucagccagguugcagaagcggcuuagcguguguccuaaucuucucucugcguguagguaggccugugccgcaaacaagcuuaccaugggccagaucaucaccuucuuccaggaggugccccacgucaucgaggaggugaugaacaucgugcugaucgcccucagccugcuggccauccucaaggggaucuacaacgucgcgaccugcggccuguucgggcugguguccuuccuccugcugugcggccgcagcugcuccacgaccuacaaggggguguacgagcuccagacccuggagcuggacauggccagccucaacaugugcaugccgcuguccugcaccaagaacaacagccaccacuacaucauggucggcaacgagacgggccuggagcucacccugaccaacaccuccaucaucaaccacaaguucugcaaccugagcgacgcccacaagaagaaccucuacgaccacgcccugauguccaucaucagcacguuccaccuguccauccccaacuucaaccaguacgaggccaugagcugcgacuucaacgggggcaagaucuccgugcaguacaaccucagccacaccuacgcgaucgacgccgccaaccacugcgggaccaucgccaacggcgugcugcagaccuucaugcggauggcguggggcggguccuacaucgcccuggacagcggcaagggguccugggacugcaucaugacgagcuaccaguaccucaucauccagaacaccaccugggaggaccacugccaguucucccgccccagccccaucggcuaccuggggcugcucagccagcggacccgcgacaucuacaucucccggcgccggcgcggcacguucaccuggacccugagcgacuccgagggcaacgagacccccgggggcuacugccugacgcgguggaugcucaucgaggccgagcugaagugcuucgggaacaccgccgucgccaagugcaacgagaagcacgacgaggaguucugcgacaugcugcgccucuucgacuucugcaagcaggcgauccggcgccugaagaccccggcccagaugagcauccagcugaucaacaaggccgugaacgcccucaucaacgaccagcugaucaugaagaaccaccuccgggacaucaugggcauccccuacugcaacuacuccaaguacugcuaccugaaccacaccgugacggggaagaccagccugccccgcugcugccuggucuccaacggcagcuaccucaacgagacccacuucuccgacgacaucgagcagcaggccgacaacaugaucaccgagaugcugcagaaggaguacauggaccggcagggcaagacgccgcuggggcucguggaccuguucguguucagcaccuccuucuaccugaucagcaucuuccugcaccucgucaagauccccacccaccgccacgugaucggcaagcccugccccaagccgcaccggcugaaccacauggggaucugcuccugcggccuguacaagcaccccggggugcccgucaaguggaagcgcugaggacuagucccuguucccagagcccacuuuuuuuucuuuuuuugaaauaaaauagccugucuuucagaucucaaaggcucuuuucagagccaccaaaaaaaaaaaaaaaaaaaaaaaaaaaaaaaaaaaaaaaaaaaaaaaaaaaaaaaaaaaaaaaaagaauu

SEQ ID NO: 26935 - RNA, 1733 nt, Artificial Sequence
  mRNA product Design a-2 (hSL-A64-N5) comprising derived and/or modified sequence from LASV(LASV237-NIG-2010;Clade II)__AIT17638__GPCmut4 (opt1)
aggagaguccgcucagccagguugcagaagcggcuuagcguguguccuaaucuucucucugcguguagguaggccugugccgcaaacaagcuuaccaugggccagaucaucaccuucuuccaggaggugccccacgucaucgaggaggugaugaacaucgugcugaucgcccucagccugcuggccauccucaaggggaucuacaacgucgcgaccugcggccuguucgggcugguguccuuccuccugcugugcggccgcagcugcuccacgaccuacaaggggguguacgagcuccagacccuggagcuggacauggccagccucaacaugugcaugccgcuguccugcaccaagaacaacagccaccacuacaucauggucggcaacgagacgggccuggagcucacccugaccaacaccuccaucaucaaccacaaguucugcaaccugagcgacgcccacaagaaggaccucuacgaccacgcccugauguccaucaucagcacguuccaccuguccauccccaacuucaaccaguacgaggccaugagcugcgacuucaacgggggcaagaucuccgugcaguacaaccucagccacaccuacgcgguggacgccgccaaccacugcgggaccaucgccaacggcguccugcagaccuucaugcggauggcguggggcggguccuacaucgcccuggacagcggcaagggguccugggacugcaucaugacgagcuaccaguaccucaucauccagaacaccaccugggaggaccacugccaguucucccgccccagccccaucggcuaccuggggcugcucagccagcggacccgcgacaucuacaucucccggcgccggcgcggcacguucaccuggacccugagcgacuccgagggcaacgagacccccgggggcuacugccugacgcgguggaugcucaucgaggccgagcugaagugcuucgggaacaccgccguggccaagugcaacgagaagcacgacgaggaguucugcgacaugcugcgccucuucgacuucugcaagcaggcgauccggcgccugaagaccccggcccagaugagcauccagcugaucaacaaggccgugaacgcccucaucaacgaccagcugaucaugaagaaccaccuccgggacaucaugggcauccccuacugcaacuacuccaaguacugcuaccugaaccacaccgucacggggaagaccagccugccccgcugcugccugguguccaacggcagcuaccucaacgagacccacuucuccgacgacaucgagcagcaggccgacaacaugaucaccgagcugcugcagaaggaguacauggaccggcagggcaagacgccgcucgggcugguggaccuguucgucuucagcaccuccuucuaccugaucagcaucuuccuccaccugaucaagauccccacccaccgccacaucaccggcaagcccugccccaagccgcaccggcugaaccacauggggaucugcuccugcggccucuacaagcaccccggggugcccgugaaguggaagcgcugaggacuagucccuguucccagagcccacuuuuuuuucuuuuuuugaaauaaaauagccugucuuucagaucucaaaggcucuuuucagagccaccaaaaaaaaaaaaaaaaaaaaaaaaaaaaaaaaaaaaaaaaaaaaaaaaaaaaaaaaaaaaaaaaagaauu

SEQ ID NO: 26936 - RNA, 1733 nt, Artificial Sequence
  mRNA product Design a-2 (hSL-A64-N5) comprising derived and/or modified sequence from LASV(LASV253-NIG-2011;Clade II)__AIT17670__GPCmut4 (opt1)
aggagaguccgcucagccagguugcagaagcggcuuagcguguguccuaaucuucucucugcguguagguaggccugugccgcaaacaagcuuaccaugggccagaucaucaccuucuuccaggaggugccccacgucaucgaggaggugaugaacaucgugcugaucgcccucagccugcuggccauccucaaggggaucuacaacgucgcgaccugcggccuguucgggcugguguccuuccuccugcugugcggccgcagcugcuccacgaccuacaaggggguguacgagcuccagacccuggagcuggacauggccagccucaacaugugcaugccgcuguccugcaccaagaacaacagccaccacuacaucauggucggcaacgagacgggccuggagcucacccugaccaacaccuccaucaucaaccacaaguucugcaaccugagcgacgcccacaagaagaaccucuacgaccacgcccugauguccaucaucagcacguuccaccuguccauccccaacuucaaccaguacgaggccaugagcugcgacuucaacgggggcaagaucuccgugcaguacaaccucagccacaccuacgcgguggacgccgccaaccacugcgggaccaucgccaacggcguccugcagaccuucaugcggauggcguggggcggguccuacaucgcccuggacagcggcaagggguccugggacugcaucaugacgagcuaccaguaccucaucauccagaacaccaccugggaggaccacugccaguucucccgccccagccccaucggcuaccuggggcugcucagccagcggacccgcgacaucuacaucucccggcgccggcgcggcacguucaccuggacccugagcgacuccgagggcaacgagacccccgggggcuacugccugacgcgguggaugcucaucgaggccgagcugaagugcuucgggaacaccgccguggccaagugcaacgagaagcacgacgaggaguucugcgacaugcugcgccucuucgacuucugcaagcaggcgauccggcgccugaaggccccggcccagaugagcauccagcugaucaacaaggccgugaacgcccucaucaacgaccagcugaucaugaagaaccaccuccgggacaucaugggcauccccuacugcaacuacuccaaguacugcuaccugaaccacaccgucaccgggcgcacgagccugccccggugcugccugguguccaacggcagcuaccucaacgagacccacuucuccgacgacaucgagcagcaggcggacaacaugaucaccgagcugcugcagaaggaguacaucgaccgccagggcaagaccccgcucgggcugguggaccuguucgucuucagcacguccuucuaccugaucagcaucuuccuccaccuggugaagauccccacccaccggcacaucaucggcaagcccugccccaagccgcaccgccugaaccacauggggaucugcuccugcggccucuacaagcaccccggggugcccgucaaguggaagcggugaggacuagucccuguucccagagcccacuuuuuuuucuuuuuuugaaauaaaauagccugucuuucagaucucaaaggcucuuuucagagccaccaaaaaaaaaaaaaaaaaaaaaaaaaaaaaaaaaaaaaaaaaaaaaaaaaaaaaaaaaaaaaaaaagaauu

SEQ ID NO: 26937 - RNA, 1733 nt, Artificial Sequence
  mRNA product Design a-2 (hSL-A64-N5) comprising derived and/or modified sequence from LASV(LASV254-NIG-2011;Clade II)__AIT17674__GPCmut4 (opt1)
aggagaguccgcucagccagguugcagaagcggcuuagcguguguccuaaucuucucucugcguguagguaggccugugccgcaaacaagcuuaccaugggccagaucaucaccuucuuccaggaggugccccacgucaucgaggaggugaugaacaucgugcugaucgcccucagccugcuggccauccucaaggggaucuacaacgucgcgaccugcggccuguucgggcugguguccuuccuccugcugugcggccgcagcugcuccacgaccuacaaggggguguacgagcuccagacccuggagcuggacaugaccaaccucaacaugugcaugccgcugagcugcacgaagaacaacucccaccacuacaucauggucggcaacgagaccggccuggagcucacccugaccaacacgagcaucaucaaccacaaguucugcaaccuguccgacgcccacaagaagaaccucuacaaccacgcccugaugagcaucaucuccaccuuccaccugagcauccccaacuucaaccaguacgaggccauguccugcgacuucaacgggggcaagaucagcgugcaguacaaccucucccacagcuacgccguggacgcggccaaccacugcgggaccaucgccaacggcguccugcagaccuucaugcggauggccuggggcggguccuacaucgcgcuggacagcggcaaggggaacugggacugcaucaugacguccuaccaguaccucaucauccagaacaccaccugggaggaccacugccaguucagccgccccucccccaucggcuaccuggggcugcucagccagcggacccgcgacaucuacaucagccggcgccggcgcggcacguucaccuggacccuguccgacagcgagggcaacgagacccccgggggcuacugccugacgcgguggaugcucaucgaggccgagcugaagugcuucgggaacaccgccguggccaagugcaacgagaagcacgacgaggaguucugcgacaugcugcgccucuucgacuucugcaagcaggccauccggcgccugaagaccccggcgcaggccaacauccagcugaucaacaaggccgugaacgcccucaucaacgaccagcugaucaugaagaaccaccuccgggacaucaugggcauccccuacugcaacuacuccaaguacugcuaccugaaccacaccgucacggggaagaccagccugccccgcugcugccugguguccaacggcagcuaccucaacgagacccacuucuccgacgacaucgagcagcaggccgacaacaugaucaccgagcugcugcagaaggaguacauggaccggcagggcaagacgccgcucgggcugguggaccuguucgucuucagcaccuccuucuaccugaucagcaucuuccuccaccuggugaagauccccacccaccgccacgugaucggcaagcccugccccaagccgcaccggcugaaccacauggggaucugcuccugcggccucuacaagcaccccgggguccccgugaaguggaagcgcugaggacuagucccuguucccagagcccacuuuuuuuucuuuuuuugaaauaaaauagccugucuuucagaucucaaaggcucuuuucagagccaccaaaaaaaaaaaaaaaaaaaaaaaaaaaaaaaaaaaaaaaaaaaaaaaaaaaaaaaaaaaaaaaaagaauu

SEQ ID NO: 26938 - RNA, 1733 nt, Artificial Sequence
  mRNA product Design a-2 (hSL-A64-N5) comprising derived and/or modified sequence from LASV(Nig08-A19;Clade III)__ADU56618__GPCmut4 (opt1)
aggagaguccgcucagccagguugcagaagcggcuuagcguguguccuaaucuucucucugcguguagguaggccugugccgcaaacaagcuuaccaugggccagaucgugaccuucuuccaggaggucccccacgugaucgaggaggugaugaacaucguccugaucgcccucagcauccuggccauccugaaggggcucuacaacaucgcgaccugcggccugaucgggcuggugacguuccuccugcuguccggccgcagcugcuccaugaccuacaaggggguguacgagcuccagacccuggagcugaacaugaacacccucaacaugugcaugccgcugagcugcacgaagaacaacucccaccacuacaucauggucggcaacgagaccggccuggagcucacccugaccaacacgagccugcuccaccacaaguucugcaaccuguccgacgcccacaagaagaaccuguacgaccacacccucaugagcaucaucuccaccuuccaccugagcauccccaacuucaaccaguacgaggccauguccugcgacuucaacgggggcaagaucaccgugcaguacaaccugagccacuccuacgccaucgacgccgcgaaccacugcgggacgguggccaacggcguccuccagaccuucaugcggauggccuggggcgggagcuacaucgcccuggacuccggccgcgggaagugggacugcaucaugaccagcuaccaguaccugaucauccagaacaccacgugggaggaccacugccaguucucccggcccagccccaucggcuaccucgggcugcugucccagcgcacccgggacaucuacaucagccgccggcgccggggcaccuucaccuggacgcucagcgacuccgagggcaacgagacccccgggggcuacugccugacccgcuggaugcugaucgaggcggagcucaagugcuucgggaacaccgccguggccaagugcaacgagaagcacgacgaggaguucugcgacaugcugcggcuguucgacuucugcaagcaggccauccgccggcucaaggccccggcgcagaugagcauccagcugaucaacaaggccgugaacgcccugaucaacgaccagcucaucaugaagaaccaccuccgcgacaucaugggcauccccuacugcaacuacuccaaguacugcuaccugaaccacacgagcaccgggcggaccucccugccccgcugcugccuggucagcaacggcuccuaccugaacgagacccacuucagcgacgacaucgagcagcaggccgacaacaugaucacggagaugcuccagaaggaguaccuggaccggcagggcaagaccccgcuggggcugguggaccucuucguguucuccaccagcuucuaccugaucuccaucuuccugcaccucgucaagauccccacccaccgccacaucgugggcaagcccugccccaagccgcaccggcugaaccacauggggaucugcagcugcggccuguacaagcagcccggggugcccguccgcuggaagcggugaggacuagucccuguucccagagcccacuuuuuuuucuuuuuuugaaauaaaauagccugucuuucagaucucaaaggcucuuuucagagccaccaaaaaaaaaaaaaaaaaaaaaaaaaaaaaaaaaaaaaaaaaaaaaaaaaaaaaaaaaaaaaaaaagaauu

SEQ ID NO: 26939 - RNA, 1736 nt, Artificial Sequence
  mRNA product Design a-2 (hSL-A64-N5) comprising derived and/or modified sequence from LASV(G1180-SLE-2010;Clade IV)__AIT17168__GPCmut4 (opt1)
aggagaguccgcucagccagguugcagaagcggcuuagcguguguccuaaucuucucucugcguguagguaggccugugccgcaaacaagcuuaccaugggccagaucgugaccuucuuccaggaggucccccacgugaucgaggaggugaugaacaucguccugaucgcccucagcauccuggccgugcugaaggggcucuacaacuucgcgaccugcggccugguggggcugcucacguuccugcugcucugcggccgcuccugcaccgccagccgguacaagggggucuacgagcugcagacccuggagcucaacauggagacccugaacaugugcaugccgcuguccugcacgaagaacaacagccaccacuacaucauggugggcaacgagaccggccucgagcugacccugaccaacacguccaucaucaaccacaaguucugcaaccucagcgacgcccacaagaagaaccuguacgaccacgcccugauguccaucaucagcaccuuccaccucuccauccccaacuucaaccaguacgaggccaugagcugcgacuucaacgggggcaagaucuccgugcaguacaaccugagccacuccuacgcgggggacgccgccaaccacugcggcaccgucgccaacggggugcugcagaccuucaugcgcauggcguggggcggcagcuacaucgcccucgacuccgggcacggcagcugggacugcaucaugacguccuaccaguaccugaucauccagaacaccaccugggaggaccacugccaguucagccggcccucccccaucggguaccugggccuccugagccagcgcacccgggacaucuacaucagccgccggcgccggggcacguucaccuggacccuguccgacagcgaggggaaggacaccccgggcggguacugccucacgcgcuggaugcugaucgaggccgagcugaagugcuucggcaacaccgccguggccaagugcaacgagaagcacgacgaggaguucugcgacaugcuccggcuguucgacuucugcaagcaggcgauccagcgccugaaggcccccgcccagauguccauccagcucaucaacaaggccgucaacgcccugaucaacgaccagcugaucaugaagaaccaccuccgggacaucauggggauccccuacugcaacuacagcaaguacugcuaccugaaccacaccaccacgggcaagaccucccugcccaagugcugccucgugagcaacggcuccuaccugaacgagacccacuucagcgacgacaucgagcagcaggcggacaacaugaucaccgagaugcugcagaaggaguacauggagcgccaggggaagacgccgcucggccugguggaccuguucgucuucuccaccagcuucuaccugaucuccaucuuccuccaccuggugaagauccccacccaccggcacaucgugggcaagagcugccccaagccccaccgccugaaccacauggggaucugcuccugcgggcucuacaagcagccgggcguccccgugaaguggaagcggugaggacuagucccuguucccagagcccacuuuuuuuucuuuuuuugaaauaaaauagccugucuuucagaucucaaaggcucuuuucagagccaccaaaaaaaaaaaaaaaaaaaaaaaaaaaaaaaaaaaaaaaaaaaaaaaaaaaaaaaaaaaaaaaaagaauu

SEQ ID NO: 26940 - RNA, 1736 nt, Artificial Sequence
  mRNA product Design a-2 (hSL-A64-N5) comprising derived and/or modified sequence from LASV(G1442-SLE-2011;Clade IV)__AIT17180__GPCmut4 (opt1)
aggagaguccgcucagccagguugcagaagcggcuuagcguguguccuaaucuucucucugcguguagguaggccugugccgcaaacaagcuuaccaugggccagaucgugaccuucuuccaggaggucccccacgugaucgaggaggugaugaacaucguccugaucgcccucagcauccuggccgugcugaaggggcucuacaacguggcgaccugcggccugaucgggcuggucacguuccuccugcugugcggccgcuccugcaccaccacccucuacaaggggguguacgagcugcagacgcuggagcucaacauggagacccugaacaugugcaugccgcugagcugcaccaagaacaacucccaccacuacauccgggugggcaacgagaccggccucgagcugacgcugaccaacaccagcaucaucaaccacaaguucugcaaccucuccgacgcccacaagaagaaccuguacgaccacgcccugaugagcaucaucuccaccuuccaccucagcauccccaacuucaaccaguacgaggccauguccugcgacuucaacgggggcaagaucagcguccaguacaaccugucccacagcuacgccggggacgcggccaaccacugcggcacgguggccaacggggugcugcagaccuucaugcgcauggccuggggcggcuccuacaucgcgcucgacagcgggcggggcaacugggacugcaucaugaccuccuaccaguaccugaucauccagaacaccacgugggacgaccacugccaguucagccgccccucccccaucggguaccugggccuccugagccagcggacccgcgacgucuacaucucccggcgccggcgcggcaccuucaccuggacgcugagcgacagcgaggggaaggacaccccgggcggguacugccucacccgguggaugcugaucgaggccgagcugaagugcuucggcaacaccgccguggccaagugcaacgagaagcacgacgaggaguucugcgacaugcuccgccuguucgacuucugcaagcaggccauccagcggcugaaggcgcccgcccagauguccauccagcucaucaacaaggccgugaacgcccugaucaacgaccagcugaucaugaagaaccaccuccgcgacaucauggggauccccuacugcaacuacagcaaguacugcuaccugaacaacacggccaccggcaagaccucccugcccaagugcugccucaucagcaacggcuccuaccugaacgagacccacuucagcgacgacaucgagcaggaggcggacaacaugaucacggagaugcugcagaaggaguacauggagcggcaggggaagaccccgcucggccuggucgaccuguucguguucuccaccagcuucuaccugaucuccaucuuccuccaccuggugaagauccccacccaccgccacaucgucggcaagagcugccccaagccccaccggcugaaccacauggggaucugcuccugcgggcucuacaagcagccgggcgugcccgugcgcuggaagcggugaggacuagucccuguucccagagcccacuuuuuuuucuuuuuuugaaauaaaauagccugucuuucagaucucaaaggcucuuuucagagccaccaaaaaaaaaaaaaaaaaaaaaaaaaaaaaaaaaaaaaaaaaaaaaaaaaaaaaaaaaaaaaaaaagaauu

SEQ ID NO: 26941 - RNA, 1736 nt, Artificial Sequence
  mRNA product Design a-2 (hSL-A64-N5) comprising derived and/or modified sequence from LASV(G3010-SLE-2013;Clade IV)__AIT17344__GPCmut4 (opt1)
aggagaguccgcucagccagguugcagaagcggcuuagcguguguccuaaucuucucucugcguguagguaggccugugccgcaaacaagcuuaccaugggccagaucgugaccuucuuccaggaggucccccacgugaucgaggaggugaugaacaucguccugaucgcccucagcauccuggccgugcugaaggggcucuacaacuucgcgaccugcggccugguggggcuggucacguuccuccugcugugcggccgcuccugcaccaccagccucuacaaggggguguacgagcugcagacccuggagcucaacauggagacgcugaacaugugcaugccgcuguccugcaccaagaacaacagccaccacuacaucauggugggcaacgagaccggccucgagcugacccugacgaacaccuccaucaucaaccacaaguucugcaaccucagcgacgcccacaagaagaaccuguacaaccacgcccugauguccaucaucagcaccuuccaccucuccauccccaacuucaaccaguacgaggccaugagcugcgacuucaacgggggcaagaucuccguccaguacaaccugagccacuccuacgccggggacgcggccagccacugcggcaccguggccaacggggugcugcagacguucaugcggauggccuggggcggcuccuacaucgcgcucgacagcggguacggcaagugggacugcaucaugaccuccuaccaguaccugaucauccagaacaccaccugggaggaccacugccaguucagccgccccucccccaucggguaccugggccuccugagccagcggacgcgcgacaucuacaucagccggcgccggcgcggcaccuucaccuggacccuguccgacagcgaggggaaggacacgccgggcggguacugccucacccgguggaugcugaucgaggccgagcugaagugcuucggcaacaccgccgucgccaagugcaacgagaagcacgacgaggaguucugcgacaugcuccgccuguucgacuucugcaagcaggccauccagcggcugaagacccccgcgcagauguccauccagcucaucaacaaggccgugaacgcccugaucaacgaccagcugaucaugaagaaccaccuccgcgacaucauggggauccccuacugcaacuacagcaaguacugcuaccugaaccacacgaccaccggcaagaccucccugcccaagugcugccucgugagcaacggcuccuaccugaacgagacgcacuucagcgacgacaucgagcagcaggccgacaacaugaucaccgagaugcugcagaaggaguacauggagcggcaggggaagaccccgcucggccuggucgaccuguucguguucuccaccagcuucuaccugaucuccaucuuccuccaccuggugaagauccccacgcaccgccacaucgucggcaagagcugccccaagccccaccggcugaaccacauggggaucugcuccugcgggcucuacaagcagccgggcgugcccgugcgcuggaagcggugaggacuagucccuguucccagagcccacuuuuuuuucuuuuuuugaaauaaaauagccugucuuucagaucucaaaggcucuuuucagagccaccaaaaaaaaaaaaaaaaaaaaaaaaaaaaaaaaaaaaaaaaaaaaaaaaaaaaaaaaaaaaaaaaagaauu

SEQ ID NO: 26942 - RNA, 1736 nt, Artificial Sequence
  mRNA product Design a-2 (hSL-A64-N5) comprising derived and/or modified sequence from LASV(G502-SLE-2009;Clade IV)__AIT17126__GPCmut4 (opt1)
aggagaguccgcucagccagguugcagaagcggcuuagcguguguccuaaucuucucucugcguguagguaggccugugccgcaaacaagcuuaccaugggccagaucgugaccuucuuccaggaggucccccacgugaucgaggaggugaugaacaucguccugaucgcccucagcauccuggccgugcugaaggggcucuacaacuucgcgaccugcggccugguggggcugcucacguuccugcugcucugcggccgcuccugcaccaccgggcuguacaagggcgucuacgagcugcagacccucgagcugaacauggagacgcugaacaugugcaugccgcucagcugcaccaagaacaacucccaccacuacaucauggugggcaacgagaccgggcuggagcugacccucacgaacaccagcaucaucaaccacaaguucugcaaccuguccgacgcccacaagaagaaccuguacgaccacgcccucaugagcaucaucuccaccuuccaccugagcauccccaacuucaaccaguacgaggccauguccugcgacuucaacggcgggaagaucagcgugcaguacaaccugucccacagcuacgccggcgacgcggccgaccacugcgggaccgucgccaacggcgugcuccagacguucaugcggauggccuggggcggguccuacaucgcgcuggacagcggccgcgggcggugggacugcaucaugaccuccuaccaguaccugaucauccagaacaccaccugggaggaccacugccaguucagccgccccucccccaucggcuaccucggccugcugagccagcggacgcgcgacaucuacaucucccggcgccggcgcgggaccuucaccuggacccucagcgacagcgagggcaaggacacgcccgggggcuacugccugacccgguggaugcugaucgaggccgagcucaagugcuucgggaacaccgccguggccaagugcaacgagaagcacgacgaggaguucugcgacaugcugcgccuguucgacuucugcaagcaggccauccagcggcucaaggcgccggcccagauguccauccagcugaucaacaaggccgucaacgcccugaucaacgaccagcucgugaugaagaaccaccuccgcgacaucaugggcauccccuacugcaacuacagccgguacugcuaccugaaccacaccacgaccggccgcaccucccugcccaagugcugccuggugagcaacggguccuaccugaacgagacccacuucagcgacgacaucgagcagcaggccgacaacaugaucacggagaugcuccagaaggaguacauggagcggcagggcaagaccccgcuggggcuggucgaccuguucguguucuccaccagcuucuaccucaucuccaucuuccugcaccuggugaagauccccacccaccgccacaucgucggcaagagcugccccaagccccaccggcucaaccacauggggaucugcuccugcggccuguacaagcagccgggcgugcccgugaaguggaagcgcugaggacuagucccuguucccagagcccacuuuuuuuucuuuuuuugaaauaaaauagccugucuuucagaucucaaaggcucuuuucagagccaccaaaaaaaaaaaaaaaaaaaaaaaaaaaaaaaaaaaaaaaaaaaaaaaaaaaaaaaaaaaaaaaaagaauu

SEQ ID NO: 26943 - RNA, 1736 nt, Artificial Sequence
  mRNA product Design a-2 (hSL-A64-N5) comprising derived and/or modified sequence from LASV(G733-SLE-2010;Clade IV)__AIT17154__GPCmut4 (opt1)
aggagaguccgcucagccagguugcagaagcggcuuagcguguguccuaaucuucucucugcguguagguaggccugugccgcaaacaagcuuaccaugggccagaucgugaccuucuuccaggaggucccccacgugaucgaggaggugaugaacaucguccugaucgcccucagcauccuggccgugcugaaggggcucuacaacuucgcgaccugcggcaucguggggcuggucuccuuccugcuccugugcggccgcagcugcacgaccucccuguacaaggggguguacgagcuccagacccuggagcugaacauggagacccucaacaugugcaugccgcugagcugcacgaagaacaacucccaccacuacaucauggugggcaacgagaccggccuggagcucacccugaccaacacgagcaucaucaaccacaaguucugcaaccuguccgacgcccacaagaagaaccucuacgaccacgcccugaugagcaucaucuccaccuuccaccugagcauccccaacuucaaccaguacgaggccauguccugcgacuucaacgggggcaagaucagcguccaguacaaccucucccacagcuacgccggggacgcggccaaccacugcggcaccaucgccaacggggugcugcagaccuucaugcggauggccuggggcggcuccuacaucgcgcuggacagcgggcgcgaccggugggacugcaucaugacguccuaccaguaccucaucauccagaacaccaccugggaggaccacugccaguucagccgccccucccccaucggcuaccuggggcugcucagccagcggacccgcgacaucuacaucagccggcgccggcgcggcacguucaccuggacccuguccgacagcgagggcaaggacacccccgggggcuacugccugacgcgguggaugcucaucgaggccgagcugaagugcuucgggaacaccgccguggccaagugcaacgagaagcacgacgaggaguucugcgacaugcugcgccucuucgacuucugcaagcaggccauccagcggcugaaggcgccggcccagauguccauccagcugaucaacaaggccgucaacgcccucaucaacgaccagcugaucaugaagaaccaccuccgcgacaucaugggcauccccuacugcaacuacagcaaguacugcuaccugaaccacaccaccacggggaagaccucccugcccaagugcugccuggugagcaacggcuccuaccucaacgagacccacuucagcgacgacaucgagcagcaggccgacaacaugaucaccgagaugcugcagaaggaguacauggagcggcagggcaagacgccgcuggggcucguggaccuguucgucuucuccaccagcuucuaccugaucuccaucuuccugcaccucgugaagauccccacccaccgccacguggucggcaagagcugccccaagccccaccggcugaaccacauggggaucugcuccugcggccuguacgggcagccgggcgugcccgugaaguggaagcgcugaggacuagucccuguucccagagcccacuuuuuuuucuuuuuuugaaauaaaauagccugucuuucagaucucaaaggcucuuuucagagccaccaaaaaaaaaaaaaaaaaaaaaaaaaaaaaaaaaaaaaaaaaaaaaaaaaaaaaaaaaaaaaaaaagaauu

SEQ ID NO: 26944 - RNA, 1736 nt, Artificial Sequence
  mRNA product Design a-2 (hSL-A64-N5) comprising derived and/or modified sequence from MOPV/LASV reassortant(IGS-1;Clade IV)__AFY05576__GPCmut4 (opt1)
aggagaguccgcucagccagguugcagaagcggcuuagcguguguccuaaucuucucucugcguguagguaggccugugccgcaaacaagcuuaccaugggccagaucgugaccuucuuccaggaggucccccacgugaucgaggaggugaugaacaucguccugaucgcccucagcgugcuggccgugcugaaggggcucuacaacuucgcgaccugcggccuggucgggcuggugacguuccuccugcugugcggccgcuccugcaccaccagccucuacaaggggguguacgagcugcagacccuggagcucaacauggagacgcugaacaugugcaugccgcuguccugcaccaagaacaacagccaccacuacaucauggucggcaacgagaccggccucgagcugacccugacgaacaccuccaucaucaaccacaaguucugcaaccucagcgacgcccacaagaagaaccuguacgaccacgcccugauguccaucaucagcaccuuccaccucuccauccccaacuucaaccaguacgaggccaugagcugcgacuucaacgggggcaagaucuccgugcaguacaaccugagccacuccuacgccggggacgcggccaaccacugcggcaccguggccaacgggguccugcagacguucaugcggauggccuggggcggcagcuacaucgcgcucgacuccgggcgcggcaacugggacugcaucaugaccagcuaccaguaccugaucauccagaacaccaccugggaggaccacugccaguucucccggcccagccccaucggguaccugggccuccugucccagcgcacgcgggacaucuacaucagccgccggcgccggggcaccuucaccuggacccugagcgacuccgagggggaggacacgccgggcggguacugccucacccgcuggaugcugaucgaggccgagcugaagugcuucggcaacaccgccguggccaagugcaacgagaagcacgacgaggaguucugcgacaugcuccggcuguucgacuucugcaagcaggccauccagcgccugaaggcgcccgcccagaugagcauccagcucaucaacaaggccgugaacgcccugaucaacgaccagcugaucaugaagaaccaccuccgggacaucauggggauccccuacugcaacuacuccaaguacugcuaccugaaccacaccacgaccggccgcaccagccugcccaagugcugccucgucuccaacggcagcuaccugaacgagacccacuucuccgacgacaucgagcagcaggccgacaacaugaucacggagaugcugcagaaggaguacauggagcggcaggggaagaccccgcucggccugguggaccuguucguguucagcaccuccuucuaccugaucagcaucuuccuccaccuggucaagauccccacccaccgccacaucguggggaaguccugccccaagccccaccggcugaaccacaugggcaucugcagcugcgggcucuacaagcagccgggcgugcccgucaaguggaagcgcugaggacuagucccuguucccagagcccacuuuuuuuucuuuuuuugaaauaaaauagccugucuuucagaucucaaaggcucuuuucagagccaccaaaaaaaaaaaaaaaaaaaaaaaaaaaaaaaaaaaaaaaaaaaaaaaaaaaaaaaaaaaaaaaaagaauu

SEQ ID NO: 26945 - RNA, 1736 nt, Artificial Sequence
  mRNA product Design a-2 (hSL-A64-N5) comprising derived and/or modified sequence from LASV(LM765-SLE-2012;Clade IV)__AIT17814__GPCmut4 (opt1)
aggagaguccgcucagccagguugcagaagcggcuuagcguguguccuaaucuucucucugcguguagguaggccugugccgcaaacaagcuuaccaugggccagaucgugaccuucuuccaggaggucccccacgugaucgaggaggugaugaacaucguccugaucgcccucagcauccuggccgugcugaaggggcucuacaacuucgcgaccugcggccugguggggcuggucacguuccuccugcugugcggccgcuccugcaccaccagccucuacaaggggguguacgagcugcagacccuggagcucaacauggagacgcugaacaugugcaugccgcuguccugcaccaagaacaacagccaccacuacaucauggugggcaacgagaccggccucgagcugacccugacgaacaccuccaucaucgaccacaaguucugcaaccucagcgacgcccaccggaagaaccuguacgaccacgcccugauguccaucaucagcaccuuccaccucuccauccccaacuucaaccaguacgaggccaugagcugcgacuucaacgggggcaagaucuccguccaguacaaccugagccacuccuacgccaaggacgcggccgaccacugcgggaccguggccaacggcgugcugcagacguucaugcgcauggccuggggcgggagcuacaucgcgcucgacuccggccgggggcgcugggacugcaucaugaccagcuaccaguaccugaucauccagaacaccaccugggaggaccacugccaguucucccggcccagccccaucggcuaccuggggcuccugucccagcgcacgcgggacaucuacaucagccgccggcgccggggcaccuucaccuggacccugagcgacuccgagggcaaggacacgcccgggggcuacugccucacccgcuggaugcugaucgaggccgagcugaagugcuucgggaacaccgccgucgccaagugcaacgagaagcacgacgaggaguucugcgacaugcuccggcuguucgacuucugcaagcaggccauccagcgccugaaggcgccggcccagaugagcauccagcucaucaacaaggccgugaacgcccugaucaacgaccagcugaucaugaagaaccaccuccgggacaucaugggcauccccuacugcaacuacuccaaguacugcuaccugaaccacaccacgaccgggaagaccagccugcccaagugcugccucguguccaacggcagcuaccugaacgagacccacuucuccgacgacaucgagcagcaggccgacaacaugaucacggagaugcugcagaaggaguacauggagcgccagggcaagaccccgcucgggcuggucgaccuguucguguucagcaccuccuucuaccugaucagcaucuuccuccaccuggugaagauccccacccaccggcacaucgucggcaagcccugccccaagccgcaccgccugaaccacauggggaucugcuccugcggccucuacaagcagcccggggugcccgugaaguggaagcggugaggacuagucccuguucccagagcccacuuuuuuuucuuuuuuugaaauaaaauagccugucuuucagaucucaaaggcucuuuucagagccaccaaaaaaaaaaaaaaaaaaaaaaaaaaaaaaaaaaaaaaaaaaaaaaaaaaaaaaaaaaaaaaaaagaauu

SEQ ID NO: 26946 - RNA, 1736 nt, Artificial Sequence
  mRNA product Design a-2 (hSL-A64-N5) comprising derived and/or modified sequence from LASV(LM776-SLE-2012;Clade IV)__AIT17824__GPCmut4 (opt1)
aggagaguccgcucagccagguugcagaagcggcuuagcguguguccuaaucuucucucugcguguagguaggccugugccgcaaacaagcuuaccaugggccagaucgugaccuucuuccaggaggucccccacgugaucgaggaggugaugaacaucguccugaucgcccucagcauccuggccgugcugaaggggcucuacaacuucgcgaccugcggccugguggggcuggucacguuccuccugcugugcggccgcuccugcaccaccagcguguacaaggggguguacgagcuccagacccuggagcugaacauggagacgcucaacaugugcaugccgcuguccugcaccaagaacaacagccaccacuacaucauggucggcaacgagaccggccuggagcucacccugacgaacaccuccaucaucaaccacaaguucugcaaccugagcgacgcccacaagaagaaccucuacgaccacgcccugauguccaucaucagcaccuuccaccuguccauccccaacuucaaccaguacgaggccaugagcugcgacuucaacgggggcaagaucuccgugcaguacaaccucagccacuccuacgccggggacgcggccaaccacugcggcaccguggccaacgggguccugcagacguucaugcggauggccuggggcggcagcuacaucgcgcuggacuccgggcacggcaagugggacugcaucaugaccagcuaccaguaccucaucauccagaacaccaccugggaggaccacugccaguucucccgccccagccccaucggguaccugggccugcucucccagcggacgcgcgacaucuacaucagccggcgccggcgcggcaccuucaccuggacccugagcgacuccgaggggaaggacacgccgggcggguacugccugacccgguggaugcucaucgaggccgagcugaagugcuucggcaacaccgccguggccaagugcaacgagaagcacgacgaggaguucugcgacaugcugcgccucuucgacuucugcaagcaggccauccagcggcugaaggcgcccgcccagaugagcauccagcugaucaacaaggccgugaacgcccucaucaacgaccagcugaucaugaagaaccaccuccgcgacaucauggggauccccuacugcaacuacuccaaguacugcuaccugaaccacaccacgaccggcaagaccagccugcccaagugcugccuggucuccaacggcagcuaccucaacgagacccacuucuccgacgacaucgagcagcaggccgacaacaugaucacggagaugcugcagaaggaguacauggagcggcaggggaagaccccgcugggccucguggaccuguucguguucagcaccuccuucuaccugaucagcaucuuccugcaccucgucaagauccccacccaccgccacaucguggggaaguccugccccaagccccaccggcugaaccacaugggcaucugcagcugcgggcuguacaagcagccgggcgugcccguccgcuggaagcggugaggacuagucccuguucccagagcccacuuuuuuuucuuuuuuugaaauaaaauagccugucuuucagaucucaaaggcucuuuucagagccaccaaaaaaaaaaaaaaaaaaaaaaaaaaaaaaaaaaaaaaaaaaaaaaaaaaaaaaaaaaaaaaaaagaauu

SEQ ID NO: 26947 - RNA, 1736 nt, Artificial Sequence
  mRNA product Design a-2 (hSL-A64-N5) comprising derived and/or modified sequence from LASV(Mad39;Clade IV)__ANH09722__GPCmut4 (opt1)
aggagaguccgcucagccagguugcagaagcggcuuagcguguguccuaaucuucucucugcguguagguaggccugugccgcaaacaagcuuaccaugggccagaucgugaccuucuuccaggaggucccccacgugaucgaggaggugaugaacaucguccugaucgcccucagcauccuggccgugcugaaggggcucuacaacguggcgaccugcggccugaucgggcuggucacguuccuccugcugugcggccgcuccugcaccaccacccucuacaaggggguguacgagcugcaggcccuggagcucaacauggagacgcugaacaugugcaugccgcugagcugcaccaagaacaacucccaccacuacauccgggugggcaacgagaccggccucgagcugacccugacgaacaccagccucaucaaccacaaguucugcaaccuguccgacgcccacaagaagaaccuguacgaccacgcccucaugagcaucaucuccaccuuccaccugagcauccccaacuucaaccaguacgaggccauguccugcgacuucaacgacgggaagaucagcguccaguacaaccugucccacaccuacgcgggcgacacggccaaccacugcgggaccguggccaacggcgugcuccagaccuucaugcgcauggccuggggcgggagcuacaucgcgcuggacuccggccgcgggggcugggacugcaucaugaccagcuaccaguaccugaucauccagaacacgaccugggaggaccacugccaguucucccggcccagccccaucggguaccucggccugcugucccagcggacccgcgacaucuacaucagccggcgccggcgcggcaccuucacguggacccucuccgacagcgaggggaaggacaccccgggcggguacugccugacccgguggaugcugaucgaggccgagcucaagugcuucggcaacacggccgucgccaagugcaacgagaagcacgacgaggaguucugcgacaugcugcgccuguucgacuucugcaagcaggccauccagcggcucaaggcgcccgcccagaugagcauccagcugaucaacaaggccgugaacgcccugaucaacgaccagcucaucaugaagaaccaccuccgcgacaucauggggauccccuacugcaacuacuccaaguacugcuaccugaaccacaccgugaccggcaagaccagccugcccaagugcugccuggucuccaacggcagcuaccugaacgagacgcacuucuccgacgacaucgagcagcaggccgacaacaugaucaccgagaugcuccagaaggaguacauggagcggcaggggaagaccccgcugggccugguggaccuguucguguucagcaccuccuucuaccucaucagcaucuuccugcaccuggucaagauccccacgcaccgccacgugguggggaagcccugccccaagccgcaccggcucaaccacaugggcaucugcuccugcggguucuacaagcagcccggcguccccgugcgcuggaagcggugaggacuagucccuguucccagagcccacuuuuuuuucuuuuuuugaaauaaaauagccugucuuucagaucucaaaggcucuuuucagagccaccaaaaaaaaaaaaaaaaaaaaaaaaaaaaaaaaaaaaaaaaaaaaaaaaaaaaaaaaaaaaaaaaagaauu

SEQ ID NO: 26948 - RNA, 1736 nt, Artificial Sequence
  mRNA product Design a-2 (hSL-A64-N5) comprising derived and/or modified sequence from LASV(Z0947-SLE-2011;Clade IV)__AIT17840__GPCmut4 (opt1)
aggagaguccgcucagccagguugcagaagcggcuuagcguguguccuaaucuucucucugcguguagguaggccugugccgcaaacaagcuuaccaugggccagaucgugaccuucuuccaggaggucccccacgugaucgaggaggugaugaacaucguccugaucgcccucagcauccuggccgugcugaaggggcucuacaacuucgcgaccugcggccugguggggcuggucacguuccuccugcugugcggccgcuccugcaccaucagccucuacaaggggguguacgagcugcagacccuggagcucaacauggagacccugaacaugugcaugccgcuguccugcacgaagaacaacagccaccacuacaucauggugggcaacgagaccggccucgagcugacccugaccaacacguccaucaucaaccacaaguucugcaaccucagcgacgcccacaagaagaaccuguacgaccacgcccugauguccaucaucagcaccuuccaccucuccauccccaacuucaaccaguacgaggccaugagcugcgacuucaacgggggcaagaucuccguccaguacaaccugagccacuccuacgccggggacgcggccaaccacugcggcaccguggccaacggggugcugcagaccuucaugcggauggccuggggcggcagcuacaucgcgcucgacuccgggcgcgaccggugggacugcaucaugacgagcuaccaguaccugaucauccagaacaccaccugggaggaccacugccaguucucccgccccagccccaucggcuaccuggggcuccugucccagcggacccgcgacaucuacaucagccggcgccggcgcggcacguucaccuggacccugagcgacuccgagggcaaggacacccccgggggcuacugccucacgcgguggaugcugaucgaggccgagcugaagugcuucgggaacaccgccgucgccaagugcaacgagaagcacgacgaggaguucugcgacaugcuccgccuguucgacuucugcaagcaggccauccagcggcugaaggcgccggcccagaugagcauccagcucaucaacaaggccgugaacgcccugaucaacgaccagcugaucaugaagaaccaccuccgcgacaucaugggcauccccuacugcaacuacuccaaguacugcuaccugaaccacaccaccacggggaagaccagccugcccaagugcugccucguguccaacggcagcuaccugaacgagacccacuucuccgacgacaucgagcagcaggccgacaacaugaucaccgagaugcugcagaaggaguacauggagcggcagggcaagacgccgcucgggcuggucgaccuguucguguucagcaccuccuucuaccugaucagcaucuuccuccaccuggugaagauccccacccaccgccacaucgucggcaagcccugccccaagccgcaccggcugaaccacauggggaucugcuccugcggccucuacaagcagcccggggugcccgugaaguggaagcgcugaggacuagucccuguucccagagcccacuuuuuuuucuuuuuuugaaauaaaauagccugucuuucagaucucaaaggcucuuuucagagccaccaaaaaaaaaaaaaaaaaaaaaaaaaaaaaaaaaaaaaaaaaaaaaaaaaaaaaaaaaaaaaaaaagaauu

SEQ ID NO: 26949 - RNA, 1736 nt, Artificial Sequence
  mRNA product Design a-2 (hSL-A64-N5) comprising derived and/or modified sequence from LASV(Josiah;Clade IV)__NP_694870__GPCmut4 (opt4)
aggagaguccgcucagccagguugcagaagcggcuuagcguguguccuaaucuucucucugcguguagguaggccugugccgcaaacaagcuuaccaugggccagaucgugaccuucuuccaggaggugccccacgugaucgaggaggugaugaacaucgugcugaucgcccugagcgugcuggccgugcugaagggccuguacaacuucgccaccugcggccuggugggccuggugaccuuccugcugcugugcggcagaagcugcaccaccagccuguacaagggcguguacgagcugcagacccuggagcugaacauggagacccugaacaugugcaugccccugagcugcaccaagaacaacagccaccacuacaucauggugggcaacgagaccggccuggagcugacccugaccaacaccagcaucaucaaccacaaguucugcaaccugagcgacgcccacaagaagaaccuguacgaccacgcccugaugagcaucaucagcaccuuccaccugagcauccccaacuucaaccaguacgaggccaugagcugcgacuucaacggcggcaagaucagcgugcaguacaaccugagccacagcuacgccggcgacgccgccaaccacugcggcaccguggccaacggcgugcugcagaccuucaugagaauggccuggggcggcagcuacaucgcccuggacagcggcagaggcaacugggacugcaucaugaccagcuaccaguaccugaucauccagaacaccaccugggaggaccacugccaguucagcagacccagccccaucggcuaccugggccugcugagccagagaaccagagacaucuacaucagcagaagaagaagaggcaccuucaccuggacccugagcgacagcgagggcaaggacacccccggcggcuacugccugaccagauggaugcugaucgaggccgagcugaagugcuucggcaacaccgccguggccaagugcaacgagaagcacgacgaggaguucugcgacaugcugagacuguucgacuucugcaagcaggccauccagagacugaaggcccccgcccagaugagcauccagcugaucaacaaggccgugaacgcccugaucaacgaccagcugaucaugaagaaccaccugagagacaucaugggcauccccuacugcaacuacagcaaguacugcuaccugaaccacaccaccaccggcagaaccagccugcccaagugcugccuggugagcaacggcagcuaccugaacgagacccacuucagcgacgacaucgagcagcaggccgacaacaugaucaccgagaugcugcagaaggaguacauggagagacagggcaagaccccccugggccugguggaccuguucguguucagcaccagcuucuaccugaucagcaucuuccugcaccuggugaagauccccacccacagacacaucgugggcaagagcugccccaagccccacagacugaaccacaugggcaucugcagcugcggccuguacaagcagcccggcgugcccgugaaguggaagagaugaggacuagucccuguucccagagcccacuuuuuuuucuuuuuuugaaauaaaauagccugucuuucagaucucaaaggcucuuuucagagccaccaaaaaaaaaaaaaaaaaaaaaaaaaaaaaaaaaaaaaaaaaaaaaaaaaaaaaaaaaaaaaaaaagaauu

SEQ ID NO: 26950 - RNA, 1733 nt, Artificial Sequence
  mRNA product Design a-2 (hSL-A64-N5) comprising derived and/or modified sequence from LASV(LP;Clade I)__AAF86701__GPCmut4 (opt4)
aggagaguccgcucagccagguugcagaagcggcuuagcguguguccuaaucuucucucugcguguagguaggccugugccgcaaacaagcuuaccaugggccagaucaucaccuucuuccaggaggugccccacgugaucgaggaggugaugaacaucgugcugaucgcccugagccugcuggccauccugaagggccuguacaacaucgccaccugcggcaucaucggccugguggccuuccuguuccugugcggcaagagcugcagccugacccugaagggcggcuacgagcugcagacccuggagcugaacauggagacccugaacaugugcaugccccugagcugcaccaagaacagcagccaccacuacaucagagugggcaacgagaccggccuggagcugacccugaccaacaccagcaucaucaaccacaaguucugcaaccugagcgacgcccacaagaagaaccuguacgaccacgcccugaugagcaucaucagcaccuuccaccugagcauccccaacuucaaccaguacgaggccaugagcugcgacuucaacggcggcaagaucagcgugcaguacaaccugagccacagcuacgccggcgacgccgccgagcacugcggcaccguggccaacggcgugcugcagaccuucaugagaauggccuggggcggcagauacaucgcccuggacagcggcaagggcaacugggacugcaucaugaccagcuaccaguaccugaucauccagaacaccaccugggaggaccacugccaguucagcagacccagccccaucggcuaccugggccugcugagccagagaaccagagacaucuacaucagcagaagaagaagaggcaccuucaccuggacccugagcgacagcgagggcaacgagacccccggcggcuacugccugaccagauggaugcugaucgaggccgagcugaagugcuucggcaacaccgccguggccaagugcaacgagaagcacgacgaggaguucugcgacaugcugagacuguucgacuucugcaagcaggccaucagaagacugaaggcccccgcccagaugagcauccagcugaucaacaaggccgugaacgcccugaucaacgaccagcugaucaugaagaaccaccugagagacaucaugggcauccccuacugcaacuacagcaaguacugcuaccugaaccacaccagcagcggcagaaccagccugcccaagugcugccugaucagcaacggcagcuaccugaacgagacccaguucagcgacgacaucgagcagcaggccgacaacaugaucaccgagaugcugcagaaggaguacaucgagagacagggcaagaccccccugggccugguggacaucuucaucuucagcaccagcuucuaccugaucagcaucuuccugcaccugaucaagauccccacccacagacacaucgugggcaagcccugccccaagccccacagacugaaccacaugggcgugugcagcugcggccuguacaagcaccccggcgugcccaccaaguggaagagaugaggacuagucccuguucccagagcccacuuuuuuuucuuuuuuugaaauaaaauagccugucuuucagaucucaaaggcucuuuucagagccaccaaaaaaaaaaaaaaaaaaaaaaaaaaaaaaaaaaaaaaaaaaaaaaaaaaaaaaaaaaaaaaaaagaauu

SEQ ID NO: 26951 - RNA, 1733 nt, Artificial Sequence
  mRNA product Design a-2 (hSL-A64-N5) comprising derived and/or modified sequence from LASV(803213;Clade II)__AAF86703__GPCmut4 (opt4)
aggagaguccgcucagccagguugcagaagcggcuuagcguguguccuaaucuucucucugcguguagguaggccugugccgcaaacaagcuuaccaugggccagaucaucaccuucuuccaggaggugccccacgugaucgaggaggugaugaacaucgugcugaucgcccugagccugcuggccauccugaagggcaucuacaacguggccaccugcggccuguucggccugaucagcuuccugcugcugugcggcagaagcugcagcgugaccuacaagggcguguacgagcugcagacccuggagcugaacauggccaaccugaacaugugcaugccccugagcugcaccaagaacaacagccaccacuacaucauggugggcaacgagaccggccuggagcugacccugaccaacaccagcaucaucaaccacaaguucugcaaccugagcgacgcccacaagaagaaccuguacgaccacgcccugaugagcaucaucagcaccuuccaccugagcauccccaacuucaaccaguacgaggccaugagcugcgacuucaacggcggcaagaucagcgugcaguacaaccugagccacagcuucgccguggacgccgccaaccacugcggcaccaucgccaacggcgugcugcagaccuucaugagaauggccuggggcggcagcuacaucgcccuggacagcggcaagggcaacugggacugcaucaugaccagcuaccaguaccugaucauccagaacaccaccugggaggaccacugccaguucagcagacccagccccaucggcuaccugggccugcugagccagagaaccagagacaucuacaucagcagaagaagaagaggcaccuucaccuggacccugagcgacagcgagggcaacgaggcccccggcggcuacugccugaccagauggaugcugaucgaggccgagcugaagugcuucggcaacaccgccguggccaagugcaacgagaagcacgacgaggaguucugcgacaugcugagacuguucgacuucugcaagcaggccaucaagagacugaagacccccgcccagaugagcauccagcugaucaacaaggccgugaacgcccugaucaacgaccagcugaucaugaagaaccaccugagagacaucaugggcauccccuacugcaacuacagcagauacugcuaccugaaccacaccgugaccggcaagaccagccugcccagaugcugccuggugagcaacggcagcuaccugaacgagacccacuucagcgacgacaucgagcagcaggccgacaacaugaucaccgagaugcugcagaaggaguacauggacagacagggcaagaccccccugggccugguggaccuguucguguucagcaccagcuucuaccugaucagcaucuuccugcaccuggugaagauccccacccacagacacaucgugggcaagcccugccccaagccccacagacugaaccacaugggcaucugcagcugcggccuguacaagcaccccggcgugcccgugaaguggaagagaugaggacuagucccuguucccagagcccacuuuuuuuucuuuuuuugaaauaaaauagccugucuuucagaucucaaaggcucuuuucagagccaccaaaaaaaaaaaaaaaaaaaaaaaaaaaaaaaaaaaaaaaaaaaaaaaaaaaaaaaaaaaaaaaaagaauu

SEQ ID NO: 26952 - RNA, 1733 nt, Artificial Sequence
  mRNA product Design a-2 (hSL-A64-N5) comprising derived and/or modified sequence from LASV(GA391;Clade III)__CAA36645__GPCmut4 (opt4)
aggagaguccgcucagccagguugcagaagcggcuuagcguguguccuaaucuucucucugcguguagguaggccugugccgcaaacaagcuuaccaugggccagaucgugaccuucuuccaggaggugccccacgugaucgaggaggugaugaacaucgugcugaucgcccugagcauccuggccauccugaagggccuguacaacguggccaccugcggccugaucggccuggugaccuuccugcugcugagcggcagaagcugcagccugaucuacaagggcaccuacgagcugcagacccuggagcugaacauggagacccugaacaugugcaugccccugagcugcaccaagaacaacagccaccacuacaucagagugggcaacgagaccggccuggagcugacccugaccaacaccagcauccugaaccacaaguucugcaaccugagcgacgcccacaagagaaaccuguacgaccacagccugaugagcaucaucagcaccuuccaccugagcauccccaacuucaaccaguacgaggccaugagcugcgacuucaacggcggcaagaucaccgugcaguacaaccugagccacagcuucgccguggacgccgccggccacugcggcacccuggccaacggcgugcugcagaccuucaugagaauggccuggggcggcagcuacaucgcccuggacagcggcagaggcaacugggacugcaucaugaccagcuaccaguaccugaucauccagaacaccaccugggacgaccacugccaguucagcagacccagccccaucggcuaccugggccugcugagccagagaaccagagacaucuacaucagcagaagaagaagaggcaccuucaccuggacccugagcgacagcgagggcaacgagacccccggcggcuacugccugaccagauggaugcugaucgaggccgagcugaagugcuucggcaacaccgccguggccaagugcaacgagaagcacgacgaggaguucugcgacaugcugagacuguucgacuucugcaagcaggccaucagaagacugaagacccccgcccagaugagcauccagcugaucaacaaggccgugaacgcccugaucaacgaccagcugaucaugaagaaccaccugagagacaucaugggcauccccuacugcaacuacagcagauacugcuaccugaaccacaccagcaccggcaagaccagccugcccagaugcugccugaucagcaacggcagcuaccugaacgagaccaaguucagcgacgacaucgagcagcaggccgacaacaugaucaccgagaugcugcagaaggaguacaucgacagacagggcaagaccccccugggccugguggaccuguucguguucagcaccagcuucuaccugaucagcaucuuccugcaccuggugaagauccccacccacagacacaucgugggcaagcccugccccaagccccacagacugaaccacaugggcaucugcagcugcggccuguacaagcagcccggcgugcccgugagauggaagagaugaggacuagucccuguucccagagcccacuuuuuuuucuuuuuuugaaauaaaauagccugucuuucagaucucaaaggcucuuuucagagccaccaaaaaaaaaaaaaaaaaaaaaaaaaaaaaaaaaaaaaaaaaaaaaaaaaaaaaaaaaaaaaaaaagaauu

SEQ ID NO: 26953 - RNA, 1736 nt, Artificial Sequence
  mRNA product Design a-2 (hSL-A64-N5) comprising derived and/or modified sequence from LASV(AV;Clade V)__CCA30314__GPCmut4 (opt4)
aggagaguccgcucagccagguugcagaagcggcuuagcguguguccuaaucuucucucugcguguagguaggccugugccgcaaacaagcuuaccaugggccagaucgugaccuucuuccaggaggugccccacgugaucgaggaggugaugaacaucgugcugaucgcccugagcauccuggccgugcugaagggccuguacaacaucgccaccugcggccugaucggccugaucaccuuccugcugcugugcggcagaagcugcagcagcaaccuguacaagggcguguacgagcugcagagccuggaccugaacauggagacccugaacaugugcaugccccugagcugcaccaagaacaacagccaccacuacaucagagugggcaacgacaccggccuggagcugacccugaccaacaccagcauccugaaccacaaguucugcaaccugagcgacgcccacaagaaggaccuguacgaccacgcccugaugagcaucaucagcaccuuccaccugagcauccccaacuucaaccaguacgaggccaugagcugcgacuucaacggcggcaagaucagcgugcaguacaaccugagccacagcuacgccaucgacgccgccaaccacugcggcaccguggccaacggcauccugcagaccuucaugagaauggccuggggcggcagcuacaucgcccuggacagcggcagaggcaacugggacugcaucaugaccagcuaccaguaccugaucauccagaacaccaccugggagaaccacugccaguucagcagacccagccccaucggcuaccugggccugcugagccagagaaccagagacaucuacaucagcagaagaagaagaggcaccuucaccuggacccugagcgacagcgagggcaacgccacccccggcggcuacugccugaccagauggaugcugaucgaggccgagcugaagugcuucggcaacaccgccguggccaagugcaacgagaagcacgacgaggaguucugcgacaugcugagacuguucgacuucugcaagcaggccaucagcagacugaagagccccgcccagaugagcauccagcugaucaacaaggccgugaacgcccugaucaacgaccagcugaucaugaagaaccaccugagagacaucaugggcauccccuacugcaacuacagcaaguacugcuaccugaaccacaccaucaccggcaagaccagccugcccaagugcugccuggugagcaacggcagcuaccugaacgagacccacuucagcgacgacaucgagcagcaggccgacaacaugaucaccgagaugcugcagaaggaguacauggagagacagggcaagaccccccugggccugguggaccuguucguguucagcaccagcuucuaccugaucagcaucuuccugagacuggugaagauccccacccacagacacaucgugggcaagcccugccccaagccccacagacugaaccacaugggcaucugcagcugcggccuguacaagcagcccggcgugcccgugagauggaagagaugaggacuagucccuguucccagagcccacuuuuuuuucuuuuuuugaaauaaaauagccugucuuucagaucucaaaggcucuuuucagagccaccaaaaaaaaaaaaaaaaaaaaaaaaaaaaaaaaaaaaaaaaaaaaaaaaaaaaaaaaaaaaaaaaagaauu

SEQ ID NO: 26954 - RNA, 1733 nt, Artificial Sequence
  mRNA product Design a-2 (hSL-A64-N5) comprising derived and/or modified sequence from LASV(Togo/2016/7082;Clade VI)__AMR44577__GPCmut4 (opt4)
aggagaguccgcucagccagguugcagaagcggcuuagcguguguccuaaucuucucucugcguguagguaggccugugccgcaaacaagcuuaccaugggccagaucaucaccuucuuccaggaggugccccacgugaucgaggaggugaugaacaucgugcugaucgcccugagccugcuggccauccugaagggcguguacaacguggccaccugcggcaucaucggccuggugaccuuccuguuccugugcggcagaagcugcagccugaucuacaagggcagcuacgagcugcagacccuggagcugaacauggagacccugaacaugugcaugccccugagcugcaccaagaacagcagccaccacuacaucagagugggcaacgagaccggccuggagcugacccugaccaacaccagcaucaucaaccacaaguucugcaaccugagcgacgcccacaagagaaaccuguacgaccacgcccugaugagcauccugagcaccuuccaccugagcauccccaacuucaaccaguacgaggccaugagcugcgacuucaacggcggcaagaucagcgugcaguacaaccugagccacgccuacgccguggacgccgccgagcacugcggcaccguggccaacggcgugcugcagaccuucaugagaauggccuggggcggcagcuacaucgcccuggacagcggcagaggcaacugggacugcaucaugaccagcuaccaguaccugaucauccagaacaccaccugggaggaccacugccaguucagcagacccagccccaucggcuaccugggccugcugagccagagaaccagagacaucuacaucagcagaagaagaagaggcaccuucaccuggacccugagcgacagcgagggcaacgagacccccggcggcuacugccugaccagauggaugcugaucgaggccgagcugaagugcuucggcaacaccgccguggccaagugcaacgagaagcacgacgaggaguucugcgacaugcugagacuguucgacuucugcaagcaggccauccagagacugaagagccccgcccagaugagcauccagcugaucaacaaggccgugaacgcccugaucaacgaccagcugaucaugaagaaccaccugagagacaugaugggcauccccuacugcaacuacagcaaguacugcuaccugaaccacaccagcagcggcagaaccagccugcccaagugcugccuggugagcaacggcagcuaccugaacgagacccacuucagcgacgacaucgagcagcaggccgacaacaugaucaccgagaugcugcagaaggaguacaucgacagacagggcaagaccccccugggccugguggaccuguucguguucagcaccagcuucuaccugaucagcaucuuccugcaccugaucaagauccccacccacagacacaucgugggcaagcccugccccaagccccacagacugaaccacaugggcaucugcagcugcggccuguacaagcagcccggcgugcccaccagauggaagagaugaggacuagucccuguucccagagcccacuuuuuuuucuuuuuuugaaauaaaauagccugucuuucagaucucaaaggcucuuuucagagccaccaaaaaaaaaaaaaaaaaaaaaaaaaaaaaaaaaaaaaaaaaaaaaaaaaaaaaaaaaaaaaaaaagaauu

SEQ ID NO: 26955 - RNA, 1733 nt, Artificial Sequence
  mRNA product Design a-2 (hSL-A64-N5) comprising derived and/or modified sequence from LASV(KAK-428;Clade n.d. (VII))__ANH09740__GPCmut4 (opt4)
aggagaguccgcucagccagguugcagaagcggcuuagcguguguccuaaucuucucucugcguguagguaggccugugccgcaaacaagcuuaccaugggccagaucgugaccuucuuccaggaggugccccacgugaucgaggaggugaugaacaucgugcugaucgcccugagccugcuggccauccugaagggccuguacaacuucgccaccugcggcgugaucggccugaucaccuuccugcugcugugcggcagaagcugcagcgccaccuacaagggccaguacgagcugcagacccuggagcugaacauggagagccugaacaugugcaugccccugagcugcaccaagaacaacagccaccacuacaucagagccggcaacaacaccggccuggagcugacccugaccaacaccagcaucaucagccacaaguucugcaaccugagcgacgcccacaagaagaaccuguacgaccacacccugaugagcaucaucaccaccuuccaccugagcauccccaacuucaaccaguacgaggccaugagcugcgacuucaacggcggcaagaucagcauccaguacaaccugagccacagcuacgccggcgacgccgcccagcacugcggcaccguggccaacggcgugcugcagaccuucaugagaauggccuggggcggcagcuaccuggcccuggacagcggcagaagaggcugggacugcaucaucagcagcuaccaguaccugaucauccagaacaccaccugggacgaccacugccaguucagcagacccagccccaucggcuaccugggcuucgugagccagaagaccagagacaucuacaucagcagaagaagaagaggcaccuucaccuggacccugagcgacagcgagggccacgacaugcccggcggcuacugccugaccagauggaugcugaucgaggccgaccugaagugcuucggcaacaccgccguggccaagugcaacgagaagcacgacgaggaguucugcgacauguggagacuguucgacuucugcaagcaggccauccagagacugaaggcccccgcccagaugaacauccagcugaucaacaaggccgugaacgcccugaucaacgaccagcugaugaugaagaaccaccugagagacaucaugggcauccccuacugcaacuacagcaaguucugcuaccugaacaacaccaccaccggcagaaccagccugcccagaugcugccugaucagcaacggcagcuaccugaacgagacccacuucagcgacgacaucgagcagcaggccgacaacaugaucaccgagaugcugcagaaggaguacauggacagacagggcaagaccccccugggccugguggaccuguucguguucagcaccagcuucuaccugaucaccaucuuccugcaccuggugaagauccccacccacagacacaucgugggcaagcccugccccaagccccacagacugaaccacaugggcaucugcagcugcggccuguacaagcagcccggcgugcccgugagauggaagagaugaggacuagucccuguucccagagcccacuuuuuuuucuuuuuuugaaauaaaauagccugucuuucagaucucaaaggcucuuuucagagccaccaaaaaaaaaaaaaaaaaaaaaaaaaaaaaaaaaaaaaaaaaaaaaaaaaaaaaaaaaaaaaaaaagaauu

SEQ ID NO: 26956 - RNA, 1733 nt, Artificial Sequence; identical to SEQ ID NO: 26950
  mRNA product Design a-2 (hSL-A64-N5) comprising derived and/or modified sequence from LASV(Pinneo-NIG-1969;Clade I)__AIT17836__GPCmut4 (opt4)

SEQ ID NO: 26957 - RNA, 1733 nt, Artificial Sequence
  mRNA product Design a-2 (hSL-A64-N5) comprising derived and/or modified sequence from LASV(ISTH0009-NIG-2011;Clade II)__AIT17404__GPCmut4 (opt4)
aggagaguccgcucagccagguugcagaagcggcuuagcguguguccuaaucuucucucugcguguagguaggccugugccgcaaacaagcuuaccaugggccagaucaucaccuucuuccaggaggugccccacgugaucgaggaggugaugaacaucgugcugaucgcccugagccugcuggccauccugaagggcaucuacaacguggccaccugcggccuguucggccuggugagcuuccugcugcugugcggcagaagcugcagcaccaccuacaagggcguguacgagcugcagacccuggagcuggacauggccagccugaacaugugcaugccccugagcugcaccaagaacaacagccaccacuacaucauggugggcaacgagaccggccuggagcugacccugaccaacaccagcaucaucaaccacaaguucugcaaccugagcgacgcccacaagaagaaccuguacgaccacgcccugaugagcaucaucagcaccuuccaccugagcauccccaacuucaaccaguacgaggccaugagcugcgacuucaacggcggcaagaucagcgugcaguacaaccugagccacgccuacgccguggacgccgccaaccacugcggcaccaucgccaacggcgugcugcagaccuucaugagaauggccuggggcggcagcuacaucgcccuggacagcggcaagggcagcugggacugcaucaugaccagcuaccaguaccugaucauccagaacaccaccugggaggaccacugccaguucagcagacccagccccaucggcuaccugggccugcugagccagagaaccagagacaucuacaucagcagaagaagaagaggcaccuucaccuggacccugagcgacagcgagggcaacgagacccccggcggcuacugccugaccagauggaugcugaucgaggccgagcugaagugcuucggcaacaccgccguggccaagugcaacgagaagcacgacgaggaguucugcgacaugcugagacuguucgacuucugcaagcaggccaucagaagacugaagacccccgcccagaugagcauccagcugaucaacaaggccgugaacgcccugaucaacgaccagcugaucaugaagaaccaccugagagacaucaugggcauccccuacugcaacuacagcaaguacugcuaccugaaccacaccgugaccggcaagaccagccugcccagaugcugccuggugagcaacggcagcuaccugaacgagacccacuucagcgacgacaucgagcagcaggccgacaacaugaucaccgagcugcugcagaaggaguacauggacagacagggcaagaccccccugggccugguggaccuguucguguucagcaccagcuucuaccugaucagcaucuuccugcaccugaucaagauccccacccacagacacaucaccggcaagcccugccccaagccccacagacugaaccacaugggcaucugcagcugcggccuguacaagcaccccggcgugcccgugaaguggaagagaugaggacuagucccuguucccagagcccacuuuuuuuucuuuuuuugaaauaaaauagccugucuuucagaucucaaaggcucuuuucagagccaccaaaaaaaaaaaaaaaaaaaaaaaaaaaaaaaaaaaaaaaaaaaaaaaaaaaaaaaaaaaaaaaaagaauu

SEQ ID NO: 26958 - RNA, 1733 nt, Artificial Sequence
  mRNA product Design a-2 (hSL-A64-N5) comprising derived and/or modified sequence from LASV(ISTH2010-NIG-2012;Clade II)__AIT17482__GPCmut4 (opt4)
aggagaguccgcucagccagguugcagaagcggcuuagcguguguccuaaucuucucucugcguguagguaggccugugccgcaaacaagcuuaccaugggccagaucaucaccuucuuccaggaggugccccacgugaucgaggaggugaugaacaucgugcugaucgcccugagccugcuggccauccugaagggcaucuacaacguggccaccugcggccuguucggccuggugagcuuccugcugcugugcggcagaagcugcagcaccaccuacaagggcguguacgagcugcagacccuggagcuggacauggccagccugaacaugugcaugccccugagcugcaccaagaacaacagccaccacuacaucauggugggcaacgagaccggccuggagcugacccugaccaacaccagcaucaucaaccacaaguucugcaaccugagcgacgcccacaagaagaaccuguacgaccacgcccugaugagcaucaucagcaccuuccaccugagcauccccaacuucaaccaguacgaggccaugagcugcgacuucaacggcggcaagaucagcgugcaguacaaccugagccacgccuacgccguggacgccgccaaccacugcggcaccaucgccaacggcgugcugcagaccuucaugagaauggccuggggcggcagcuacaucgcccuggacagcggcaagggcagcugggacugcaucaugaccagcuaccaguaccugaucauccagaacaucaccugggaggaccacugccaguucagcagacccagccccaucggcuaccugggccugcugagccagagaaccagagacaucuacaucagcagaagaagaagaggcaccuucaccuggacccugagcgacagcgagggcaacgagacccccggcggcuacugccugaccagauggaugcugaucgaggccgagcugaagugcuucggcaacaccgccguggccaagugcaacgagaagcacgacgaggaguucugcgacaugcugagacuguucgacuucugcaagcaggccaucagaagacugaagacccccgcccagaugagcauccagcugaucaacaaggccgugaacgcccugaucaacgaccagcugaucaugaagaaccaccugagagacaucaugggcauccccuacugcaacuacagcaaguacugcuaccugaaccacaccgugaccggcaagaccagccugcccagaugcugccuggugagcaacggcagcuaccugaacgagacccacuucagcgacgacaucgagcagcaggccgacaacaugaucaccgagcugcugcagaaggaguacaucgacagacagggcaagaccccccugggccugguggaccuguucguguucagcaccagcuucuaccugaucagcaucuuccugcaccuggugaagauccccacccacagacacguggugggcaagcccugccccaagccccacagacugaaccacaugggcaucugcagcugcggccuguacaagcaccccggcgugcccgugaaguggaagagaugaggacuagucccuguucccagagcccacuuuuuuuucuuuuuuugaaauaaaauagccugucuuucagaucucaaaggcucuuuucagagccaccaaaaaaaaaaaaaaaaaaaaaaaaaaaaaaaaaaaaaaaaaaaaaaaaaaaaaaaaaaaaaaaaagaauu

SEQ ID NO: 26959 - RNA, 1733 nt, Artificial Sequence
  mRNA product Design a-2 (hSL-A64-N5) comprising derived and/or modified sequence from LASV(Lassa virus/H.sapiens-wt/NGA/2015/ISTH_0543;Clade II)__AVO03639__GPCmut4 (opt4)
aggagaguccgcucagccagguugcagaagcggcuuagcguguguccuaaucuucucucugcguguagguaggccugugccgcaaacaagcuuaccaugggccagaucaucaccuucuuccaggaggugccccacgugaucgaggaggugaugaacaucgugcugaucgcccugagccugcuggccauccugaagggcaucuacaacguggccaccugcggccuguucggccuggugagcuuccugcugcugugcggcagaagcugcagcaccaccuacaagggcguguacgagcugcagacccuggagcuggacauggccaaccugaacaugugcaugccccugagcugcaccaagaacaacagccaccacuacaucauggugggcaacgagaccggccuggagcugacccugaccaacaccagcaucaucaaccacaaguucugcaaccugagcgacgcccacaagaagaaccuguacgaccacgcccugaugagcaucaucagcaccuuccaccugagcauccccaacuucaaccaguacgaggccaugagcugcgacuucaacggcggcaagaucagcgugcaguacaaccugagccacaccuacgccguggacgccgccaaccacugcggcaccaucgccaacggcgugcugcagaccuucaugagaauggccuggggcggcagcuacaucgcccuggacagcggcaagggcagcugggacugcaucaugaccagcuaccaguaccuggugauccagaacaccaccugggaggaccacugccaguucagcagacccagccccaucggcuaccugggccugcugagccagagaaccagagacaucuacaucagcagaagaagaagaggcaccuucaccuggacccugagcgacagcgagggcaacgagacccccggcggcuacugccugaccagauggaugcugaucgaggccgagcugaagugcuucggcaacaccgccguggccaagugcaacgagaagcacgacgaggaguucugcgacaugcugagacuguucgacuucugcaagcaggccaucagaagacugaagacccccgcccagaugagcauccagcugaucaacaaggccgugaacgcccugaucaacgaccagcugaucaugaagaaccaccugagagacaucaugggcauccccuacugcaacuacagcaaguacugcuaccugaaccacaccgugaccggcaagaccagccugcccagaugcugccuggugagcaacggcagcuaccugaacgagacccacuucagcgacgacaucgagcagcaggccgacaacaugaucaccgagcugcugcagaaggaguacaucgacagacagggcaagaccccccugggccugguggaccuguucguguucagcaccagcuucuaccugaucagcaucuuccugcaccuggugaagauccccacccacagacacaucaccggcaagcccugccccaagccccacagacugaaccacaugggcaucugcagcugcggccuguacaagcaccccggcgugcccgugaaguggaagagaugaggacuagucccuguucccagagcccacuuuuuuuucuuuuuuugaaauaaaauagccugucuuucagaucucaaaggcucuuuucagagccaccaaaaaaaaaaaaaaaaaaaaaaaaaaaaaaaaaaaaaaaaaaaaaaaaaaaaaaaaaaaaaaaaagaauu

SEQ ID NO: 26960 - RNA, 1733 nt, Artificial Sequence
  mRNA product Design a-2 (hSL-A64-N5) comprising derived and/or modified sequence from LASV(Lassa virus/H.sapiens-wt/NGA/2016/ISTH_0009;Clade II)__AVO03571__GPCmut4 (opt4)
aggagaguccgcucagccagguugcagaagcggcuuagcguguguccuaaucuucucucugcguguagguaggccugugccgcaaacaagcuuaccaugggccagaucaucaccuucuuccaggaggugccccacgugaucgaggaggugaugaacaucgugcugaucgcccugagccugcuggccauccugaagggcaucuacaacguggccaccugcggccugcugggccuggugagcuuccugcugcugugcggcagaagcugcagcaccaccuacaagggcguguacgagcugcagacccuggagcuggacauggccagccugaacaugugcaugccccugagcugcaccaagaacaacagccaccacuacaucauggugggcaacgagaccggccuggagcugacccugaccaacaccagcaucaucaaccacaaguucugcaaccugagcgacgcccacaagaagaaccuguacgaccacgcccugaugagcaucaucagcaccuuccaccugagcauccccaacuucaaccaguacgaggccaugagcugcgacuucaacggcggcagaaucagcgugcaguacaaccugagccacagcuacgccguggacgccgccaaccacugcggcaccaucgccaacggcgugcugcagaccuucaugagaauggccuggggcggcagcuacaucgcccuggacagcggcaagggcagcugggacugcaucaugaccagcuaccaguaccugaucauccagaacaccaccugggaggaccacugccaguucagcagacccagccccaucggcuaccugggccugcugagccagagaaccagagacaucuacaucagcagaagaagaagaggcaccuucaccuggacccugagcgacagcgagggcaacgagacccccggcggcuacugccugaccagauggaugcugaucgaggccgagcugaagugcuucggcaacaccgccguggccaagugcaacgagaagcacgacgaggaguucugcgacaugcugagacuguucgacuucugcaagcaggccaucagaagacugaagacccccgcccagaugagcauccagcugaucaacaaggccgugaacgcccugaucaacgaccagcugaucaugaagaaccaccugagagacaucaugggcauccccuacugcaacuacagcaaguacugcuaccugaaccacaccgugaccggcaagaccagccugcccagaugcugccuggugagcaacggcagcuaccugaacgagacccacuucagcgacgacaucgagcagcaggccgacaacaugaucaccgagcugcugcagaaggaguacaucgacagacagggcaagaccccccugggccugguggaccuguucguguucagcaccagcuucuaccugaucagcaucuuccugcaccuggugaagauccccacccacagacacaucaccggcaagcccugccccaagccccacagacugaaccacaugggcaucugcagcugcggccuguacaaccaccccggcgugcccgugaaguggaagagaugaggacuagucccuguucccagagcccacuuuuuuuucuuuuuuugaaauaaaauagccugucuuucagaucucaaaggcucuuuucagagccaccaaaaaaaaaaaaaaaaaaaaaaaaaaaaaaaaaaaaaaaaaaaaaaaaaaaaaaaaaaaaaaaaagaauu

SEQ ID NO: 26961 - RNA, 1733 nt, Artificial Sequence
  mRNA product Design a-2 (hSL-A64-N5) comprising derived and/or modified sequence from LASV(Lassa virus/H.sapiens-wt/NGA/2016/ISTH_0017;Clade II)__AVO03567__GPCmut4 (opt4)
aggagaguccgcucagccagguugcagaagcggcuuagcguguguccuaaucuucucucugcguguagguaggccugugccgcaaacaagcuuaccaugggccagaucaucaccuucuuccaggaggugccccacgugaucgaggaggugaugaacaucgugcugaucgcccugagccugcuggccauccugaagggcaucuacaacguggccaccugcggccuguucggccuggugagcuuccugcugcugugcggcagaagcugcagcaccaccuacaagggcguguacgagcugcagacccuggagcuggacauggccagccugaacaugugcaugccccugagcugcaccaagaacaacagccaccacuacaucauggugggcaacgagaccggccuggagcugacccugaccaacaccagcaucaucaaccacaaguucugcaaccugagcgacgcccacaagaagaaccuguacgaccacgcccugaugagcaucaucagcaccuuccaccugagcauccccaacuucaaccaguacgaggccaugagcugcgacuucaacggcggcaagaucagcgugcaguacaaccugagccacaccuacgccaucgacgccgccaaccacugcggcaccaucgccaacggcgugcugcagaccuucaugagaauggccuggggcggcagcuacaucgcccuggacagcggcaagggcagcugggacugcaucaugaccagcuaccaguaccugaucauccagaacaccaccugggaggaccacugccaguucagcagacccagccccaucggcuaccugggccugcugagccagagaaccagagacaucuacaucagcagaagaagaagaggcaccuucaccuggacccugagcgacagcgagggcaacgagacccccggcggcuacugccugaccagauggaugcugaucgaggccgagcugaagugcuucggcaacaccgccguggccaagugcaacgagaagcacgacgaggaguucugcgacaugcugagacuguucgacuucugcaagcaggccaucagaagacugaagacccccgcccagaugagcauccagcugaucaacaaggccgugaacgcccugaucaacgaccagcugaucaugaagaaccaccugagagacaucaugggcauccccuacugcaacuacagcaaguacugcuaccugaaccacaccgugaccggcaagaccagccugcccagaugcugccuggugagcaacggcagcuaccugaacgagacccacuucagcgacgacaucgagcagcaggccgacaacaugaucaccgagcugcugcagaaggaguacauggacagacagggcaagaccccccugggccugguggaccuguucguguucagcaccagcuucuaccugaucagcaucuuccugcaccuggugagaauccccacccacagacacgugaucggcaagcccugccccaagccccacagacugaaccacaugggcaucugcagcugcggccuguacaagcaccccggcgugcccgugaaguggaagagaugaggacuagucccuguucccagagcccacuuuuuuuucuuuuuuugaaauaaaauagccugucuuucagaucucaaaggcucuuuucagagccaccaaaaaaaaaaaaaaaaaaaaaaaaaaaaaaaaaaaaaaaaaaaaaaaaaaaaaaaaaaaaaaaaagaauu

SEQ ID NO: 26962 - RNA, 1733 nt, Artificial Sequence
  mRNA product Design a-2 (hSL-A64-N5) comprising derived and/or modified sequence from LASV(Lassa virus/H.sapiens-wt/NGA/2018/ISTH_0959;Clade II)__AVV65099__GPCmut4 (opt4)
aggagaguccgcucagccagguugcagaagcggcuuagcguguguccuaaucuucucucugcguguagguaggccugugccgcaaacaagcuuaccaugggccagaucaucaccuucuuccaggaggugccccacgugaucgaggaggugaugaacaucgugcugaucgcccugagccugcuggccauccugaagggcaucuacaacguggugaccugcggccuguucggccuggugagcuuccugcugcugugcggcagaagcugcagcaccaccuacaagggcguguacgagcugcagacccuggagcuggacauggccagccugaacaugugcaugccccugagcugcaccaagaacaacagccaccacuacaucauggugggcaacgagaccggccuggagcugacccugaccaacaccagcaucaucaaccacaaguucugcaaccugagcgacgcccacaagaagaaccuguacgaccacgcccugaugagcaucaucagcaccuuccaccugagcauccccaacuucaaccaguacgaggccaugagcugcgacuucaacggcggcaagaucagcgugcaguacaaccugagccacgccuacgccaucgacgccgccaaccacugcggcaccaucgccaacggcgugcugcagaccuucaugagaauggccuggggcggcagcuacaucgcccuggacagcggcaagggcagcugggacugcaucaugaccagcuaccaguaccugaucauccagaacaccaccugggaggaccacugccaguucagcagacccagccccaucggcuaccugggccugcugagccagagaaccagagacaucuacaucagcagaagaagaagaggcaccuucaccuggacccugagcgacagcgagggcaacgagacccccggcggcuacugccugaccagauggaugcugaucgaggccgagcugaagugcuucggcaacaccgccguggccaagugcaacgagaagcacgacgaggaguucugcgacaugcugagacuguucgacuucugcaagcaggccaucagaagacugaagacccccgcccagaugagcauccagcugaucaacaaggccgugaacgcccugaucaacgaccagcugaucaugaagaaccaccugagagacaucaugggcauccccuacugcaacuacagcaaguacugcuaccugaaccacaccgugaccggcaagaccagccugcccagaugcugccuggugagcaacggcagcuaccugaacgagacccacuucagcgacgacaucgagcagcaggccgacaacaugaucaccgagcugcugcagaaggaguacaucgacagacagggcaagaccccccugggccugguggaccuguucguguucagcaccagcuucuaccugaucagcaucuuccugcaccuggugaagauccccacccacagacacgugaucggcaagcccugccccaagccccacagacugaaccacaugggcaucugcagcugcggccuguacaagcaccccggcgugcccgugaaguggaagagaugaggacuagucccuguucccagagcccacuuuuuuuucuuuuuuugaaauaaaauagccugucuuucagaucucaaaggcucuuuucagagccaccaaaaaaaaaaaaaaaaaaaaaaaaaaaaaaaaaaaaaaaaaaaaaaaaaaaaaaaaaaaaaaaaagaauu

SEQ ID NO: 26963 - RNA, 1733 nt, Artificial Sequence
  mRNA product Design a-2 (hSL-A64-N5) comprising derived and/or modified sequence from LASV(LASV003-NIG-2008;Clade II)__AIT17580__GPCmut4 (opt4)
aggagaguccgcucagccagguugcagaagcggcuuagcguguguccuaaucuucucucugcguguagguaggccugugccgcaaacaagcuuaccaugggccagaucaucaccuucuuccaggaggugccccacgugaucgaggaggugaugaacaucgugcugaucgcccugagccugcuggccauccugaagggcaucuacaacguggccaccugcggccuguucggccuggugagcuuccugcugcugugcggcagaagcugcagcaccaccuacaagggcguguacgagcugcagacccuggagcuggacauggccagccugaacaugugcaugccccugagcugcaccaagaacaacagccaccacuacaucauggugggcaacgagaccggccuggagcugacccugaccaacaccagcaucaucaaccacaaguucugcaaccugagcgacgcccacaagaagaaccuguacgaccacgcccugaugagcaucaucagcaccuuccaccugagcauccccaacuucaaccaguacgaggccaugagcugcgacuucaacggcggcaagaucagcgugcaguacaaccugagccacaccuacgccguggacgccgccaaccacugcggcaccaucgccaacggcgugcugcagaccuucaugagaauggccuggggcggcagcuacaucgcccuggacagcggcaagggcagcugggacugcaucaugaccagcuaccaguaccugaucauccagaacaccaccugggaggaccacugccaguucagcagacccagccccaucggcuaccugggccugcugagccagagaaccagagacaucuacaucagcagaagaagaagaggcaccuucaccuggacccugagcgacagcgagagcaacgagacccccggcggcuacugccugaccagauggaugcugaucgaggccgagcugaagugcuucggcaacaccgccguggccaagugcaacgagaagcacgacgaggaguucugcgacaugcugagacuguucgacuucugcaagcaggccaucagaagacugaaggcccccgcccagaugagcauccagcugaucaacaaggccgugaacgcccugaucaacgaccagcugaucaugaagaaccaccugagagacaucaugggcauccccuacugcaacuacagcaaguacugcuaccugaaccacaccgugaccggcagaaccagccugcccagaugcugccuggugagcaacggcagcuaccugaacgagacccacuucagcgacgacaucgagcagcaggccgacaacaugaucaccgagcugcugcagaaggaguacauggacagacagggcaagaccccccugggccugguggaccuguucguguucagcaccagcuucuaccugaucagcaucuuccugcaccuggugaagauccccacccacagacacgugaucggcaagcccugccccaagccccacagacugaaccacaugggcaucugcagcugcggccuguacaagcaccccggcgugcccgugaaguggaagagaugaggacuagucccuguucccagagcccacuuuuuuuucuuuuuuugaaauaaaauagccugucuuucagaucucaaaggcucuuuucagagccaccaaaaaaaaaaaaaaaaaaaaaaaaaaaaaaaaaaaaaaaaaaaaaaaaaaaaaaaaaaaaaaaaagaauu

SEQ ID NO: 26964 - RNA, 1733 nt, Artificial Sequence
  mRNA product Design a-2 (hSL-A64-N5) comprising derived and/or modified sequence from LASV(LASV035-NIG-2009;Clade II)__AIT17588__GPCmut4 (opt4)
aggagaguccgcucagccagguugcagaagcggcuuagcguguguccuaaucuucucucugcguguagguaggccugugccgcaaacaagcuuaccaugggccagaucaucaccuucuuccaggaggugccccacgugaucgaggaggugaugaacaucgugcugaucgcccugagccugcuggccauccugaagggcaucuacaacguggccaccugcggccuguucggccuggugagcuuccugcugcugugcggcagaagcugcagcaccaccuacaagggcguguacgagcugcagacccuggagcuggacauggccagccugaacaugugcaugccccugagcugcaccaagaacaacagccaccacuacaucauggugggcaacgagaccggccuggagcugacccugaccaacaccagcaucaucaaccacaaguucugcaaccugagcgacgcccacaagaagaaccuguacgaccacgcccugaugagcaucaucagcaccuuccaccugagcauccccaacuucaaccaguacgaggccaugagcugcgacuucaacggcggcaagaucagcgugcaguacaaccugagccacgccuacgccguggacgccgccaaccacugcggcaccaucgccaacggcgugcugcagaccuucaugagaauggccuggggcggcagcuacaucgcccuggacagcggcaagggcagcugggacugcaucaugaccagcuaccaguaccugaucauccagaacaccaccugggaggaccacugccaguucagcagacccagccccaucggcuaccugggccugcugagccagagaaccagagacaucuacaucagcagaagaagaagaggcaccuucaccuggacccugagcgacagcgagggcaacgagacccccggcggcuacugccugaccagauggaugcugaucgaggccgagcugaagugcuucggcaacaccgccguggccaagugcaacgagaagcacgacgaggaguucugcgacaugcugagacuguucgacuucugcaagcaggccaucagaagacugaaggcccccgcccagaugagcauccagcugaucaacaaggccgugaacgcccugaucaacgaccagcugaucaugaagaaccaccugagagacaucaugggcauccccuacugcaacuacagcaaguacugcuaccugaaccacaccgugaccggcaagaccagccugcccagaugcugccuggugagcaacggcagcuaccugaacgagacccacuucagcgacgacaucgagcagcaggccgacaacaugaucaccgagcugcugcagaaggaguacaucgacagacagggcaagaccccccugggccugguggaccuguucguguucagcaccagcuucuaccugaucagcaucuuccugcaccuggugaagauccccacccacagacacgugaucggcaagcccugccccaagccccacagacugaaccacaugggcaucugcagcugcggccuguacaagcaccccggcgugcccgugaaguggaagagaugaggacuagucccuguucccagagcccacuuuuuuuucuuuuuuugaaauaaaauagccugucuuucagaucucaaaggcucuuuucagagccaccaaaaaaaaaaaaaaaaaaaaaaaaaaaaaaaaaaaaaaaaaaaaaaaaaaaaaaaaaaaaaaaaagaauu

SEQ ID NO: 26965 - RNA, 1733 nt, Artificial Sequence
  mRNA product Design a-2 (hSL-A64-N5) comprising derived and/or modified sequence from LASV(LASV1000-NIG-2009;Clade II)__AIT17782__GPCmut4 (opt4)
aggagaguccgcucagccagguugcagaagcggcuuagcguguguccuaaucuucucucugcguguagguaggccugugccgcaaacaagcuuaccaugggccagaucaucaccuucuuccaggaggugccccacgugaucgaggaggugaugaacaucgugcugaucgcccugagccugcuggccauccugaagggcaucuacaacguggccaccugcggccuguucggccuggugagcuuccugcugcugugcggcagaagcugcagcaccaccuacaagggcguguacgagcugcagacccuggagcuggacauggccagccugaacaugugcaugccccugagcugcaccaagaacaacagccaccacuacaucauggugggcaacgagaccggccuggagcugacccugaccaacaccagcaucaucaaccacaaguucugcaaccugagcgacgcccacaagaagaaccuguacgaccacgcccugaugagcaucaucagcaccuuccaccugagcauccccaacuucaaccaguacgaggccaugagcugcgacuucaacggcggcaagaucagcgugcaguacaaccugagccacaccuacgccguggacgccgccaaccacugcggcaccaucgccaacggcgugcugcagaccuucaugagaauggccuggggcggcagcuacaucgcccuggacagcggcaagggcagcugggacugcaucaugaccagcuaccaguaccugaucauccagaacaccaccugggaggaccacugccaguucagcagacccagccccaucggcuaccugggccugcugagccagagaaccagagacaucuacaucagcagaagaagaagaggcaccuucaccuggacccugagcgacagcgagggcaacgagacccccggcggcuacugccugaccagauggaugcugaucgaggccgagcugaagugcuucggcaacaccgccguggccaagugcaacgagaagcacgacgaggaguucugcgacaugcugagacuguucgacuucugcaagcaggccaucaagagacugaagacccccgcccagaugagcauccagcugaucaacaaggccgugaacgcccugaucaacgaccagcugaucaugaagaaccaccugagagacaucaugggcauccccuacugcaacuacagcaaguacugcuaccugaaccacaccgugaccggcaagaccagccugcccagaugcugccuggugagcaacggcagcuaccugaacgagacccacuucagcgacgacaucgagcagcaggccgacaacaugaucaccgagcugcugcagaaggaguacaucgacagacagggcaagaccccccugggccugguggaccuguucguguucagcaccagcuucuaccugaucagcaucuuccugcaccuggugaagauccccacccacagacacguggugggcaagcccugccccaagccccacagacugaaccacaugggcaucugcagcugcggccuguacaagcaccccggcgugcccgugaaguggaagagaugaggacuagucccuguucccagagcccacuuuuuuuucuuuuuuugaaauaaaauagccugucuuucagaucucaaaggcucuuuucagagccaccaaaaaaaaaaaaaaaaaaaaaaaaaaaaaaaaaaaaaaaaaaaaaaaaaaaaaaaaaaaaaaaaagaauu

SEQ ID NO: 26966 - RNA, 1733 nt, Artificial Sequence
  mRNA product Design a-2 (hSL-A64-N5) comprising derived and/or modified sequence from LASV(LASV221-NIG-2010;Clade II)__AIT17624__GPCmut4 (opt4)
aggagaguccgcucagccagguugcagaagcggcuuagcguguguccuaaucuucucucugcguguagguaggccugugccgcaaacaagcuuaccaugggccagaucaucaccuucuuccaggaggugccccacgugaucgaggaggugaugaacaucgugcugaucgcccugagccugcuggccauccugaagggcaucuacaacguggccaccugcggccuguucggccuggugagcuuccugcugcugugcggcagaagcugcagcaccaccuacaagggcguguacgagcugcagacccuggagcuggacauggccagccugaacaugugcaugccccugagcugcaccaagaacaacagccaccacuacaucauggugggcaacgagaccggccuggagcugacccugaccaacaccagcaucaucaaccacaaguucugcaaccugagcgacgcccacaagaagaaccuguacgaccacgcccugaugagcaucaucagcaccuuccaccugagcauccccaacuucaaccaguacgaggccaugagcugcgacuucaacggcggcaagaucagcgugcaguacaaccugagccacaccuacgccaucgacgccgccaaccacugcggcaccaucgccaacggcgugcugcagaccuucaugagaauggccuggggcggcagcuacaucgcccuggacagcggcaagggcagcugggacugcaucaugaccagcuaccaguaccugaucauccagaacaccaccugggaggaccacugccaguucagcagacccagccccaucggcuaccugggccugcugagccagagaaccagagacaucuacaucagcagaagaagaagaggcaccuucaccuggacccugagcgacagcgagggcaacgagacccccggcggcuacugccugaccagauggaugcugaucgaggccgagcugaagugcuucggcaacaccgccguggccaagugcaacgagaagcacgacgaggaguucugcgacaugcugagacuguucgacuucugcaagcaggccaucagaagacugaagacccccgcccagaugagcauccagcugaucaacaaggccgugaacgcccugaucaacgaccagcugaucaugaagaaccaccugagagacaucaugggcauccccuacugcaacuacagcaaguacugcuaccugaaccacaccgugaccggcaagaccagccugcccagaugcugccuggugagcaacggcagcuaccugaacgagacccacuucagcgacgacaucgagcagcaggccgacaacaugaucaccgagaugcugcagaaggaguacauggacagacagggcaagaccccccugggccugguggaccuguucguguucagcaccagcuucuaccugaucagcaucuuccugcaccuggugaagauccccacccacagacacgugaucggcaagcccugccccaagccccacagacugaaccacaugggcaucugcagcugcggccuguacaagcaccccggcgugcccgugaaguggaagagaugaggacuagucccuguucccagagcccacuuuuuuuucuuuuuuugaaauaaaauagccugucuuucagaucucaaaggcucuuuucagagccaccaaaaaaaaaaaaaaaaaaaaaaaaaaaaaaaaaaaaaaaaaaaaaaaaaaaaaaaaaaaaaaaaagaauu

SEQ ID NO: 26967 - RNA, 1733 nt, Artificial Sequence
  mRNA product Design a-2 (hSL-A64-N5) comprising derived and/or modified sequence from LASV(LASV237-NIG-2010;Clade II)__AIT17638__GPCmut4 (opt4)
aggagaguccgcucagccagguugcagaagcggcuuagcguguguccuaaucuucucucugcguguagguaggccugugccgcaaacaagcuuaccaugggccagaucaucaccuucuuccaggaggugccccacgugaucgaggaggugaugaacaucgugcugaucgcccugagccugcuggccauccugaagggcaucuacaacguggccaccugcggccuguucggccuggugagcuuccugcugcugugcggcagaagcugcagcaccaccuacaagggcguguacgagcugcagacccuggagcuggacauggccagccugaacaugugcaugccccugagcugcaccaagaacaacagccaccacuacaucauggugggcaacgagaccggccuggagcugacccugaccaacaccagcaucaucaaccacaaguucugcaaccugagcgacgcccacaagaaggaccuguacgaccacgcccugaugagcaucaucagcaccuuccaccugagcauccccaacuucaaccaguacgaggccaugagcugcgacuucaacggcggcaagaucagcgugcaguacaaccugagccacaccuacgccguggacgccgccaaccacugcggcaccaucgccaacggcgugcugcagaccuucaugagaauggccuggggcggcagcuacaucgcccuggacagcggcaagggcagcugggacugcaucaugaccagcuaccaguaccugaucauccagaacaccaccugggaggaccacugccaguucagcagacccagccccaucggcuaccugggccugcugagccagagaaccagagacaucuacaucagcagaagaagaagaggcaccuucaccuggacccugagcgacagcgagggcaacgagacccccggcggcuacugccugaccagauggaugcugaucgaggccgagcugaagugcuucggcaacaccgccguggccaagugcaacgagaagcacgacgaggaguucugcgacaugcugagacuguucgacuucugcaagcaggccaucagaagacugaagacccccgcccagaugagcauccagcugaucaacaaggccgugaacgcccugaucaacgaccagcugaucaugaagaaccaccugagagacaucaugggcauccccuacugcaacuacagcaaguacugcuaccugaaccacaccgugaccggcaagaccagccugcccagaugcugccuggugagcaacggcagcuaccugaacgagacccacuucagcgacgacaucgagcagcaggccgacaacaugaucaccgagcugcugcagaaggaguacauggacagacagggcaagaccccccugggccugguggaccuguucguguucagcaccagcuucuaccugaucagcaucuuccugcaccugaucaagauccccacccacagacacaucaccggcaagcccugccccaagccccacagacugaaccacaugggcaucugcagcugcggccuguacaagcaccccggcgugcccgugaaguggaagagaugaggacuagucccuguucccagagcccacuuuuuuuucuuuuuuugaaauaaaauagccugucuuucagaucucaaaggcucuuuucagagccaccaaaaaaaaaaaaaaaaaaaaaaaaaaaaaaaaaaaaaaaaaaaaaaaaaaaaaaaaaaaaaaaaagaauu

SEQ ID NO: 26968 - RNA, 1733 nt, Artificial Sequence
  mRNA product Design a-2 (hSL-A64-N5) comprising derived and/or modified sequence from LASV(LASV253-NIG-2011;Clade II)__AIT17670__GPCmut4 (opt4)
aggagaguccgcucagccagguugcagaagcggcuuagcguguguccuaaucuucucucugcguguagguaggccugugccgcaaacaagcuuaccaugggccagaucaucaccuucuuccaggaggugccccacgugaucgaggaggugaugaacaucgugcugaucgcccugagccugcuggccauccugaagggcaucuacaacguggccaccugcggccuguucggccuggugagcuuccugcugcugugcggcagaagcugcagcaccaccuacaagggcguguacgagcugcagacccuggagcuggacauggccagccugaacaugugcaugccccugagcugcaccaagaacaacagccaccacuacaucauggugggcaacgagaccggccuggagcugacccugaccaacaccagcaucaucaaccacaaguucugcaaccugagcgacgcccacaagaagaaccuguacgaccacgcccugaugagcaucaucagcaccuuccaccugagcauccccaacuucaaccaguacgaggccaugagcugcgacuucaacggcggcaagaucagcgugcaguacaaccugagccacaccuacgccguggacgccgccaaccacugcggcaccaucgccaacggcgugcugcagaccuucaugagaauggccuggggcggcagcuacaucgcccuggacagcggcaagggcagcugggacugcaucaugaccagcuaccaguaccugaucauccagaacaccaccugggaggaccacugccaguucagcagacccagccccaucggcuaccugggccugcugagccagagaaccagagacaucuacaucagcagaagaagaagaggcaccuucaccuggacccugagcgacagcgagggcaacgagacccccggcggcuacugccugaccagauggaugcugaucgaggccgagcugaagugcuucggcaacaccgccguggccaagugcaacgagaagcacgacgaggaguucugcgacaugcugagacuguucgacuucugcaagcaggccaucagaagacugaaggcccccgcccagaugagcauccagcugaucaacaaggccgugaacgcccugaucaacgaccagcugaucaugaagaaccaccugagagacaucaugggcauccccuacugcaacuacagcaaguacugcuaccugaaccacaccgugaccggcagaaccagccugcccagaugcugccuggugagcaacggcagcuaccugaacgagacccacuucagcgacgacaucgagcagcaggccgacaacaugaucaccgagcugcugcagaaggaguacaucgacagacagggcaagaccccccugggccugguggaccuguucguguucagcaccagcuucuaccugaucagcaucuuccugcaccuggugaagauccccacccacagacacaucaucggcaagcccugccccaagccccacagacugaaccacaugggcaucugcagcugcggccuguacaagcaccccggcgugcccgugaaguggaagagaugaggacuagucccuguucccagagcccacuuuuuuuucuuuuuuugaaauaaaauagccugucuuucagaucucaaaggcucuuuucagagccaccaaaaaaaaaaaaaaaaaaaaaaaaaaaaaaaaaaaaaaaaaaaaaaaaaaaaaaaaaaaaaaaaagaauu

SEQ ID NO: 26969 - RNA, 1733 nt, Artificial Sequence
  mRNA product Design a-2 (hSL-A64-N5) comprising derived and/or modified sequence from LASV(LASV254-NIG-2011;Clade II)__AIT17674__GPCmut4 (opt4)
aggagaguccgcucagccagguugcagaagcggcuuagcguguguccuaaucuucucucugcguguagguaggccugugccgcaaacaagcuuaccaugggccagaucaucaccuucuuccaggaggugccccacgugaucgaggaggugaugaacaucgugcugaucgcccugagccugcuggccauccugaagggcaucuacaacguggccaccugcggccuguucggccuggugagcuuccugcugcugugcggcagaagcugcagcaccaccuacaagggcguguacgagcugcagacccuggagcuggacaugaccaaccugaacaugugcaugccccugagcugcaccaagaacaacagccaccacuacaucauggugggcaacgagaccggccuggagcugacccugaccaacaccagcaucaucaaccacaaguucugcaaccugagcgacgcccacaagaagaaccuguacaaccacgcccugaugagcaucaucagcaccuuccaccugagcauccccaacuucaaccaguacgaggccaugagcugcgacuucaacggcggcaagaucagcgugcaguacaaccugagccacagcuacgccguggacgccgccaaccacugcggcaccaucgccaacggcgugcugcagaccuucaugagaauggccuggggcggcagcuacaucgcccuggacagcggcaagggcaacugggacugcaucaugaccagcuaccaguaccugaucauccagaacaccaccugggaggaccacugccaguucagcagacccagccccaucggcuaccugggccugcugagccagagaaccagagacaucuacaucagcagaagaagaagaggcaccuucaccuggacccugagcgacagcgagggcaacgagacccccggcggcuacugccugaccagauggaugcugaucgaggccgagcugaagugcuucggcaacaccgccguggccaagugcaacgagaagcacgacgaggaguucugcgacaugcugagacuguucgacuucugcaagcaggccaucagaagacugaagacccccgcccaggccaacauccagcugaucaacaaggccgugaacgcccugaucaacgaccagcugaucaugaagaaccaccugagagacaucaugggcauccccuacugcaacuacagcaaguacugcuaccugaaccacaccgugaccggcaagaccagccugcccagaugcugccuggugagcaacggcagcuaccugaacgagacccacuucagcgacgacaucgagcagcaggccgacaacaugaucaccgagcugcugcagaaggaguacauggacagacagggcaagaccccccugggccugguggaccuguucguguucagcaccagcuucuaccugaucagcaucuuccugcaccuggugaagauccccacccacagacacgugaucggcaagcccugccccaagccccacagacugaaccacaugggcaucugcagcugcggccuguacaagcaccccggcgugcccgugaaguggaagagaugaggacuagucccuguucccagagcccacuuuuuuuucuuuuuuugaaauaaaauagccugucuuucagaucucaaaggcucuuuucagagccaccaaaaaaaaaaaaaaaaaaaaaaaaaaaaaaaaaaaaaaaaaaaaaaaaaaaaaaaaaaaaaaaaagaauu

SEQ ID NO: 26970 - RNA, 1733 nt, Artificial Sequence
  mRNA product Design a-2 (hSL-A64-N5) comprising derived and/or modified sequence from LASV(Nig08-A19;Clade III)__ADU56618__GPCmut4 (opt4)
aggagaguccgcucagccagguugcagaagcggcuuagcguguguccuaaucuucucucugcguguagguaggccugugccgcaaacaagcuuaccaugggccagaucgugaccuucuuccaggaggugccccacgugaucgaggaggugaugaacaucgugcugaucgcccugagcauccuggccauccugaagggccuguacaacaucgccaccugcggccugaucggccuggugaccuuccugcugcugagcggcagaagcugcagcaugaccuacaagggcguguacgagcugcagacccuggagcugaacaugaacacccugaacaugugcaugccccugagcugcaccaagaacaacagccaccacuacaucauggugggcaacgagaccggccuggagcugacccugaccaacaccagccugcugcaccacaaguucugcaaccugagcgacgcccacaagaagaaccuguacgaccacacccugaugagcaucaucagcaccuuccaccugagcauccccaacuucaaccaguacgaggccaugagcugcgacuucaacggcggcaagaucaccgugcaguacaaccugagccacagcuacgccaucgacgccgccaaccacugcggcaccguggccaacggcgugcugcagaccuucaugagaauggccuggggcggcagcuacaucgcccuggacagcggcagaggcaagugggacugcaucaugaccagcuaccaguaccugaucauccagaacaccaccugggaggaccacugccaguucagcagacccagccccaucggcuaccugggccugcugagccagagaaccagagacaucuacaucagcagaagaagaagaggcaccuucaccuggacccugagcgacagcgagggcaacgagacccccggcggcuacugccugaccagauggaugcugaucgaggccgagcugaagugcuucggcaacaccgccguggccaagugcaacgagaagcacgacgaggaguucugcgacaugcugagacuguucgacuucugcaagcaggccaucagaagacugaaggcccccgcccagaugagcauccagcugaucaacaaggccgugaacgcccugaucaacgaccagcugaucaugaagaaccaccugagagacaucaugggcauccccuacugcaacuacagcaaguacugcuaccugaaccacaccagcaccggcagaaccagccugcccagaugcugccuggugagcaacggcagcuaccugaacgagacccacuucagcgacgacaucgagcagcaggccgacaacaugaucaccgagaugcugcagaaggaguaccuggacagacagggcaagaccccccugggccugguggaccuguucguguucagcaccagcuucuaccugaucagcaucuuccugcaccuggugaagauccccacccacagacacaucgugggcaagcccugccccaagccccacagacugaaccacaugggcaucugcagcugcggccuguacaagcagcccggcgugcccgugagauggaagagaugaggacuagucccuguucccagagcccacuuuuuuuucuuuuuuugaaauaaaauagccugucuuucagaucucaaaggcucuuuucagagccaccaaaaaaaaaaaaaaaaaaaaaaaaaaaaaaaaaaaaaaaaaaaaaaaaaaaaaaaaaaaaaaaaagaauu

SEQ ID NO: 26971 - RNA, 1736 nt, Artificial Sequence
  mRNA product Design a-2 (hSL-A64-N5) comprising derived and/or modified sequence from LASV(G1180-SLE-2010;Clade IV)__AIT17168__GPCmut4 (opt4)
aggagaguccgcucagccagguugcagaagcggcuuagcguguguccuaaucuucucucugcguguagguaggccugugccgcaaacaagcuuaccaugggccagaucgugaccuucuuccaggaggugccccacgugaucgaggaggugaugaacaucgugcugaucgcccugagcauccuggccgugcugaagggccuguacaacuucgccaccugcggccuggugggccugcugaccuuccugcugcugugcggcagaagcugcaccgccagcagauacaagggcguguacgagcugcagacccuggagcugaacauggagacccugaacaugugcaugccccugagcugcaccaagaacaacagccaccacuacaucauggugggcaacgagaccggccuggagcugacccugaccaacaccagcaucaucaaccacaaguucugcaaccugagcgacgcccacaagaagaaccuguacgaccacgcccugaugagcaucaucagcaccuuccaccugagcauccccaacuucaaccaguacgaggccaugagcugcgacuucaacggcggcaagaucagcgugcaguacaaccugagccacagcuacgccggcgacgccgccaaccacugcggcaccguggccaacggcgugcugcagaccuucaugagaauggccuggggcggcagcuacaucgcccuggacagcggccacggcagcugggacugcaucaugaccagcuaccaguaccugaucauccagaacaccaccugggaggaccacugccaguucagcagacccagccccaucggcuaccugggccugcugagccagagaaccagagacaucuacaucagcagaagaagaagaggcaccuucaccuggacccugagcgacagcgagggcaaggacacccccggcggcuacugccugaccagauggaugcugaucgaggccgagcugaagugcuucggcaacaccgccguggccaagugcaacgagaagcacgacgaggaguucugcgacaugcugagacuguucgacuucugcaagcaggccauccagagacugaaggcccccgcccagaugagcauccagcugaucaacaaggccgugaacgcccugaucaacgaccagcugaucaugaagaaccaccugagagacaucaugggcauccccuacugcaacuacagcaaguacugcuaccugaaccacaccaccaccggcaagaccagccugcccaagugcugccuggugagcaacggcagcuaccugaacgagacccacuucagcgacgacaucgagcagcaggccgacaacaugaucaccgagaugcugcagaaggaguacauggagagacagggcaagaccccccugggccugguggaccuguucguguucagcaccagcuucuaccugaucagcaucuuccugcaccuggugaagauccccacccacagacacaucgugggcaagagcugccccaagccccacagacugaaccacaugggcaucugcagcugcggccuguacaagcagcccggcgugcccgugaaguggaagagaugaggacuagucccuguucccagagcccacuuuuuuuucuuuuuuugaaauaaaauagccugucuuucagaucucaaaggcucuuuucagagccaccaaaaaaaaaaaaaaaaaaaaaaaaaaaaaaaaaaaaaaaaaaaaaaaaaaaaaaaaaaaaaaaaagaauu

SEQ ID NO: 26972 - RNA, 1736 nt, Artificial Sequence
  mRNA product Design a-2 (hSL-A64-N5) comprising derived and/or modified sequence from LASV(G1442-SLE-2011;Clade IV)__AIT17180__GPCmut4 (opt4)
aggagaguccgcucagccagguugcagaagcggcuuagcguguguccuaaucuucucucugcguguagguaggccugugccgcaaacaagcuuaccaugggccagaucgugaccuucuuccaggaggugccccacgugaucgaggaggugaugaacaucgugcugaucgcccugagcauccuggccgugcugaagggccuguacaacguggccaccugcggccugaucggccuggugaccuuccugcugcugugcggcagaagcugcaccaccacccuguacaagggcguguacgagcugcagacccuggagcugaacauggagacccugaacaugugcaugccccugagcugcaccaagaacaacagccaccacuacaucagagugggcaacgagaccggccuggagcugacccugaccaacaccagcaucaucaaccacaaguucugcaaccugagcgacgcccacaagaagaaccuguacgaccacgcccugaugagcaucaucagcaccuuccaccugagcauccccaacuucaaccaguacgaggccaugagcugcgacuucaacggcggcaagaucagcgugcaguacaaccugagccacagcuacgccggcgacgccgccaaccacugcggcaccguggccaacggcgugcugcagaccuucaugagaauggccuggggcggcagcuacaucgcccuggacagcggcagaggcaacugggacugcaucaugaccagcuaccaguaccugaucauccagaacaccaccugggacgaccacugccaguucagcagacccagccccaucggcuaccugggccugcugagccagagaaccagagacguguacaucagcagaagaagaagaggcaccuucaccuggacccugagcgacagcgagggcaaggacacccccggcggcuacugccugaccagauggaugcugaucgaggccgagcugaagugcuucggcaacaccgccguggccaagugcaacgagaagcacgacgaggaguucugcgacaugcugagacuguucgacuucugcaagcaggccauccagagacugaaggcccccgcccagaugagcauccagcugaucaacaaggccgugaacgcccugaucaacgaccagcugaucaugaagaaccaccugagagacaucaugggcauccccuacugcaacuacagcaaguacugcuaccugaacaacaccgccaccggcaagaccagccugcccaagugcugccugaucagcaacggcagcuaccugaacgagacccacuucagcgacgacaucgagcaggaggccgacaacaugaucaccgagaugcugcagaaggaguacauggagagacagggcaagaccccccugggccugguggaccuguucguguucagcaccagcuucuaccugaucagcaucuuccugcaccuggugaagauccccacccacagacacaucgugggcaagagcugccccaagccccacagacugaaccacaugggcaucugcagcugcggccuguacaagcagcccggcgugcccgugagauggaagagaugaggacuagucccuguucccagagcccacuuuuuuuucuuuuuuugaaauaaaauagccugucuuucagaucucaaaggcucuuuucagagccaccaaaaaaaaaaaaaaaaaaaaaaaaaaaaaaaaaaaaaaaaaaaaaaaaaaaaaaaaaaaaaaaaagaauu

SEQ ID NO: 26973 - RNA, 1736 nt, Artificial Sequence
  mRNA product Design a-2 (hSL-A64-N5) comprising derived and/or modified sequence from LASV(G3010-SLE-2013;Clade IV)__AIT17344__GPCmut4 (opt4)
aggagaguccgcucagccagguugcagaagcggcuuagcguguguccuaaucuucucucugcguguagguaggccugugccgcaaacaagcuuaccaugggccagaucgugaccuucuuccaggaggugccccacgugaucgaggaggugaugaacaucgugcugaucgcccugagcauccuggccgugcugaagggccuguacaacuucgccaccugcggccuggugggccuggugaccuuccugcugcugugcggcagaagcugcaccaccagccuguacaagggcguguacgagcugcagacccuggagcugaacauggagacccugaacaugugcaugccccugagcugcaccaagaacaacagccaccacuacaucauggugggcaacgagaccggccuggagcugacccugaccaacaccagcaucaucaaccacaaguucugcaaccugagcgacgcccacaagaagaaccuguacaaccacgcccugaugagcaucaucagcaccuuccaccugagcauccccaacuucaaccaguacgaggccaugagcugcgacuucaacggcggcaagaucagcgugcaguacaaccugagccacagcuacgccggcgacgccgccagccacugcggcaccguggccaacggcgugcugcagaccuucaugagaauggccuggggcggcagcuacaucgcccuggacagcggcuacggcaagugggacugcaucaugaccagcuaccaguaccugaucauccagaacaccaccugggaggaccacugccaguucagcagacccagccccaucggcuaccugggccugcugagccagagaaccagagacaucuacaucagcagaagaagaagaggcaccuucaccuggacccugagcgacagcgagggcaaggacacccccggcggcuacugccugaccagauggaugcugaucgaggccgagcugaagugcuucggcaacaccgccguggccaagugcaacgagaagcacgacgaggaguucugcgacaugcugagacuguucgacuucugcaagcaggccauccagagacugaagacccccgcccagaugagcauccagcugaucaacaaggccgugaacgcccugaucaacgaccagcugaucaugaagaaccaccugagagacaucaugggcauccccuacugcaacuacagcaaguacugcuaccugaaccacaccaccaccggcaagaccagccugcccaagugcugccuggugagcaacggcagcuaccugaacgagacccacuucagcgacgacaucgagcagcaggccgacaacaugaucaccgagaugcugcagaaggaguacauggagagacagggcaagaccccccugggccugguggaccuguucguguucagcaccagcuucuaccugaucagcaucuuccugcaccuggugaagauccccacccacagacacaucgugggcaagagcugccccaagccccacagacugaaccacaugggcaucugcagcugcggccuguacaagcagcccggcgugcccgugagauggaagagaugaggacuagucccuguucccagagcccacuuuuuuuucuuuuuuugaaauaaaauagccugucuuucagaucucaaaggcucuuuucagagccaccaaaaaaaaaaaaaaaaaaaaaaaaaaaaaaaaaaaaaaaaaaaaaaaaaaaaaaaaaaaaaaaaagaauu

SEQ ID NO: 26974 - RNA, 1736 nt, Artificial Sequence
  mRNA product Design a-2 (hSL-A64-N5) comprising derived and/or modified sequence from LASV(G502-SLE-2009;Clade IV)__AIT17126__GPCmut4 (opt4)
aggagaguccgcucagccagguugcagaagcggcuuagcguguguccuaaucuucucucugcguguagguaggccugugccgcaaacaagcuuaccaugggccagaucgugaccuucuuccaggaggugccccacgugaucgaggaggugaugaacaucgugcugaucgcccugagcauccuggccgugcugaagggccuguacaacuucgccaccugcggccuggugggccugcugaccuuccugcugcugugcggcagaagcugcaccaccggccuguacaagggcguguacgagcugcagacccuggagcugaacauggagacccugaacaugugcaugccccugagcugcaccaagaacaacagccaccacuacaucauggugggcaacgagaccggccuggagcugacccugaccaacaccagcaucaucaaccacaaguucugcaaccugagcgacgcccacaagaagaaccuguacgaccacgcccugaugagcaucaucagcaccuuccaccugagcauccccaacuucaaccaguacgaggccaugagcugcgacuucaacggcggcaagaucagcgugcaguacaaccugagccacagcuacgccggcgacgccgccgaccacugcggcaccguggccaacggcgugcugcagaccuucaugagaauggccuggggcggcagcuacaucgcccuggacagcggcagaggcagaugggacugcaucaugaccagcuaccaguaccugaucauccagaacaccaccugggaggaccacugccaguucagcagacccagccccaucggcuaccugggccugcugagccagagaaccagagacaucuacaucagcagaagaagaagaggcaccuucaccuggacccugagcgacagcgagggcaaggacacccccggcggcuacugccugaccagauggaugcugaucgaggccgagcugaagugcuucggcaacaccgccguggccaagugcaacgagaagcacgacgaggaguucugcgacaugcugagacuguucgacuucugcaagcaggccauccagagacugaaggcccccgcccagaugagcauccagcugaucaacaaggccgugaacgcccugaucaacgaccagcuggugaugaagaaccaccugagagacaucaugggcauccccuacugcaacuacagcagauacugcuaccugaaccacaccaccaccggcagaaccagccugcccaagugcugccuggugagcaacggcagcuaccugaacgagacccacuucagcgacgacaucgagcagcaggccgacaacaugaucaccgagaugcugcagaaggaguacauggagagacagggcaagaccccccugggccugguggaccuguucguguucagcaccagcuucuaccugaucagcaucuuccugcaccuggugaagauccccacccacagacacaucgugggcaagagcugccccaagccccacagacugaaccacaugggcaucugcagcugcggccuguacaagcagcccggcgugcccgugaaguggaagagaugaggacuagucccuguucccagagcccacuuuuuuuucuuuuuuugaaauaaaauagccugucuuucagaucucaaaggcucuuuucagagccaccaaaaaaaaaaaaaaaaaaaaaaaaaaaaaaaaaaaaaaaaaaaaaaaaaaaaaaaaaaaaaaaaagaauu

SEQ ID NO: 26975 - RNA, 1736 nt, Artificial Sequence
  mRNA product Design a-2 (hSL-A64-N5) comprising derived and/or modified sequence from LASV(G733-SLE-2010;Clade IV)__AIT17154__GPCmut4 (opt4)
aggagaguccgcucagccagguugcagaagcggcuuagcguguguccuaaucuucucucugcguguagguaggccugugccgcaaacaagcuuaccaugggccagaucgugaccuucuuccaggaggugccccacgugaucgaggaggugaugaacaucgugcugaucgcccugagcauccuggccgugcugaagggccuguacaacuucgccaccugcggcaucgugggccuggugagcuuccugcugcugugcggcagaagcugcaccaccagccuguacaagggcguguacgagcugcagacccuggagcugaacauggagacccugaacaugugcaugccccugagcugcaccaagaacaacagccaccacuacaucauggugggcaacgagaccggccuggagcugacccugaccaacaccagcaucaucaaccacaaguucugcaaccugagcgacgcccacaagaagaaccuguacgaccacgcccugaugagcaucaucagcaccuuccaccugagcauccccaacuucaaccaguacgaggccaugagcugcgacuucaacggcggcaagaucagcgugcaguacaaccugagccacagcuacgccggcgacgccgccaaccacugcggcaccaucgccaacggcgugcugcagaccuucaugagaauggccuggggcggcagcuacaucgcccuggacagcggcagagacagaugggacugcaucaugaccagcuaccaguaccugaucauccagaacaccaccugggaggaccacugccaguucagcagacccagccccaucggcuaccugggccugcugagccagagaaccagagacaucuacaucagcagaagaagaagaggcaccuucaccuggacccugagcgacagcgagggcaaggacacccccggcggcuacugccugaccagauggaugcugaucgaggccgagcugaagugcuucggcaacaccgccguggccaagugcaacgagaagcacgacgaggaguucugcgacaugcugagacuguucgacuucugcaagcaggccauccagagacugaaggcccccgcccagaugagcauccagcugaucaacaaggccgugaacgcccugaucaacgaccagcugaucaugaagaaccaccugagagacaucaugggcauccccuacugcaacuacagcaaguacugcuaccugaaccacaccaccaccggcaagaccagccugcccaagugcugccuggugagcaacggcagcuaccugaacgagacccacuucagcgacgacaucgagcagcaggccgacaacaugaucaccgagaugcugcagaaggaguacauggagagacagggcaagaccccccugggccugguggaccuguucguguucagcaccagcuucuaccugaucagcaucuuccugcaccuggugaagauccccacccacagacacguggugggcaagagcugccccaagccccacagacugaaccacaugggcaucugcagcugcggccuguacggccagcccggcgugcccgugaaguggaagagaugaggacuagucccuguucccagagcccacuuuuuuuucuuuuuuugaaauaaaauagccugucuuucagaucucaaaggcucuuuucagagccaccaaaaaaaaaaaaaaaaaaaaaaaaaaaaaaaaaaaaaaaaaaaaaaaaaaaaaaaaaaaaaaaaagaauu

SEQ ID NO: 26976 - RNA, 1736 nt, Artificial Sequence
  mRNA product Design a-2 (hSL-A64-N5) comprising derived and/or modified sequence from MOPV/LASV reassortant(IGS-1;Clade IV)__AFY05576__GPCmut4 (opt4)
aggagaguccgcucagccagguugcagaagcggcuuagcguguguccuaaucuucucucugcguguagguaggccugugccgcaaacaagcuuaccaugggccagaucgugaccuucuuccaggaggugccccacgugaucgaggaggugaugaacaucgugcugaucgcccugagcgugcuggccgugcugaagggccuguacaacuucgccaccugcggccuggugggccuggugaccuuccugcugcugugcggcagaagcugcaccaccagccuguacaagggcguguacgagcugcagacccuggagcugaacauggagacccugaacaugugcaugccccugagcugcaccaagaacaacagccaccacuacaucauggugggcaacgagaccggccuggagcugacccugaccaacaccagcaucaucaaccacaaguucugcaaccugagcgacgcccacaagaagaaccuguacgaccacgcccugaugagcaucaucagcaccuuccaccugagcauccccaacuucaaccaguacgaggccaugagcugcgacuucaacggcggcaagaucagcgugcaguacaaccugagccacagcuacgccggcgacgccgccaaccacugcggcaccguggccaacggcgugcugcagaccuucaugagaauggccuggggcggcagcuacaucgcccuggacagcggcagaggcaacugggacugcaucaugaccagcuaccaguaccugaucauccagaacaccaccugggaggaccacugccaguucagcagacccagccccaucggcuaccugggccugcugagccagagaaccagagacaucuacaucagcagaagaagaagaggcaccuucaccuggacccugagcgacagcgagggcgaggacacccccggcggcuacugccugaccagauggaugcugaucgaggccgagcugaagugcuucggcaacaccgccguggccaagugcaacgagaagcacgacgaggaguucugcgacaugcugagacuguucgacuucugcaagcaggccauccagagacugaaggcccccgcccagaugagcauccagcugaucaacaaggccgugaacgcccugaucaacgaccagcugaucaugaagaaccaccugagagacaucaugggcauccccuacugcaacuacagcaaguacugcuaccugaaccacaccaccaccggcagaaccagccugcccaagugcugccuggugagcaacggcagcuaccugaacgagacccacuucagcgacgacaucgagcagcaggccgacaacaugaucaccgagaugcugcagaaggaguacauggagagacagggcaagaccccccugggccugguggaccuguucguguucagcaccagcuucuaccugaucagcaucuuccugcaccuggugaagauccccacccacagacacaucgugggcaagagcugccccaagccccacagacugaaccacaugggcaucugcagcugcggccuguacaagcagcccggcgugcccgugaaguggaagagaugaggacuagucccuguucccagagcccacuuuuuuuucuuuuuuugaaauaaaauagccugucuuucagaucucaaaggcucuuuucagagccaccaaaaaaaaaaaaaaaaaaaaaaaaaaaaaaaaaaaaaaaaaaaaaaaaaaaaaaaaaaaaaaaaagaauu

SEQ ID NO: 26977 - RNA, 1736 nt, Artificial Sequence
  mRNA product Design a-2 (hSL-A64-N5) comprising derived and/or modified sequence from LASV(LM765-SLE-2012;Clade IV)__AIT17814__GPCmut4 (opt4)
aggagaguccgcucagccagguugcagaagcggcuuagcguguguccuaaucuucucucugcguguagguaggccugugccgcaaacaagcuuaccaugggccagaucgugaccuucuuccaggaggugccccacgugaucgaggaggugaugaacaucgugcugaucgcccugagcauccuggccgugcugaagggccuguacaacuucgccaccugcggccuggugggccuggugaccuuccugcugcugugcggcagaagcugcaccaccagccuguacaagggcguguacgagcugcagacccuggagcugaacauggagacccugaacaugugcaugccccugagcugcaccaagaacaacagccaccacuacaucauggugggcaacgagaccggccuggagcugacccugaccaacaccagcaucaucgaccacaaguucugcaaccugagcgacgcccacagaaagaaccuguacgaccacgcccugaugagcaucaucagcaccuuccaccugagcauccccaacuucaaccaguacgaggccaugagcugcgacuucaacggcggcaagaucagcgugcaguacaaccugagccacagcuacgccaaggacgccgccgaccacugcggcaccguggccaacggcgugcugcagaccuucaugagaauggccuggggcggcagcuacaucgcccuggacagcggcagaggcagaugggacugcaucaugaccagcuaccaguaccugaucauccagaacaccaccugggaggaccacugccaguucagcagacccagccccaucggcuaccugggccugcugagccagagaaccagagacaucuacaucagcagaagaagaagaggcaccuucaccuggacccugagcgacagcgagggcaaggacacccccggcggcuacugccugaccagauggaugcugaucgaggccgagcugaagugcuucggcaacaccgccguggccaagugcaacgagaagcacgacgaggaguucugcgacaugcugagacuguucgacuucugcaagcaggccauccagagacugaaggcccccgcccagaugagcauccagcugaucaacaaggccgugaacgcccugaucaacgaccagcugaucaugaagaaccaccugagagacaucaugggcauccccuacugcaacuacagcaaguacugcuaccugaaccacaccaccaccggcaagaccagccugcccaagugcugccuggugagcaacggcagcuaccugaacgagacccacuucagcgacgacaucgagcagcaggccgacaacaugaucaccgagaugcugcagaaggaguacauggagagacagggcaagaccccccugggccugguggaccuguucguguucagcaccagcuucuaccugaucagcaucuuccugcaccuggugaagauccccacccacagacacaucgugggcaagcccugccccaagccccacagacugaaccacaugggcaucugcagcugcggccuguacaagcagcccggcgugcccgugaaguggaagagaugaggacuagucccuguucccagagcccacuuuuuuuucuuuuuuugaaauaaaauagccugucuuucagaucucaaaggcucuuuucagagccaccaaaaaaaaaaaaaaaaaaaaaaaaaaaaaaaaaaaaaaaaaaaaaaaaaaaaaaaaaaaaaaaaagaauu

SEQ ID NO: 26978 - RNA, 1736 nt, Artificial Sequence
  mRNA product Design a-2 (hSL-A64-N5) comprising derived and/or modified sequence from LASV(LM776-SLE-2012;Clade IV)__AIT17824__GPCmut4 (opt4)
aggagaguccgcucagccagguugcagaagcggcuuagcguguguccuaaucuucucucugcguguagguaggccugugccgcaaacaagcuuaccaugggccagaucgugaccuucuuccaggaggugccccacgugaucgaggaggugaugaacaucgugcugaucgcccugagcauccuggccgugcugaagggccuguacaacuucgccaccugcggccuggugggccuggugaccuuccugcugcugugcggcagaagcugcaccaccagcguguacaagggcguguacgagcugcagacccuggagcugaacauggagacccugaacaugugcaugccccugagcugcaccaagaacaacagccaccacuacaucauggugggcaacgagaccggccuggagcugacccugaccaacaccagcaucaucaaccacaaguucugcaaccugagcgacgcccacaagaagaaccuguacgaccacgcccugaugagcaucaucagcaccuuccaccugagcauccccaacuucaaccaguacgaggccaugagcugcgacuucaacggcggcaagaucagcgugcaguacaaccugagccacagcuacgccggcgacgccgccaaccacugcggcaccguggccaacggcgugcugcagaccuucaugagaauggccuggggcggcagcuacaucgcccuggacagcggccacggcaagugggacugcaucaugaccagcuaccaguaccugaucauccagaacaccaccugggaggaccacugccaguucagcagacccagccccaucggcuaccugggccugcugagccagagaaccagagacaucuacaucagcagaagaagaagaggcaccuucaccuggacccugagcgacagcgagggcaaggacacccccggcggcuacugccugaccagauggaugcugaucgaggccgagcugaagugcuucggcaacaccgccguggccaagugcaacgagaagcacgacgaggaguucugcgacaugcugagacuguucgacuucugcaagcaggccauccagagacugaaggcccccgcccagaugagcauccagcugaucaacaaggccgugaacgcccugaucaacgaccagcugaucaugaagaaccaccugagagacaucaugggcauccccuacugcaacuacagcaaguacugcuaccugaaccacaccaccaccggcaagaccagccugcccaagugcugccuggugagcaacggcagcuaccugaacgagacccacuucagcgacgacaucgagcagcaggccgacaacaugaucaccgagaugcugcagaaggaguacauggagagacagggcaagaccccccugggccugguggaccuguucguguucagcaccagcuucuaccugaucagcaucuuccugcaccuggugaagauccccacccacagacacaucgugggcaagagcugccccaagccccacagacugaaccacaugggcaucugcagcugcggccuguacaagcagcccggcgugcccgugagauggaagagaugaggacuagucccuguucccagagcccacuuuuuuuucuuuuuuugaaauaaaauagccugucuuucagaucucaaaggcucuuuucagagccaccaaaaaaaaaaaaaaaaaaaaaaaaaaaaaaaaaaaaaaaaaaaaaaaaaaaaaaaaaaaaaaaaagaauu

SEQ ID NO: 26979 - RNA, 1736 nt, Artificial Sequence
  mRNA product Design a-2 (hSL-A64-N5) comprising derived and/or modified sequence from LASV(Mad39;Clade IV)__ANH09722__GPCmut4 (opt4)
aggagaguccgcucagccagguugcagaagcggcuuagcguguguccuaaucuucucucugcguguagguaggccugugccgcaaacaagcuuaccaugggccagaucgugaccuucuuccaggaggugccccacgugaucgaggaggugaugaacaucgugcugaucgcccugagcauccuggccgugcugaagggccuguacaacguggccaccugcggccugaucggccuggugaccuuccugcugcugugcggcagaagcugcaccaccacccuguacaagggcguguacgagcugcaggcccuggagcugaacauggagacccugaacaugugcaugccccugagcugcaccaagaacaacagccaccacuacaucagagugggcaacgagaccggccuggagcugacccugaccaacaccagccugaucaaccacaaguucugcaaccugagcgacgcccacaagaagaaccuguacgaccacgcccugaugagcaucaucagcaccuuccaccugagcauccccaacuucaaccaguacgaggccaugagcugcgacuucaacgacggcaagaucagcgugcaguacaaccugagccacaccuacgccggcgacaccgccaaccacugcggcaccguggccaacggcgugcugcagaccuucaugagaauggccuggggcggcagcuacaucgcccuggacagcggcagaggcggcugggacugcaucaugaccagcuaccaguaccugaucauccagaacaccaccugggaggaccacugccaguucagcagacccagccccaucggcuaccugggccugcugagccagagaaccagagacaucuacaucagcagaagaagaagaggcaccuucaccuggacccugagcgacagcgagggcaaggacacccccggcggcuacugccugaccagauggaugcugaucgaggccgagcugaagugcuucggcaacaccgccguggccaagugcaacgagaagcacgacgaggaguucugcgacaugcugagacuguucgacuucugcaagcaggccauccagagacugaaggcccccgcccagaugagcauccagcugaucaacaaggccgugaacgcccugaucaacgaccagcugaucaugaagaaccaccugagagacaucaugggcauccccuacugcaacuacagcaaguacugcuaccugaaccacaccgugaccggcaagaccagccugcccaagugcugccuggugagcaacggcagcuaccugaacgagacccacuucagcgacgacaucgagcagcaggccgacaacaugaucaccgagaugcugcagaaggaguacauggagagacagggcaagaccccccugggccugguggaccuguucguguucagcaccagcuucuaccugaucagcaucuuccugcaccuggugaagauccccacccacagacacguggugggcaagcccugccccaagccccacagacugaaccacaugggcaucugcagcugcggcuucuacaagcagcccggcgugcccgugagauggaagagaugaggacuagucccuguucccagagcccacuuuuuuuucuuuuuuugaaauaaaauagccugucuuucagaucucaaaggcucuuuucagagccaccaaaaaaaaaaaaaaaaaaaaaaaaaaaaaaaaaaaaaaaaaaaaaaaaaaaaaaaaaaaaaaaaagaauu

SEQ ID NO: 26980 - RNA, 1736 nt, Artificial Sequence
  mRNA product Design a-2 (hSL-A64-N5) comprising derived and/or modified sequence from LASV(Z0947-SLE-2011;Clade IV)__AIT17840__GPCmut4 (opt4)
aggagaguccgcucagccagguugcagaagcggcuuagcguguguccuaaucuucucucugcguguagguaggccugugccgcaaacaagcuuaccaugggccagaucgugaccuucuuccaggaggugccccacgugaucgaggaggugaugaacaucgugcugaucgcccugagcauccuggccgugcugaagggccuguacaacuucgccaccugcggccuggugggccuggugaccuuccugcugcugugcggcagaagcugcaccaucagccuguacaagggcguguacgagcugcagacccuggagcugaacauggagacccugaacaugugcaugccccugagcugcaccaagaacaacagccaccacuacaucauggugggcaacgagaccggccuggagcugacccugaccaacaccagcaucaucaaccacaaguucugcaaccugagcgacgcccacaagaagaaccuguacgaccacgcccugaugagcaucaucagcaccuuccaccugagcauccccaacuucaaccaguacgaggccaugagcugcgacuucaacggcggcaagaucagcgugcaguacaaccugagccacagcuacgccggcgacgccgccaaccacugcggcaccguggccaacggcgugcugcagaccuucaugagaauggccuggggcggcagcuacaucgcccuggacagcggcagagacagaugggacugcaucaugaccagcuaccaguaccugaucauccagaacaccaccugggaggaccacugccaguucagcagacccagccccaucggcuaccugggccugcugagccagagaaccagagacaucuacaucagcagaagaagaagaggcaccuucaccuggacccugagcgacagcgagggcaaggacacccccggcggcuacugccugaccagauggaugcugaucgaggccgagcugaagugcuucggcaacaccgccguggccaagugcaacgagaagcacgacgaggaguucugcgacaugcugagacuguucgacuucugcaagcaggccauccagagacugaaggcccccgcccagaugagcauccagcugaucaacaaggccgugaacgcccugaucaacgaccagcugaucaugaagaaccaccugagagacaucaugggcauccccuacugcaacuacagcaaguacugcuaccugaaccacaccaccaccggcaagaccagccugcccaagugcugccuggugagcaacggcagcuaccugaacgagacccacuucagcgacgacaucgagcagcaggccgacaacaugaucaccgagaugcugcagaaggaguacauggagagacagggcaagaccccccugggccugguggaccuguucguguucagcaccagcuucuaccugaucagcaucuuccugcaccuggugaagauccccacccacagacacaucgugggcaagcccugccccaagccccacagacugaaccacaugggcaucugcagcugcggccuguacaagcagcccggcgugcccgugaaguggaagagaugaggacuagucccuguucccagagcccacuuuuuuuucuuuuuuugaaauaaaauagccugucuuucagaucucaaaggcucuuuucagagccaccaaaaaaaaaaaaaaaaaaaaaaaaaaaaaaaaaaaaaaaaaaaaaaaaaaaaaaaaaaaaaaaaagaauu

SEQ ID NO: 26981 - RNA, 1736 nt, Artificial Sequence
  mRNA product Design a-2 (hSL-A64-N5) comprising derived and/or modified sequence from LASV(Josiah;Clade IV)__NP_694870__GPCmut4 (opt5)
aggagaguccgcucagccagguugcagaagcggcuuagcguguguccuaaucuucucucugcguguagguaggccugugccgcaaacaagcuuaccaugggccagaucgugaccuucuuucaagaggucccccacguuauugaagaggugaugaacaucgugcugauugcccucagcguccuggcugugcuuaaggggcuguacaauuucgccacaugcggacucguuggccuggugacguuucuucugcucugugggagauccugcaccacaucucuguauaaaggagucuacgaacugcagacccucgagcugaacauggaaacacuuaauauguguaugccucugagcugcaccaagaacaauucccaucacuauaucauggugggcaacgagacagggcucgagcugacccuuacgaauaccucuauuaucaaccauaaauucuguaaucugagcgacgcgcacaagaaaaaccucuacgaucaugcucugauguccaucauuucuacauuucaccugagcaucccgaauuucaaccaguaugaagccauguccugcgacuuuaauggaggcaagauuagcguucaguacaaccucucucacuccuaugccggcgaugcugccaaucauugugggaccguggcuaacggaguccugcaaacauucaugcggauggccuggggcgggagcuacaucgcgcuugacucuggacgcggcaacugggauugcauuaugaccuccuaccaguaucugaucauucagaauacgacaugggaggaccacugucaguuuagcagacccucuccuaucggguaccucggacugcuuucccaacggacccgcgauaucuauauuagcagacggcgcagaggcacauucaccuggacccuguccgacucugaaggcaaggauacacccgggggauacugccucacgcgguggaugcugaucgaggccgagcugaaauguuuuggcaacaccgcuguggccaagugcaaugaaaaacaugacgaggaguucugcgauaugcuccgccuguuugacuucuguaagcaggcuauucagagacuuaaagccccugcgcagaugagcauccaacugauuaacaaggccgugaaugcucucaucaacgaucagcugaucaugaagaaucaccuucgggacauuauggggauccccuauugcaacuacuccaaauauuguuaccugaaucacacaaccacaggacgcaccagccucccuaagugcugucuggucucuaacggcuccuaccugaaugaaacgcauuucagcgacgauauugaacagcaagccgacaacaugaucacagagaugcuccagaaagaguauauggaaagacaggggaagaccccgcugggacuuguugaucuguuuguguucucuaccagcuuuuaccucauuuccaucuuccugcaccuggugaaaauccccacacaucggcacauugucggcaagucuugcccuaaaccccaucgccuuaaucacaugggcaucuguagcugcgggcucuauaagcagccuggagugcccguuaaguggaaaagaugaggacuagucccuguucccagagcccacuuuuuuuucuuuuuuugaaauaaaauagccugucuuucagaucucaaaggcucuuuucagagccaccaaaaaaaaaaaaaaaaaaaaaaaaaaaaaaaaaaaaaaaaaaaaaaaaaaaaaaaaaaaaaaaaagaauu

SEQ ID NO: 26982 - RNA, 1733 nt, Artificial Sequence
  mRNA product Design a-2 (hSL-A64-N5) comprising derived and/or modified sequence from LASV(LP;Clade I)__AAF86701__GPCmut4 (opt5)
aggagaguccgcucagccagguugcagaagcggcuuagcguguguccuaaucuucucucugcguguagguaggccugugccgcaaacaagcuuaccaugggccagaucauuaccuucuuucaagaggugccccacgucaucgaagagguuaugaacauugugcugaucgcccucagccugcuugcuauucugaaggggcucuacaauaucgccacaugcggaaucauuggccugguggcguuccuuuuucugugugggaaauccugcucucucacgcugaagggaggcuaugaacugcagacccucgagcugaacauggaaacacuuaauauguguaugccucugagcugcaccaaaaacuccucucaucacuacaucagagucgggaaugagacaggacucgagcugacccuuacaaacaccagcauuaucaaucauaaguucuguaaccuguccgacgcucacaaaaagaaucucuaugaucaugcccugaugucuauuaucagcacguuucaccuguccauuccgaacuucaaucaguacgaagccaugagcugcgacuuuaacggcggcaagaucucugugcaguauaaucucucccacagcuacgcuggggaugccgcugagcauuguggaaccguugccaacggcgugcugcaaacauucaugcggauggcguggggagggcgcuauaucgcccuugacucuggcaaagggaauugggauugcauuaugaccuccuaccaguaccugaucauucagaacacaaccugggaagaccacugucaguuuagcagacccucuccuaucggauaucucggccugcuuucccaacggacgcgcgauauuuacaucagcagacggcgcagaggcacauucaccuggacacuguccgacucugaggggaacgagacccccggaggcuauugccucacccgguggaugcugaucgaagcugagcugaaguguuuugggaauacagccgucgcuaaaugcaacgaaaagcaugaugaggaguucugcgacaugcuccgccuguuugauuucuguaaacaggccauuagacggcuuaaggcgccugcccagaugagcauccagcugauuaauaaggcugugaacgcccucaucaaugaccaacugauuaugaaaaaccaccuucgcgauaucaugggaauccccuacugcaauuauuccaaguacuguuaucugaaccacacgagcucuggcagaaccucccucccuaaaugcugucugauuagcaaugggucuuaccugaacgaaacacaguucagcgacgacaucgagcagcaagcugauaauaugauuaccgaaaugcuccagaaggaguacaucgaacggcagggaaaaacaccgcugggccuuguugacauuuuuaucuucuccaccucuuuuuaucugauuagcaucuuccuccaucugaucaagauucccacgcaccgccauaucgugggcaaaccuugccccaagccucacagacugaaccauaugggggucuguuccugcggacuuuacaagcaccccggcgugccgacaaaauggaagcggugaggacuagucccuguucccagagcccacuuuuuuuucuuuuuuugaaauaaaauagccugucuuucagaucucaaaggcucuuuucagagccaccaaaaaaaaaaaaaaaaaaaaaaaaaaaaaaaaaaaaaaaaaaaaaaaaaaaaaaaaaaaaaaaaagaauu

SEQ ID NO: 26983 - RNA, 1733 nt, Artificial Sequence
  mRNA product Design a-2 (hSL-A64-N5) comprising derived and/or modified sequence from LASV(803213;Clade II)__AAF86703__GPCmut4 (opt5)
aggagaguccgcucagccagguugcagaagcggcuuagcguguguccuaaucuucucucugcguguagguaggccugugccgcaaacaagcuuaccaugggccagaucauuaccuucuuucaagaggugccccacgucaucgaagagguuaugaacauugugcugaucgcccucagccugcuugcuauucugaaggggaucuacaauguggccacaugcggacucuucggccugaucuccuuucuucugcucugugggagaucuugcagcgucacguauaaaggaguguacgaacugcagacccuggagcucaacauggcgaaucugaacauguguaugccucuuuccugcacaaagaauaacucucaucacuauauuaugguuggcaaugaaaccgggcuggagcucacacugaccaacacaagcaucauuaaucauaaauucuguaaccuuuccgacgcucacaagaaaaaucuguacgaucaugcccucaugucuaucauuagcaccuuucaccuguccaucccgaacuucaaucaguaugaggccaugagcugcgacuuuaacggaggcaagauuucugugcaguacaaucugucccacagcuucgcugucgaugccgcuaaccauuguggcacgaucgccaacggggugcuccaaaccuuuaugcggauggcguggggaggcucuuauaucgcccuggacuccgggaagggaaauugggauugcauuaugacaagcuaccaguaccuuaucauucagaacaccacaugggaagaccacugucaguucucucgccccuccccuaucggcuaucuggggcuccugagccaaagaacccgggauauuuacaucucccgcagacggcgcggaacguuuacauggacccuuucugacagcgagggcaaugaagcucccggcggguauugccugacaagauggaugcucaucgaggccgagcugaaauguuucggaaacaccgcuguugccaagugcaaugaaaaacaugaugaggaauuuugcgacaugcugcgccucuucgauuucuguaagcaggcgauuaaacggcugaagaccccugcccagauguccauccagcuuauuaacaaggcugugaaugcccugaucaacgaccaacucauuaugaaaaaucaccugagagauaucaugggcauccccuacugcaacuauagccgguacuguuaucuuaaucacacagucacggggaagaccucucugccucgcugcugucucguguccaacggaagcuaccugaaugagacacauuuuucugacgacauugaacagcaggcugauaacaugaucaccgagaugcugcaaaaagaguacauggacagacagggcaagacaccgcucgggcugguggaucuuuucgucuuuagcaccuccuucuaucugauuucuaucuuucuccaccugguuaaaauucccacgcaucggcacaucgugggaaagccuugccccaaaccucaucgccugaaucacaugggcauuuguagcugcggccuuuacaagcaccccggggugccggucaaguggaaaagaugaggacuagucccuguucccagagcccacuuuuuuuucuuuuuuugaaauaaaauagccugucuuucagaucucaaaggcucuuuucagagccaccaaaaaaaaaaaaaaaaaaaaaaaaaaaaaaaaaaaaaaaaaaaaaaaaaaaaaaaaaaaaaaaaagaauu

SEQ ID NO: 26984 - RNA, 1733 nt, Artificial Sequence
  mRNA product Design a-2 (hSL-A64-N5) comprising derived and/or modified sequence from LASV(GA391;Clade III)__CAA36645__GPCmut4 (opt5)
aggagaguccgcucagccagguugcagaagcggcuuagcguguguccuaaucuucucucugcguguagguaggccugugccgcaaacaagcuuaccaugggccagaucgugaccuucuuucaagaggucccccacguuauugaagaggugaugaacaucgugcugauugcccucagcauccuggcuauucuuaaggggcuguacaaugucgccacaugcggacucaucggccuggugacguuccuucugcucuccgggagaucuuguagccugaucuauaaaggaaccuacgaacugcagacacucgagcugaacauggaaacccuuaauaugugcaugccucuguccuguacaaagaacaauucucaucacuauauucggguuggcaacgagaccgggcucgagcugacacuuaccaauacgagcauccugaaccauaaauuuugcaaucucuccgacgcgcacaagcgcaaccuguacgaucauucucugaugagcauuaucuccaccuuccaccucagcauuccgaauuuuaaccaguaugaagcuaugucuugugacuucaauggaggcaaaaucacagugcaguacaaccugucccacagcuuugccgucgaugccgcuggccauugcgggacccuugccaauggagugcugcaaacauucaugagaauggcuuggggcgggucuuauauugcccucgacuccggacggggcaacugggauuguaucaugaccagcuaccaguaccugaucauucagaacacgacaugggacgaucacugccaguuuucucgccccuccccuaucggguaucuuggacugcucagccaaagaacccgggacauuuacaucucccgcagacggcgcggcacauucaccuggacccugucugauagcgagggcaaugaaacacccgggggauauugucugacgagauggaugcucauugaggcggagcugaagugcuuuggcaacaccgccguugcuaaguguaaugaaaaacaugacgaggaguucugcgauaugcuucggcuguuugacuucugcaagcaggccauccgcagacucaaaaccccugcucagauguccauccagcugauuaacaaggccgugaaugcgcuuaucaacgaucaacugauuaugaaaaaucaccuccgggacaucauggggauucccuacuguaacuauagccgcuacugcuaucugaaucacacaucuacaggaaagaccucccugccuagauguugccucaucagcaacggcucuuaccugaaugaaacgaaguucagcgacgauaucgaacagcaggccgacaacaugauuacagagaugcuucaaaaagaguacaucgaucggcaggggaagaccccgcugggacucgucgaccuguuuguguucuccaccucuuuuuaucugauuagcaucuuccuucaucucgugaaaauucccacacacagacauaucgucggcaagccuugucccaaaccucaccgccugaaucauaugggcauuugcuccugugggcuguacaagcagcccggaguuccggugcgguggaaaagaugaggacuagucccuguucccagagcccacuuuuuuuucuuuuuuugaaauaaaauagccugucuuucagaucucaaaggcucuuuucagagccaccaaaaaaaaaaaaaaaaaaaaaaaaaaaaaaaaaaaaaaaaaaaaaaaaaaaaaaaaaaaaaaaaagaauu

SEQ ID NO: 26985 - RNA, 1736 nt, Artificial Sequence
  mRNA product Design a-2 (hSL-A64-N5) comprising derived and/or modified sequence from LASV(AV;Clade V)__CCA30314__GPCmut4 (opt5)
aggagaguccgcucagccagguugcagaagcggcuuagcguguguccuaaucuucucucugcguguagguaggccugugccgcaaacaagcuuaccaugggccagaucgugaccuucuuucaagaggucccccacguuauugaagaggugaugaacaucgugcugauugcccucagcauccuggcuguccuuaaggggcuguacaauauugccacaugcggacucaucggccugaucacguuccuucugcucugugggagauccugcucuagcaaccuguauaaaggaguguacgaacugcagucccucgaccugaauauggagacccuuaacauguguaugccucugucuugcacaaagaauaacagccaucacuauauucggguuggcaaugauaccgggcucgaacugacacuuaccaacacauccauccugaaucauaaauuuuguaaccucucugacgcgcacaagaaagaucuguacgaccaugcucugaugagcauuaucuccaccuuccaccucagcauuccgaauuuuaaccaguaugaggccaugucuugcgauuucaauggaggcaagaucuccgugcaguacaaccugagccacucuuaugccauugacgcugccaaucauuguggcacggucgcuaacgggauccuucaaaccuuuaugcgcauggccuggggaggcuccuacaucgcgcuggauagcgggagaggaaacugggacugcauuaugacaucuuaccaguaucucaucauucagaauaccacaugggagaaccacugucaguucucccggcccagcccuaucggcuaccuggggcuucugucccaacgcaccagagauauuuauaucucucggcgcagacggggaacguuuacauggacccucagcgacuccgaaggcaaugccacacccggcggguacugccugacccgcuggaugcugaucgaggcugaacucaaguguuucggaaacaccgccguggcuaaaugcaaugagaagcaugaugaggaauuuugcgacaugcugagacuuuucgauuuuuguaaacaggccauuagccggcugaagucuccugcgcagauguccauccagcucauuaacaaagccguuaaugcucugaucaacgaccaacuuauuaugaagaaucaucugcgcgacaucaugggcauccccuauugcaacuacagcaaguauuguuaccucaaucacacaauuacggggaaaaccucucugccuaagugcugucuggugagcaacggauccuaccucaaugagacacacuucucugaugacaucgaacagcaggccgauaacaugauuaccgagaugcugcaaaaagaauauauggagagacagggcaagacaccgcuugggcuggucgaccucuucguguuuagcaccuccuucuaccugaucagcauuuuucugcggcuugugaaaauccccacgcaccgccauauugucggaaagccuugccccaaaccucacagacucaaucauaugggcaucuguucuugcggccuguauaagcagcccgggguuccggugcgguggaagagaugaggacuagucccuguucccagagcccacuuuuuuuucuuuuuuugaaauaaaauagccugucuuucagaucucaaaggcucuuuucagagccaccaaaaaaaaaaaaaaaaaaaaaaaaaaaaaaaaaaaaaaaaaaaaaaaaaaaaaaaaaaaaaaaaagaauu

SEQ ID NO: 26986 - RNA, 1733 nt, Artificial Sequence
  mRNA product Design a-2 (hSL-A64-N5) comprising derived and/or modified sequence from LASV(Togo/2016/7082;Clade VI)__AMR44577__GPCmut4 (opt5)
aggagaguccgcucagccagguugcagaagcggcuuagcguguguccuaaucuucucucugcguguagguaggccugugccgcaaacaagcuuaccaugggccagaucauuaccuucuuucaagaggugccccacgucaucgaagagguuaugaacauugugcugaucgcccucagccugcuugcuauucugaaggggguguacaaugucgccacaugcggaaucaucggccucgugacguuccuguuucuuugugggagauccugcucucugauuuauaaaggaagcuacgaacuccagacccuggagcugaacauggaaacacucaauauguguaugccucuguccugcaccaagaacucuagccaucacuauauccggguuggcaaugagacagggcuugagcugacccucacaaacaccuccauuaucaaucauaaauucuguaaccugucugacgcgcacaagcgcaaucuuuacgaucaugcucugaugagcauucucuccacguuucaccugagcaucccgaacuucaaucaguaugaagccaugucuugcgacuuuaacggaggcaaaauuuccgugcaguacaaucugagccacgccuaugcugucgaugccgcugagcauuguggcaccguggccaacgggguucuccaaacauucaugagaauggcguggggaggcucuuacaucgcccuggacuccgggcggggaaauugggauugcaucaugaccagcuaccaguaucuuauuauccagaacacaaccugggaagaccacugucaguuuucucgccccuccccuauuggcuaccuggggcuccugagccaaagaacgcgggauaucuauauuucccgcagacggcgcggaacauucaccuggacacuuucugacagcgagggcaacgagacccccggcggguacugccugaccagauggaugcucaucgaagcugagcugaaguguuuuggaaauacagccguggcuaagugcaacgaaaaacaugaugaggaguucugcgacaugcugcggcucuuugauuucuguaagcaggccauccagcgccugaaauccccugcgcagaugagcauucaacuuaucaauaaggccgucaacgcucugauuaaugaccagcucaucaugaaaaaccaccugagagauaugaugggcauucccuauugcaauuacucuaaguauuguuaccuuaaccacacguccagcgggcggaccucucugccuaagugcugucucgugagcaauggauccuaccugaacgaaacacauuucucugacgacaucgagcagcaagccgauaauaugaucaccgaaaugcugcagaaagaguauauugaccgccagggcaagacaccgcucgggcugguggaucuuuuugucuucagcaccuccuuuuaccugaucagcauuuuccuccaccugaucaaaauucccacgcauagacacaucguuggaaagccuugccccaaaccucaucggcugaaccacaugggcauuuguucuugcggccuuuauaagcagcccggggugccgacaagauggaaacgcugaggacuagucccuguucccagagcccacuuuuuuuucuuuuuuugaaauaaaauagccugucuuucagaucucaaaggcucuuuucagagccaccaaaaaaaaaaaaaaaaaaaaaaaaaaaaaaaaaaaaaaaaaaaaaaaaaaaaaaaaaaaaaaaaagaauu

SEQ ID NO: 26987 - RNA, 1733 nt, Artificial Sequence
  mRNA product Design a-2 (hSL-A64-N5) comprising derived and/or modified sequence from LASV(KAK-428;Clade n.d. (VII))__ANH09740__GPCmut4 (opt5)
aggagaguccgcucagccagguugcagaagcggcuuagcguguguccuaaucuucucucugcguguagguaggccugugccgcaaacaagcuuaccaugggccagaucgugaccuucuuucaagaggucccccacguuauugaagaggugaugaacaucgugcugauugcccucagccugcuugcuauccugaaggggcucuacaauuucgccacaugcggagucauuggccugaucacguuucuucugcucugugggagauccugcucugcgaccuauaaaggacaguacgaacugcagacacuggagcucaacauggaaagccugaauauguguaugccucuuuccugcaccaagaacaauucucaucacuauauccgggcuggcaacaauacagggcuggagcucacccugacaaacaccagcauuaucucccauaaauucuguaaucuuucugacgcccacaagaaaaaccuguacgaucauacgcucaugagcauuaucaccacauuucaccuguccauuccgaauuucaaccaguaugaggccaugagcugcgacuuuaauggaggcaagaucucuauucaauacaaccugucccacagcuaugcuggcgaugccgcucagcauugugggaccguggccaauggaguucuccagacauucaugcgcauggcguggggcgggucuuaccuggcccuugacuccggaagacggggcugggauugcaucaucagcucuuaccaguaucugauuauccaaaacaccacgugggacgaucacugucaguuuucccgccccagcccuauuggguaccucggauucgugucccagaagacaagagacaucuauauuucucggcgcagacggggcaccuuuacauggacccugagcgauuccgaaggccaugacaugcccgggggauacugccuuacccgcuggaugcugaucgaggcugaucucaaauguuucggcaacacagccgucgcuaagugcaaugaaaaacacgacgaggaguuuugcgauauguggagacuguucgacuucuguaagcaggccauccaacggcugaaagcgccugcccagaugaacauucagcucaucaauaaggcugugaacgcccugauuaaugaccaacuuaugaugaagaaccaucugcgcgauaucauggggauucccuauugcaauuacagcaaauuuuguuaucucaacaauacgaccacaggaagaaccucucugccucggugcugucuuaucuccaacggcagcuaccugaaugaaacacacuucucugacgauaucgagcagcaggcugacaacaugauuaccgaaaugcuccagaaggaguacauggaucgccaagggaaaacgccgcugggacugguugaccucuuuguguucagcacauccuuuuaucugaucaccauuuuccuucaccuggucaagauccccacccauagacacauugugggcaaaccuugccccaagccucaucggcucaaucacaugggcaucuguucuugcgggcuguacaaacagcccggagugccggucagauggaagcgcugaggacuagucccuguucccagagcccacuuuuuuuucuuuuuuugaaauaaaauagccugucuuucagaucucaaaggcucuuuucagagccaccaaaaaaaaaaaaaaaaaaaaaaaaaaaaaaaaaaaaaaaaaaaaaaaaaaaaaaaaaaaaaaaaagaauu

SEQ ID NO: 26988 - RNA, 1733 nt, Artificial Sequence; identical to SEQ ID NO: 26982
  mRNA product Design a-2 (hSL-A64-N5) comprising derived and/or modified sequence from LASV(Pinneo-NIG-1969;Clade I)__AIT17836__GPCmut4 (opt5)

SEQ ID NO: 26989 - RNA, 1733 nt, Artificial Sequence
  mRNA product Design a-2 (hSL-A64-N5) comprising derived and/or modified sequence from LASV(ISTH0009-NIG-2011;Clade II)__AIT17404__GPCmut4 (opt5)
aggagaguccgcucagccagguugcagaagcggcuuagcguguguccuaaucuucucucugcguguagguaggccugugccgcaaacaagcuuaccaugggccagaucauuaccuucuuucaagaggugccccacgucaucgaagagguuaugaacauugugcugaucgcccucagccugcuugcuauucugaaggggaucuacaauguggccacaugcggacucuucggccuggucuccuuucuucugcucugugggagaucuugcagcacgaccuauaaaggaguguacgaacugcagacacuggagcucgacauggcgucccugaacauguguaugccucuuucuugcaccaagaauaacagccaucacuauaucaugguuggcaaugaaacagggcuggagcucacccugacaaacaccuccauuaucaaucauaaauucuguaaccuuucugaugcucacaagaaaaaucuguacgaccaugcccucaugagcauuaucuccacguuucaccugagcauuccgaacuucaaucaguaugaggccaugucuugcgauuuuaacggaggcaagaucuccgugcaguacaaucugagccacgcuuaugccgucgacgcugccaaccauuguggcaccauugcgaauggggugcuccaaacauucaugcggauggccuggggaggcucuuacaucgcucuggauuccgggaagggaagcugggacugcaucaugaccucuuaccaguaucuuauuauccagaacacaaccugggaagaucacugucaguuuucccgccccagcccuauuggcuaccuggggcuccugucccaaagaacgcgggacaucuauauuucucgcagacggcgcggaacauucaccuggacacuuagcgauuccgagggcaacgaaacccccggcggguacugccugaccagauggaugcucaucgaggccgagcugaaauguuuuggaaauacagcuguugccaagugcaacgaaaaacaugacgaggaguucugcgauaugcugcggcucuuugacuucuguaagcaggcgauccgcagacugaaaacgccugcccagaugagcauucagcuuaucaauaaggcugugaacgcccugauuaaugaucaacucaucaugaagaaccaucugcgggacauuaugggcauccccuauugcaauuacucuaaauauuguuaccuuaaccacaccgucacagggaagaccucccugccucgcugcugucucgugagcaauggaucuuaccugaacgaaacacacuucagcgacgauaucgaacagcaggcugacaauaugauuaccgagcugcuccaaaaagaguauauggauagacagggcaagacgccgcuggggcuuguggaccuguuugucuucuccacaucuuuuuaccucaucagcauuuuccugcaccugaucaaaauucccacccaucggcacaucaccggaaagccuugccccaaaccucaucgccuuaaccacaugggcauuuguuccugcggccucuauaagcaccccgggguuccggugaaguggaaaagaugaggacuagucccuguucccagagcccacuuuuuuuucuuuuuuugaaauaaaauagccugucuuucagaucucaaaggcucuuuucagagccaccaaaaaaaaaaaaaaaaaaaaaaaaaaaaaaaaaaaaaaaaaaaaaaaaaaaaaaaaaaaaaaaaagaauu

SEQ ID NO: 26990 - RNA, 1733 nt, Artificial Sequence
  mRNA product Design a-2 (hSL-A64-N5) comprising derived and/or modified sequence from LASV(ISTH2010-NIG-2012;Clade II)__AIT17482__GPCmut4 (opt5)
aggagaguccgcucagccagguugcagaagcggcuuagcguguguccuaaucuucucucugcguguagguaggccugugccgcaaacaagcuuaccaugggccagaucauuaccuucuuucaagaggugccccacgucaucgaagagguuaugaacauugugcugaucgcccucagccugcuugcuauucugaaggggaucuacaauguggccacaugcggacucuucggccuggucuccuuucuucugcucugugggagaucuugcagcacgaccuauaaaggaguguacgaacugcagacacuggagcucgacauggcgucccugaacauguguaugccucuuucuugcaccaagaauaacagccaucacuauaucaugguuggcaaugaaacagggcuggagcucacccugacaaacaccuccauuaucaaucauaaauucuguaaccuuucugaugcucacaagaaaaaucuguacgaccaugcccucaugagcauuaucuccacguuucaccugagcauuccgaacuucaaucaguaugaggccaugucuugcgauuuuaacggaggcaagaucuccgugcaguacaaucugagccacgcuuaugccgucgacgcugccaaccauuguggcaccauugcgaauggggugcuccaaacauucaugcggauggccuggggaggcucuuacaucgcucuggauuccgggaagggaagcugggacugcaucaugaccucuuaccaguaucuuauuauccagaacauuacaugggaagaucacugucaguuuucccgccccagcccuaucggcuaccuggggcuccugucccaaagaacccgggacauuuauaucucucgcagacggcgcggaacguucacauggacccuuagcgauuccgagggcaacgaaacacccggcggguacugccugaccagauggaugcucaucgaggccgagcugaaauguuuuggaaauaccgcuguugccaagugcaacgaaaaacaugacgaggaguucugcgauaugcugcggcucuuugacuucuguaagcaggcgauucgcagacugaaaacgccugcccagaugagcauccagcuuauuaauaaggcugugaacgcccugaucaaugaucaacucauuaugaagaaccaucugcgggacaucaugggcauccccuauugcaauuacucuaaauauuguuaccuuaaccacacagucaccgggaagacaucccugccucgcugcugucucgugagcaauggaucuuaccugaacgaaacccacuucagcgacgauauugaacagcaggcugacaauaugaucacagagcugcuccaaaaagaguauauugauagacagggcaagaccccgcuggggcuuguggaccuguuugucuucuccacgucuuuuuaccucaucagcauuuuccugcaccugguuaaaauccccacacaucggcacguggugggaaagccuugccccaaaccucaucgccuuaaccacaugggcauuuguuccugcggccucuauaagcaccccggggucccggugaaguggaaaagaugaggacuagucccuguucccagagcccacuuuuuuuucuuuuuuugaaauaaaauagccugucuuucagaucucaaaggcucuuuucagagccaccaaaaaaaaaaaaaaaaaaaaaaaaaaaaaaaaaaaaaaaaaaaaaaaaaaaaaaaaaaaaaaaaagaauu

SEQ ID NO: 26991 - RNA, 1733 nt, Artificial Sequence
  mRNA product Design a-2 (hSL-A64-N5) comprising derived and/or modified sequence from LASV(Lassa virus/H.sapiens-wt/NGA/2015/ISTH_0543;Clade II)__AVO03639__GPCmut4 (opt5)
aggagaguccgcucagccagguugcagaagcggcuuagcguguguccuaaucuucucucugcguguagguaggccugugccgcaaacaagcuuaccaugggccagaucauuaccuucuuucaagaggugccccacgucaucgaagagguuaugaacauugugcugaucgcccucagccugcuugcuauucugaaggggaucuacaauguggccacaugcggacucuucggccuggucuccuuucuucugcucugugggagaucuugcagcacgaccuauaaaggaguguacgaacugcagacacuggagcucgacauggcgaaccugaauauguguaugccucuuuccugcaccaagaacaauucucaucacuauaucaugguuggcaacgaaacagggcuggagcucacccugacaaauaccagcauuaucaaccauaaauucuguaaucuuuccgaugcucacaagaaaaaccuguacgaccaugcccucaugucuauuaucagcacguuucaccuguccauuccgaauuucaaccaguaugaggccaugagcugcgauuuuaauggaggcaagaucucugugcaguacaaccugucccacaccuaugcugucgacgccgcuaaucauuguggcacaauugccaacggggugcuccaaaccuucaugcggauggcguggggaggcagcuacaucgcccuggauucugggaagggauccugggacugcaucaugacaagcuaccaguaucuuguuauucagaacaccacgugggaagaucacugucaguuuucucgccccuccccuaucggcuaccuggggcuccugagccaaagaacacgggacauuuauaucucccgcagacggcgcggaaccuucacauggacccuuucugauagcgagggcaaugaaacccccggcggguacugccugacaagauggaugcucauugaggcugagcugaaauguuuuggaaacacggccguggcuaagugcaaugaaaaacaugacgaggaguucugcgauaugcugcggcucuuugacuucuguaagcaggccauccgcagacugaaaaccccugcgcagauguccauccagcuuauuaacaaggccgucaaugcucugaucaacgaucaacucauuaugaagaaucaucugcgggacaucaugggcauucccuauugcaacuacagcaaauauuguuaccuuaaucacacagugaccgggaagacaucucugccucgcugcugucucguguccaacggaagcuaccugaaugaaacccacuucucugacgauaucgaacagcaggccgacaacaugaucacggagcugcuccaaaaagaguauauugauagacagggcaagacaccgcuggggcuugucgaccuguuuguuuucagcaccuccuuuuaccucaucucuauuuuccugcaccuggugaaaauccccacccaucggcacauuacaggaaagccuugccccaaaccucaucgccuuaaucacaugggcaucuguagcugcggccucuauaagcaccccggggugccggucaaguggaaaagaugaggacuagucccuguucccagagcccacuuuuuuuucuuuuuuugaaauaaaauagccugucuuucagaucucaaaggcucuuuucagagccaccaaaaaaaaaaaaaaaaaaaaaaaaaaaaaaaaaaaaaaaaaaaaaaaaaaaaaaaaaaaaaaaaagaauu

SEQ ID NO: 26992 - RNA, 1733 nt, Artificial Sequence
  mRNA product Design a-2 (hSL-A64-N5) comprising derived and/or modified sequence from LASV(Lassa virus/H.sapiens-wt/NGA/2016/ISTH_0009;Clade II)__AVO03571__GPCmut4 (opt5)
aggagaguccgcucagccagguugcagaagcggcuuagcguguguccuaaucuucucucugcguguagguaggccugugccgcaaacaagcuuaccaugggccagaucauuaccuucuuucaagaggugccccacgucaucgaagagguuaugaacauugugcugaucgcccucagccugcuugcuauucugaaggggaucuacaauguggccacaugcggacuccugggccuugucuccuuccugcuccugugugggagaucuugcagcacgaccuauaaaggaguguacgaacugcagacacucgagcuggacauggcgucccuuaacauguguaugccucugucuugcaccaagaauaacagccaucacuauaucaugguuggcaaugaaacagggcucgagcugacccuuacaaacaccuccauuaucaaucauaaauuuuguaaccugucugaugcucacaagaaaaaucucuacgaccaugcccugaugagcauuaucuccacguuccaccugagcauuccgaacuuuaaucaguaugaggccaugucuugcgauuucaacggaggccggaucuccgugcaguacaaucucagccacucuuaugcugucgacgccgcuaaccauuguggcaccauugccaauggggugcugcaaacauuuaugcgcauggcguggggaggcuccuacaucgcccuugauagcgggaagggaucuugggacugcaucaugaccuccuaccaguaucugauuauccagaacacaaccugggaagaucacugucaguucagcagacccuccccuauuggcuaccucgggcugcuuucucaacggacgcgcgacaucuauauuagcagacggcgcagaggaacauuuaccuggacacuguccgauagcgagggcaacgaaacccccggcggguacugccucacccgguggaugcugaucgaggcugagcugaaguguuucggaaauacagccguugcuaaaugcaacgaaaagcaugacgaggaauuuugcgauaugcuccgccuguucgacuuuuguaaacaggccaucagacggcuuaagacgccugcgcagaugucuauucagcugaucaauaaagccgugaacgcucucauuaaugaucaacugaucaugaagaaccaccuucgcgacauuaugggcauccccuauugcaauuacuccaaguauuguuaccugaaccacaccgucacagggaaaaccagccucccuagaugcugucuggugucuaauggaagcuaccugaacgagacacauuucuccgacgauaucgaacagcaggccgacaauaugauuaccgagcuccugcaaaaggaguauaucgaucggcagggcaaaacgccgcuugggcugguggaccucuucgucuuuucuaccagcuucuaccugauuuccaucuuucugcaccuuguuaagauucccacacaucgccacaucaccggaaaaccuugccccaagccucauagacucaaccacaugggcauuuguagcugcggccuguauaaucaccccggggugccggugaaauggaagcggugaggacuagucccuguucccagagcccacuuuuuuuucuuuuuuugaaauaaaauagccugucuuucagaucucaaaggcucuuuucagagccaccaaaaaaaaaaaaaaaaaaaaaaaaaaaaaaaaaaaaaaaaaaaaaaaaaaaaaaaaaaaaaaaaagaauu

SEQ ID NO: 26993 - RNA, 1733 nt, Artificial Sequence
  mRNA product Design a-2 (hSL-A64-N5) comprising derived and/or modified sequence from LASV(Lassa virus/H.sapiens-wt/NGA/2016/ISTH_0017;Clade II)__AVO03567__GPCmut4 (opt5)
aggagaguccgcucagccagguugcagaagcggcuuagcguguguccuaaucuucucucugcguguagguaggccugugccgcaaacaagcuuaccaugggccagaucauuaccuucuuucaagaggugccccacgucaucgaagagguuaugaacauugugcugaucgcccucagccugcuugcuauucugaaggggaucuacaauguggccacaugcggacucuucggccuggucuccuuucuucugcucugugggagaucuugcagcacgaccuauaaaggaguguacgaacugcagacacuggagcucgacauggcgucccugaacauguguaugccucuuucuugcaccaagaauaacagccaucacuauaucaugguuggcaaugaaacagggcuggagcucacccugacaaacaccuccauuaucaaucauaaauucuguaaccuuucugaugcucacaagaaaaaucuguacgaccaugcccucaugagcauuaucuccacguuucaccugagcauuccgaacuucaaucaguaugaggccaugucuugcgauuuuaacggaggcaagaucuccgugcaguacaaucugagccacaccuaugcuauugacgccgcuaaccauuguggcacaaucgccaaugggguccuccaaaccuucaugcggauggcguggggaggcucuuacaucgcccuggauuccgggaagggaagcugggacugcauuaugacaucuuaccaguaucuuaucauucagaacaccacgugggaagaucacugucaguuuucccgccccagcccuaucggcuaccuggggcuccugucccaaagaacacgggacauuuauaucucucgcagacggcgcggaaccuucacauggacccuuagcgauuccgagggcaacgaaacccccggcggguacugccugacaagauggaugcucaucgaggcugagcugaaauguuuuggaaauacggccguggcuaagugcaacgaaaaacaugacgaggaguucugcgauaugcugcggcucuuugacuucuguaagcaggccauucgcagacugaaaaccccugcgcagaugagcauccagcuuauuaauaaggccguuaacgcucugaucaaugaucaacucauuaugaagaaccaucugcgggacaucaugggcauccccuauugcaauuacucuaaauauuguuaccuuaaccacacagugaccgggaagacaucccugccucgcugcugucucgucagcaauggaucuuaccugaacgaaacccacuucagcgacgauauugaacagcaggccgacaauaugaucacggagcugcuccaaaaagaguauauggauagacagggcaagacaccgcuggggcuuguggaccuguuuguguucuccaccucuuuuuaccucauuagcaucuuccugcaccugguccggauucccacccaucgccacguuaucggaaaaccuugccccaagccucauagacuuaaccacaugggcauuuguuccugcggccucuauaaacaccccggggugccggugaaguggaagcggugaggacuagucccuguucccagagcccacuuuuuuuucuuuuuuugaaauaaaauagccugucuuucagaucucaaaggcucuuuucagagccaccaaaaaaaaaaaaaaaaaaaaaaaaaaaaaaaaaaaaaaaaaaaaaaaaaaaaaaaaaaaaaaaaagaauu

SEQ ID NO: 26994 - RNA, 1733 nt, Artificial Sequence
  mRNA product Design a-2 (hSL-A64-N5) comprising derived and/or modified sequence from LASV(Lassa virus/H.sapiens-wt/NGA/2018/ISTH_0959;Clade II)__AVV65099__GPCmut4 (opt5)
aggagaguccgcucagccagguugcagaagcggcuuagcguguguccuaaucuucucucugcguguagguaggccugugccgcaaacaagcuuaccaugggccagaucauuaccuucuuucaagaggugccccacgucaucgaagagguuaugaacauugugcugaucgcccucagccugcuugcuauucugaaggggaucuacaauguggucacaugcggacucuucggccugguguccuuucuucugcucugugggagaucuugcagcacgaccuauaaaggaguuuacgaacugcagacacuggagcucgacauggccucccugaacauguguaugccucuuucuugcaccaagaauaacagccaucacuauaucauggugggcaaugaaacagggcuggagcucacccugacaaacaccuccauuaucaaucauaaauucuguaaccuuucugaugcgcacaagaaaaaucuguacgaccaugcucucaugagcauuaucuccacguuucaccugagcauuccgaacuucaaucaguaugaggccaugucuugcgauuuuaacggaggcaagaucuccguccaguacaaucugagccacgccuaugcuauugacgccgcuaaccauuguggcaccaucgccaauggggugcuccaaacauucaugcggauggcguggggaggcucuuacaucgcccuggauuccgggaagggaagcugggacugcauuaugaccucuuaccaguaucuuaucauucagaacacaaccugggaagaucacugucaguuuucccgccccagcccuaucggcuaccuggggcuccugucccaaagaacgcgggacauuuauaucucucgcagacggcgcggaacauucaccuggacacuuagcgauuccgagggcaacgaaacccccggcggguacugccugaccagauggaugcucaucgaggcugagcugaaauguuuuggaaauacagccguugcuaagugcaacgaaaaacaugacgaggaguucugcgauaugcugcggcucuuugacuucuguaagcaggccauucgcagacugaaaacgccugcgcagaugagcauccagcuuauuaauaaggccgugaacgcucugaucaaugaucaacucauuaugaagaaccaucugcgggacaucaugggcauccccuauugcaauuacucuaaauauuguuaccuuaaccacaccgucacagggaagaccucccugccucgcugcugucucgugagcaauggaucuuaccugaacgaaacacacuucagcgacgauauugaacagcaggccgacaauaugaucaccgagcugcuccaaaaagaguauauugauagacagggcaagacgccgcuggggcuuguggaccuguuugucuucuccacaucuuuuuaccucaucagcauuuuccugcaccugguuaaaauccccacccaucggcacgugauuggaaagccuugccccaaaccucaucgccuuaaccacaugggcaucuguuccugcggccucuauaagcaccccggggugccggucaaguggaaaagaugaggacuagucccuguucccagagcccacuuuuuuuucuuuuuuugaaauaaaauagccugucuuucagaucucaaaggcucuuuucagagccaccaaaaaaaaaaaaaaaaaaaaaaaaaaaaaaaaaaaaaaaaaaaaaaaaaaaaaaaaaaaaaaaaagaauu

SEQ ID NO: 26995 - RNA, 1733 nt, Artificial Sequence
  mRNA product Design a-2 (hSL-A64-N5) comprising derived and/or modified sequence from LASV(LASV003-NIG-2008;Clade II)__AIT17580__GPCmut4 (opt5)
aggagaguccgcucagccagguugcagaagcggcuuagcguguguccuaaucuucucucugcguguagguaggccugugccgcaaacaagcuuaccaugggccagaucauuaccuucuuucaagaggugccccacgucaucgaagagguuaugaacauugugcugaucgcccucagccugcuugcuauucugaaggggaucuacaauguggccacaugcggacucuucggccuggucuccuuucuucugcucugugggagaucuugcagcacgaccuauaaaggaguguacgaacugcagacacuggagcucgacauggcgucccugaacauguguaugccucuuucuugcaccaagaauaacagccaucacuauaucaugguuggcaaugaaacagggcuggagcucacccugacaaacaccuccauuaucaaucauaaauucuguaaccuuucugaugcucacaagaaaaaucuguacgaccaugcccucaugagcauuaucuccacguuucaccugagcauuccgaacuucaaucaguaugaggccaugucuugcgauuuuaacggaggcaagaucuccgugcaguacaaucugagccacaccuaugcugucgacgccgcuaaccauuguggcacaauugccaauggggugcuccaaaccuucaugcggauggcguggggaggcucuuacaucgcccuggauuccgggaagggaagcugggacugcaucaugacaucuuaccaguaucuuauuauccagaacaccacgugggaagaucacugucaguuuucccgccccagcccuauuggcuaccuggggcuccugucccaaagaacacgggacaucuauauuucucgcagacggcgcggaaccuucacauggacccuuagcgauuccgagagcaacgaaacccccggcggcuacugccugacaagauggaugcucaucgaggcugagcugaaauguuuugggaauacggccguugcuaagugcaacgaaaaacaugacgaggaguucugcgauaugcugcggcucuuugacuucuguaagcaggccauccgcagacugaaagcgccugcccagaugucuauucagcuuaucaauaaggcugugaacgcccugauuaaugaucaacucaucaugaagaaccaucugcgggacauuaugggaauccccuauugcaauuacuccaaauauuguuaccuuaaccacaccgucacaggccgcaccagccugccuagaugcugucucgugucuaaugggagcuaccugaacgaaacacacuucuccgacgauaucgaacagcaggcugacaauaugauuaccgagcugcuccaaaaggaguauauggaucggcagggaaaaacgccgcugggccuuguggaccuguuugucuucucuaccagcuuuuaccucaucuccauuuuccugcaccugguuaagauccccacacaucgccacgugauugggaaaccuugccccaagccucauagacuuaaccacaugggaaucuguagcugcggccucuauaaacaccccggcgugccggucaaguggaagcggugaggacuagucccuguucccagagcccacuuuuuuuucuuuuuuugaaauaaaauagccugucuuucagaucucaaaggcucuuuucagagccaccaaaaaaaaaaaaaaaaaaaaaaaaaaaaaaaaaaaaaaaaaaaaaaaaaaaaaaaaaaaaaaaaagaauu

SEQ ID NO: 26996 - RNA, 1733 nt, Artificial Sequence
  mRNA product Design a-2 (hSL-A64-N5) comprising derived and/or modified sequence from LASV(LASV035-NIG-2009;Clade II)__AIT17588__GPCmut4 (opt5)
aggagaguccgcucagccagguugcagaagcggcuuagcguguguccuaaucuucucucugcguguagguaggccugugccgcaaacaagcuuaccaugggccagaucauuaccuucuuucaagaggugccccacgucaucgaagagguuaugaacauugugcugaucgcccucagccugcuugcuauucugaaggggaucuacaauguggccacaugcggacucuucggccuggucuccuuucuucugcucugugggagaucuugcagcacgaccuauaaaggaguguacgaacugcagacacuggagcucgacauggcgucccugaacauguguaugccucuuucuugcaccaagaauaacagccaucacuauaucaugguuggcaaugaaacagggcuggagcucacccugacaaacaccuccauuaucaaucauaaauucuguaaccuuucugaugcucacaagaaaaaucuguacgaccaugcccucaugagcauuaucuccacguuucaccugagcauuccgaacuucaaucaguaugaggccaugucuugcgauuuuaacggaggcaagaucuccgugcaguacaaucugagccacgcuuaugccgucgacgcugccaaccauuguggcaccauugcgaauggggugcuccaaacauucaugcggauggccuggggaggcucuuacaucgcucuggauuccgggaagggaagcugggacugcaucaugaccucuuaccaguaucuuauuauccagaacacaaccugggaagaucacugucaguuuucccgccccagcccuauuggcuaccuggggcuccugucccaaagaacgcgggacaucuauauuucucgcagacggcgcggaacauucaccuggacacuuagcgauuccgagggcaacgaaacccccggcggguacugccugaccagauggaugcucaucgaggccgagcugaaauguuuuggaaauacagcuguugccaagugcaacgaaaaacaugacgaggaguucugcgauaugcugcggcucuuugacuucuguaagcaggcgauccgcagacugaaagccccugcucagaugagcauucagcuuaucaauaaggccgugaacgcucugauuaaugaucaacucaucaugaagaaccaucugcgggacauuaugggcauccccuauugcaauuacucuaaauauuguuaccuuaaccacacggucaccgggaagacaucccugccucgcugcugucucgugagcaauggaucuuaccugaacgaaacccacuucagcgacgauaucgaacagcaggccgacaauaugauuacagagcugcuccaaaaagaguauaucgauagacagggcaagaccccgcuggggcuuguggaccuguuugucuucuccacgucuuuuuaccucauuagcaucuuccugcaccugguuaaaauucccacacaucggcacgugaucggaaagccuugccccaaaccucaucgccuuaaccacaugggcauuuguuccugcggccucuauaagcaccccggggugccggucaaguggaaaagaugaggacuagucccuguucccagagcccacuuuuuuuucuuuuuuugaaauaaaauagccugucuuucagaucucaaaggcucuuuucagagccaccaaaaaaaaaaaaaaaaaaaaaaaaaaaaaaaaaaaaaaaaaaaaaaaaaaaaaaaaaaaaaaaaagaauu

SEQ ID NO: 26997 - RNA, 1733 nt, Artificial Sequence
  mRNA product Design a-2 (hSL-A64-N5) comprising derived and/or modified sequence from LASV(LASV1000-NIG-2009;Clade II)__AIT17782__GPCmut4 (opt5)
aggagaguccgcucagccagguugcagaagcggcuuagcguguguccuaaucuucucucugcguguagguaggccugugccgcaaacaagcuuaccaugggccagaucauuaccuucuuucaagaggugccccacgucaucgaagagguuaugaacauugugcugaucgcccucagccugcuugcuauucugaaggggaucuacaauguggccacaugcggacucuucggccuggucuccuuucuucugcucugugggagaucuugcagcacgaccuauaaaggaguguacgaacugcagacacuggagcucgacauggcgucccugaacauguguaugccucuuucuugcaccaagaauaacagccaucacuauaucaugguuggcaaugaaacagggcuggagcucacccugacaaacaccuccauuaucaaucauaaauucuguaaccuuucugaugcucacaagaaaaaucuguacgaccaugcccucaugagcauuaucuccacguuucaccugagcauuccgaacuucaaucaguaugaggccaugucuugcgauuuuaacggaggcaagaucuccgugcaguacaaucugagccacaccuaugcugucgacgccgcuaaccauuguggcacaauugccaauggggugcuccaaaccuucaugcggauggcguggggaggcucuuacaucgcccuggauuccgggaagggaagcugggacugcaucaugacaucuuaccaguaucuuauuauccagaacaccacgugggaagaucacugucaguuuucccgccccagcccuauuggcuaccuggggcuccugucccaaagaacacgggacaucuauauuucucgcagacggcgcggaaccuucacauggacccuuagcgauuccgagggcaacgaaacccccggcggguacugccugacaagauggaugcucaucgaggcugagcugaaauguuuuggaaauacggccguugcuaagugcaacgaaaaacaugacgaggaguucugcgauaugcugcggcucuuugacuucuguaagcaggccaucaaacgccugaagaccccugcgcagaugagcauucagcuuaucaauaaggccgugaacgcucugauuaaugaucaacucaucaugaaaaaccaccugagagacauuaugggcauccccuauugcaauuacucuaaguauuguuaccuuaaccacacagucaccgggaaaacaucccugccucggugcugucucgugagcaauggaucuuaccugaacgaaacccauuucagcgacgauaucgaacagcaggccgacaauaugauuacggagcugcuccaaaaggaguauaucgaucgccagggcaaaacaccgcuggggcuuguggaccuguuugucuucuccaccucuuuuuaccucauuagcaucuuccugcaccugguuaagauucccacccauagacacguggugggaaaaccuugccccaagccucaucggcuuaaccacaugggcaucuguuccugcggccucuauaagcaccccggggucccggugaaauggaagcgcugaggacuagucccuguucccagagcccacuuuuuuuucuuuuuuugaaauaaaauagccugucuuucagaucucaaaggcucuuuucagagccaccaaaaaaaaaaaaaaaaaaaaaaaaaaaaaaaaaaaaaaaaaaaaaaaaaaaaaaaaaaaaaaaaagaauu

SEQ ID NO: 26998 - RNA, 1733 nt, Artificial Sequence
  mRNA product Design a-2 (hSL-A64-N5) comprising derived and/or modified sequence from LASV(LASV221-NIG-2010;Clade II)__AIT17624__GPCmut4 (opt5)
aggagaguccgcucagccagguugcagaagcggcuuagcguguguccuaaucuucucucugcguguagguaggccugugccgcaaacaagcuuaccaugggccagaucauuaccuucuuucaagaggugccccacgucaucgaagagguuaugaacauugugcugaucgcccucagccugcuugcuauucugaaggggaucuacaauguggccacaugcggacucuucggccuggucuccuuucuucugcucugugggagaucuugcagcacgaccuauaaaggaguguacgaacugcagacacuggagcucgacauggcgucccugaacauguguaugccucuuucuugcaccaagaauaacagccaucacuauaucaugguuggcaaugaaacagggcuggagcucacccugacaaacaccuccauuaucaaucauaaauucuguaaccuuucugaugcucacaagaaaaaucuguacgaccaugcccucaugagcauuaucuccacguuucaccugagcauuccgaacuucaaucaguaugaggccaugucuugcgauuuuaacggaggcaagaucuccgugcaguacaaucugagccacaccuaugcuauugacgccgcuaaccauuguggcacaaucgccaaugggguccuccaaaccuucaugcggauggcguggggaggcucuuacaucgcccuggauuccgggaagggaagcugggacugcauuaugacaucuuaccaguaucuuaucauucagaacaccacgugggaagaucacugucaguuuucccgccccagcccuaucggcuaccuggggcuccugucccaaagaacacgggacauuuauaucucucgcagacggcgcggaaccuucacauggacccuuagcgauuccgagggcaacgaaacccccggcggguacugccugacaagauggaugcucaucgaggcugagcugaaauguuuuggaaauacggccguggcuaagugcaacgaaaaacaugacgaggaguucugcgauaugcugcggcucuuugacuucuguaagcaggccauucgcagacugaaaaccccugcgcagaugagcauccagcuuauuaauaaggccguuaacgcucugaucaaugaucaacucauuaugaagaaccaucugcgggacaucaugggcauccccuauugcaauuacucuaaauauuguuaccuuaaccacacagugaccgggaagacaucccugccucgcugcugucucgucagcaauggaucuuaccugaacgaaacccacuucagcgacgauauugaacagcaggccgacaauaugaucacggagaugcugcaaaaagaguauauggauagacagggcaagacaccgcucgggcugguggaccuuuuuguguucuccaccucuuuuuaccugauuagcaucuuccuccaccuggucaaaauucccacccaucggcacguuaucggaaagccuugccccaaaccucaucgccugaaccacaugggcauuuguuccugcggccuuuauaagcaccccggggugccggugaaguggaaaagaugaggacuagucccuguucccagagcccacuuuuuuuucuuuuuuugaaauaaaauagccugucuuucagaucucaaaggcucuuuucagagccaccaaaaaaaaaaaaaaaaaaaaaaaaaaaaaaaaaaaaaaaaaaaaaaaaaaaaaaaaaaaaaaaaagaauu

SEQ ID NO: 26999 - RNA, 1733 nt, Artificial Sequence
  mRNA product Design a-2 (hSL-A64-N5) comprising derived and/or modified sequence from LASV(LASV237-NIG-2010;Clade II)__AIT17638__GPCmut4 (opt5)
aggagaguccgcucagccagguugcagaagcggcuuagcguguguccuaaucuucucucugcguguagguaggccugugccgcaaacaagcuuaccaugggccagaucauuaccuucuuucaagaggugccccacgucaucgaagagguuaugaacauugugcugaucgcccucagccugcuugcuauucugaaggggaucuacaauguggccacaugcggacucuucggccuggucuccuuucuucugcucugugggagaucuugcagcacgaccuauaaaggaguguacgaacugcagacacuggagcucgacauggcgucccugaacauguguaugccucuuucuugcaccaagaauaacagccaucacuauaucaugguuggcaaugaaacagggcuggagcucacccugacaaacaccuccauuaucaaucauaaauucuguaaccuuucugaugcucacaagaaagaccuguacgaucaugcccucaugagcauuaucuccacguuucaccugagcauuccgaauuucaaccaguaugaggccaugucuugcgacuuuaauggaggcaagaucuccgugcaguacaaccugagccacaccuaugcugucgaugccgcuaaucauuguggcacaauugccaacggggugcuccaaaccuucaugcggauggcguggggaggcucuuacaucgcccuggacuccgggaagggaagcugggauugcaucaugacaucuuaccaguaucuuauuauccagaauaccacgugggaagaccacugucaguuuucccgccccagcccuauuggcuaccuggggcuccugucccaaagaacacgggauaucuauauuucucgcagacggcgcggaaccuucacauggacccuuagcgacuccgagggcaacgaaacccccggcggguacugccugacaagauggaugcucaucgaggcugagcugaaauguuuuggaaacacggccguugcuaagugcaaugaaaaacaugaugaggaguucugcgacaugcugcggcucuuugauuucuguaagcaggccauccgcagacugaaaaccccugcgcagaugagcauucagcuuaucaacaaggccgugaaugcucugauuaacgaccaacucaucaugaagaaucaucugcgggacauuaugggcauccccuauugcaacuacucuaaauauuguuaccuuaaucacacagucaccgggaagacaucccugccucgcugcugucucgugagcaacggaucuuaccugaaugaaacccacuucagcgaugacaucgaacagcaggccgauaacaugauuacggagcugcuccaaaaagaguauauggacagacagggcaagacaccgcuggggcuuguggaucuguuugucuucuccaccucuuuuuaccucaucagcauuuuccugcaccugaucaaaauucccacccaucggcacaucacaggaaagccuugccccaaaccucaucgccuuaaucacaugggcauuuguuccugcggccucuauaagcaccccgggguuccggugaaguggaaaagaugaggacuagucccuguucccagagcccacuuuuuuuucuuuuuuugaaauaaaauagccugucuuucagaucucaaaggcucuuuucagagccaccaaaaaaaaaaaaaaaaaaaaaaaaaaaaaaaaaaaaaaaaaaaaaaaaaaaaaaaaaaaaaaaaagaauu

SEQ ID NO: 27000 - RNA, 1733 nt, Artificial Sequence
  mRNA product Design a-2 (hSL-A64-N5) comprising derived and/or modified sequence from LASV(LASV253-NIG-2011;Clade II)__AIT17670__GPCmut4 (opt5)
aggagaguccgcucagccagguugcagaagcggcuuagcguguguccuaaucuucucucugcguguagguaggccugugccgcaaacaagcuuaccaugggccagaucauuaccuucuuucaagaggugccccacgucaucgaagagguuaugaacauugugcugaucgcccucagccugcuugcuauucugaaggggaucuacaauguggccacaugcggacucuucggccuggucuccuuucuucugcucugugggagaucuugcagcacgaccuauaaaggaguguacgaacugcagacacuggagcucgacauggcgucccugaacauguguaugccucuuucuugcaccaagaauaacagccaucacuauaucaugguuggcaaugaaacagggcuggagcucacccugacaaacaccuccauuaucaaucauaaauucuguaaccuuucugaugcucacaagaaaaaucuguacgaccaugcccucaugagcauuaucuccacguuucaccugagcauuccgaacuucaaucaguaugaggccaugucuugcgauuuuaacggaggcaagaucuccgugcaguacaaucugagccacaccuaugcugucgacgccgcuaaccauuguggcacaauugccaauggggugcuccaaaccuucaugcggauggcguggggaggcucuuacaucgcccuggauuccgggaagggaagcugggacugcaucaugacaucuuaccaguaucuuauuauccagaacaccacgugggaagaucacugucaguuuucccgccccagcccuauuggcuaccuggggcuccugucccaaagaacacgggacaucuauauuucucgcagacggcgcggaaccuucacauggacccuuagcgauuccgagggcaacgaaacccccggcggguacugccugacaagauggaugcucaucgaggcugagcugaaauguuuuggaaauacggccguugcuaagugcaacgaaaaacaugacgaggaguucugcgauaugcugcggcucuuugacuucuguaagcaggccauccgcagacugaaagcgccugcccagaugagcauucagcuuaucaauaaggcugugaacgcccugauuaaugaucaacucaucaugaagaaccaucugcgggacauuaugggcauccccuauugcaauuacucuaaauauuguuaccuuaaccacaccgucacagggcgcaccucccugccuagaugcugucucgugagcaauggaucuuaccugaacgaaacacacuucagcgacgauaucgaacagcaggcugacaauaugauuaccgagcugcuccaaaaggaguauaucgaucggcagggcaaaacgccgcuggggcuuguggaccuguuugucuucuccacaucuuuuuaccucauuagcaucuuccugcaccugguuaagauucccacccaucgccacaucauuggaaaaccuugccccaagccucauagacuuaaccacaugggcaucuguuccugcggccucuauaaacaccccggggugccggugaaguggaagcggugaggacuagucccuguucccagagcccacuuuuuuuucuuuuuuugaaauaaaauagccugucuuucagaucucaaaggcucuuuucagagccaccaaaaaaaaaaaaaaaaaaaaaaaaaaaaaaaaaaaaaaaaaaaaaaaaaaaaaaaaaaaaaaaaagaauu

SEQ ID NO: 27001 - RNA, 1733 nt, Artificial Sequence
  mRNA product Design a-2 (hSL-A64-N5) comprising derived and/or modified sequence from LASV(LASV254-NIG-2011;Clade II)__AIT17674__GPCmut4 (opt5)
aggagaguccgcucagccagguugcagaagcggcuuagcguguguccuaaucuucucucugcguguagguaggccugugccgcaaacaagcuuaccaugggccagaucauuaccuucuuucaagaggugccccacgucaucgaagagguuaugaacauugugcugaucgcccucagccugcuugcuauucugaaggggaucuacaauguggccacaugcggacucuucggccuggucuccuuucuucugcucugugggagaucuugcagcacgaccuauaaaggaguguacgaacugcagacacuggagcucgacaugaccaaccugaauauguguaugccucuuuccugcacaaagaacaauucucaucacuauaucaugguuggcaacgaaaccgggcuggagcucacacugaccaauacgagcauuaucaaccauaaauucuguaaucuuuccgaugcgcacaagaaaaaccuguacaaucaugcucucaugucuauuaucagcaccuuucaccuguccauuccgaacuucaaucaguaugaggccaugagcugcgacuuuaacggaggcaagaucucugugcaguacaaucugucccacagcuaugccgucgaugcugccaaccauuguggcacaauugcuaacggggugcuccaaaccuucaugcggauggccuggggaggcucuuacaucgcgcuggacuccgggaagggaaauugggauugcaucaugacaagcuaccaguaucuuauuauccagaacaccacgugggaagaccacugucaguuuucucgccccuccccuauuggcuaccuggggcuccugagccaaagaacacgggauaucuauauuucccgcagacggcgcggaaccuucacauggacccuuucugacagcgagggcaaugaaacccccggcggguacugccugacaagauggaugcucaucgaggccgagcugaaauguuuuggaaacacggcuguugccaagugcaaugaaaaacaugaugaggaguucugcgacaugcugcggcucuuugauuucuguaagcaggcuauccgcagacugaaaaccccugcccaggcgaacauucagcuuaucaauaaggccgugaacgcucugauuaaugaccaacucaucaugaagaaccaucugcgggauauuaugggcauccccuauugcaauuacuccaaauauuguuaccuuaaccacacagucaccgggaagacaagccugccucgcugcugucucgugucuaauggauccuaccugaacgaaacccacuucagcgacgacaucgaacagcaggccgauaauaugauuacggagcugcuccaaaaagaguauauggacagacagggcaagacaccgcuggggcuuguggaucuguuugucuucucuaccagcuuuuaccucaucuccauuuuccugcaccugguuaaaauccccacccaucggcacgugauuggaaagccuugccccaaaccucaucgccuuaaccacaugggcaucuguucuugcggccucuauaagcaccccggggugccggucaaguggaaaagaugaggacuagucccuguucccagagcccacuuuuuuuucuuuuuuugaaauaaaauagccugucuuucagaucucaaaggcucuuuucagagccaccaaaaaaaaaaaaaaaaaaaaaaaaaaaaaaaaaaaaaaaaaaaaaaaaaaaaaaaaaaaaaaaaagaauu

SEQ ID NO: 27002 - RNA, 1733 nt, Artificial Sequence
  mRNA product Design a-2 (hSL-A64-N5) comprising derived and/or modified sequence from LASV(Nig08-A19;Clade III)__ADU56618__GPCmut4 (opt5)
aggagaguccgcucagccagguugcagaagcggcuuagcguguguccuaaucuucucucugcguguagguaggccugugccgcaaacaagcuuaccaugggccagaucgugaccuucuuucaagaggucccccacguuauugaagaggugaugaacaucgugcugauugcccucagcauccuggcuauucuuaaggggcuguacaauaucgccacaugcggacucaucggccuggucacguuccuucugcucuccgggagaucuuguagcaugaccuauaaaggaguguacgaacugcagacacuggagcucaacaugaauacccugaacaugugcaugccucuuuccuguacaaagaauaacucucaucacuauauuaugguuggcaaugaaaccgggcuggagcucacacugaccaacacgagccuucugcaucacaaauuuugcaaucucuccgacgcgcauaagaaaaaccuguacgaucacacccugaugucuaucauuagcacauuccaccucuccaucccgaauuuuaaccaguaugaggcuaugagcugugacuucaauggaggcaagauuaccgugcaguacaaccugucucauuccuaugccaucgaugccgcuaaucacugcggcacagucgccaacggggugcuucaaaccuuuaugcggauggcuuggggaggcagcuacauugcccuggacucugggcgcggaaagugggauuguaucaugacguccuaccaguaucucaucauucagaacacaaccugggaagaccauugccaguucagcagacccucuccuaucggcuaccuggggcuucugucccaacggacacgcgauauuuauaucagcagacggcgcagaggaaccuuuaccuggacacucuccgacucugagggcaaugaaacgcccggcggguacugucugacccgguggaugcugauugaggcggagcucaaaugcuucggaaacacagccguugcuaaguguaaugaaaaacacgaugaggaauuuugcgacaugcugcgccuuuucgauuuuugcaagcaggccaucagacggcugaaagcuccugcccagaugagcauccagcucauuaacaaggcggugaaugcccugaucaacgaccaacuuauuaugaagaaucaucugcgcgauaucaugggcauucccuauuguaacuacuccaaauauugcuaccucaaucacaccagcacagggagaaccucucugccucgguguugccuggucuccaacggaagcuaccucaaugagacgcacuucucugacgacaucgaacagcaggcugauaacaugaucacagagaugcugcaaaaggaguaucuugaccgccagggcaaaaccccgcuggggcucguggaucuguucguguuuagcaccuccuucuaccugauuucuaucuuucuucaucucgucaagauucccacacacagacauaucguuggaaaaccuugucccaagccucaccggcugaaucacaugggcauuugcagcuguggccuguauaaacagcccggggugccggugagauggaagcgcugaggacuagucccuguucccagagcccacuuuuuuuucuuuuuuugaaauaaaauagccugucuuucagaucucaaaggcucuuuucagagccaccaaaaaaaaaaaaaaaaaaaaaaaaaaaaaaaaaaaaaaaaaaaaaaaaaaaaaaaaaaaaaaaaagaauu

SEQ ID NO: 27003 - RNA, 1736 nt, Artificial Sequence
  mRNA product Design a-2 (hSL-A64-N5) comprising derived and/or modified sequence from LASV(G1180-SLE-2010;Clade IV)__AIT17168__GPCmut4 (opt5)
aggagaguccgcucagccagguugcagaagcggcuuagcguguguccuaaucuucucucugcguguagguaggccugugccgcaaacaagcuuaccaugggccagaucgugaccuucuuucaagaggucccccacguuauugaagaggugaugaacaucgugcugauugcccucagcauccuggcuguccuuaaggggcuguacaauuucgccacaugcggacucgugggccugcuuacguuucugcuccugugugggagauccugcaccgcgucucgguauaaaggaguuuacgaacugcagacacucgagcugaacauggaaacccuuaauauguguaugccucugagcugcacaaagaacaauucccaucacuauauuauggugggcaacgagaccgggcucgagcugacacuuaccaauacgucuaucaucaaccauaaauucuguaaucugagcgacgcucacaagaaaaaccucuacgaucaugcccugauguccauuaucucuaccuuucaccugagcauuccgaauuucaaccaguaugaagccauguccugcgacuuuaauggaggcaagaucagcguccaguacaaccucucucacuccuaugcuggcgaugccgcuaaucauugugggacaguggccaacggaguucugcaaaccuucaugcgcauggcguggggcgggagcuacauugcccuugacucuggacacggcuccugggauugcaucaugacaagcuaccaguaucugauuauccagaacaccacgugggaggaccauugucaguuuucuagacccuccccuaucggguaccucggacugcuuagccaacggacacgcgauauuuauaucuccagacggcgcagaggcaccuucacauggacccugucugacagcgaaggcaaggauacccccgggggauacugccucacacgguggaugcugauugaggcugagcugaaauguuuuggcaauacggccguggcuaagugcaacgaaaaacacgacgaggaguucugcgauaugcuccgccuguuugacuucuguaagcaggccauccagagacuuaaagcgccugcccagauguccauucaacugaucaauaaggcugucaacgcccucaucaaugaucagcugauuaugaagaaccaccuucgggacaucauggggauucccuauugcaauuacagcaaauauuguuaccugaaccauaccacaaccggaaagacaucucucccuaaaugcugucugguguccaauggcagcuaccugaacgaaacccacuucucugacgauaucgaacagcaagcugacaauaugauuacggagaugcuccagaaggaguauauggaacgccaggggaaaacaccgcugggacuuguggaucuguuugucuucagcaccuccuuuuaccucaucucuaucuuccugcaucugguuaagauucccacccacagacauaucgugggcaaaagcugcccuaagccccaccggcuuaaccacaugggcauuuguuccugcgggcucuauaagcagccuggagugcccgucaaauggaagcgcugaggacuagucccuguucccagagcccacuuuuuuuucuuuuuuugaaauaaaauagccugucuuucagaucucaaaggcucuuuucagagccaccaaaaaaaaaaaaaaaaaaaaaaaaaaaaaaaaaaaaaaaaaaaaaaaaaaaaaaaaaaaaaaaaagaauu

SEQ ID NO: 27004 - RNA, 1736 nt, Artificial Sequence
  mRNA product Design a-2 (hSL-A64-N5) comprising derived and/or modified sequence from LASV(G1442-SLE-2011;Clade IV)__AIT17180__GPCmut4 (opt5)
aggagaguccgcucagccagguugcagaagcggcuuagcguguguccuaaucuucucucugcguguagguaggccugugccgcaaacaagcuuaccaugggccagaucgugaccuucuuucaagaggucccccacguuauugaagaggugaugaacaucgugcugauugcccucagcauccuggcuguccuuaaggggcuguacaauguggccacaugcggacucauuggccugguuacguuccuucugcucugugggagauccugcaccacaacccuguauaaaggaguguacgaacugcagacacucgagcugaacauggaaacccuuaauauguguaugccucugucuugcacaaagaacaauagccaucacuauauccgggucggcaacgagaccgggcucgagcugacgcuuaccaauacauccaucauuaaccauaaauuuuguaaucugucugacgcgcacaagaaaaaccucuacgaucaugcucugaugagcaucauuuccaccuuccaccugucuaucccgaauuuuaaccaguaugaagccaugagcugcgacuucaauggaggcaagauuuccgugcaguacaaccucagccacucuuaugccggcgaugcugccaaucauugugggacaguugcuaacggagugcugcaaaccuuuaugcgcauggccuggggcggguccuacaucgcgcuugacagcggaagaggcaacugggauugcauuaugacgucuuaccaguaucugaucauccagaauacaaccugggacgaucacugucaguucucccggcccagcccuauuggguaccucggacugcuuucucaacgcacaagagacgucuauaucucccggcgcagacggggcaccuuuaccuggacacugagcgauuccgagggcaaggacacgcccgggggauacugccucacccgcuggaugcugauugaagccgagcugaaauguuucggcaacacagcuguggccaagugcaaugagaaacaugaugaagaguuuugcgacaugcucagacuguucgauuuuuguaagcaggcuauccagcggcuuaaagccccugcgcagaugucuauucaacugaucaacaaggccgugaaugcucucaucaacgaccagcugauuaugaagaaucaccuucgcgacaucauggggauucccuauugcaacuacagcaaauauuguuaccugaauaacaccgccacaggaaagaccucccucccuaaaugcugucugaucagcaauggcucuuaccugaacgaaacgcacuucuccgaugacauugagcaggaagcugauaauaugaucacagagaugcuccaaaaggaguauauggaaagacaggggaaaaccccgcugggacuugucgaccuguucguuuuuagcaccucuuucuaccucaucagcauuuuucugcaucuggugaagauccccacacaccggcauauugugggcaaauccugcccuaagccccaccgccuuaaccauaugggcaucuguucuugcgggcucuauaagcagccuggaguccccgugagauggaaacggugaggacuagucccuguucccagagcccacuuuuuuuucuuuuuuugaaauaaaauagccugucuuucagaucucaaaggcucuuuucagagccaccaaaaaaaaaaaaaaaaaaaaaaaaaaaaaaaaaaaaaaaaaaaaaaaaaaaaaaaaaaaaaaaaagaauu

SEQ ID NO: 27005 - RNA, 1736 nt, Artificial Sequence
  mRNA product Design a-2 (hSL-A64-N5) comprising derived and/or modified sequence from LASV(G3010-SLE-2013;Clade IV)__AIT17344__GPCmut4 (opt5)
aggagaguccgcucagccagguugcagaagcggcuuagcguguguccuaaucuucucucugcguguagguaggccugugccgcaaacaagcuuaccaugggccagaucgugaccuucuuucaagaggucccccacguuauugaagaggugaugaacaucgugcugauugcccucagcauccuggcuguccuuaaggggcuguacaauuucgccacaugcggacucgugggccugguuacguuucuucugcucugugggagauccugcaccacaucucuguauaaaggaguguacgaacugcagacccucgagcugaacauggaaacacuuaauauguguaugccucugagcugcaccaagaacaauucccaucacuauauuauggucggcaacgagacagggcucgagcugacccuuacgaauaccucuaucaucaaccauaaauucuguaaucugagcgacgcgcacaagaaaaaccucuacaaucaugcucugauguccauuaucucuacauuucaccugagcauuccgaacuucaaucaguaugaagccauguccugcgauuuuaacggaggcaagaucagcgugcaguacaaucucucucacuccuaugccggcgacgcugccagccauugugggaccguugcuaacggagugcugcaaacauucaugcggauggccuggggcgggucuuacauugcgcuugauuccggauacggcaagugggacugcaucaugaccagcuaucaguaccugauuauccagaacacgacaugggaggaucacugucaguuuucucgccccuccccuaucggguaucucggacugcuuagccaaagaacccgggacauuuacaucucccgcagacggcgcggcacauucaccuggacccugucugauagcgaaggcaaagacacacccgggggauauugccucacgagauggaugcugauugaggccgagcugaaguguuuuggcaauaccgcugucgccaaaugcaacgaaaagcaugaugaggaguucugcgacaugcuccggcuguuugauuucuguaaacaggcuauccagcgccuuaagaccccugcccagauguccauucaacugaucaauaaggcggugaacgcccucaucaaugaccagcugauuaugaaaaaccaccuuagagauaucauggggauucccuacugcaauuauagcaaguacuguuaccugaaccacacaacaaccggaaaaacgucucucccuaagugcugucugguguccaauggcagcuaucugaacgaaacacauuucucugacgacaucgaacagcaagcugauaauaugauuaccgagaugcuccagaaagaguacauggaacggcaggggaagaccccgcugggacuugucgaccuguuuguuuucagcacauccuuuuaucucaucucuaucuuccugcaccuggugaaaauucccacccaucgccacaucgugggcaagagcugcccuaagccccauagacuuaaccacaugggcauuuguuccugcgggcucuacaaacagccuggaguccccgugcgguggaagcgcugaggacuagucccuguucccagagcccacuuuuuuuucuuuuuuugaaauaaaauagccugucuuucagaucucaaaggcucuuuucagagccaccaaaaaaaaaaaaaaaaaaaaaaaaaaaaaaaaaaaaaaaaaaaaaaaaaaaaaaaaaaaaaaaaagaauu

SEQ ID NO: 27006 - RNA, 1736 nt, Artificial Sequence
  mRNA product Design a-2 (hSL-A64-N5) comprising derived and/or modified sequence from LASV(G502-SLE-2009;Clade IV)__AIT17126__GPCmut4 (opt5)
aggagaguccgcucagccagguugcagaagcggcuuagcguguguccuaaucuucucucugcguguagguaggccugugccgcaaacaagcuuaccaugggccagaucgugaccuucuuucaagaggucccccacguuauugaagaggugaugaacaucgugcugauugcccucagcauccuggcuguccuuaaggggcuguacaauuucgccacaugcggacucgugggccugcuuacguuucugcuccugugugggagauccugcaccacaggacuguauaaaggcguuuacgaacuccagacccuggagcuuaacauggaaacacugaauauguguaugccucucucuugcaccaagaacaauagccaucacuauauuaugguggggaacgagacaggacuggagcuuacccugacgaauaccuccaucaucaaccauaaauucuguaaucucucugacgcgcacaagaaaaaccuguacgaucaugcucugaugagcauuaucuccacauuucaccucucuauuccgaauuucaaccaguaugaagccaugagcugcgacuuuaauggcggcaagaucuccguccaguacaaccugagccacucuuaugccggggaugcugccgaccauuguggaaccguggcuaauggcguucuucaaacauucaugcggauggccuggggaggguccuacauugcgcuggauagcggccgcgggagaugggacugcaucaugaccucuuaccaguaucucauuauccagaacacgacaugggaggaucacugucaguuuucccggcccagcccuaucggauaccugggccuucugucucaacgcaccagagacauuuauaucucccggcgcagacggggcacauucaccuggacccucagcgauuccgaagggaaggacacacccggaggcuacugccugacgcgcuggaugcugauugaggccgagcucaaauguuuugggaacaccgcuguggccaagugcaaugaaaaacaugaugaggaguucugcgacaugcugagacuuuuugauuucuguaagcaggcuauccagcggcugaaagccccugcgcagaugucuauucaacucaucaacaaggccgucaaugcucugaucaacgaccagcuugugaugaagaaucaucugcgcgacauuaugggaauccccuauugcaacuacagcagauauuguuaccucaaucacacaaccacaggccggaccucccugccuaaaugcugucuggugagcaacgggucuuaccucaaugaaacgcacuucuccgaugacauugaacagcaagccgauaacaugaucacagagaugcugcagaaggaguauauggaacgccagggaaaaaccccgcuuggccuggucgaccucuuuguuuucagcaccucuuuuuaccugauuagcaucuuccugcaccuugugaagauccccacacauagacacauugugggcaaauccugcccuaagccccaucggcucaaucacauggggaucuguucuugcggacuguauaaacagccuggcguccccgugaaguggaagagaugaggacuagucccuguucccagagcccacuuuuuuuucuuuuuuugaaauaaaauagccugucuuucagaucucaaaggcucuuuucagagccaccaaaaaaaaaaaaaaaaaaaaaaaaaaaaaaaaaaaaaaaaaaaaaaaaaaaaaaaaaaaaaaaaagaauu

SEQ ID NO: 27007 - RNA, 1736 nt, Artificial Sequence
  mRNA product Design a-2 (hSL-A64-N5) comprising derived and/or modified sequence from LASV(G733-SLE-2010;Clade IV)__AIT17154__GPCmut4 (opt5)
aggagaguccgcucagccagguugcagaagcggcuuagcguguguccuaaucuucucucugcguguagguaggccugugccgcaaacaagcuuaccaugggccagaucgugaccuucuuucaagaggucccccacguuauugaagaggugaugaacaucgugcugauugcccucagcauccuggcuguccuuaaggggcuguacaauuucgccacaugcggaauugugggccucguuuccuuucugcuucugugugggagaucuugcacgaccagccucuauaaaggaguguacgaacugcagacacuggagcucaacauggaaacccugaauauguguaugccucuuuccugcacaaagaacaauucucaucacuauaucauggucggcaacgagaccgggcuggagcucacacugaccaauacgagcaucauuaaccauaaauucuguaaucuuuccgacgcgcacaagaaaaaccuguacgaucaugcucucaugucuaucauuagcaccuuucaccuguccaucccgaauuucaaccaguaugaagccaugagcugcgacuuuaauggaggcaagauuucugugcaguacaaccugucccacagcuaugccggcgaugcugccaaucauugugggacaaucgcuaacggaguucuccaaaccuucaugcggauggccuggggcgggucuuacauugcgcuggacuccggacgcgauagaugggacugcaucaugacaagcuaccaguaucuuaucauucagaacaccacgugggaggaucacugucaguuuucucggcccuccccuaucggcuaccuggggcuccugagccaacgcacaagagacauuuauaucucccggcgcagacggggaaccuucacauggacccuuucugauagcgaaggcaaggacacccccggcggguacugccugacacgcuggaugcucauugaggccgagcugaaauguuuuggaaauacggcuguggccaagugcaacgaaaaacaugaugaggaguucugcgacaugcugagacucuuugauuucuguaagcaggcuauccagcggcugaaagccccugcgcagauguccauccaacuuauuaauaaggccgucaacgcucugaucaaugaccagcucauuaugaagaaccaucugcgcgacaucaugggcauucccuauugcaauuacagcaaauauuguuaccuuaaccacaccacaaccgggaagacaucucugccuaaaugcugucucguguccaauggaagcuaccugaacgaaacccacuucucugaugacaucgaacagcaagccgauaauaugaucacggagaugcugcagaaggaguauauggaaagacagggcaaaacaccgcucgggcugguggaccuuuuugucuucagcaccuccuuuuaccugauuucuaucuuccuccaccugguuaagauucccacccaucggcacguggugggaaaaagcugcccuaagccccaucgccugaaccacaugggcaucuguuccugcggccuuuaugggcagccuggaguccccgugaaguggaaaagaugaggacuagucccuguucccagagcccacuuuuuuuucuuuuuuugaaauaaaauagccugucuuucagaucucaaaggcucuuuucagagccaccaaaaaaaaaaaaaaaaaaaaaaaaaaaaaaaaaaaaaaaaaaaaaaaaaaaaaaaaaaaaaaaaagaauu

SEQ ID NO: 27008 - RNA, 1736 nt, Artificial Sequence
  mRNA product Design a-2 (hSL-A64-N5) comprising derived and/or modified sequence from MOPV/LASV reassortant(IGS-1;Clade IV)__AFY05576__GPCmut4 (opt5)
aggagaguccgcucagccagguugcagaagcggcuuagcguguguccuaaucuucucucugcguguagguaggccugugccgcaaacaagcuuaccaugggccagaucgugaccuucuuucaagaggucccccacguuauugaagaggugaugaacaucgugcugauugcccucagcguccuggcugugcuuaaggggcuguacaauuucgccacaugcggacucguuggccuggugacguuucuucugcucugugggagauccugcaccacaucucuguauaaaggagucuacgaacugcagacccucgagcugaacauggaaacacuuaauauguguaugccucugagcugcaccaagaacaauucccaucacuauaucauggugggcaacgagacagggcucgagcugacccuuacgaauaccucuauuaucaaccauaaauucuguaaucugagcgacgcgcacaagaaaaaccucuacgaucaugcucugauguccaucauuucuacauuucaccugagcaucccgaauuucaaccaguaugaagccauguccugcgacuuuaauggaggcaagauuagcguucaguacaaccucucucacuccuaugccggcgaugcugccaaucauugugggaccguggcuaacggaguccugcaaacauucaugcggauggccuggggcgggagcuacaucgcgcuugacucuggacgcggcaacugggauugcauuaugaccuccuaccaguaucugaucauucagaauacgacaugggaggaccacugucaguuuagcagacccucuccuaucggguaccucggacugcuuucccaacggacccgcgauaucuauauuagcagacggcgcagaggcacauucaccuggacccuguccgacucugaaggcgaggauacacccgggggauacugccucacgcgguggaugcugaucgaggccgaacugaaguguuuuggcaacaccgcuguggccaaaugcaaugagaagcaugacgaagaguucugcgauaugcuccgccuguuugacuucuguaaacaggcuauucagagacuuaaggccccugcgcagaugagcauccaacugauuaacaaagccgugaaugcucucaucaacgaucagcugaucaugaagaaucaccuucgggacauuauggggauccccuauugcaacuacuccaaguauuguuaccugaaucacacaaccacaggacgcaccagccucccuaaaugcugucuggucucuaacggcuccuaccugaaugaaacgcauuucagcgacgauauugagcagcaagccgacaacaugaucacagagaugcuccagaaggaauauauggagagacaggggaaaaccccgcugggacuuguugaucuguuuguguucucuaccagcuuuuaccucauuuccaucuuccugcaccuggugaagauccccacacaucggcacauugucggcaaaucuugcccuaagccccaucgccuuaaucacaugggcaucuguagcugcgggcucuauaaacagccuggagugcccguuaaguggaagagaugaggacuagucccuguucccagagcccacuuuuuuuucuuuuuuugaaauaaaauagccugucuuucagaucucaaaggcucuuuucagagccaccaaaaaaaaaaaaaaaaaaaaaaaaaaaaaaaaaaaaaaaaaaaaaaaaaaaaaaaaaaaaaaaaagaauu

SEQ ID NO: 27009 - RNA, 1736 nt, Artificial Sequence
  mRNA product Design a-2 (hSL-A64-N5) comprising derived and/or modified sequence from LASV(LM765-SLE-2012;Clade IV)__AIT17814__GPCmut4 (opt5)
aggagaguccgcucagccagguugcagaagcggcuuagcguguguccuaaucuucucucugcguguagguaggccugugccgcaaacaagcuuaccaugggccagaucgugaccuucuuucaagaggucccccacguuauugaagaggugaugaacaucgugcugauugcccucagcauccuggcuguccuuaaggggcuguacaauuucgccacaugcggacucgugggccugguuacguuucuucugcucugugggagauccugcaccacaucucuguauaaaggaguguacgaacugcagacccucgagcugaacauggaaacacuuaauauguguaugccucugagcugcaccaagaacaauucccaucacuauauuauggucggcaacgagacagggcucgagcugacccuuacgaauaccucuaucaucgaccauaaauucuguaaccugagcgaugcgcaccggaagaaucucuacgaccaugcucugauguccauuaucucuacauuucaccugagcauuccgaacuucaaucaguaugaagccauguccugcgauuuuaacggaggcaaaaucagcgugcaguacaaucucucucacuccuaugccaaggacgcugccgaucauuguggcaccguugcuaacggggugcugcaaacauucaugcgcauggccuggggaggcagcuacauugcgcuugacucugggagaggacggugggauugcaucaugaccuccuaccaguaucugauuauccagaauacgacaugggaggaccacugucaguuuagccgccccucuccuaucggcuaccucgggcugcuuucccaaagaacccgggauauuuauaucagccgcagacggcgcggaacauucaccuggacccuguccgacucugaaggcaaggauacacccggcggguacugccucacgagauggaugcugauugaggccgagcugaaauguuuuggaaacaccgcugucgccaagugcaacgaaaaacaugacgaggaguucugcgauaugcuccggcuguuugacuucuguaagcaggcuauccagcgccuuaaagccccugcgcagaugagcauucaacugaucaauaaggccgugaacgcucucaucaaugaccagcugauuaugaagaaccaccuuagagauaucaugggcauucccuauugcaauuacuccaaauauuguuaccugaaccacacaaccacagggaagaccagccucccuaaaugcugucuggugucuaauggauccuaccugaacgaaacgcauuucagcgacgauaucgaacagcaagccgacaauaugauuacagagaugcuccagaaggaguauauggaacggcagggcaaaaccccgcuggggcuugucgaucuguuuguuuucucuaccagcuuuuaccucaucuccaucuuccugcaccuggugaagauucccacacaucgccacaucgugggaaaaccuugccccaagccucauagacuuaaccacaugggcauuuguucuugcggccucuauaagcagcccggggucccggugaaauggaagcggugaggacuagucccuguucccagagcccacuuuuuuuucuuuuuuugaaauaaaauagccugucuuucagaucucaaaggcucuuuucagagccaccaaaaaaaaaaaaaaaaaaaaaaaaaaaaaaaaaaaaaaaaaaaaaaaaaaaaaaaaaaaaaaaaagaauu

SEQ ID NO: 27010 - RNA, 1736 nt, Artificial Sequence
  mRNA product Design a-2 (hSL-A64-N5) comprising derived and/or modified sequence from LASV(LM776-SLE-2012;Clade IV)__AIT17824__GPCmut4 (opt5)
aggagaguccgcucagccagguugcagaagcggcuuagcguguguccuaaucuucucucugcguguagguaggccugugccgcaaacaagcuuaccaugggccagaucgugaccuucuuucaagaggucccccacguuauugaagaggugaugaacaucgugcugauugcccucagcauccuggcuguccuuaaggggcuguacaauuucgccacaugcggacucgugggccugguuacguuucuucugcucugugggagauccugcaccacaucuguguauaaaggagucuacgaacugcagacccuggagcucaacauggaaacacugaauauguguaugccucuuagcugcaccaagaacaauucccaucacuauauuauggugggcaacgagacagggcuggagcucacccugacgaauaccucuaucaucaaccauaaauucuguaaucuuagcgacgcgcacaagaaaaaccuguacgaucaugcucucauguccauuaucucuacauuucaccugagcauuccgaauuucaaccaguaugaagccauguccugcgacuuuaauggaggcaagaucagcguucaguacaaccugucucacuccuaugccggcgaugcugccaaucauugugggaccguggcuaacggaguccuccaaacauucaugcggauggccuggggcgggagcuacauugcgcuggacucuggacacggcaagugggauugcaucaugaccuccuaccaguaucuuauuauccagaacacgacaugggaggaccauugucaguuuagccgccccucuccuaucggguaccugggacuccugucccaaagaacccgggauauuuauaucagccgcagacggcgcggcacauucaccuggacccuuuccgacucugaaggcaaagauacacccgggggauacugccugacgagauggaugcucauugaggccgagcugaaguguuuuggcaauaccgcuguggccaaaugcaacgaaaagcacgacgaggaguucugcgauaugcugcggcucuuugacuucuguaaacaggcuauccagcgccugaaggccccugcgcagaugagcauucaacuuaucaauaaggccgugaacgcucugaucaaugaucagcucauuaugaaaaaccaccugagagacaucauggggauucccuauugcaauuacuccaaguauuguuaccuuaaccauacaaccacaggaaaaaccagccugccuaagugcugucucgucucuaauggcuccuaccugaacgaaacgcacuucagcgacgauaucgaacagcaagccgacaauaugauuacagagaugcugcagaaagaguauauggaacggcaggggaagaccccgcucggacugguugaucuuuuuguguucucuaccagcuuuuaccugaucuccaucuuccuccaucuggugaaaauucccacacaccgccauaucgucggcaagucuugcccuaagccccacagacugaaccacaugggcauuuguagcugcgggcuuuauaaacagccuggagugcccguucgguggaagcgcugaggacuagucccuguucccagagcccacuuuuuuuucuuuuuuugaaauaaaauagccugucuuucagaucucaaaggcucuuuucagagccaccaaaaaaaaaaaaaaaaaaaaaaaaaaaaaaaaaaaaaaaaaaaaaaaaaaaaaaaaaaaaaaaaagaauu

SEQ ID NO: 27011 - RNA, 1736 nt, Artificial Sequence
  mRNA product Design a-2 (hSL-A64-N5) comprising derived and/or modified sequence from LASV(Mad39;Clade IV)__ANH09722__GPCmut4 (opt5)
aggagaguccgcucagccagguugcagaagcggcuuagcguguguccuaaucuucucucugcguguagguaggccugugccgcaaacaagcuuaccaugggccagaucgugaccuucuuucaagaggucccccacguuauugaagaggugaugaacaucgugcugauugcccucagcauccuggcuguccuuaaggggcuguacaauguggccacaugcggacucauuggccugguuacguuccuucugcucugugggagauccugcaccacaacccuguauaaaggaguguacgaacugcaggcgcucgagcugaacauggaaacacuuaauauguguaugccucugucuugcaccaagaacaauagccaucacuauauccgggucggcaacgagacagggcucgagcugacccuuacgaauaccucccugaucaaccauaaauuuuguaaucucucugacgcucacaagaaaaaccuguacgaucaugcccugaugagcauuaucuccacauuccaccucucuauuccgaauuuuaaccaguaugaagccaugagcugcgacuucaaugauggaaagaucuccgugcaguacaaccugagccacaccuaugcuggcgacacagccaaucauuguggcaccguugcuaacggggugcuucaaacguuuaugcgcauggccuggggaggcucuuacauugcgcuggauuccgggagaggaggcugggacugcaucaugacaagcuaccaguaucucauuauccagaacaccacaugggaggaucacugucaguucucucggcccuccccuaucggguaccugggacuucugagccaacgcaccagagacauuuauaucucucggcgcagacggggcaccuuuacauggacgcucuccgauagcgaaggcaaggacacccccgggggauacugccugacacgcuggaugcugauugaggccgagcucaaauguuucggcaauaccgcugucgccaagugcaacgaaaaacaugaugaggaauuuugcgacaugcugagacuuuucgauuuuuguaagcaggcuauccagcggcugaaagccccugcgcagauguccauucaacucaucaauaaggccgugaacgcucugaucaaugaccagcuuauuaugaagaaccaucugcgcgacaucauggggauucccuauugcaauuacucuaaauauuguuaccucaaccacacagugaccggaaagacgagccugccuaaaugcugucuggucuccaauggcagcuaccucaacgagacacacuucucugaugacaucgaacagcaagccgauaauaugauuaccgagaugcugcagaaggaguauauggaaagacaggggaaaaccccgcuuggacugguugaccucuucguguuuuccaccagcuucuaccugaucucuaucuuucugcaccuugugaagauucccacacaucggcacgucgugggcaaaccuugccccaagccucaucgccucaaccacaugggcaucuguagcugcggguucuauaagcagcccggaguuccggugagauggaaacggugaggacuagucccuguucccagagcccacuuuuuuuucuuuuuuugaaauaaaauagccugucuuucagaucucaaaggcucuuuucagagccaccaaaaaaaaaaaaaaaaaaaaaaaaaaaaaaaaaaaaaaaaaaaaaaaaaaaaaaaaaaaaaaaaagaauu

SEQ ID NO: 27012 - RNA, 1736 nt, Artificial Sequence
  mRNA product Design a-2 (hSL-A64-N5) comprising derived and/or modified sequence from LASV(Z0947-SLE-2011;Clade IV)__AIT17840__GPCmut4 (opt5)
aggagaguccgcucagccagguugcagaagcggcuuagcguguguccuaaucuucucucugcguguagguaggccugugccgcaaacaagcuuaccaugggccagaucgugaccuucuuucaagaggucccccacguuauugaagaggugaugaacaucgugcugauugcccucagcauccuggcuguccuuaaggggcuguacaauuucgccacaugcggacucgugggccugguuacguuucuucugcucugugggagauccugcaccauuucucuguauaaaggaguguacgaacugcagacacucgagcugaacauggaaacccuuaauauguguaugccucugagcugcacaaagaacaauucccaucacuauaucauggucggcaacgagaccgggcucgagcugacacuuaccaauacgucuaucauuaaccauaaauucuguaaucugagcgacgcgcacaagaaaaaccucuacgaucaugcucugauguccaucauuucuaccuuucaccugagcaucccgaauuucaaccaguaugaagccauguccugcgacuuuaauggaggcaagauuagcgugcaguacaaccucucucacuccuaugccggcgaugcugccaaucauugugggacaguugcuaacggagugcugcaaaccuucaugcggauggccuggggcgggagcuacaucgcgcuugacucuggacgcgauagaugggacugcauuaugacauccuaccaguaucugaucauccagaacaccacgugggaggaucacugucaguuuagccggcccucuccuauuggcuaccucgggcugcuuucccaacgcacaagagacaucuauauuagccggcgcagacggggaaccuucacauggacccuguccgauucugaaggcaaggacacccccggcggguacugccucacacgcuggaugcugaucgaggccgagcugaaauguuuuggaaauacggcugucgccaagugcaacgaaaaacaugaugaggaguucugcgacaugcucagacuguuugauuucuguaagcaggcuauucagcggcuuaaagccccugcgcagaugagcauccaacugaucaauaaggccgugaacgcucucauuaaugaccagcugaucaugaagaaccaccuucgcgacauuaugggcauccccuauugcaauuacuccaaauauuguuaccugaaccacaccacaaccgggaagacaagccucccuaaaugcugucuggugucuaauggauccuaccugaacgaaacccauuucagcgaugacauugaacagcaagccgauaauaugaucacggagaugcuccagaaggaguauauggaaagacagggcaaaacaccgcuggggcuugucgaccuguuuguuuucucuaccagcuuuuaccucaucuccauuuuccugcaccuggugaagauccccacccaucggcacauugugggaaaaccuugccccaagccucaucgccuuaaccacaugggcaucuguucuugcggccucuauaagcagcccggggucccggugaaauggaagagaugaggacuagucccuguucccagagcccacuuuuuuuucuuuuuuugaaauaaaauagccugucuuucagaucucaaaggcucuuuucagagccaccaaaaaaaaaaaaaaaaaaaaaaaaaaaaaaaaaaaaaaaaaaaaaaaaaaaaaaaaaaaaaaaaagaauu

SEQ ID NO: 27013 - RNA, 1767 nt, Artificial Sequence
  mRNA product Design a-2 (hSL-A100) comprising derived and/or modified sequence from LASV(Josiah;Clade IV)__NP_694870__GPCmut4 (opt1)
aggagaguccgcucagccagguugcagaagcggcuuagcguguguccuaaucuucucucugcguguagguaggccugugccgcaaacaagcuuaccaugggccagaucgugaccuucuuccaggaggucccccacgugaucgaggaggugaugaacaucguccugaucgcccucagcgugcuggccgugcugaaggggcucuacaacuucgcgaccugcggccuggucgggcuggugacguuccuccugcugugcggccgcuccugcaccaccagccucuacaaggggguguacgagcugcagacccuggagcucaacauggagacgcugaacaugugcaugccgcuguccugcaccaagaacaacagccaccacuacaucauggucggcaacgagaccggccucgagcugacgcugaccaacaccuccaucaucaaccacaaguucugcaaccucagcgacgcccacaagaagaaccuguacgaccacgcccugauguccaucaucagcaccuuccaccucuccauccccaacuucaaccaguacgaggccaugagcugcgacuucaacgggggcaagaucuccgugcaguacaaccugagccacuccuacgccggggacgcggccaaccacugcggcacgguggccaacgggguccugcagaccuucaugcggauggccuggggcggcagcuacaucgcgcucgacuccgggcgcggcaacugggacugcaucaugaccagcuaccaguaccugaucauccagaacaccacgugggaggaccacugccaguucucccggcccagccccaucggguaccugggccuccugucccagcgcacccgggacaucuacaucagccgccggcgccggggcaccuucaccuggacgcugagcgacuccgaggggaaggacaccccgggcggguacugccugacccgcuggaugcucaucgaggccgagcugaagugcuucggcaacaccgccguggccaagugcaacgagaagcacgacgaggaguucugcgacaugcugcggcuguucgacuucugcaagcaggccauccagcgccugaaggcgcccgcccagaugagcauccagcugaucaacaaggccgugaacgcccucaucaacgaccagcugaucaugaagaaccaccuccgggacaucauggggauccccuacugcaacuacuccaaguacugcuaccucaaccacacgaccaccggccgcaccagccugcccaagugcugccuggucuccaacggcagcuaccucaacgagacgcacuucuccgacgacaucgagcagcaggccgacaacaugaucaccgagaugcugcagaaggaguacauggagcggcaggggaagacgccccugggccucguggaccuguucguguucagcaccuccuucuaccugaucagcaucuuccugcaccucgucaagaucccgacccaccgccacaucguggggaaguccugccccaagccccaccggcugaaccacaugggcaucugcagcugcgggcuguacaagcagcccggcgugccggucaaguggaagcgcugaggacuagucccuguucccagagcccacuuuuuuuucuuuuuuugaaauaaaauagccugucuuucagaucucaaaggcucuuuucagagccaccaaaaaaaaaaaaaaaaaaaaaaaaaaaaaaaaaaaaaaaaaaaaaaaaaaaaaaaaaaaaaaaaaaaaaaaaaaaaaaaaaaaaaaaaaaaaaaaaaaaaa

SEQ ID NO: 27014 - RNA, 1764 nt, Artificial Sequence
  mRNA product Design a-2 (hSL-A100) comprising derived and/or modified sequence from LASV(LP;Clade I)__AAF86701__GPCmut4 (opt1)
aggagaguccgcucagccagguugcagaagcggcuuagcguguguccuaaucuucucucugcguguagguaggccugugccgcaaacaagcuuaccaugggccagaucaucaccuucuuccaggaggugccccacgucaucgaggaggugaugaacaucgugcugaucgcccucagccugcuggccauccucaaggggcuguacaacaucgcgaccugcggcaucaucgggcuggucgccuuccucuuccugugcggcaaguccugcagccugacgcucaagggcggguacgagcugcagacccuggagcucaacauggagacccugaacaugugcaugccgcuguccugcacgaagaacagcucccaccacuacauccgcgugggcaacgagaccgggcucgagcugacccugaccaacacgagcaucaucaaccacaaguucugcaaccucuccgacgcccacaagaagaaccuguacgaccacgcccugaugagcaucaucuccaccuuccaccucagcauccccaacuucaaccaguacgaggccauguccugcgacuucaacggcgggaagaucagcgugcaguacaaccugucccacagcuacgcgggcgacgccgccgagcacugcgggaccgucgccaacggcgugcugcagaccuucaugcggauggcguggggcgggcgcuacaucgcccucgacuccggcaaggggaacugggacugcaucaugacgagcuaccaguaccugaucauccagaacaccaccugggaggaccacugccaguucucccggcccagccccaucggcuaccugggccuccugucccagcgcacccgggacaucuacaucagccgccggcgccgggggacguucaccuggacccugagcgacuccgagggcaacgagacccccgggggcuacugccugacgcgcuggaugcucaucgaggccgagcugaagugcuucgggaacaccgccguggccaagugcaacgagaagcacgacgaggaguucugcgacaugcugcggcuguucgacuucugcaagcaggcgauccgccggcugaaggcccccgcccagaugagcauccagcugaucaacaaggccgucaacgcccucaucaacgaccagcugaucaugaagaaccaccuccgcgacaucaugggcauccccuacugcaacuacuccaaguacugcuaccucaaccacaccagcuccggccggaccagccugcccaagugcugccugaucuccaacgggagcuaccucaacgagacgcaguucuccgacgacaucgagcagcaggcggacaacaugaucaccgagaugcugcagaaggaguacaucgagcgccagggcaagaccccgcuggggcucguggacaucuucaucuucagcaccuccuucuaccugaucagcaucuuccugcaccugaucaagaucccgacgcaccggcacaucgugggcaagcccugccccaagccccaccgccucaaccacaugggggucugcuccugcggccuguacaagcacccgggcgugcccaccaaguggaagcggugaggacuagucccuguucccagagcccacuuuuuuuucuuuuuuugaaauaaaauagccugucuuucagaucucaaaggcucuuuucagagccaccaaaaaaaaaaaaaaaaaaaaaaaaaaaaaaaaaaaaaaaaaaaaaaaaaaaaaaaaaaaaaaaaaaaaaaaaaaaaaaaaaaaaaaaaaaaaaaaaaaaaa

SEQ ID NO: 27015 - RNA, 1764 nt, Artificial Sequence
  mRNA product Design a-2 (hSL-A100) comprising derived and/or modified sequence from LASV(803213;Clade II)__AAF86703__GPCmut4 (opt1)
aggagaguccgcucagccagguugcagaagcggcuuagcguguguccuaaucuucucucugcguguagguaggccugugccgcaaacaagcuuaccaugggccagaucaucaccuucuuccaggaggugccccacgucaucgaggaggugaugaacaucgugcugaucgcccucagccugcuggccauccucaaggggaucuacaacgucgcgaccugcggccuguucgggcugaucuccuuccuccugcugugcggccgcagcugcuccgugacguacaaggggguguacgagcuccagacccuggagcugaacauggccaaccucaacaugugcaugccgcugagcugcaccaagaacaacucccaccacuacaucauggucggcaacgagacgggccuggagcucacccugaccaacaccagcaucaucaaccacaaguucugcaaccuguccgacgcccacaagaagaaccucuacgaccacgcccugaugagcaucaucuccacguuccaccugagcauccccaacuucaaccaguacgaggccauguccugcgacuucaacgggggcaagaucagcgugcaguacaaccucucccacagcuucgcgguggacgccgccaaccacugcgggaccaucgccaacggcguccugcagaccuucaugcggauggcguggggcggguccuacaucgcccuggacagcggcaaggggaacugggacugcaucaugaccuccuaccaguaccucaucauccagaacacgaccugggaggaccacugccaguucagccgccccucccccaucggcuaccuggggcugcucagccagcggacccgcgacaucuacaucagccggcgccgccggggcaccuucacguggacccucuccgacagcgagggcaacgaggcccccgggggcuacugccugacccgguggaugcugaucgaggccgagcucaagugcuucgggaacaccgccguggcgaagugcaacgagaagcacgacgaggaguucugcgacaugcugcgccuguucgacuucugcaagcaggccaucaagcggcucaagacgcccgcccagauguccauccagcugaucaacaaggccgugaacgcccugaucaacgaccagcucaucaugaagaaccaccuccgcgacaucaugggcauccccuacugcaacuacagccgguacugcuaccugaaccacaccgucaccgggaagaccucccugccccgcugcugccuggugagcaacggcuccuaccugaacgagacgcacuucagcgacgacaucgagcagcaggcggacaacaugaucaccgagaugcuccagaaggaguacauggaccggcagggcaagaccccgcuggggcugguggaccucuucgucuucuccaccagcuucuaccugaucuccaucuuccugcaccuggugaagaucccgacgcaccgccacaucgugggcaagcccugccccaagccccaccggcucaaccacauggggaucugcagcugcggccuguacaagcacccggggguccccgugaaguggaagcgcugaggacuagucccuguucccagagcccacuuuuuuuucuuuuuuugaaauaaaauagccugucuuucagaucucaaaggcucuuuucagagccaccaaaaaaaaaaaaaaaaaaaaaaaaaaaaaaaaaaaaaaaaaaaaaaaaaaaaaaaaaaaaaaaaaaaaaaaaaaaaaaaaaaaaaaaaaaaaaaaaaaaaa

SEQ ID NO: 27016 - RNA, 1764 nt, Artificial Sequence
  mRNA product Design a-2 (hSL-A100) comprising derived and/or modified sequence from LASV(GA391;Clade III)__CAA36645__GPCmut4 (opt1)
aggagaguccgcucagccagguugcagaagcggcuuagcguguguccuaaucuucucucugcguguagguaggccugugccgcaaacaagcuuaccaugggccagaucgugaccuucuuccaggaggucccccacgugaucgaggaggugaugaacaucguccugaucgcccucagcauccuggccauccugaaggggcucuacaacguggcgaccugcggccugaucgggcuggugacguuccuccugcuguccggccgcagcugcucccucaucuacaaggggaccuacgagcugcagacccuggagcucaacauggagacccugaacaugugcaugccgcugagcugcaccaagaacaacucccaccacuacauccgggucggcaacgagaccggccucgagcugacccugacgaacaccagcauccucaaccacaaguucugcaaccuguccgacgcccacaagcgcaaccuguacgaccacagccucauguccaucaucagcaccuuccaccuguccauccccaacuucaaccaguacgaggccaugagcugcgacuucaacgggggcaagaucaccgugcaguacaaccugucccacagcuucgccguggacgccgcggggcacugcggcacgcucgccaacgggguccugcagaccuucaugcggauggccuggggcggcuccuacaucgcccuggacagcgggcgcggcaacugggacugcaucaugaccuccuaccaguaccucaucauccagaacaccacgugggacgaccacugccaguucagccggcccucccccaucggguaccugggccugcucagccagcgcacccgggacaucuacaucagccgccggcgccggggcaccuucaccuggacgcucuccgacagcgaggggaacgagaccccgggcggguacugccugacccgcuggaugcugaucgaggcggagcucaagugcuucggcaacaccgccguggccaagugcaacgagaagcacgacgaggaguucugcgacaugcugcggcuguucgacuucugcaagcaggccauccgccggcucaagacgcccgcccagauguccauccagcugaucaacaaggcggugaacgcccugaucaacgaccagcucaucaugaagaaccaccuccgcgacaucauggggauccccuacugcaacuacagccgguacugcuaccugaaccacaccuccaccggcaagaccagccugccccgcugcugccugaucuccaacggcagcuaccugaacgagacgaaguucuccgacgacaucgagcagcaggccgacaacaugaucaccgagaugcuccagaaggaguacaucgaccggcaggggaagacgccccugggccuggucgaccuguucguguucagcaccuccuucuaccucaucagcaucuuccugcaccuggugaagaucccgacccaccgccacaucgucgggaagcccugccccaagccccaccggcucaaccacaugggcaucugcuccugcgggcuguacaagcagccgggcgugcccgugcgcuggaagcggugaggacuagucccuguucccagagcccacuuuuuuuucuuuuuuugaaauaaaauagccugucuuucagaucucaaaggcucuuuucagagccaccaaaaaaaaaaaaaaaaaaaaaaaaaaaaaaaaaaaaaaaaaaaaaaaaaaaaaaaaaaaaaaaaaaaaaaaaaaaaaaaaaaaaaaaaaaaaaaaaaaaaa

SEQ ID NO: 27017 - RNA, 1767 nt, Artificial Sequence
  mRNA product Design a-2 (hSL-A100) comprising derived and/or modified sequence from LASV(AV;Clade V)__CCA30314__GPCmut4 (opt1)
aggagaguccgcucagccagguugcagaagcggcuuagcguguguccuaaucuucucucugcguguagguaggccugugccgcaaacaagcuuaccaugggccagaucgugaccuucuuccaggaggucccccacgugaucgaggaggugaugaacaucguccugaucgcccucagcauccuggccgugcugaaggggcucuacaacaucgcgaccugcggccugaucgggcugaucacguuccuccugcugugcggccgcuccugcagcuccaaccucuacaaggggguguacgagcugcagagccuggaccucaacauggagacccugaacaugugcaugccgcuguccugcaccaagaacaacagccaccacuacauccgggucggcaacgacacgggccucgagcugacccugaccaacaccuccauccucaaccacaaguucugcaaccugagcgacgcccacaagaaggaccuguacgaccacgcccucauguccaucaucagcacguuccaccuguccauccccaacuucaaccaguacgaggccaugagcugcgacuucaacgggggcaagaucuccgugcaguacaaccugagccacuccuacgccaucgacgcggccaaccacugcgggaccguggccaacggcauccuccagaccuucaugcgcauggccuggggcgggagcuacaucgcgcuggacuccggccgggggaacugggacugcaucaugaccagcuaccaguaccugaucauccagaacacgaccugggagaaccacugccaguucucccgccccagccccaucggcuaccucgggcugcugagccagcggacccgcgacaucuacaucucccggcgccgccggggcaccuucacguggacccugagcgacuccgagggcaacgccacccccgggggcuacugccucacccgguggaugcugaucgaggccgagcugaagugcuucgggaacacggccgucgccaagugcaacgagaagcacgacgaggaguucugcgacaugcuccgccuguucgacuucugcaagcaggcgaucagccggcugaagucccccgcccagaugagcauccagcucaucaacaaggccgugaacgcccugaucaacgaccagcugaucaugaagaaccaccuccgcgacaucaugggcauccccuacugcaacuacuccaaguacugcuaccugaaccacaccaucaccgggaagaccagccugcccaagugcugccucguguccaacggcagcuaccugaacgagacgcacuucuccgacgacaucgagcagcaggccgacaacaugaucaccgagaugcugcagaaggaguacauggagcggcagggcaagaccccgcucgggcuggucgaccuguucguguucagcaccuccuucuaccugaucagcaucuuccuccgccuggugaagaucccgacgcaccggcacaucgucggcaagcccugccccaagccccaccgccugaaccacauggggaucugcuccugcggccucuacaagcagccgggggugcccgugcgguggaagcgcugaggacuagucccuguucccagagcccacuuuuuuuucuuuuuuugaaauaaaauagccugucuuucagaucucaaaggcucuuuucagagccaccaaaaaaaaaaaaaaaaaaaaaaaaaaaaaaaaaaaaaaaaaaaaaaaaaaaaaaaaaaaaaaaaaaaaaaaaaaaaaaaaaaaaaaaaaaaaaaaaaaaaa

SEQ ID NO: 27018 - RNA, 1764 nt, Artificial Sequence
  mRNA product Design a-2 (hSL-A100) comprising derived and/or modified sequence from LASV(Togo/2016/7082;Clade VI)__AMR44577__GPCmut4 (opt1)
aggagaguccgcucagccagguugcagaagcggcuuagcguguguccuaaucuucucucugcguguagguaggccugugccgcaaacaagcuuaccaugggccagaucaucaccuucuuccaggaggugccccacgucaucgaggaggugaugaacaucgugcugaucgcccucagccugcuggccauccucaagggggucuacaacguggcgaccugcggcaucaucgggcuggugacguuccuguuccucugcggccgcuccugcagccugaucuacaagggguccuacgagcugcagacccucgagcugaacauggagacccugaacaugugcaugccgcucagcugcacgaagaacuccagccaccacuacauccgggucggcaacgagaccggccuggagcugacccucaccaacacguccaucaucaaccacaaguucugcaaccugagcgacgcccacaagcgcaaccuguacgaccacgcccucauguccauccugagcaccuuccaccuguccauccccaacuucaaccaguacgaggccaugagcugcgacuucaacgggggcaagaucuccgugcaguacaaccucagccacgccuacgcgguggacgccgccgagcacugcgggaccgucgccaacggcgugcugcagaccuucaugcggauggcguggggcggguccuacaucgcccuggacagcggccgcgggaacugggacugcaucaugacguccuaccaguaccucaucauccagaacaccaccugggaggaccacugccaguucagccggcccucccccaucggcuaccuggggcugcucagccagcgcacccgggacaucuacaucagccgccggcgccggggcacguucaccuggacccucuccgacagcgagggcaacgagacccccgggggcuacugccugacgcgcuggaugcugaucgaggccgagcucaagugcuucgggaacaccgccguggccaagugcaacgagaagcacgacgaggaguucugcgacaugcugcggcuguucgacuucugcaagcaggcgauccagcgccucaagucccccgcccagaugagcauccagcugaucaacaaggccgucaacgcccugaucaacgaccagcucaucaugaagaaccaccuccgggacaugaugggcauccccuacugcaacuacuccaaguacugcuaccugaaccacaccagcuccgggcgcaccagccugcccaagugcugccugguguccaacggcagcuaccugaacgagacgcacuucuccgacgacaucgagcagcaggccgacaacaugaucaccgagaugcuccagaaggaguacaucgaccggcagggcaagaccccgcuggggcugguggaccucuucgucuucagcaccuccuucuaccugaucagcaucuuccugcaccugaucaagaucccgacgcaccgccacaucgugggcaagcccugccccaagccccaccggcucaaccacauggggaucugcuccugcggccuguacaagcagccgggggugcccacccgcuggaagcggugaggacuagucccuguucccagagcccacuuuuuuuucuuuuuuugaaauaaaauagccugucuuucagaucucaaaggcucuuuucagagccaccaaaaaaaaaaaaaaaaaaaaaaaaaaaaaaaaaaaaaaaaaaaaaaaaaaaaaaaaaaaaaaaaaaaaaaaaaaaaaaaaaaaaaaaaaaaaaaaaaaaaa

SEQ ID NO: 27019 - RNA, 1764 nt, Artificial Sequence
  mRNA product Design a-2 (hSL-A100) comprising derived and/or modified sequence from LASV(KAK-428;Clade n.d. (VII))__ANH09740__GPCmut4 (opt1)
aggagaguccgcucagccagguugcagaagcggcuuagcguguguccuaaucuucucucugcguguagguaggccugugccgcaaacaagcuuaccaugggccagaucgugaccuucuuccaggaggucccccacgugaucgaggaggugaugaacaucguccugaucgcccucagccugcuggccauccucaaggggcuguacaacuucgcgaccugcggcgugaucgggcugaucacguuccuccugcugugcggccgcuccugcagcgccaccuacaaggggcaguacgagcuccagacccuggagcugaacauggagucccucaacaugugcaugccgcugagcugcacgaagaacaacucccaccacuacauccgggccggcaacaacaccggccuggagcucacccugaccaacacgagcaucaucucccacaaguucugcaaccugagcgacgcccacaagaagaaccucuacgaccacacccugauguccaucaucaccaccuuccaccugagcauccccaacuucaaccaguacgaggccauguccugcgacuucaacgggggcaagaucagcauccaguacaaccucucccacagcuacgcgggggacgccgcccagcacugcggcacgguggccaacgggguccugcagaccuucaugcgcauggcguggggcggcuccuaccuggcccucgacagcgggcggcgcggcugggacugcaucaucuccagcuaccaguaccugaucauccagaacaccaccugggacgaccacugccaguucucccggcccagccccaucggguaccugggcuucgugagccagaagacgcgcgacaucuacaucucccggcgccgccggggcaccuucaccuggacccugagcgacuccgaggggcacgacaugccgggcggguacugccucacgcgguggaugcugaucgaggccgaccugaagugcuucggcaacaccgccguggccaagugcaacgagaagcacgacgaggaguucugcgacauguggcgccucuucgacuucugcaagcaggcgauccagcggcugaaggcccccgcccagaugaacauccagcugaucaacaaggccgucaacgcccucaucaacgaccagcugaugaugaagaaccaccuccgcgacaucauggggauccccuacugcaacuacagcaaguucugcuaccugaacaacaccaccacgggccggaccucccugccccgcugcugccugaucagcaacggcuccuaccucaacgagacccacuucagcgacgacaucgagcagcaggcggacaacaugaucaccgagaugcugcagaaggaguacauggaccggcaggggaagacgccccugggccucguggaccuguucguguucuccaccagcuucuaccugaucaccaucuuccuccaccuggucaagaucccgacccaccgccacaucguggggaagcccugccccaagccccaccggcugaaccacaugggcaucugcuccugcgggcuguacaagcagccgggcgugcccguccgcuggaagcggugaggacuagucccuguucccagagcccacuuuuuuuucuuuuuuugaaauaaaauagccugucuuucagaucucaaaggcucuuuucagagccaccaaaaaaaaaaaaaaaaaaaaaaaaaaaaaaaaaaaaaaaaaaaaaaaaaaaaaaaaaaaaaaaaaaaaaaaaaaaaaaaaaaaaaaaaaaaaaaaaaaaaa

SEQ ID NO: 27020 - RNA, 1764 nt, Artificial Sequence; identical to SEQ ID NO: 27014
  mRNA product Design a-2 (hSL-A100) comprising derived and/or modified sequence from LASV(Pinneo-NIG-1969;Clade I)__AIT17836__GPCmut4 (opt1)

SEQ ID NO: 27021 - RNA, 1764 nt, Artificial Sequence
  mRNA product Design a-2 (hSL-A100) comprising derived and/or modified sequence from LASV(ISTH0009-NIG-2011;Clade II)__AIT17404__GPCmut4 (opt1)
aggagaguccgcucagccagguugcagaagcggcuuagcguguguccuaaucuucucucugcguguagguaggccugugccgcaaacaagcuuaccaugggccagaucaucaccuucuuccaggaggugccccacgucaucgaggaggugaugaacaucgugcugaucgcccucagccugcuggccauccucaaggggaucuacaacgucgcgaccugcggccuguucgggcugguguccuuccuccugcugugcggccgcagcugcuccacgaccuacaaggggguguacgagcuccagacccuggagcuggacauggccagccucaacaugugcaugccgcuguccugcacgaagaacaacagccaccacuacaucauggucggcaacgagaccggccuggagcucacccugaccaacacguccaucaucaaccacaaguucugcaaccugagcgacgcccacaagaagaaccucuacgaccacgcccugauguccaucaucagcaccuuccaccuguccauccccaacuucaaccaguacgaggccaugagcugcgacuucaacgggggcaagaucuccgugcaguacaaccucagccacgcguacgccguggacgccgccaaccacugcgggaccaucgcgaacggcguccugcagaccuucaugcggauggccuggggcggguccuacaucgcccuggacagcggcaagggguccugggacugcaucaugacgagcuaccaguaccucaucauccagaacaccaccugggaggaccacugccaguucucccgccccagccccaucggcuaccuggggcugcucagccagcggacccgcgacaucuacaucucccggcgccgccggggcacguucaccuggacccucagcgacuccgagggcaacgagacccccgggggcuacugccugacgcgguggaugcugaucgaggccgagcucaagugcuucgggaacaccgccguggcgaagugcaacgagaagcacgacgaggaguucugcgacaugcugcgccuguucgacuucugcaagcaggccauccggcgccucaagacccccgcccagaugagcauccagcugaucaacaaggccgugaacgcccugaucaacgaccagcucaucaugaagaaccaccuccgggacaucaugggcaucccguacugcaacuacuccaaguacugcuaccugaaccacaccgucacggggaagaccagccugccccgcugcugccugguguccaacggcagcuaccugaacgagacccacuucuccgacgacaucgagcagcaggcggacaacaugaucaccgagcuccugcagaaggaguacauggaccggcagggcaagacgccccuggggcucguggaccuguucgucuucagcaccuccuucuaccugaucagcaucuuccugcaccucaucaagaucccgacccaccgccacaucaccggcaagcccugccccaagccccaccggcugaaccacauggggaucugcuccugcggccuguacaagcacccgggggugcccgugaaguggaagcgcugaggacuagucccuguucccagagcccacuuuuuuuucuuuuuuugaaauaaaauagccugucuuucagaucucaaaggcucuuuucagagccaccaaaaaaaaaaaaaaaaaaaaaaaaaaaaaaaaaaaaaaaaaaaaaaaaaaaaaaaaaaaaaaaaaaaaaaaaaaaaaaaaaaaaaaaaaaaaaaaaaaaaa

SEQ ID NO: 27022 - RNA, 1764 nt, Artificial Sequence
  mRNA product Design a-2 (hSL-A100) comprising derived and/or modified sequence from LASV(ISTH2010-NIG-2012;Clade II)__AIT17482__GPCmut4 (opt1)
aggagaguccgcucagccagguugcagaagcggcuuagcguguguccuaaucuucucucugcguguagguaggccugugccgcaaacaagcuuaccaugggccagaucaucaccuucuuccaggaggugccccacgucaucgaggaggugaugaacaucgugcugaucgcccucagccugcuggccauccucaaggggaucuacaacgucgcgaccugcggccuguucgggcugguguccuuccuccugcugugcggccgcagcugcuccacgaccuacaaggggguguacgagcuccagacccuggagcuggacauggccagccucaacaugugcaugccgcuguccugcacgaagaacaacagccaccacuacaucauggucggcaacgagaccggccuggagcucacccugaccaacacguccaucaucaaccacaaguucugcaaccugagcgacgcccacaagaagaaccucuacgaccacgcccugauguccaucaucagcaccuuccaccuguccauccccaacuucaaccaguacgaggccaugagcugcgacuucaacgggggcaagaucuccgugcaguacaaccucagccacgcguacgccguggacgccgccaaccacugcgggaccaucgcgaacggcguccugcagaccuucaugcggauggccuggggcggguccuacaucgcccuggacagcggcaagggguccugggacugcaucaugacgagcuaccaguaccucaucauccagaacaucaccugggaggaccacugccaguucucccgccccagccccaucggcuaccuggggcugcucagccagcggacccgcgacaucuacaucucccggcgccgccggggcaccuucacguggacccucagcgacuccgagggcaacgagacccccgggggcuacugccugacccgguggaugcugaucgaggccgagcucaagugcuucgggaacacggccguggcgaagugcaacgagaagcacgacgaggaguucugcgacaugcugcgccuguucgacuucugcaagcaggccauccggcgccucaagacccccgcccagaugagcauccagcugaucaacaaggccgugaacgcccugaucaacgaccagcucaucaugaagaaccaccuccgggacaucaugggcauccccuacugcaacuacuccaaguacugcuaccugaaccacaccgucaccgggaagacgagccugccccgcugcugccugguguccaacggcagcuaccugaacgagacccacuucuccgacgacaucgagcagcaggcggacaacaugaucaccgagcuccugcagaaggaguacaucgaccggcagggcaagaccccgcuggggcucguggaccuguucgucuucagcacguccuucuaccugaucagcaucuuccugcaccucgugaagaucccgacccaccgccacguggucggcaagcccugccccaagccccaccggcugaaccacauggggaucugcuccugcggccuguacaagcacccgggggugcccgugaaguggaagcgcugaggacuagucccuguucccagagcccacuuuuuuuucuuuuuuugaaauaaaauagccugucuuucagaucucaaaggcucuuuucagagccaccaaaaaaaaaaaaaaaaaaaaaaaaaaaaaaaaaaaaaaaaaaaaaaaaaaaaaaaaaaaaaaaaaaaaaaaaaaaaaaaaaaaaaaaaaaaaaaaaaaaaa

SEQ ID NO: 27023 - RNA, 1764 nt, Artificial Sequence
  mRNA product Design a-2 (hSL-A100) comprising derived and/or modified sequence from LASV(Lassa virus/H.sapiens-wt/NGA/2015/ISTH_0543;Clade II)__AVO03639__GPCmut4 (opt1)
aggagaguccgcucagccagguugcagaagcggcuuagcguguguccuaaucuucucucugcguguagguaggccugugccgcaaacaagcuuaccaugggccagaucaucaccuucuuccaggaggugccccacgucaucgaggaggugaugaacaucgugcugaucgcccucagccugcuggccauccucaaggggaucuacaacgucgcgaccugcggccuguucgggcugguguccuuccuccugcugugcggccgcagcugcuccacgaccuacaaggggguguacgagcuccagacccuggagcuggacauggccaaccucaacaugugcaugccgcugagcugcacgaagaacaacucccaccacuacaucauggucggcaacgagaccggccuggagcucacccugaccaacacgagcaucaucaaccacaaguucugcaaccuguccgacgcccacaagaagaaccucuacgaccacgcccugaugagcaucaucuccaccuuccaccugagcauccccaacuucaaccaguacgaggccauguccugcgacuucaacgggggcaagaucagcgugcaguacaaccucucccacaccuacgcgguggacgccgccaaccacugcgggaccaucgccaacggcguccugcagacguucaugcggauggcguggggcgggagcuacaucgcccuggacuccggcaaggggagcugggacugcaucaugaccuccuaccaguaccucgugauccagaacaccaccugggaggaccacugccaguucagccgccccucccccaucggcuaccuggggcugcucagccagcggacgcgcgacaucuacaucagccggcgccgccggggcaccuucaccuggacccucuccgacagcgagggcaacgagacgcccgggggcuacugccugacccgguggaugcugaucgaggccgagcucaagugcuucgggaacaccgccguggccaagugcaacgagaagcacgacgaggaguucugcgacaugcugcgccuguucgacuucugcaagcaggcgauccggcgccucaagacccccgcccagauguccauccagcugaucaacaaggccgucaacgcccugaucaacgaccagcucaucaugaagaaccaccuccgggacaucaugggcauccccuacugcaacuacagcaaguacugcuaccugaaccacacggugaccgggaagaccucccugccccgcugcugccuggugagcaacggcuccuaccugaacgagacccacuucagcgacgacaucgagcagcaggccgacaacaugaucacggagcuccugcagaaggaguacaucgaccggcagggcaagaccccgcuggggcucgucgaccuguucguguucuccaccagcuucuaccugaucuccaucuuccugcaccucgugaagaucccgacccaccgccacaucacgggcaagcccugccccaagccccaccggcugaaccacauggggaucugcagcugcggccuguacaagcacccggggguccccgugaaguggaagcgcugaggacuagucccuguucccagagcccacuuuuuuuucuuuuuuugaaauaaaauagccugucuuucagaucucaaaggcucuuuucagagccaccaaaaaaaaaaaaaaaaaaaaaaaaaaaaaaaaaaaaaaaaaaaaaaaaaaaaaaaaaaaaaaaaaaaaaaaaaaaaaaaaaaaaaaaaaaaaaaaaaaaaa

SEQ ID NO: 27024 - RNA, 1764 nt, Artificial Sequence
  mRNA product Design a-2 (hSL-A100) comprising derived and/or modified sequence from LASV(Lassa virus/H.sapiens-wt/NGA/2016/ISTH_0009;Clade II)__AVO03571__GPCmut4 (opt1)
aggagaguccgcucagccagguugcagaagcggcuuagcguguguccuaaucuucucucugcguguagguaggccugugccgcaaacaagcuuaccaugggccagaucaucaccuucuuccaggaggugccccacgucaucgaggaggugaugaacaucgugcugaucgcccucagccugcuggccauccucaaggggaucuacaacgucgcgaccugcggccugcuggggcucguguccuuccugcugcucugcggccgcagcugcuccacgaccuacaaggggguguacgagcugcagacccuggagcucgacauggccagccugaacaugugcaugccgcuguccugcacgaagaacaacagccaccacuacaucauggucggcaacgagaccggccucgagcugacccugaccaacacguccaucaucaaccacaaguucugcaaccucagcgacgcccacaagaagaaccuguacgaccacgcccugauguccaucaucagcaccuuccaccucuccauccccaacuucaaccaguacgaggccaugagcugcgacuucaacgggggccggaucuccgugcaguacaaccugagccacuccuacgcgguggacgccgccaaccacugcgggaccaucgccaacggcguccugcagaccuucaugcgcauggcguggggcgggagcuacaucgcccucgacuccggcaaggggagcugggacugcaucaugacguccuaccaguaccugaucauccagaacaccaccugggaggaccacugccaguucagccggcccagccccaucggcuaccuggggcuccugucccagcgcacccgggacaucuacaucagccgccggcgccggggcacguucaccuggacccuguccgacagcgagggcaacgagacccccgggggcuacugccugacgcgcuggaugcucaucgaggccgagcugaagugcuucgggaacaccgccguggccaagugcaacgagaagcacgacgaggaguucugcgacaugcugcggcuguucgacuucugcaagcaggcgauccgccggcugaagacccccgcccagauguccauccagcugaucaacaaggccgugaacgcccucaucaacgaccagcugaucaugaagaaccaccuccgcgacaucaugggcaucccguacugcaacuacagcaaguacugcuaccucaaccacaccgucacggggaagaccucccugccccggugcugccuggugagcaacggcuccuaccucaacgagacccacuucagcgacgacaucgagcagcaggccgacaacaugaucaccgagcugcugcagaaggaguacaucgaccgccagggcaagacgccccucgggcugguggaccuguucgucuucuccaccagcuucuaccugaucuccaucuuccuccaccuggugaagaucccgacccaccggcacaucaccggcaagcccugccccaagccccaccgccugaaccacauggggaucugcagcugcggccucuacaaccacccgggggugcccgucaaguggaagcggugaggacuagucccuguucccagagcccacuuuuuuuucuuuuuuugaaauaaaauagccugucuuucagaucucaaaggcucuuuucagagccaccaaaaaaaaaaaaaaaaaaaaaaaaaaaaaaaaaaaaaaaaaaaaaaaaaaaaaaaaaaaaaaaaaaaaaaaaaaaaaaaaaaaaaaaaaaaaaaaaaaaaa

SEQ ID NO: 27025 - RNA, 1764 nt, Artificial Sequence
  mRNA product Design a-2 (hSL-A100) comprising derived and/or modified sequence from LASV(Lassa virus/H.sapiens-wt/NGA/2016/ISTH_0017;Clade II)__AVO03567__GPCmut4 (opt1)
aggagaguccgcucagccagguugcagaagcggcuuagcguguguccuaaucuucucucugcguguagguaggccugugccgcaaacaagcuuaccaugggccagaucaucaccuucuuccaggaggugccccacgucaucgaggaggugaugaacaucgugcugaucgcccucagccugcuggccauccucaaggggaucuacaacgucgcgaccugcggccuguucgggcugguguccuuccuccugcugugcggccgcagcugcuccacgaccuacaaggggguguacgagcuccagacccuggagcuggacauggccagccucaacaugugcaugccgcuguccugcacgaagaacaacagccaccacuacaucauggucggcaacgagaccggccuggagcucacccugaccaacacguccaucaucaaccacaaguucugcaaccugagcgacgcccacaagaagaaccucuacgaccacgcccugauguccaucaucagcaccuuccaccuguccauccccaacuucaaccaguacgaggccaugagcugcgacuucaacgggggcaagaucuccgugcaguacaaccucagccacaccuacgcgaucgacgccgccaaccacugcgggaccaucgccaacggcgugcugcagacguucaugcggauggcguggggcggguccuacaucgcccuggacagcggcaagggguccugggacugcaucaugaccagcuaccaguaccucaucauccagaacaccaccugggaggaccacugccaguucucccgccccagccccaucggcuaccuggggcugcucagccagcggacgcgcgacaucuacaucucccggcgccgccggggcaccuucaccuggacccucagcgacuccgagggcaacgagacgcccgggggcuacugccugacccgguggaugcugaucgaggccgagcucaagugcuucgggaacaccgccgucgccaagugcaacgagaagcacgacgaggaguucugcgacaugcugcgccuguucgacuucugcaagcaggcgauccggcgccucaagacccccgcccagaugagcauccagcugaucaacaaggccgugaacgcccugaucaacgaccagcucaucaugaagaaccaccuccgggacaucaugggcauccccuacugcaacuacuccaaguacugcuaccugaaccacacggugaccgggaagaccagccugccccgcugcugccuggucuccaacggcagcuaccugaacgagacccacuucuccgacgacaucgagcagcaggccgacaacaugaucacggagcuccugcagaaggaguacauggaccggcagggcaagaccccgcuggggcucguggaccuguucguguucagcaccuccuucuaccugaucagcaucuuccugcaccucguccgcaucccgacccaccggcacgugaucggcaagcccugccccaagccccaccgccugaaccacauggggaucugcuccugcggccuguacaagcacccgggggugcccgucaaguggaagcggugaggacuagucccuguucccagagcccacuuuuuuuucuuuuuuugaaauaaaauagccugucuuucagaucucaaaggcucuuuucagagccaccaaaaaaaaaaaaaaaaaaaaaaaaaaaaaaaaaaaaaaaaaaaaaaaaaaaaaaaaaaaaaaaaaaaaaaaaaaaaaaaaaaaaaaaaaaaaaaaaaaaaa

SEQ ID NO: 27026 - RNA, 1764 nt, Artificial Sequence
  mRNA product Design a-2 (hSL-A100) comprising derived and/or modified sequence from LASV(Lassa virus/H.sapiens-wt/NGA/2018/ISTH_0959;Clade II)__AVV65099__GPCmut4 (opt1)
aggagaguccgcucagccagguugcagaagcggcuuagcguguguccuaaucuucucucugcguguagguaggccugugccgcaaacaagcuuaccaugggccagaucaucaccuucuuccaggaggugccccacgucaucgaggaggugaugaacaucgugcugaucgcccucagccugcuggccauccucaaggggaucuacaacgucgugaccugcggccuguucgggcugguguccuuccuccugcugugcggccgcagcugcuccacgaccuacaagggggucuacgagcuccagacccuggagcuggacauggcgagccucaacaugugcaugccgcuguccugcacgaagaacaacagccaccacuacaucauggugggcaacgagaccggccuggagcucacccugaccaacacguccaucaucaaccacaaguucugcaaccugagcgacgcccacaagaagaaccucuacgaccacgcccugauguccaucaucagcaccuuccaccuguccauccccaacuucaaccaguacgaggccaugagcugcgacuucaacgggggcaagaucuccgugcaguacaaccucagccacgccuacgcgaucgacgccgccaaccacugcgggaccaucgccaacggcguccugcagaccuucaugcggauggcguggggcggguccuacaucgcccuggacagcggcaagggguccugggacugcaucaugacgagcuaccaguaccucaucauccagaacaccaccugggaggaccacugccaguucucccgccccagccccaucggcuaccuggggcugcucagccagcggacccgcgacaucuacaucucccggcgccgccggggcacguucaccuggacccucagcgacuccgagggcaacgagacccccgggggcuacugccugacgcgguggaugcugaucgaggccgagcucaagugcuucgggaacaccgccguggccaagugcaacgagaagcacgacgaggaguucugcgacaugcugcgccuguucgacuucugcaagcaggcgauccggcgccucaagacccccgcccagaugagcauccagcugaucaacaaggccgugaacgcccugaucaacgaccagcucaucaugaagaaccaccuccgggacaucaugggcaucccguacugcaacuacuccaaguacugcuaccugaaccacaccgucacggggaagaccagccugccccgcugcugccugguguccaacggcagcuaccugaacgagacccacuucuccgacgacaucgagcagcaggccgacaacaugaucaccgagcuccugcagaaggaguacaucgaccggcagggcaagacgccccuggggcucguggaccuguucgucuucagcaccuccuucuaccugaucagcaucuuccugcaccucgugaagaucccgacccaccgccacgugaucggcaagcccugccccaagccccaccggcugaaccacauggggaucugcuccugcggccuguacaagcacccggggguccccgugaaguggaagcgcugaggacuagucccuguucccagagcccacuuuuuuuucuuuuuuugaaauaaaauagccugucuuucagaucucaaaggcucuuuucagagccaccaaaaaaaaaaaaaaaaaaaaaaaaaaaaaaaaaaaaaaaaaaaaaaaaaaaaaaaaaaaaaaaaaaaaaaaaaaaaaaaaaaaaaaaaaaaaaaaaaaaaa

SEQ ID NO: 27027 - RNA, 1764 nt, Artificial Sequence
  mRNA product Design a-2 (hSL-A100) comprising derived and/or modified sequence from LASV(LASV003-NIG-2008;Clade II)__AIT17580__GPCmut4 (opt1)
aggagaguccgcucagccagguugcagaagcggcuuagcguguguccuaaucuucucucugcguguagguaggccugugccgcaaacaagcuuaccaugggccagaucaucaccuucuuccaggaggugccccacgucaucgaggaggugaugaacaucgugcugaucgcccucagccugcuggccauccucaaggggaucuacaacgucgcgaccugcggccuguucgggcugguguccuuccuccugcugugcggccgcagcugcuccacgaccuacaaggggguguacgagcuccagacccuggagcuggacauggccagccucaacaugugcaugccgcuguccugcacgaagaacaacagccaccacuacaucauggucggcaacgagaccggccuggagcucacccugaccaacacguccaucaucaaccacaaguucugcaaccugagcgacgcccacaagaagaaccucuacgaccacgcccugauguccaucaucagcaccuuccaccuguccauccccaacuucaaccaguacgaggccaugagcugcgacuucaacgggggcaagaucuccgugcaguacaaccucagccacaccuacgcgguggacgccgccaaccacugcgggaccaucgccaacggcguccugcagacguucaugcggauggcguggggcggguccuacaucgcccuggacagcggcaagggguccugggacugcaucaugaccagcuaccaguaccucaucauccagaacaccaccugggaggaccacugccaguucucccgccccagccccaucggcuaccuggggcugcucagccagcggacgcgcgacaucuacaucucccggcgccgccggggcaccuucaccuggacccucagcgacuccgagagcaacgagacgccgggcggguacugccugacccgguggaugcugaucgaggccgagcucaagugcuucggcaacaccgccguggccaagugcaacgagaagcacgacgaggaguucugcgacaugcugcgccuguucgacuucugcaagcaggcgauccggcgccucaaggcccccgcccagauguccauccagcugaucaacaaggccgugaacgcccugaucaacgaccagcucaucaugaagaaccaccuccgggacaucauggggauccccuacugcaacuacagcaaguacugcuaccugaaccacaccgucacgggccgcaccucccugccccggugcugccuggugagcaacggguccuaccugaacgagacccacuucagcgacgacaucgagcagcaggcggacaacaugaucaccgagcuccugcagaaggaguacauggaccgccagggcaagacgccccugggccucguggaccuguucgucuucuccaccagcuucuaccugaucuccaucuuccugcaccucgugaagaucccgacccaccggcacgugaucgggaagcccugccccaagccccaccgccugaaccacaugggcaucugcagcugcgggcuguacaagcacccgggcguccccgugaaguggaagcggugaggacuagucccuguucccagagcccacuuuuuuuucuuuuuuugaaauaaaauagccugucuuucagaucucaaaggcucuuuucagagccaccaaaaaaaaaaaaaaaaaaaaaaaaaaaaaaaaaaaaaaaaaaaaaaaaaaaaaaaaaaaaaaaaaaaaaaaaaaaaaaaaaaaaaaaaaaaaaaaaaaaaa

SEQ ID NO: 27028 - RNA, 1764 nt, Artificial Sequence
  mRNA product Design a-2 (hSL-A100) comprising derived and/or modified sequence from LASV(LASV035-NIG-2009;Clade II)__AIT17588__GPCmut4 (opt1)
aggagaguccgcucagccagguugcagaagcggcuuagcguguguccuaaucuucucucugcguguagguaggccugugccgcaaacaagcuuaccaugggccagaucaucaccuucuuccaggaggugccccacgucaucgaggaggugaugaacaucgugcugaucgcccucagccugcuggccauccucaaggggaucuacaacgucgcgaccugcggccuguucgggcugguguccuuccuccugcugugcggccgcagcugcuccacgaccuacaaggggguguacgagcuccagacccuggagcuggacauggccagccucaacaugugcaugccgcuguccugcacgaagaacaacagccaccacuacaucauggucggcaacgagaccggccuggagcucacccugaccaacacguccaucaucaaccacaaguucugcaaccugagcgacgcccacaagaagaaccucuacgaccacgcccugauguccaucaucagcaccuuccaccuguccauccccaacuucaaccaguacgaggccaugagcugcgacuucaacgggggcaagaucuccgugcaguacaaccucagccacgcguacgccguggacgccgccaaccacugcgggaccaucgcgaacggcguccugcagaccuucaugcggauggccuggggcggguccuacaucgcccuggacagcggcaagggguccugggacugcaucaugacgagcuaccaguaccucaucauccagaacaccaccugggaggaccacugccaguucucccgccccagccccaucggcuaccuggggcugcucagccagcggacccgcgacaucuacaucucccggcgccgccggggcacguucaccuggacccucagcgacuccgagggcaacgagacccccgggggcuacugccugacgcgguggaugcugaucgaggccgagcucaagugcuucgggaacaccgccguggcgaagugcaacgagaagcacgacgaggaguucugcgacaugcugcgccuguucgacuucugcaagcaggccauccggcgccucaaggcccccgcccagaugagcauccagcugaucaacaaggccgugaacgcgcugaucaacgaccagcucaucaugaagaaccaccuccgggacaucaugggcauccccuacugcaacuacuccaaguacugcuaccugaaccacaccgucaccgggaagacgagccugccccgcugcugccugguguccaacggcagcuaccugaacgagacccacuucuccgacgacaucgagcagcaggccgacaacaugaucaccgagcuccugcagaaggaguacaucgaccggcagggcaagaccccgcuggggcucguggaccuguucgucuucagcacguccuucuaccugaucagcaucuuccugcaccucgugaagaucccgacccaccgccacgugaucggcaagcccugccccaagccccaccggcugaaccacauggggaucugcuccugcggccuguacaagcacccggggguccccgugaaguggaagcgcugaggacuagucccuguucccagagcccacuuuuuuuucuuuuuuugaaauaaaauagccugucuuucagaucucaaaggcucuuuucagagccaccaaaaaaaaaaaaaaaaaaaaaaaaaaaaaaaaaaaaaaaaaaaaaaaaaaaaaaaaaaaaaaaaaaaaaaaaaaaaaaaaaaaaaaaaaaaaaaaaaaaaa

SEQ ID NO: 27029 - RNA, 1764 nt, Artificial Sequence
  mRNA product Design a-2 (hSL-A100) comprising derived and/or modified sequence from LASV(LASV1000-NIG-2009;Clade II)__AIT17782__GPCmut4 (opt1)
aggagaguccgcucagccagguugcagaagcggcuuagcguguguccuaaucuucucucugcguguagguaggccugugccgcaaacaagcuuaccaugggccagaucaucaccuucuuccaggaggugccccacgucaucgaggaggugaugaacaucgugcugaucgcccucagccugcuggccauccucaaggggaucuacaacgucgcgaccugcggccuguucgggcugguguccuuccuccugcugugcggccgcagcugcuccacgaccuacaaggggguguacgagcuccagacccuggagcuggacauggccagccucaacaugugcaugccgcuguccugcacgaagaacaacagccaccacuacaucauggucggcaacgagaccggccuggagcucacccugaccaacacguccaucaucaaccacaaguucugcaaccugagcgacgcccacaagaagaaccucuacgaccacgcccugauguccaucaucagcaccuuccaccuguccauccccaacuucaaccaguacgaggccaugagcugcgacuucaacgggggcaagaucuccgugcaguacaaccucagccacaccuacgcgguggacgccgccaaccacugcgggaccaucgccaacggcguccugcagacguucaugcggauggcguggggcggguccuacaucgcccuggacagcggcaagggguccugggacugcaucaugaccagcuaccaguaccucaucauccagaacaccaccugggaggaccacugccaguucucccgccccagccccaucggcuaccuggggcugcucagccagcggacgcgcgacaucuacaucucccggcgccgccggggcaccuucaccuggacccucagcgacuccgagggcaacgagacgcccgggggcuacugccugacccgguggaugcugaucgaggccgagcucaagugcuucgggaacaccgccguggccaagugcaacgagaagcacgacgaggaguucugcgacaugcugcgccuguucgacuucugcaagcaggcgaucaagcggcucaagacccccgcccagaugagcauccagcugaucaacaaggccgugaacgcccugaucaacgaccagcucaucaugaagaaccaccuccgcgacaucaugggcauccccuacugcaacuacuccaaguacugcuaccugaaccacacggucaccgggaagaccagccugccccggugcugccugguguccaacggcagcuaccugaacgagacccacuucuccgacgacaucgagcagcaggccgacaacaugaucacggagcuccugcagaaggaguacaucgaccgccagggcaagaccccgcuggggcucguggaccuguucgucuucagcaccuccuucuaccugaucagcaucuuccugcaccucgugaagaucccgacccaccggcacguggucggcaagcccugccccaagccccaccgccugaaccacauggggaucugcuccugcggccuguacaagcacccgggggugcccgugaaguggaagcggugaggacuagucccuguucccagagcccacuuuuuuuucuuuuuuugaaauaaaauagccugucuuucagaucucaaaggcucuuuucagagccaccaaaaaaaaaaaaaaaaaaaaaaaaaaaaaaaaaaaaaaaaaaaaaaaaaaaaaaaaaaaaaaaaaaaaaaaaaaaaaaaaaaaaaaaaaaaaaaaaaaaaa

SEQ ID NO: 27030 - RNA, 1764 nt, Artificial Sequence
  mRNA product Design a-2 (hSL-A100) comprising derived and/or modified sequence from LASV(LASV221-NIG-2010;Clade II)__AIT17624__GPCmut4 (opt1)
aggagaguccgcucagccagguugcagaagcggcuuagcguguguccuaaucuucucucugcguguagguaggccugugccgcaaacaagcuuaccaugggccagaucaucaccuucuuccaggaggugccccacgucaucgaggaggugaugaacaucgugcugaucgcccucagccugcuggccauccucaaggggaucuacaacgucgcgaccugcggccuguucgggcugguguccuuccuccugcugugcggccgcagcugcuccacgaccuacaaggggguguacgagcuccagacccuggagcuggacauggccagccucaacaugugcaugccgcuguccugcacgaagaacaacagccaccacuacaucauggucggcaacgagaccggccuggagcucacccugaccaacacguccaucaucaaccacaaguucugcaaccugagcgacgcccacaagaagaaccucuacgaccacgcccugauguccaucaucagcaccuuccaccuguccauccccaacuucaaccaguacgaggccaugagcugcgacuucaacgggggcaagaucuccgugcaguacaaccucagccacaccuacgcgaucgacgccgccaaccacugcgggaccaucgccaacggcgugcugcagacguucaugcggauggcguggggcggguccuacaucgcccuggacagcggcaagggguccugggacugcaucaugaccagcuaccaguaccucaucauccagaacaccaccugggaggaccacugccaguucucccgccccagccccaucggcuaccuggggcugcucagccagcggacgcgcgacaucuacaucucccggcgccgccggggcaccuucaccuggacccucagcgacuccgagggcaacgagacgcccgggggcuacugccugacccgguggaugcugaucgaggccgagcucaagugcuucgggaacaccgccgucgccaagugcaacgagaagcacgacgaggaguucugcgacaugcugcgccuguucgacuucugcaagcaggcgauccggcgccucaagacccccgcccagaugagcauccagcugaucaacaaggccgugaacgcccugaucaacgaccagcucaucaugaagaaccaccuccgggacaucaugggcauccccuacugcaacuacuccaaguacugcuaccugaaccacacggugaccgggaagaccagccugccccgcugcugccuggucuccaacggcagcuaccugaacgagacccacuucuccgacgacaucgagcagcaggccgacaacaugaucacggagaugcuccagaaggaguacauggaccggcagggcaagaccccgcuggggcugguggaccucuucguguucagcaccuccuucuaccugaucagcaucuuccugcaccuggucaagaucccgacccaccgccacgugaucggcaagcccugccccaagccccaccggcucaaccacauggggaucugcuccugcggccuguacaagcacccgggggugcccgucaaguggaagcgcugaggacuagucccuguucccagagcccacuuuuuuuucuuuuuuugaaauaaaauagccugucuuucagaucucaaaggcucuuuucagagccaccaaaaaaaaaaaaaaaaaaaaaaaaaaaaaaaaaaaaaaaaaaaaaaaaaaaaaaaaaaaaaaaaaaaaaaaaaaaaaaaaaaaaaaaaaaaaaaaaaaaaa

SEQ ID NO: 27031 - RNA, 1764 nt, Artificial Sequence
  mRNA product Design a-2 (hSL-A100) comprising derived and/or modified sequence from LASV(LASV237-NIG-2010;Clade II)__AIT17638__GPCmut4 (opt1)
aggagaguccgcucagccagguugcagaagcggcuuagcguguguccuaaucuucucucugcguguagguaggccugugccgcaaacaagcuuaccaugggccagaucaucaccuucuuccaggaggugccccacgucaucgaggaggugaugaacaucgugcugaucgcccucagccugcuggccauccucaaggggaucuacaacgucgcgaccugcggccuguucgggcugguguccuuccuccugcugugcggccgcagcugcuccacgaccuacaaggggguguacgagcuccagacccuggagcuggacauggccagccucaacaugugcaugccgcuguccugcacgaagaacaacagccaccacuacaucauggucggcaacgagaccggccuggagcucacccugaccaacacguccaucaucaaccacaaguucugcaaccugagcgacgcccacaagaaggaccucuacgaccacgcccugauguccaucaucagcaccuuccaccuguccauccccaacuucaaccaguacgaggccaugagcugcgacuucaacgggggcaagaucuccgugcaguacaaccucagccacaccuacgcgguggacgccgccaaccacugcgggaccaucgccaacggcguccugcagacguucaugcggauggcguggggcggguccuacaucgcccuggacagcggcaagggguccugggacugcaucaugaccagcuaccaguaccucaucauccagaacaccaccugggaggaccacugccaguucucccgccccagccccaucggcuaccuggggcugcucagccagcggacgcgcgacaucuacaucucccggcgccgccggggcaccuucaccuggacccucagcgacuccgagggcaacgagacgcccgggggcuacugccugacccgguggaugcugaucgaggccgagcucaagugcuucgggaacaccgccguggccaagugcaacgagaagcacgacgaggaguucugcgacaugcugcgccuguucgacuucugcaagcaggcgauccggcgccucaagacccccgcccagaugagcauccagcugaucaacaaggccgugaacgcccugaucaacgaccagcucaucaugaagaaccaccuccgggacaucaugggcauccccuacugcaacuacuccaaguacugcuaccugaaccacacggucaccgggaagaccagccugccccgcugcugccugguguccaacggcagcuaccugaacgagacccacuucuccgacgacaucgagcagcaggccgacaacaugaucacggagcuccugcagaaggaguacauggaccggcagggcaagaccccgcuggggcucguggaccuguucgucuucagcaccuccuucuaccugaucagcaucuuccugcaccucaucaagaucccgacccaccgccacaucacgggcaagcccugccccaagccccaccggcugaaccacauggggaucugcuccugcggccuguacaagcacccgggggugcccgugaaguggaagcgcugaggacuagucccuguucccagagcccacuuuuuuuucuuuuuuugaaauaaaauagccugucuuucagaucucaaaggcucuuuucagagccaccaaaaaaaaaaaaaaaaaaaaaaaaaaaaaaaaaaaaaaaaaaaaaaaaaaaaaaaaaaaaaaaaaaaaaaaaaaaaaaaaaaaaaaaaaaaaaaaaaaaaa

SEQ ID NO: 27032 - RNA, 1764 nt, Artificial Sequence
  mRNA product Design a-2 (hSL-A100) comprising derived and/or modified sequence from LASV(LASV253-NIG-2011;Clade II)__AIT17670__GPCmut4 (opt1)
aggagaguccgcucagccagguugcagaagcggcuuagcguguguccuaaucuucucucugcguguagguaggccugugccgcaaacaagcuuaccaugggccagaucaucaccuucuuccaggaggugccccacgucaucgaggaggugaugaacaucgugcugaucgcccucagccugcuggccauccucaaggggaucuacaacgucgcgaccugcggccuguucgggcugguguccuuccuccugcugugcggccgcagcugcuccacgaccuacaaggggguguacgagcuccagacccuggagcuggacauggccagccucaacaugugcaugccgcuguccugcacgaagaacaacagccaccacuacaucauggucggcaacgagaccggccuggagcucacccugaccaacacguccaucaucaaccacaaguucugcaaccugagcgacgcccacaagaagaaccucuacgaccacgcccugauguccaucaucagcaccuuccaccuguccauccccaacuucaaccaguacgaggccaugagcugcgacuucaacgggggcaagaucuccgugcaguacaaccucagccacaccuacgcgguggacgccgccaaccacugcgggaccaucgccaacggcguccugcagacguucaugcggauggcguggggcggguccuacaucgcccuggacagcggcaagggguccugggacugcaucaugaccagcuaccaguaccucaucauccagaacaccaccugggaggaccacugccaguucucccgccccagccccaucggcuaccuggggcugcucagccagcggacgcgcgacaucuacaucucccggcgccgccggggcaccuucaccuggacccucagcgacuccgagggcaacgagacgcccgggggcuacugccugacccgguggaugcugaucgaggccgagcucaagugcuucgggaacaccgccguggccaagugcaacgagaagcacgacgaggaguucugcgacaugcugcgccuguucgacuucugcaagcaggcgauccggcgccucaaggcccccgcccagaugagcauccagcugaucaacaaggccgugaacgcccugaucaacgaccagcucaucaugaagaaccaccuccgggacaucaugggcaucccguacugcaacuacuccaaguacugcuaccugaaccacaccgucacggggcgcaccagccugccccggugcugccugguguccaacggcagcuaccugaacgagacccacuucuccgacgacaucgagcagcaggcggacaacaugaucaccgagcuccugcagaaggaguacaucgaccgccagggcaagacgccccuggggcucguggaccuguucgucuucagcaccuccuucuaccugaucagcaucuuccugcaccucgugaagaucccgacccaccggcacaucaucggcaagcccugccccaagccccaccgccugaaccacauggggaucugcuccugcggccuguacaagcacccgggggugcccgucaaguggaagcggugaggacuagucccuguucccagagcccacuuuuuuuucuuuuuuugaaauaaaauagccugucuuucagaucucaaaggcucuuuucagagccaccaaaaaaaaaaaaaaaaaaaaaaaaaaaaaaaaaaaaaaaaaaaaaaaaaaaaaaaaaaaaaaaaaaaaaaaaaaaaaaaaaaaaaaaaaaaaaaaaaaaaa

SEQ ID NO: 27033 - RNA, 1764 nt, Artificial Sequence
  mRNA product Design a-2 (hSL-A100) comprising derived and/or modified sequence from LASV(LASV254-NIG-2011;Clade II)__AIT17674__GPCmut4 (opt1)
aggagaguccgcucagccagguugcagaagcggcuuagcguguguccuaaucuucucucugcguguagguaggccugugccgcaaacaagcuuaccaugggccagaucaucaccuucuuccaggaggugccccacgucaucgaggaggugaugaacaucgugcugaucgcccucagccugcuggccauccucaaggggaucuacaacgucgcgaccugcggccuguucgggcugguguccuuccuccugcugugcggccgcagcugcuccacgaccuacaaggggguguacgagcuccagacccuggagcuggacaugaccaaccucaacaugugcaugccgcugagcugcaccaagaacaacucccaccacuacaucauggucggcaacgagaccggccuggagcucacccugacgaacaccagcaucaucaaccacaaguucugcaaccuguccgacgcccacaagaagaaccucuacaaccacgcccugaugagcaucaucuccaccuuccaccugagcauccccaacuucaaccaguacgaggccauguccugcgacuucaacgggggcaagaucagcgugcaguacaaccucucccacagcuacgccguggacgcggccaaccacugcgggaccaucgccaacggcguccugcagacguucaugcggauggccuggggcggguccuacaucgcgcuggacagcggcaaggggaacugggacugcaucaugaccuccuaccaguaccucaucauccagaacaccaccugggaggaccacugccaguucagccgccccucccccaucggcuaccuggggcugcucagccagcggacgcgcgacaucuacaucagccggcgccgccggggcaccuucaccuggacccucuccgacagcgagggcaacgagacgcccgggggcuacugccugacccgguggaugcugaucgaggccgagcucaagugcuucgggaacaccgccguggccaagugcaacgagaagcacgacgaggaguucugcgacaugcugcgccuguucgacuucugcaagcaggccauccggcgccucaagacccccgcgcaggccaacauccagcugaucaacaaggccgugaacgcccugaucaacgaccagcucaucaugaagaaccaccuccgggacaucaugggcauccccuacugcaacuacuccaaguacugcuaccugaaccacacggucaccgggaagaccagccugccccgcugcugccugguguccaacggcagcuaccugaacgagacccacuucuccgacgacaucgagcagcaggccgacaacaugaucacggagcuccugcagaaggaguacauggaccggcagggcaagaccccgcuggggcucguggaccuguucgucuucagcaccuccuucuaccugaucagcaucuuccugcaccucgugaagaucccgacccaccgccacgugaucggcaagcccugccccaagccccaccggcugaaccacauggggaucugcuccugcggccuguacaagcacccggggguccccgugaaguggaagcgcugaggacuagucccuguucccagagcccacuuuuuuuucuuuuuuugaaauaaaauagccugucuuucagaucucaaaggcucuuuucagagccaccaaaaaaaaaaaaaaaaaaaaaaaaaaaaaaaaaaaaaaaaaaaaaaaaaaaaaaaaaaaaaaaaaaaaaaaaaaaaaaaaaaaaaaaaaaaaaaaaaaaaa

SEQ ID NO: 27034 - RNA, 1764 nt, Artificial Sequence
  mRNA product Design a-2 (hSL-A100) comprising derived and/or modified sequence from LASV(Nig08-A19;Clade III)__ADU56618__GPCmut4 (opt1)
aggagaguccgcucagccagguugcagaagcggcuuagcguguguccuaaucuucucucugcguguagguaggccugugccgcaaacaagcuuaccaugggccagaucgugaccuucuuccaggaggucccccacgugaucgaggaggugaugaacaucguccugaucgcccucagcauccuggccauccugaaggggcucuacaacaucgcgaccugcggccugaucgggcuggugacguuccuccugcuguccggccgcagcugcuccaugaccuacaaggggguguacgagcuccagacccuggagcugaacaugaacacccucaacaugugcaugccgcugagcugcaccaagaacaacucccaccacuacaucauggucggcaacgagaccggccuggagcucacccugacgaacaccagccugcuccaccacaaguucugcaaccuguccgacgcccacaagaagaaccuguacgaccacacccucaugagcaucaucuccaccuuccaccugagcauccccaacuucaaccaguacgaggccauguccugcgacuucaacgggggcaagaucacggugcaguacaaccugagccacuccuacgccaucgacgccgcgaaccacugcgggaccguggccaacggcguccuccagaccuucaugcggauggccuggggcgggagcuacaucgcccuggacuccggccgcgggaagugggacugcaucaugaccagcuaccaguaccugaucauccagaacacgaccugggaggaccacugccaguucucccggcccagccccaucggcuaccucgggcugcugucccagcgcacccgggacaucuacaucagccgccggcgccggggcaccuucacguggacccugagcgacuccgagggcaacgagacccccgggggcuacugccucacccgcuggaugcugaucgaggcggagcugaagugcuucgggaacacggccguggccaagugcaacgagaagcacgacgaggaguucugcgacaugcuccggcuguucgacuucugcaagcaggccauccgccggcugaaggcccccgcgcagaugagcauccagcucaucaacaaggccgugaacgcccugaucaacgaccagcugaucaugaagaaccaccuccgcgacaucaugggcauccccuacugcaacuacuccaaguacugcuaccugaaccacaccagcaccgggcggaccucccugccccgcugcugccucgucagcaacggcuccuaccugaacgagacgcacuucagcgacgacaucgagcagcaggccgacaacaugaucaccgagaugcugcagaaggaguaccucgaccggcagggcaagaccccgcuggggcugguggaccuguucguguucuccaccagcuucuaccucaucuccaucuuccugcaccuggucaagaucccgacgcaccgccacaucgugggcaagcccugccccaagccccaccggcucaaccacauggggaucugcagcugcggccuguacaagcagccgggggugcccguccgcuggaagcggugaggacuagucccuguucccagagcccacuuuuuuuucuuuuuuugaaauaaaauagccugucuuucagaucucaaaggcucuuuucagagccaccaaaaaaaaaaaaaaaaaaaaaaaaaaaaaaaaaaaaaaaaaaaaaaaaaaaaaaaaaaaaaaaaaaaaaaaaaaaaaaaaaaaaaaaaaaaaaaaaaaaaa

SEQ ID NO: 27035 - RNA, 1767 nt, Artificial Sequence
  mRNA product Design a-2 (hSL-A100) comprising derived and/or modified sequence from LASV(G1180-SLE-2010;Clade IV)__AIT17168__GPCmut4 (opt1)
aggagaguccgcucagccagguugcagaagcggcuuagcguguguccuaaucuucucucugcguguagguaggccugugccgcaaacaagcuuaccaugggccagaucgugaccuucuuccaggaggucccccacgugaucgaggaggugaugaacaucguccugaucgcccucagcauccuggccgugcugaaggggcucuacaacuucgcgaccugcggccugguggggcugcucaccuuccugcugcucugcggccgcuccugcaccgccagccgguacaagggggucuacgagcugcagacccuggagcucaacauggagacccugaacaugugcaugccgcuguccugcaccaagaacaacagccaccacuacaucauggugggcaacgagaccggccucgagcugacccugacgaacaccuccaucaucaaccacaaguucugcaaccucagcgacgcccacaagaagaaccuguacgaccacgcccugauguccaucaucagcaccuuccaccucuccauccccaacuucaaccaguacgaggccaugagcugcgacuucaacgggggcaagaucuccgugcaguacaaccugagccacuccuacgcgggggacgccgccaaccacugcggcaccgucgccaacggggugcugcagacguucaugcgcauggcguggggcggcagcuacaucgcccucgacuccgggcacggcagcugggacugcaucaugaccuccuaccaguaccugaucauccagaacaccaccugggaggaccacugccaguucagccggcccucccccaucggguaccugggccuccugagccagcgcacgcgggacaucuacaucagccgccggcgccggggcaccuucaccuggacccuguccgacagcgaggggaaggacacgccgggcggguacugccugacccgcuggaugcucaucgaggccgagcugaagugcuucggcaacaccgccguggccaagugcaacgagaagcacgacgaggaguucugcgacaugcugcggcuguucgacuucugcaagcaggcgauccagcgccugaaggcccccgcccagauguccauccagcugaucaacaaggccgucaacgcccucaucaacgaccagcugaucaugaagaaccaccuccgggacaucauggggauccccuacugcaacuacagcaaguacugcuaccucaaccacaccacgaccggcaagaccucccugcccaagugcugccuggugagcaacggcuccuaccucaacgagacccacuucagcgacgacaucgagcagcaggcggacaacaugaucacggagaugcugcagaaggaguacauggagcgccaggggaagacgccccugggccucguggaccuguucgucuucuccaccagcuucuaccugaucuccaucuuccugcaccucgugaagaucccgacccaccggcacaucgugggcaagagcugccccaagccccaccgccugaaccacauggggaucugcuccugcgggcuguacaagcagcccggcgucccggugaaguggaagcggugaggacuagucccuguucccagagcccacuuuuuuuucuuuuuuugaaauaaaauagccugucuuucagaucucaaaggcucuuuucagagccaccaaaaaaaaaaaaaaaaaaaaaaaaaaaaaaaaaaaaaaaaaaaaaaaaaaaaaaaaaaaaaaaaaaaaaaaaaaaaaaaaaaaaaaaaaaaaaaaaaaaaa

SEQ ID NO: 27036 - RNA, 1767 nt, Artificial Sequence
  mRNA product Design a-2 (hSL-A100) comprising derived and/or modified sequence from LASV(G1442-SLE-2011;Clade IV)__AIT17180__GPCmut4 (opt1)
aggagaguccgcucagccagguugcagaagcggcuuagcguguguccuaaucuucucucugcguguagguaggccugugccgcaaacaagcuuaccaugggccagaucgugaccuucuuccaggaggucccccacgugaucgaggaggugaugaacaucguccugaucgcccucagcauccuggccgugcugaaggggcucuacaacguggcgaccugcggccugaucgggcuggucacguuccuccugcugugcggccgcuccugcaccaccacccucuacaaggggguguacgagcugcagacgcuggagcucaacauggagacccugaacaugugcaugccgcugagcugcaccaagaacaacucccaccacuacauccgggugggcaacgagacgggccucgagcugacccugaccaacaccagcaucaucaaccacaaguucugcaaccucuccgacgcccacaagaagaaccuguacgaccacgcccugaugagcaucaucuccacguuccaccucagcauccccaacuucaaccaguacgaggccauguccugcgacuucaacgggggcaagaucagcguccaguacaaccugucccacagcuacgccggggacgcggccaaccacugcggcaccguggccaacggggugcugcagaccuucaugcgcauggccuggggcggcuccuacaucgcgcucgacagcgggcggggcaacugggacugcaucaugaccuccuaccaguaccugaucauccagaacacgaccugggacgaccacugccaguucagccgccccucccccaucggguaccugggccuccugagccagcggacccgcgacgucuacaucucccggcgccgccggggcaccuucacguggacccugagcgacagcgaggggaaggacaccccgggcggguacugccugacccgguggaugcucaucgaggccgagcugaagugcuucggcaacacggccguggccaagugcaacgagaagcacgacgaggaguucugcgacaugcugcgccucuucgacuucugcaagcaggccauccagcggcugaaggcgcccgcccagauguccauccagcugaucaacaaggccgugaacgcccucaucaacgaccagcugaucaugaagaaccaccuccgcgacaucauggggauccccuacugcaacuacagcaaguacugcuaccugaacaacaccgccaccggcaagaccucccugcccaagugcugccugaucagcaacggcuccuaccucaacgagacgcacuucagcgacgacaucgagcaggaggcggacaacaugaucaccgagaugcugcagaaggaguacauggagcggcaggggaagacgccccugggccucgucgaccuguucguguucuccaccagcuucuaccugaucuccaucuuccugcaccucgugaagaucccgacccaccgccacaucgucggcaagagcugccccaagccccaccggcugaaccacauggggaucugcuccugcgggcuguacaagcagcccggcgugccggugcgcuggaagcggugaggacuagucccuguucccagagcccacuuuuuuuucuuuuuuugaaauaaaauagccugucuuucagaucucaaaggcucuuuucagagccaccaaaaaaaaaaaaaaaaaaaaaaaaaaaaaaaaaaaaaaaaaaaaaaaaaaaaaaaaaaaaaaaaaaaaaaaaaaaaaaaaaaaaaaaaaaaaaaaaaaaaa

SEQ ID NO: 27037 - RNA, 1767 nt, Artificial Sequence
  mRNA product Design a-2 (hSL-A100) comprising derived and/or modified sequence from LASV(G3010-SLE-2013;Clade IV)__AIT17344__GPCmut4 (opt1)
aggagaguccgcucagccagguugcagaagcggcuuagcguguguccuaaucuucucucugcguguagguaggccugugccgcaaacaagcuuaccaugggccagaucgugaccuucuuccaggaggucccccacgugaucgaggaggugaugaacaucguccugaucgcccucagcauccuggccgugcugaaggggcucuacaacuucgcgaccugcggccugguggggcuggucacguuccuccugcugugcggccgcuccugcaccaccagccucuacaaggggguguacgagcugcagacccuggagcucaacauggagacgcugaacaugugcaugccgcuguccugcaccaagaacaacagccaccacuacaucauggugggcaacgagaccggccucgagcugacgcugaccaacaccuccaucaucaaccacaaguucugcaaccucagcgacgcccacaagaagaaccuguacaaccacgcccugauguccaucaucagcaccuuccaccucuccauccccaacuucaaccaguacgaggccaugagcugcgacuucaacgggggcaagaucuccguccaguacaaccugagccacuccuacgccggggacgcggccagccacugcggcacgguggccaacggggugcugcagaccuucaugcggauggccuggggcggcuccuacaucgcgcucgacagcggguacggcaagugggacugcaucaugaccuccuaccaguaccugaucauccagaacaccacgugggaggaccacugccaguucagccgccccucccccaucggguaccugggccuccugagccagcggacccgcgacaucuacaucagccggcgccgccggggcaccuucaccuggacgcuguccgacagcgaggggaaggacaccccgggcggguacugccugacccgguggaugcucaucgaggccgagcugaagugcuucggcaacaccgccgucgccaagugcaacgagaagcacgacgaggaguucugcgacaugcugcgccucuucgacuucugcaagcaggccauccagcggcugaagacgcccgcgcagauguccauccagcugaucaacaaggccgugaacgcccucaucaacgaccagcugaucaugaagaaccaccuccgcgacaucauggggauccccuacugcaacuacagcaaguacugcuaccugaaccacaccaccaccggcaagacgucccugcccaagugcugccuggugagcaacggcuccuaccucaacgagacccacuucagcgacgacaucgagcagcaggccgacaacaugaucaccgagaugcugcagaaggaguacauggagcggcaggggaagacgccccugggccucgucgaccuguucguguucuccaccagcuucuaccugaucuccaucuuccugcaccucgugaagaucccgacccaccgccacaucgucggcaagagcugccccaagccccaccggcugaaccacauggggaucugcuccugcgggcuguacaagcagcccggcgugccggugcgcuggaagcggugaggacuagucccuguucccagagcccacuuuuuuuucuuuuuuugaaauaaaauagccugucuuucagaucucaaaggcucuuuucagagccaccaaaaaaaaaaaaaaaaaaaaaaaaaaaaaaaaaaaaaaaaaaaaaaaaaaaaaaaaaaaaaaaaaaaaaaaaaaaaaaaaaaaaaaaaaaaaaaaaaaaaa

SEQ ID NO: 27038 - RNA, 1767 nt, Artificial Sequence
  mRNA product Design a-2 (hSL-A100) comprising derived and/or modified sequence from LASV(G502-SLE-2009;Clade IV)__AIT17126__GPCmut4 (opt1)
aggagaguccgcucagccagguugcagaagcggcuuagcguguguccuaaucuucucucugcguguagguaggccugugccgcaaacaagcuuaccaugggccagaucgugaccuucuuccaggaggucccccacgugaucgaggaggugaugaacaucguccugaucgcccucagcauccuggccgugcugaaggggcucuacaacuucgcgaccugcggccugguggggcugcucacguuccugcugcucugcggccgcuccugcaccaccgggcuguacaagggcgucuacgagcugcagacccucgagcugaacauggagacgcugaacaugugcaugccgcucagcugcaccaagaacaacucccaccacuacaucauggugggcaacgagaccgggcuggagcugacgcucaccaacaccagcaucaucaaccacaaguucugcaaccuguccgacgcccacaagaagaaccuguacgaccacgcccucaugagcaucaucuccaccuuccaccugagcauccccaacuucaaccaguacgaggccauguccugcgacuucaacggcgggaagaucagcgugcaguacaaccugucccacagcuacgccggcgacgcggccgaccacugcgggacggucgccaacggcgugcuccagaccuucaugcggauggccuggggcggguccuacaucgcgcuggacagcggccgcgggcggugggacugcaucaugaccuccuaccaguaccugaucauccagaacaccacgugggaggaccacugccaguucagccgccccucccccaucggcuaccucggccugcugagccagcggacccgcgacaucuacaucucccggcgccgccgggggaccuucaccuggacgcugagcgacagcgagggcaaggacacccccgggggcuacugccucacccgguggaugcugaucgaggccgagcugaagugcuucgggaacaccgccguggccaagugcaacgagaagcacgacgaggaguucugcgacaugcuccgccuguucgacuucugcaagcaggccauccagcggcugaaggcgcccgcccagauguccauccagcucaucaacaaggccgucaacgcccugaucaacgaccagcuggugaugaagaaccaccuccgcgacaucaugggcauccccuacugcaacuacagccgguacugcuaccugaaccacacgaccaccggccgcaccucccugcccaagugcugccucgugagcaacggguccuaccugaacgagacgcacuucagcgacgacaucgagcagcaggccgacaacaugaucaccgagaugcugcagaaggaguacauggagcggcagggcaagaccccgcucgggcuggucgaccuguucguguucuccaccagcuucuaccugaucuccaucuuccuccaccuggugaagaucccgacgcaccgccacaucgucggcaagagcugccccaagccccaccggcugaaccacauggggaucugcuccugcggccucuacaagcagcccggcgugccggugaaguggaagcgcugaggacuagucccuguucccagagcccacuuuuuuuucuuuuuuugaaauaaaauagccugucuuucagaucucaaaggcucuuuucagagccaccaaaaaaaaaaaaaaaaaaaaaaaaaaaaaaaaaaaaaaaaaaaaaaaaaaaaaaaaaaaaaaaaaaaaaaaaaaaaaaaaaaaaaaaaaaaaaaaaaaaaa

SEQ ID NO: 27039 - RNA, 1767 nt, Artificial Sequence
  mRNA product Design a-2 (hSL-A100) comprising derived and/or modified sequence from LASV(G733-SLE-2010;Clade IV)__AIT17154__GPCmut4 (opt1)
aggagaguccgcucagccagguugcagaagcggcuuagcguguguccuaaucuucucucugcguguagguaggccugugccgcaaacaagcuuaccaugggccagaucgugaccuucuuccaggaggucccccacgugaucgaggaggugaugaacaucguccugaucgcccucagcauccuggccgugcugaaggggcucuacaacuucgcgaccugcggcaucguggggcuggucuccuuccugcuccugugcggccgcagcugcacgaccucccuguacaaggggguguacgagcuccagacccuggagcugaacauggagacccucaacaugugcaugccgcugagcugcaccaagaacaacucccaccacuacaucauggugggcaacgagaccggccuggagcucacccugacgaacaccagcaucaucaaccacaaguucugcaaccuguccgacgcccacaagaagaaccucuacgaccacgcccugaugagcaucaucuccaccuuccaccugagcauccccaacuucaaccaguacgaggccauguccugcgacuucaacgggggcaagaucagcguccaguacaaccucucccacagcuacgccggggacgcggccaaccacugcggcaccaucgccaacggggugcugcagacguucaugcggauggccuggggcggcuccuacaucgcgcuggacagcgggcgcgaccggugggacugcaucaugaccuccuaccaguaccucaucauccagaacaccaccugggaggaccacugccaguucagccgccccucccccaucggcuaccuggggcugcucagccagcggacgcgcgacaucuacaucagccggcgccgccggggcaccuucaccuggacccucuccgacagcgagggcaaggacacgcccgggggcuacugccugacccgguggaugcugaucgaggccgagcucaagugcuucgggaacaccgccguggccaagugcaacgagaagcacgacgaggaguucugcgacaugcugcgccuguucgacuucugcaagcaggccauccagcggcucaaggcgcccgcccagauguccauccagcugaucaacaaggccgucaacgcccugaucaacgaccagcucaucaugaagaaccaccuccgcgacaucaugggcauccccuacugcaacuacagcaaguacugcuaccugaaccacaccacgaccgggaagaccucccugcccaagugcugccuggugagcaacggcuccuaccugaacgagacccacuucagcgacgacaucgagcagcaggccgacaacaugaucacggagaugcuccagaaggaguacauggagcggcagggcaagaccccgcuggggcugguggaccucuucgucuucuccaccagcuucuaccugaucuccaucuuccugcaccuggugaagaucccgacccaccgccacguggucggcaagagcugccccaagccccaccggcucaaccacauggggaucugcuccugcggccuguacgggcagcccggcgugccggugaaguggaagcgcugaggacuagucccuguucccagagcccacuuuuuuuucuuuuuuugaaauaaaauagccugucuuucagaucucaaaggcucuuuucagagccaccaaaaaaaaaaaaaaaaaaaaaaaaaaaaaaaaaaaaaaaaaaaaaaaaaaaaaaaaaaaaaaaaaaaaaaaaaaaaaaaaaaaaaaaaaaaaaaaaaaaaa

SEQ ID NO: 27040 - RNA, 1767 nt, Artificial Sequence
  mRNA product Design a-2 (hSL-A100) comprising derived and/or modified sequence from MOPV/LASV reassortant(IGS-1;Clade IV)__AFY05576__GPCmut4 (opt1)
aggagaguccgcucagccagguugcagaagcggcuuagcguguguccuaaucuucucucugcguguagguaggccugugccgcaaacaagcuuaccaugggccagaucgugaccuucuuccaggaggucccccacgugaucgaggaggugaugaacaucguccugaucgcccucagcgugcuggccgugcugaaggggcucuacaacuucgcgaccugcggccuggucgggcuggugacguuccuccugcugugcggccgcuccugcaccaccagccucuacaaggggguguacgagcugcagacccuggagcucaacauggagacgcugaacaugugcaugccgcuguccugcaccaagaacaacagccaccacuacaucauggucggcaacgagaccggccucgagcugacgcugaccaacaccuccaucaucaaccacaaguucugcaaccucagcgacgcccacaagaagaaccuguacgaccacgcccugauguccaucaucagcaccuuccaccucuccauccccaacuucaaccaguacgaggccaugagcugcgacuucaacgggggcaagaucuccgugcaguacaaccugagccacuccuacgccggggacgcggccaaccacugcggcacgguggccaacgggguccugcagaccuucaugcggauggccuggggcggcagcuacaucgcgcucgacuccgggcgcggcaacugggacugcaucaugaccagcuaccaguaccugaucauccagaacaccacgugggaggaccacugccaguucucccggcccagccccaucggguaccugggccuccugucccagcgcacccgggacaucuacaucagccgccggcgccggggcaccuucaccuggacgcugagcgacuccgagggggaggacaccccgggcggguacugccugacccgcuggaugcucaucgaggccgagcugaagugcuucggcaacaccgccguggccaagugcaacgagaagcacgacgaggaguucugcgacaugcugcggcuguucgacuucugcaagcaggccauccagcgccugaaggcgcccgcccagaugagcauccagcugaucaacaaggccgugaacgcccucaucaacgaccagcugaucaugaagaaccaccuccgggacaucauggggauccccuacugcaacuacuccaaguacugcuaccucaaccacacgaccaccggccgcaccagccugcccaagugcugccuggucuccaacggcagcuaccucaacgagacgcacuucuccgacgacaucgagcagcaggccgacaacaugaucaccgagaugcugcagaaggaguacauggagcggcaggggaagacgccccugggccucguggaccuguucguguucagcaccuccuucuaccugaucagcaucuuccugcaccucgucaagaucccgacccaccgccacaucguggggaaguccugccccaagccccaccggcugaaccacaugggcaucugcagcugcgggcuguacaagcagcccggcgugccggucaaguggaagcgcugaggacuagucccuguucccagagcccacuuuuuuuucuuuuuuugaaauaaaauagccugucuuucagaucucaaaggcucuuuucagagccaccaaaaaaaaaaaaaaaaaaaaaaaaaaaaaaaaaaaaaaaaaaaaaaaaaaaaaaaaaaaaaaaaaaaaaaaaaaaaaaaaaaaaaaaaaaaaaaaaaaaaa

SEQ ID NO: 27041 - RNA, 1767 nt, Artificial Sequence
  mRNA product Design a-2 (hSL-A100) comprising derived and/or modified sequence from LASV(LM765-SLE-2012;Clade IV)__AIT17814__GPCmut4 (opt1)
aggagaguccgcucagccagguugcagaagcggcuuagcguguguccuaaucuucucucugcguguagguaggccugugccgcaaacaagcuuaccaugggccagaucgugaccuucuuccaggaggucccccacgugaucgaggaggugaugaacaucguccugaucgcccucagcauccuggccgugcugaaggggcucuacaacuucgcgaccugcggccugguggggcuggucacguuccuccugcugugcggccgcuccugcaccaccagccucuacaaggggguguacgagcugcagacccuggagcucaacauggagacgcugaacaugugcaugccgcuguccugcaccaagaacaacagccaccacuacaucauggugggcaacgagaccggccucgagcugacgcugaccaacaccuccaucaucgaccacaaguucugcaaccucagcgacgcccaccggaagaaccuguacgaccacgcccugauguccaucaucagcaccuuccaccucuccauccccaacuucaaccaguacgaggccaugagcugcgacuucaacgggggcaagaucuccguccaguacaaccugagccacuccuacgccaaggacgcggccgaccacugcgggacgguggccaacggcgugcugcagaccuucaugcgcauggccuggggcgggagcuacaucgcgcucgacuccggccgggggcgcugggacugcaucaugaccagcuaccaguaccugaucauccagaacaccacgugggaggaccacugccaguucucccggcccagccccaucggcuaccuggggcuccugucccagcgcacccgggacaucuacaucagccgccggcgccggggcaccuucaccuggacgcugagcgacuccgagggcaaggacacccccgggggcuacugccugacccgcuggaugcucaucgaggccgagcugaagugcuucgggaacaccgccgucgccaagugcaacgagaagcacgacgaggaguucugcgacaugcugcggcuguucgacuucugcaagcaggccauccagcgccugaaggcgcccgcccagaugagcauccagcugaucaacaaggccgugaacgcccucaucaacgaccagcugaucaugaagaaccaccuccgggacaucaugggcauccccuacugcaacuacuccaaguacugcuaccucaaccacacgaccaccgggaagaccagccugcccaagugcugccugguguccaacggcagcuaccucaacgagacgcacuucuccgacgacaucgagcagcaggccgacaacaugaucaccgagaugcugcagaaggaguacauggagcgccagggcaagaccccgcuggggcucgucgaccuguucguguucagcaccuccuucuaccugaucagcaucuuccugcaccucgugaagaucccgacgcaccggcacaucgucggcaagcccugccccaagccccaccgccugaaccacauggggaucugcuccugcggccuguacaagcagccgggggugcccgugaaguggaagcggugaggacuagucccuguucccagagcccacuuuuuuuucuuuuuuugaaauaaaauagccugucuuucagaucucaaaggcucuuuucagagccaccaaaaaaaaaaaaaaaaaaaaaaaaaaaaaaaaaaaaaaaaaaaaaaaaaaaaaaaaaaaaaaaaaaaaaaaaaaaaaaaaaaaaaaaaaaaaaaaaaaaaa

SEQ ID NO: 27042 - RNA, 1767 nt, Artificial Sequence
  mRNA product Design a-2 (hSL-A100) comprising derived and/or modified sequence from LASV(LM776-SLE-2012;Clade IV)__AIT17824__GPCmut4 (opt1)
aggagaguccgcucagccagguugcagaagcggcuuagcguguguccuaaucuucucucugcguguagguaggccugugccgcaaacaagcuuaccaugggccagaucgugaccuucuuccaggaggucccccacgugaucgaggaggugaugaacaucguccugaucgcccucagcauccuggccgugcugaaggggcucuacaacuucgcgaccugcggccugguggggcuggucacguuccuccugcugugcggccgcuccugcaccaccagcguguacaaggggguguacgagcuccagacccuggagcugaacauggagacgcucaacaugugcaugccgcuguccugcaccaagaacaacagccaccacuacaucauggucggcaacgagaccggccuggagcucacgcugaccaacaccuccaucaucaaccacaaguucugcaaccugagcgacgcccacaagaagaaccucuacgaccacgcccugauguccaucaucagcaccuuccaccuguccauccccaacuucaaccaguacgaggccaugagcugcgacuucaacgggggcaagaucuccgugcaguacaaccucagccacuccuacgccggggacgcggccaaccacugcggcacgguggccaacgggguccugcagaccuucaugcggauggccuggggcggcagcuacaucgcgcuggacuccgggcacggcaagugggacugcaucaugaccagcuaccaguaccucaucauccagaacaccacgugggaggaccacugccaguucucccgccccagccccaucggguaccugggccugcucucccagcggacccgcgacaucuacaucagccggcgccgccggggcaccuucaccuggacgcucagcgacuccgaggggaaggacaccccgggcggguacugccugacccgguggaugcugaucgaggccgagcucaagugcuucggcaacaccgccguggccaagugcaacgagaagcacgacgaggaguucugcgacaugcugcgccuguucgacuucugcaagcaggccauccagcggcucaaggcgcccgcccagaugagcauccagcugaucaacaaggccgugaacgcccugaucaacgaccagcucaucaugaagaaccaccuccgcgacaucauggggauccccuacugcaacuacuccaaguacugcuaccugaaccacacgaccaccggcaagaccagccugcccaagugcugccuggucuccaacggcagcuaccugaacgagacgcacuucuccgacgacaucgagcagcaggccgacaacaugaucaccgagaugcuccagaaggaguacauggagcggcaggggaagacgccccugggccugguggaccucuucguguucagcaccuccuucuaccugaucagcaucuuccugcaccuggucaagaucccgacccaccgccacaucguggggaaguccugccccaagccccaccggcucaaccacaugggcaucugcagcugcgggcuguacaagcagcccggcgugccgguccgcuggaagcggugaggacuagucccuguucccagagcccacuuuuuuuucuuuuuuugaaauaaaauagccugucuuucagaucucaaaggcucuuuucagagccaccaaaaaaaaaaaaaaaaaaaaaaaaaaaaaaaaaaaaaaaaaaaaaaaaaaaaaaaaaaaaaaaaaaaaaaaaaaaaaaaaaaaaaaaaaaaaaaaaaaaaa

SEQ ID NO: 27043 - RNA, 1767 nt, Artificial Sequence
  mRNA product Design a-2 (hSL-A100) comprising derived and/or modified sequence from LASV(Mad39;Clade IV)__ANH09722__GPCmut4 (opt1)
aggagaguccgcucagccagguugcagaagcggcuuagcguguguccuaaucuucucucugcguguagguaggccugugccgcaaacaagcuuaccaugggccagaucgugaccuucuuccaggaggucccccacgugaucgaggaggugaugaacaucguccugaucgcccucagcauccuggccgugcugaaggggcucuacaacguggcgaccugcggccugaucgggcuggucacguuccuccugcugugcggccgcuccugcaccaccacccucuacaaggggguguacgagcugcaggcccuggagcucaacauggagacgcugaacaugugcaugccgcugagcugcaccaagaacaacucccaccacuacauccgggugggcaacgagaccggccucgagcugacgcugaccaacaccagccucaucaaccacaaguucugcaaccuguccgacgcccacaagaagaaccuguacgaccacgcccucaugagcaucaucuccaccuuccaccugagcauccccaacuucaaccaguacgaggccauguccugcgacuucaacgacgggaagaucagcguccaguacaaccugucccacacguacgcgggcgacaccgccaaccacugcgggaccguggccaacggcgugcuccagaccuucaugcgcauggccuggggcgggagcuacaucgcgcuggacuccggccgcgggggcugggacugcaucaugacgagcuaccaguaccugaucauccagaacaccaccugggaggaccacugccaguucucccggcccagccccaucggguaccucggccugcugucccagcggacccgcgacaucuacaucagccggcgccgccggggcacguucaccuggacccuguccgacagcgaggggaaggacaccccgggcggguacugccucacgcgguggaugcugaucgaggccgagcugaagugcuucggcaacaccgccgucgccaagugcaacgagaagcacgacgaggaguucugcgacaugcuccgccuguucgacuucugcaagcaggccauccagcggcugaaggcgcccgcccagaugagcauccagcucaucaacaaggccgugaacgcccugaucaacgaccagcugaucaugaagaaccaccuccgcgacaucauggggauccccuacugcaacuacuccaaguacugcuaccugaaccacaccgugaccggcaagacgagccugcccaagugcugccucgucuccaacggcagcuaccugaacgagacccacuucuccgacgacaucgagcagcaggccgacaacaugaucaccgagaugcugcagaaggaguacauggagcggcaggggaagacgccccucggccugguggaccuguucguguucagcaccuccuucuaccugaucagcaucuuccuccaccuggucaagaucccgacccaccgccacgugguggggaagcccugccccaagccccaccggcugaaccacaugggcaucugcuccugcggguucuacaagcagccgggcguccccgugcgcuggaagcggugaggacuagucccuguucccagagcccacuuuuuuuucuuuuuuugaaauaaaauagccugucuuucagaucucaaaggcucuuuucagagccaccaaaaaaaaaaaaaaaaaaaaaaaaaaaaaaaaaaaaaaaaaaaaaaaaaaaaaaaaaaaaaaaaaaaaaaaaaaaaaaaaaaaaaaaaaaaaaaaaaaaaa

SEQ ID NO: 27044 - RNA, 1767 nt, Artificial Sequence
  mRNA product Design a-2 (hSL-A100) comprising derived and/or modified sequence from LASV(Z0947-SLE-2011;Clade IV)__AIT17840__GPCmut4 (opt1)
aggagaguccgcucagccagguugcagaagcggcuuagcguguguccuaaucuucucucugcguguagguaggccugugccgcaaacaagcuuaccaugggccagaucgugaccuucuuccaggaggucccccacgugaucgaggaggugaugaacaucguccugaucgcccucagcauccuggccgugcugaaggggcucuacaacuucgcgaccugcggccugguggggcuggucacguuccuccugcugugcggccgcuccugcaccaucagccucuacaaggggguguacgagcugcagacccuggagcucaacauggagacccugaacaugugcaugccgcuguccugcaccaagaacaacagccaccacuacaucauggugggcaacgagaccggccucgagcugacccugacgaacaccuccaucaucaaccacaaguucugcaaccucagcgacgcccacaagaagaaccuguacgaccacgcccugauguccaucaucagcaccuuccaccucuccauccccaacuucaaccaguacgaggccaugagcugcgacuucaacgggggcaagaucuccguccaguacaaccugagccacuccuacgccggggacgcggccaaccacugcggcaccguggccaacggggugcugcagacguucaugcggauggccuggggcggcagcuacaucgcgcucgacuccgggcgcgaccggugggacugcaucaugaccagcuaccaguaccugaucauccagaacaccaccugggaggaccacugccaguucucccgccccagccccaucggcuaccuggggcuccugucccagcggacgcgcgacaucuacaucagccggcgccgccggggcaccuucaccuggacccugagcgacuccgagggcaaggacacgcccgggggcuacugccugacccgguggaugcucaucgaggccgagcugaagugcuucgggaacaccgccgucgccaagugcaacgagaagcacgacgaggaguucugcgacaugcugcgccucuucgacuucugcaagcaggccauccagcggcugaaggcgcccgcccagaugagcauccagcugaucaacaaggccgugaacgcccucaucaacgaccagcugaucaugaagaaccaccuccgcgacaucaugggcauccccuacugcaacuacuccaaguacugcuaccugaaccacaccacgaccgggaagaccagccugcccaagugcugccugguguccaacggcagcuaccucaacgagacccacuucuccgacgacaucgagcagcaggccgacaacaugaucacggagaugcugcagaaggaguacauggagcggcagggcaagaccccgcuggggcucgucgaccuguucguguucagcaccuccuucuaccugaucagcaucuuccugcaccucgugaagaucccgacccaccgccacaucgucggcaagcccugccccaagccccaccggcugaaccacauggggaucugcuccugcggccuguacaagcagccgggggugcccgugaaguggaagcgcugaggacuagucccuguucccagagcccacuuuuuuuucuuuuuuugaaauaaaauagccugucuuucagaucucaaaggcucuuuucagagccaccaaaaaaaaaaaaaaaaaaaaaaaaaaaaaaaaaaaaaaaaaaaaaaaaaaaaaaaaaaaaaaaaaaaaaaaaaaaaaaaaaaaaaaaaaaaaaaaaaaaaa

SEQ ID NO: 27045 - RNA, 1767 nt, Artificial Sequence
  mRNA product Design a-2 (hSL-A100) comprising derived and/or modified sequence from LASV(Josiah;Clade IV)__NP_694870__GPCmut4 (opt1)
aggagaguccgcucagccagguugcagaagcggcuuagcguguguccuaaucuucucucugcguguagguaggccugugccgcaaacaagcuuaccaugggccagaucgugaccuucuuccaggaggucccccacgugaucgaggaggugaugaacaucguccugaucgcccucagcgugcuggccgugcugaaggggcucuacaacuucgcgaccugcggccuggucgggcuggugacguuccuccugcugugcggccgcuccugcaccaccagccucuacaaggggguguacgagcugcagacccuggagcucaacauggagacgcugaacaugugcaugccgcuguccugcaccaagaacaacagccaccacuacaucauggucggcaacgagaccggccucgagcugacccugacgaacaccuccaucaucaaccacaaguucugcaaccucagcgacgcccacaagaagaaccuguacgaccacgcccugauguccaucaucagcaccuuccaccucuccauccccaacuucaaccaguacgaggccaugagcugcgacuucaacgggggcaagaucuccgugcaguacaaccugagccacuccuacgccggggacgcggccaaccacugcggcaccguggccaacgggguccugcagacguucaugcggauggccuggggcggcagcuacaucgcgcucgacuccgggcgcggcaacugggacugcaucaugaccagcuaccaguaccugaucauccagaacaccaccugggaggaccacugccaguucucccggcccagccccaucggguaccugggccuccugucccagcgcacgcgggacaucuacaucagccgccggcgccggggcaccuucaccuggacccugagcgacuccgaggggaaggacacgccgggcggguacugccucacccgcuggaugcugaucgaggccgagcugaagugcuucggcaacaccgccguggccaagugcaacgagaagcacgacgaggaguucugcgacaugcuccggcuguucgacuucugcaagcaggccauccagcgccugaaggcgcccgcccagaugagcauccagcucaucaacaaggccgugaacgcccugaucaacgaccagcugaucaugaagaaccaccuccgggacaucauggggauccccuacugcaacuacuccaaguacugcuaccugaaccacaccacgaccggccgcaccagccugcccaagugcugccucgucuccaacggcagcuaccugaacgagacccacuucuccgacgacaucgagcagcaggccgacaacaugaucacggagaugcugcagaaggaguacauggagcggcaggggaagaccccgcucggccugguggaccuguucguguucagcaccuccuucuaccugaucagcaucuuccuccaccuggucaagauccccacccaccgccacaucguggggaaguccugccccaagccccaccggcugaaccacaugggcaucugcagcugcgggcucuacaagcagccgggcgugcccgucaaguggaagcgcugaggacuagucccuguucccagagcccacuuuuuuuucuuuuuuugaaauaaaauagccugucuuucagaucucaaaggcucuuuucagagccaccaaaaaaaaaaaaaaaaaaaaaaaaaaaaaaaaaaaaaaaaaaaaaaaaaaaaaaaaaaaaaaaaaaaaaaaaaaaaaaaaaaaaaaaaaaaaaaaaaaaaa

SEQ ID NO: 27046 - RNA, 1764 nt, Artificial Sequence
  mRNA product Design a-2 (hSL-A100) comprising derived and/or modified sequence from LASV(LP;Clade I)__AAF86701__GPCmut4 (opt1)
aggagaguccgcucagccagguugcagaagcggcuuagcguguguccuaaucuucucucugcguguagguaggccugugccgcaaacaagcuuaccaugggccagaucaucaccuucuuccaggaggugccccacgucaucgaggaggugaugaacaucgugcugaucgcccucagccugcuggccauccucaaggggcuguacaacaucgcgaccugcggcaucaucgggcuggucgccuuccucuuccugugcggcaaguccugcagccugacgcucaagggcggguacgagcugcagacccuggagcucaacauggagacccugaacaugugcaugccgcuguccugcaccaagaacagcucccaccacuacauccgcgugggcaacgagacggggcucgagcugacccugaccaacaccagcaucaucaaccacaaguucugcaaccucuccgacgcccacaagaagaaccuguacgaccacgcccugaugagcaucaucuccacguuccaccucagcauccccaacuucaaccaguacgaggccauguccugcgacuucaacggcgggaagaucagcgugcaguacaaccugucccacagcuacgcgggcgacgccgccgagcacugcgggaccgucgccaacggcgugcugcagaccuucaugcggauggcguggggcgggcgcuacaucgcccucgacuccggcaaggggaacugggacugcaucaugaccagcuaccaguaccugaucauccagaacacgaccugggaggaccacugccaguucucccggcccagccccaucggcuaccugggccuccugucccagcgcacccgggacaucuacaucagccgccggcgccgggggaccuucacguggacccugagcgacuccgagggcaacgagacccccgggggcuacugccucacccgcuggaugcugaucgaggccgagcugaagugcuucgggaacacggccguggccaagugcaacgagaagcacgacgaggaguucugcgacaugcuccggcuguucgacuucugcaagcaggcgauccgccggcugaaggccccggcccagaugagcauccagcucaucaacaaggccgucaacgcccugaucaacgaccagcugaucaugaagaaccaccuccgcgacaucaugggcauccccuacugcaacuacuccaaguacugcuaccugaaccacaccagcuccggccggaccagccugcccaagugcugccucaucuccaacgggagcuaccugaacgagacccaguucuccgacgacaucgagcagcaggcggacaacaugaucacggagaugcugcagaaggaguacaucgagcgccagggcaagaccccgcucgggcugguggacaucuucaucuucagcaccuccuucuaccugaucagcaucuuccugcaccucaucaagauccccacccaccggcacaucgugggcaagcccugccccaagccgcaccgccugaaccacaugggggucugcuccugcggccuguacaagcaccccggcgugcccacgaaguggaagcggugaggacuagucccuguucccagagcccacuuuuuuuucuuuuuuugaaauaaaauagccugucuuucagaucucaaaggcucuuuucagagccaccaaaaaaaaaaaaaaaaaaaaaaaaaaaaaaaaaaaaaaaaaaaaaaaaaaaaaaaaaaaaaaaaaaaaaaaaaaaaaaaaaaaaaaaaaaaaaaaaaaaaa

SEQ ID NO: 27047 - RNA, 1764 nt, Artificial Sequence
  mRNA product Design a-2 (hSL-A100) comprising derived and/or modified sequence from LASV(803213;Clade II)__AAF86703__GPCmut4 (opt1)
aggagaguccgcucagccagguugcagaagcggcuuagcguguguccuaaucuucucucugcguguagguaggccugugccgcaaacaagcuuaccaugggccagaucaucaccuucuuccaggaggugccccacgucaucgaggaggugaugaacaucgugcugaucgcccucagccugcuggccauccucaaggggaucuacaacgucgcgaccugcggccuguucgggcugaucuccuuccuccugcugugcggccgcagcugcuccgugacguacaaggggguguacgagcuccagacccuggagcugaacauggccaaccucaacaugugcaugccgcugagcugcaccaagaacaacucccaccacuacaucauggucggcaacgagaccggccuggagcucacgcugaccaacaccagcaucaucaaccacaaguucugcaaccuguccgacgcccacaagaagaaccucuacgaccacgcccugaugagcaucaucuccaccuuccaccugagcauccccaacuucaaccaguacgaggccauguccugcgacuucaacgggggcaagaucagcgugcaguacaaccucucccacagcuucgcgguggacgccgccaaccacugcgggacgaucgccaacggcguccugcagaccuucaugcggauggcguggggcggguccuacaucgcccuggacagcggcaaggggaacugggacugcaucaugaccuccuaccaguaccucaucauccagaacaccacgugggaggaccacugccaguucagccgccccucccccaucggcuaccuggggcugcucagccagcggacccgcgacaucuacaucagccggcgccggcgcggcaccuucaccuggacgcuguccgacagcgagggcaacgaggcccccgggggcuacugccugacccgguggaugcucaucgaggccgagcugaagugcuucgggaacaccgccguggcgaagugcaacgagaagcacgacgaggaguucugcgacaugcugcgccucuucgacuucugcaagcaggccaucaagcggcugaagaccccggcccagauguccauccagcugaucaacaaggccgugaacgcccucaucaacgaccagcugaucaugaagaaccaccuccgcgacaucaugggcauccccuacugcaacuacagccgguacugcuaccugaaccacacggucaccgggaagaccucccugccccgcugcugccuggugagcaacggcuccuaccucaacgagacccacuucagcgacgacaucgagcagcaggcggacaacaugaucacggagaugcugcagaaggaguacauggaccggcagggcaagaccccgcuggggcucguggaccuguucgucuucuccaccagcuucuaccugaucuccaucuuccugcaccucgugaagauccccacccaccgccacaucgugggcaagcccugccccaagccgcaccggcugaaccacauggggaucugcagcugcggccuguacaagcaccccgggguccccgugaaguggaagcgcugaggacuagucccuguucccagagcccacuuuuuuuucuuuuuuugaaauaaaauagccugucuuucagaucucaaaggcucuuuucagagccaccaaaaaaaaaaaaaaaaaaaaaaaaaaaaaaaaaaaaaaaaaaaaaaaaaaaaaaaaaaaaaaaaaaaaaaaaaaaaaaaaaaaaaaaaaaaaaaaaaaaaa

SEQ ID NO: 27048 - RNA, 1764 nt, Artificial Sequence
  mRNA product Design a-2 (hSL-A100) comprising derived and/or modified sequence from LASV(GA391;Clade III)__CAA36645__GPCmut4 (opt1)
aggagaguccgcucagccagguugcagaagcggcuuagcguguguccuaaucuucucucugcguguagguaggccugugccgcaaacaagcuuaccaugggccagaucgugaccuucuuccaggaggucccccacgugaucgaggaggugaugaacaucguccugaucgcccucagcauccuggccauccugaaggggcucuacaacguggcgaccugcggccugaucgggcuggugacguuccuccugcuguccggccgcagcugcucccucaucuacaaggggaccuacgagcugcagacccuggagcucaacauggagacccugaacaugugcaugccgcugagcugcacgaagaacaacucccaccacuacauccgggucggcaacgagaccggccucgagcugacccugaccaacacgagcauccucaaccacaaguucugcaaccuguccgacgcccacaagcgcaaccuguacgaccacagccucauguccaucaucagcaccuuccaccuguccauccccaacuucaaccaguacgaggccaugagcugcgacuucaacgggggcaagaucaccgugcaguacaaccugucccacagcuucgccguggacgccgcggggcacugcggcacccucgccaacgggguccugcagacguucaugcggauggccuggggcggcuccuacaucgcccuggacagcgggcgcggcaacugggacugcaucaugaccuccuaccaguaccucaucauccagaacaccaccugggacgaccacugccaguucagccggcccucccccaucggguaccugggccugcucagccagcgcacgcgggacaucuacaucagccgccggcgccggggcaccuucaccuggacccuguccgacagcgaggggaacgagacgccgggcggguacugccugacccgcuggaugcucaucgaggcggagcugaagugcuucggcaacaccgccguggccaagugcaacgagaagcacgacgaggaguucugcgacaugcugcggcuguucgacuucugcaagcaggccauccgccggcugaagacccccgcccagauguccauccagcugaucaacaaggcggugaacgcccucaucaacgaccagcugaucaugaagaaccaccuccgcgacaucauggggauccccuacugcaacuacagccgguacugcuaccucaaccacacguccaccggcaagaccagccugccccgcugcugccugaucuccaacggcagcuaccucaacgagaccaaguucuccgacgacaucgagcagcaggccgacaacaugaucacggagaugcugcagaaggaguacaucgaccggcaggggaagaccccgcugggccuggucgaccucuucguguucagcaccuccuucuaccugaucagcaucuuccugcaccucgugaagauccccacccaccgccacaucgucgggaagcccugccccaagccgcaccggcugaaccacaugggcaucugcuccugcgggcuguacaagcagcccggcgugcccgugcgcuggaagcgcugaggacuagucccuguucccagagcccacuuuuuuuucuuuuuuugaaauaaaauagccugucuuucagaucucaaaggcucuuuucagagccaccaaaaaaaaaaaaaaaaaaaaaaaaaaaaaaaaaaaaaaaaaaaaaaaaaaaaaaaaaaaaaaaaaaaaaaaaaaaaaaaaaaaaaaaaaaaaaaaaaaaaa

SEQ ID NO: 27049 - RNA, 1767 nt, Artificial Sequence
  mRNA product Design a-2 (hSL-A100) comprising derived and/or modified sequence from LASV(AV;Clade V)__CCA30314__GPCmut4 (opt1)
aggagaguccgcucagccagguugcagaagcggcuuagcguguguccuaaucuucucucugcguguagguaggccugugccgcaaacaagcuuaccaugggccagaucgugaccuucuuccaggaggucccccacgugaucgaggaggugaugaacaucguccugaucgcccucagcauccuggccgugcugaaggggcucuacaacaucgcgaccugcggccugaucgggcugaucacguuccuccugcugugcggccgcuccugcagcuccaaccucuacaaggggguguacgagcugcagagccuggaccucaacauggagacccugaacaugugcaugccgcuguccugcaccaagaacaacagccaccacuacauccgggucggcaacgacaccggccucgagcugacgcugaccaacaccuccauccucaaccacaaguucugcaaccugagcgacgcccacaagaaggaccuguacgaccacgcccucauguccaucaucagcaccuuccaccuguccauccccaacuucaaccaguacgaggccaugagcugcgacuucaacgggggcaagaucuccgugcaguacaaccugagccacuccuacgccaucgacgcggccaaccacugcgggacgguggccaacggcauccuccagaccuucaugcgcauggccuggggcgggagcuacaucgcgcuggacuccggccgggggaacugggacugcaucaugaccagcuaccaguaccugaucauccagaacaccacgugggagaaccacugccaguucucccgccccagccccaucggcuaccucgggcugcugagccagcggacccgcgacaucuacaucucccggcgccggcgcggcaccuucaccuggacgcucagcgacuccgagggcaacgccacccccgggggcuacugccugacccgguggaugcugaucgaggccgagcucaagugcuucgggaacaccgccgucgccaagugcaacgagaagcacgacgaggaguucugcgacaugcugcgccuguucgacuucugcaagcaggcgaucagccggcucaaguccccggcccagaugagcauccagcugaucaacaaggccgugaacgcccugaucaacgaccagcucaucaugaagaaccaccuccgcgacaucaugggcauccccuacugcaacuacuccaaguacugcuaccugaaccacacgaucaccgggaagaccagccugcccaagugcugccugguguccaacggcagcuaccugaacgagacccacuucuccgacgacaucgagcagcaggccgacaacaugaucacggagaugcuccagaaggaguacauggagcggcagggcaagaccccgcuggggcuggucgaccuguucguguucagcaccuccuucuaccucaucagcaucuuccugcgccuggugaagauccccacccaccggcacaucgucggcaagcccugccccaagccgcaccgccucaaccacauggggaucugcuccugcggccuguacaagcagcccggggugcccgugcgguggaagcgcugaggacuagucccuguucccagagcccacuuuuuuuucuuuuuuugaaauaaaauagccugucuuucagaucucaaaggcucuuuucagagccaccaaaaaaaaaaaaaaaaaaaaaaaaaaaaaaaaaaaaaaaaaaaaaaaaaaaaaaaaaaaaaaaaaaaaaaaaaaaaaaaaaaaaaaaaaaaaaaaaaaaaa

SEQ ID NO: 27050 - RNA, 1764 nt, Artificial Sequence
  mRNA product Design a-2 (hSL-A100) comprising derived and/or modified sequence from LASV(Togo/2016/7082;Clade VI)__AMR44577__GPCmut4 (opt1)
aggagaguccgcucagccagguugcagaagcggcuuagcguguguccuaaucuucucucugcguguagguaggccugugccgcaaacaagcuuaccaugggccagaucaucaccuucuuccaggaggugccccacgucaucgaggaggugaugaacaucgugcugaucgcccucagccugcuggccauccucaagggggucuacaacguggcgaccugcggcaucaucgggcuggugacguuccuguuccucugcggccgcuccugcagccugaucuacaagggguccuacgagcugcagacccucgagcugaacauggagacccugaacaugugcaugccgcucagcugcaccaagaacuccagccaccacuacauccgggucggcaacgagacgggccuggagcugacccucaccaacaccuccaucaucaaccacaaguucugcaaccugagcgacgcccacaagcgcaaccuguacgaccacgcccucauguccauccugagcacguuccaccuguccauccccaacuucaaccaguacgaggccaugagcugcgacuucaacgggggcaagaucuccgugcaguacaaccucagccacgccuacgcgguggacgccgccgagcacugcgggaccgucgccaacggcgugcugcagaccuucaugcggauggcguggggcggguccuacaucgcccuggacagcggccgcgggaacugggacugcaucaugaccuccuaccaguaccucaucauccagaacacgaccugggaggaccacugccaguucagccggcccucccccaucggcuaccuggggcugcucagccagcgcacccgggacaucuacaucagccgccggcgccggggcaccuucacguggacccuguccgacagcgagggcaacgagacccccgggggcuacugccugacccgcuggaugcucaucgaggccgagcugaagugcuucgggaacacggccguggccaagugcaacgagaagcacgacgaggaguucugcgacaugcugcggcuguucgacuucugcaagcaggcgauccagcgccugaaguccccggcccagaugagcauccagcugaucaacaaggccgucaacgcccucaucaacgaccagcugaucaugaagaaccaccuccgggacaugaugggcauccccuacugcaacuacuccaaguacugcuaccucaaccacaccagcuccgggcgcaccagccugcccaagugcugccugguguccaacggcagcuaccucaacgagacccacuucuccgacgacaucgagcagcaggccgacaacaugaucacggagaugcugcagaaggaguacaucgaccggcagggcaagaccccgcuggggcucguggaccuguucgucuucagcaccuccuucuaccugaucagcaucuuccugcaccucaucaagauccccacccaccgccacaucgugggcaagcccugccccaagccgcaccggcugaaccacauggggaucugcuccugcggccuguacaagcagcccggggugcccacgcgcuggaagcggugaggacuagucccuguucccagagcccacuuuuuuuucuuuuuuugaaauaaaauagccugucuuucagaucucaaaggcucuuuucagagccaccaaaaaaaaaaaaaaaaaaaaaaaaaaaaaaaaaaaaaaaaaaaaaaaaaaaaaaaaaaaaaaaaaaaaaaaaaaaaaaaaaaaaaaaaaaaaaaaaaaaaa

SEQ ID NO: 27051 - RNA, 1764 nt, Artificial Sequence
  mRNA product Design a-2 (hSL-A100) comprising derived and/or modified sequence from LASV(KAK-428;Clade n.d. (VII))__ANH09740__GPCmut4 (opt1)
aggagaguccgcucagccagguugcagaagcggcuuagcguguguccuaaucuucucucugcguguagguaggccugugccgcaaacaagcuuaccaugggccagaucgugaccuucuuccaggaggucccccacgugaucgaggaggugaugaacaucguccugaucgcccucagccugcuggccauccucaaggggcuguacaacuucgcgaccugcggcgugaucgggcugaucacguuccuccugcugugcggccgcuccugcagcgccaccuacaaggggcaguacgagcuccagacccuggagcugaacauggagucccucaacaugugcaugccgcugagcugcaccaagaacaacucccaccacuacauccgggccggcaacaacacgggccuggagcucacccugaccaacaccagcaucaucucccacaaguucugcaaccugagcgacgcccacaagaagaaccucuacgaccacacgcugauguccaucaucaccaccuuccaccugagcauccccaacuucaaccaguacgaggccauguccugcgacuucaacgggggcaagaucagcauccaguacaaccucucccacagcuacgcgggggacgccgcccagcacugcggcaccguggccaacgggguccugcagacguucaugcgcauggcguggggcggcuccuaccuggcccucgacagcgggcggcgcggcugggacugcaucaucuccagcuaccaguaccugaucauccagaacaccaccugggacgaccacugccaguucucccggcccagccccaucggguaccugggcuucgugagccagaagacccgcgacaucuacaucucccggcgccggcgcggcacguucaccuggacccucagcgacuccgaggggcacgacaugccgggcggguacugccugacccgguggaugcugaucgaggccgaccucaagugcuucggcaacacggccguggccaagugcaacgagaagcacgacgaggaguucugcgacauguggcgccuguucgacuucugcaagcaggcgauccagcggcugaaggcccccgcccagaugaacauccagcucaucaacaaggccgucaacgcccugaucaacgaccagcugaugaugaagaaccaccuccgcgacaucauggggauccccuacugcaacuacagcaaguucugcuaccugaacaacaccaccaccggccggacgucccugccccgcugcugccucaucagcaacggcuccuaccugaacgagacccacuucagcgacgacaucgagcagcaggcggacaacaugaucaccgagaugcugcagaaggaguacauggaccggcaggggaagaccccgcucggccugguggaccuguucguguucuccacgagcuucuaccucaucaccaucuuccugcaccuggucaagauccccacccaccgccacaucguggggaagcccugccccaagccgcaccggcugaaccacaugggcaucugcuccugcgggcucuacaagcagcccggcgugcccguccgcuggaagcggugaggacuagucccuguucccagagcccacuuuuuuuucuuuuuuugaaauaaaauagccugucuuucagaucucaaaggcucuuuucagagccaccaaaaaaaaaaaaaaaaaaaaaaaaaaaaaaaaaaaaaaaaaaaaaaaaaaaaaaaaaaaaaaaaaaaaaaaaaaaaaaaaaaaaaaaaaaaaaaaaaaaaa

SEQ ID NO: 27052 - RNA, 1764 nt, Artificial Sequence; identical to SEQ ID NO: 27046
  mRNA product Design a-2 (hSL-A100) comprising derived and/or modified sequence from LASV(Pinneo-NIG-1969;Clade I)__AIT17836__GPCmut4 (opt1)

SEQ ID NO: 27053 - RNA, 1764 nt, Artificial Sequence
  mRNA product Design a-2 (hSL-A100) comprising derived and/or modified sequence from LASV(ISTH0009-NIG-2011;Clade II)__AIT17404__GPCmut4 (opt1)
aggagaguccgcucagccagguugcagaagcggcuuagcguguguccuaaucuucucucugcguguagguaggccugugccgcaaacaagcuuaccaugggccagaucaucaccuucuuccaggaggugccccacgucaucgaggaggugaugaacaucgugcugaucgcccucagccugcuggccauccucaaggggaucuacaacgucgcgaccugcggccuguucgggcugguguccuuccuccugcugugcggccgcagcugcuccacgaccuacaaggggguguacgagcuccagacccuggagcuggacauggccagccucaacaugugcaugccgcuguccugcaccaagaacaacagccaccacuacaucauggucggcaacgagacgggccuggagcucacccugaccaacaccuccaucaucaaccacaaguucugcaaccugagcgacgcccacaagaagaaccucuacgaccacgcccugauguccaucaucagcacguuccaccuguccauccccaacuucaaccaguacgaggccaugagcugcgacuucaacgggggcaagaucuccgugcaguacaaccucagccacgcguacgccguggacgccgccaaccacugcgggaccaucgcgaacggcguccugcagaccuucaugcggauggccuggggcggguccuacaucgcccuggacagcggcaagggguccugggacugcaucaugaccagcuaccaguaccucaucauccagaacacgaccugggaggaccacugccaguucucccgccccagccccaucggcuaccuggggcugcucagccagcggacccgcgacaucuacaucucccggcgccggcgcggcaccuucacguggacccugagcgacuccgagggcaacgagacccccgggggcuacugccugacccgguggaugcucaucgaggccgagcugaagugcuucgggaacacggccguggcgaagugcaacgagaagcacgacgaggaguucugcgacaugcugcgccucuucgacuucugcaagcaggccauccggcgccugaagaccccggcccagaugagcauccagcugaucaacaaggccgugaacgcccucaucaacgaccagcugaucaugaagaaccaccuccgggacaucaugggcauccccuacugcaacuacuccaaguacugcuaccugaaccacaccgucaccgggaagacgagccugccccgcugcugccugguguccaacggcagcuaccucaacgagacccacuucuccgacgacaucgagcagcaggcggacaacaugaucaccgagcugcugcagaaggaguacauggaccggcagggcaagaccccgcucgggcugguggaccuguucgucuucagcacguccuucuaccugaucagcaucuuccuccaccugaucaagauccccacccaccgccacaucaccggcaagcccugccccaagccgcaccggcugaaccacauggggaucugcuccugcggccucuacaagcaccccggggugcccgugaaguggaagcgcugaggacuagucccuguucccagagcccacuuuuuuuucuuuuuuugaaauaaaauagccugucuuucagaucucaaaggcucuuuucagagccaccaaaaaaaaaaaaaaaaaaaaaaaaaaaaaaaaaaaaaaaaaaaaaaaaaaaaaaaaaaaaaaaaaaaaaaaaaaaaaaaaaaaaaaaaaaaaaaaaaaaaa

SEQ ID NO: 27054 - RNA, 1764 nt, Artificial Sequence
  mRNA product Design a-2 (hSL-A100) comprising derived and/or modified sequence from LASV(ISTH2010-NIG-2012;Clade II)__AIT17482__GPCmut4 (opt1)
aggagaguccgcucagccagguugcagaagcggcuuagcguguguccuaaucuucucucugcguguagguaggccugugccgcaaacaagcuuaccaugggccagaucaucaccuucuuccaggaggugccccacgucaucgaggaggugaugaacaucgugcugaucgcccucagccugcuggccauccucaaggggaucuacaacgucgcgaccugcggccuguucgggcugguguccuuccuccugcugugcggccgcagcugcuccacgaccuacaaggggguguacgagcuccagacccuggagcuggacauggccagccucaacaugugcaugccgcuguccugcaccaagaacaacagccaccacuacaucauggucggcaacgagacgggccuggagcucacccugaccaacaccuccaucaucaaccacaaguucugcaaccugagcgacgcccacaagaagaaccucuacgaccacgcccugauguccaucaucagcacguuccaccuguccauccccaacuucaaccaguacgaggccaugagcugcgacuucaacgggggcaagaucuccgugcaguacaaccucagccacgcguacgccguggacgccgccaaccacugcgggaccaucgcgaacggcguccugcagaccuucaugcggauggccuggggcggguccuacaucgcccuggacagcggcaagggguccugggacugcaucaugaccagcuaccaguaccucaucauccagaacaucacgugggaggaccacugccaguucucccgccccagccccaucggcuaccuggggcugcucagccagcggacccgcgacaucuacaucucccggcgccggcgcggcaccuucaccuggacgcugagcgacuccgagggcaacgagacccccgggggcuacugccugacccgguggaugcucaucgaggccgagcugaagugcuucgggaacaccgccguggcgaagugcaacgagaagcacgacgaggaguucugcgacaugcugcgccucuucgacuucugcaagcaggccauccggcgccugaagacgccggcccagaugagcauccagcugaucaacaaggccgugaacgcccucaucaacgaccagcugaucaugaagaaccaccuccgggacaucaugggcauccccuacugcaacuacuccaaguacugcuaccugaaccacaccgucaccgggaagaccagccugccccgcugcugccugguguccaacggcagcuaccucaacgagacgcacuucuccgacgacaucgagcagcaggcggacaacaugaucaccgagcugcugcagaaggaguacaucgaccggcagggcaagaccccgcucgggcugguggaccuguucgucuucagcaccuccuucuaccugaucagcaucuuccuccaccuggugaagauccccacgcaccgccacguggucggcaagcccugccccaagccgcaccggcugaaccacauggggaucugcuccugcggccucuacaagcaccccggggugcccgugaaguggaagcgcugaggacuagucccuguucccagagcccacuuuuuuuucuuuuuuugaaauaaaauagccugucuuucagaucucaaaggcucuuuucagagccaccaaaaaaaaaaaaaaaaaaaaaaaaaaaaaaaaaaaaaaaaaaaaaaaaaaaaaaaaaaaaaaaaaaaaaaaaaaaaaaaaaaaaaaaaaaaaaaaaaaaaa

SEQ ID NO: 27055 - RNA, 1764 nt, Artificial Sequence
  mRNA product Design a-2 (hSL-A100) comprising derived and/or modified sequence from LASV(Lassa virus/H.sapiens-wt/NGA/2015/ISTH_0543;Clade II)__AVO03639__GPCmut4 (opt1)
aggagaguccgcucagccagguugcagaagcggcuuagcguguguccuaaucuucucucugcguguagguaggccugugccgcaaacaagcuuaccaugggccagaucaucaccuucuuccaggaggugccccacgucaucgaggaggugaugaacaucgugcugaucgcccucagccugcuggccauccucaaggggaucuacaacgucgcgaccugcggccuguucgggcugguguccuuccuccugcugugcggccgcagcugcuccacgaccuacaaggggguguacgagcuccagacccuggagcuggacauggccaaccucaacaugugcaugccgcugagcugcaccaagaacaacucccaccacuacaucauggucggcaacgagacgggccuggagcucacccugaccaacaccagcaucaucaaccacaaguucugcaaccuguccgacgcccacaagaagaaccucuacgaccacgcccugaugagcaucaucuccacguuccaccugagcauccccaacuucaaccaguacgaggccauguccugcgacuucaacgggggcaagaucagcgugcaguacaaccucucccacaccuacgcgguggacgccgccaaccacugcgggaccaucgccaacggcguccugcagaccuucaugcggauggcguggggcgggagcuacaucgcccuggacuccggcaaggggagcugggacugcaucaugacguccuaccaguaccucgugauccagaacaccaccugggaggaccacugccaguucagccgccccucccccaucggcuaccuggggcugcucagccagcggacccgcgacaucuacaucagccggcgccggcgcggcacguucaccuggacccuguccgacagcgagggcaacgagacccccgggggcuacugccugacgcgguggaugcucaucgaggccgagcugaagugcuucgggaacaccgccguggccaagugcaacgagaagcacgacgaggaguucugcgacaugcugcgccucuucgacuucugcaagcaggcgauccggcgccugaagaccccggcccagauguccauccagcugaucaacaaggccgucaacgcccucaucaacgaccagcugaucaugaagaaccaccuccgggacaucaugggcauccccuacugcaacuacagcaaguacugcuaccugaaccacaccgugacggggaagaccucccugccccgcugcugccuggugagcaacggcuccuaccucaacgagacccacuucagcgacgacaucgagcagcaggccgacaacaugaucaccgagcugcugcagaaggaguacaucgaccggcagggcaagacgccgcucgggcuggucgaccuguucguguucuccaccagcuucuaccugaucuccaucuuccuccaccuggugaagauccccacccaccgccacaucaccggcaagcccugccccaagccgcaccggcugaaccacauggggaucugcagcugcggccucuacaagcaccccgggguccccgugaaguggaagcgcugaggacuagucccuguucccagagcccacuuuuuuuucuuuuuuugaaauaaaauagccugucuuucagaucucaaaggcucuuuucagagccaccaaaaaaaaaaaaaaaaaaaaaaaaaaaaaaaaaaaaaaaaaaaaaaaaaaaaaaaaaaaaaaaaaaaaaaaaaaaaaaaaaaaaaaaaaaaaaaaaaaaaa

SEQ ID NO: 27056 - RNA, 1764 nt, Artificial Sequence
  mRNA product Design a-2 (hSL-A100) comprising derived and/or modified sequence from LASV(Lassa virus/H.sapiens-wt/NGA/2016/ISTH_0009;Clade II)__AVO03571__GPCmut4 (opt1)
aggagaguccgcucagccagguugcagaagcggcuuagcguguguccuaaucuucucucugcguguagguaggccugugccgcaaacaagcuuaccaugggccagaucaucaccuucuuccaggaggugccccacgucaucgaggaggugaugaacaucgugcugaucgcccucagccugcuggccauccucaaggggaucuacaacgucgcgaccugcggccugcuggggcucguguccuuccugcugcucugcggccgcagcugcuccacgaccuacaaggggguguacgagcugcagacccuggagcucgacauggccagccugaacaugugcaugccgcuguccugcaccaagaacaacagccaccacuacaucauggucggcaacgagacgggccucgagcugacccugaccaacaccuccaucaucaaccacaaguucugcaaccucagcgacgcccacaagaagaaccuguacgaccacgcccugauguccaucaucagcacguuccaccucuccauccccaacuucaaccaguacgaggccaugagcugcgacuucaacgggggccggaucuccgugcaguacaaccugagccacuccuacgcgguggacgccgccaaccacugcgggaccaucgccaacggcguccugcagaccuucaugcgcauggcguggggcgggagcuacaucgcccucgacuccggcaaggggagcugggacugcaucaugaccuccuaccaguaccugaucauccagaacacgaccugggaggaccacugccaguucagccggcccagccccaucggcuaccuggggcuccugucccagcgcacccgggacaucuacaucagccgccggcgccggggcaccuucacguggacccuguccgacagcgagggcaacgagacccccgggggcuacugccucacccgcuggaugcugaucgaggccgagcugaagugcuucgggaacacggccguggccaagugcaacgagaagcacgacgaggaguucugcgacaugcuccggcuguucgacuucugcaagcaggcgauccgccggcugaagaccccggcccagauguccauccagcucaucaacaaggccgugaacgcccugaucaacgaccagcugaucaugaagaaccaccuccgcgacaucaugggcauccccuacugcaacuacagcaaguacugcuaccugaaccacaccgucaccgggaagacgucccugccccggugcugccucgugagcaacggcuccuaccugaacgagacccacuucagcgacgacaucgagcagcaggccgacaacaugaucaccgagcugcuccagaaggaguacaucgaccgccagggcaagaccccgcuggggcugguggaccuguucgucuucuccacgagcuucuaccucaucuccaucuuccugcaccuggugaagauccccacccaccggcacaucaccggcaagcccugccccaagccgcaccgccucaaccacauggggaucugcagcugcggccuguacaaccaccccggggugcccgucaaguggaagcggugaggacuagucccuguucccagagcccacuuuuuuuucuuuuuuugaaauaaaauagccugucuuucagaucucaaaggcucuuuucagagccaccaaaaaaaaaaaaaaaaaaaaaaaaaaaaaaaaaaaaaaaaaaaaaaaaaaaaaaaaaaaaaaaaaaaaaaaaaaaaaaaaaaaaaaaaaaaaaaaaaaaaa

SEQ ID NO: 27057 - RNA, 1764 nt, Artificial Sequence
  mRNA product Design a-2 (hSL-A100) comprising derived and/or modified sequence from LASV(Lassa virus/H.sapiens-wt/NGA/2016/ISTH_0017;Clade II)__AVO03567__GPCmut4 (opt1)
aggagaguccgcucagccagguugcagaagcggcuuagcguguguccuaaucuucucucugcguguagguaggccugugccgcaaacaagcuuaccaugggccagaucaucaccuucuuccaggaggugccccacgucaucgaggaggugaugaacaucgugcugaucgcccucagccugcuggccauccucaaggggaucuacaacgucgcgaccugcggccuguucgggcugguguccuuccuccugcugugcggccgcagcugcuccacgaccuacaaggggguguacgagcuccagacccuggagcuggacauggccagccucaacaugugcaugccgcuguccugcaccaagaacaacagccaccacuacaucauggucggcaacgagacgggccuggagcucacccugaccaacaccuccaucaucaaccacaaguucugcaaccugagcgacgcccacaagaagaaccucuacgaccacgcccugauguccaucaucagcacguuccaccuguccauccccaacuucaaccaguacgaggccaugagcugcgacuucaacgggggcaagaucuccgugcaguacaaccucagccacaccuacgcgaucgacgccgccaaccacugcgggaccaucgccaacggcgugcugcagaccuucaugcggauggcguggggcggguccuacaucgcccuggacagcggcaagggguccugggacugcaucaugacgagcuaccaguaccucaucauccagaacaccaccugggaggaccacugccaguucucccgccccagccccaucggcuaccuggggcugcucagccagcggacccgcgacaucuacaucucccggcgccggcgcggcacguucaccuggacccugagcgacuccgagggcaacgagacccccgggggcuacugccugacgcgguggaugcucaucgaggccgagcugaagugcuucgggaacaccgccgucgccaagugcaacgagaagcacgacgaggaguucugcgacaugcugcgccucuucgacuucugcaagcaggcgauccggcgccugaagaccccggcccagaugagcauccagcugaucaacaaggccgugaacgcccucaucaacgaccagcugaucaugaagaaccaccuccgggacaucaugggcauccccuacugcaacuacuccaaguacugcuaccugaaccacaccgugacggggaagaccagccugccccgcugcugccuggucuccaacggcagcuaccucaacgagacccacuucuccgacgacaucgagcagcaggccgacaacaugaucaccgagcugcugcagaaggaguacauggaccggcagggcaagacgccgcucgggcugguggaccuguucguguucagcaccuccuucuaccugaucagcaucuuccuccaccugguccgcauccccacccaccggcacgugaucggcaagcccugccccaagccgcaccgccugaaccacauggggaucugcuccugcggccucuacaagcaccccggggugcccgucaaguggaagcggugaggacuagucccuguucccagagcccacuuuuuuuucuuuuuuugaaauaaaauagccugucuuucagaucucaaaggcucuuuucagagccaccaaaaaaaaaaaaaaaaaaaaaaaaaaaaaaaaaaaaaaaaaaaaaaaaaaaaaaaaaaaaaaaaaaaaaaaaaaaaaaaaaaaaaaaaaaaaaaaaaaaaa

SEQ ID NO: 27058 - RNA, 1764 nt, Artificial Sequence
  mRNA product Design a-2 (hSL-A100) comprising derived and/or modified sequence from LASV(Lassa virus/H.sapiens-wt/NGA/2018/ISTH_0959;Clade II)__AVV65099__GPCmut4 (opt1)
aggagaguccgcucagccagguugcagaagcggcuuagcguguguccuaaucuucucucugcguguagguaggccugugccgcaaacaagcuuaccaugggccagaucaucaccuucuuccaggaggugccccacgucaucgaggaggugaugaacaucgugcugaucgcccucagccugcuggccauccucaaggggaucuacaacgucgugaccugcggccuguucgggcugguguccuuccuccugcugugcggccgcagcugcuccacgaccuacaagggggucuacgagcuccagacccuggagcuggacauggcgagccucaacaugugcaugccgcuguccugcaccaagaacaacagccaccacuacaucauggugggcaacgagacgggccuggagcucacccugaccaacaccuccaucaucaaccacaaguucugcaaccugagcgacgcccacaagaagaaccucuacgaccacgcccugauguccaucaucagcacguuccaccuguccauccccaacuucaaccaguacgaggccaugagcugcgacuucaacgggggcaagaucuccgugcaguacaaccucagccacgccuacgcgaucgacgccgccaaccacugcgggaccaucgccaacggcguccugcagaccuucaugcggauggcguggggcggguccuacaucgcccuggacagcggcaagggguccugggacugcaucaugaccagcuaccaguaccucaucauccagaacacgaccugggaggaccacugccaguucucccgccccagccccaucggcuaccuggggcugcucagccagcggacccgcgacaucuacaucucccggcgccggcgcggcaccuucacguggacccugagcgacuccgagggcaacgagacccccgggggcuacugccugacccgguggaugcucaucgaggccgagcugaagugcuucgggaacacggccguggccaagugcaacgagaagcacgacgaggaguucugcgacaugcugcgccucuucgacuucugcaagcaggcgauccggcgccugaagaccccggcccagaugagcauccagcugaucaacaaggccgugaacgcccucaucaacgaccagcugaucaugaagaaccaccuccgggacaucaugggcauccccuacugcaacuacuccaaguacugcuaccugaaccacaccgucaccgggaagacgagccugccccgcugcugccugguguccaacggcagcuaccucaacgagacccacuucuccgacgacaucgagcagcaggccgacaacaugaucaccgagcugcugcagaaggaguacaucgaccggcagggcaagaccccgcucgggcugguggaccuguucgucuucagcacguccuucuaccugaucagcaucuuccuccaccuggugaagauccccacccaccgccacgugaucggcaagcccugccccaagccgcaccggcugaaccacauggggaucugcuccugcggccucuacaagcaccccgggguccccgugaaguggaagcgcugaggacuagucccuguucccagagcccacuuuuuuuucuuuuuuugaaauaaaauagccugucuuucagaucucaaaggcucuuuucagagccaccaaaaaaaaaaaaaaaaaaaaaaaaaaaaaaaaaaaaaaaaaaaaaaaaaaaaaaaaaaaaaaaaaaaaaaaaaaaaaaaaaaaaaaaaaaaaaaaaaaaaa

SEQ ID NO: 27059 - RNA, 1764 nt, Artificial Sequence
  mRNA product Design a-2 (hSL-A100) comprising derived and/or modified sequence from LASV(LASV003-NIG-2008;Clade II)__AIT17580__GPCmut4 (opt1)
aggagaguccgcucagccagguugcagaagcggcuuagcguguguccuaaucuucucucugcguguagguaggccugugccgcaaacaagcuuaccaugggccagaucaucaccuucuuccaggaggugccccacgucaucgaggaggugaugaacaucgugcugaucgcccucagccugcuggccauccucaaggggaucuacaacgucgcgaccugcggccuguucgggcugguguccuuccuccugcugugcggccgcagcugcuccacgaccuacaaggggguguacgagcuccagacccuggagcuggacauggccagccucaacaugugcaugccgcuguccugcaccaagaacaacagccaccacuacaucauggucggcaacgagacgggccuggagcucacccugaccaacaccuccaucaucaaccacaaguucugcaaccugagcgacgcccacaagaagaaccucuacgaccacgcccugauguccaucaucagcacguuccaccuguccauccccaacuucaaccaguacgaggccaugagcugcgacuucaacgggggcaagaucuccgugcaguacaaccucagccacaccuacgcgguggacgccgccaaccacugcgggaccaucgccaacggcguccugcagaccuucaugcggauggcguggggcggguccuacaucgcccuggacagcggcaagggguccugggacugcaucaugacgagcuaccaguaccucaucauccagaacaccaccugggaggaccacugccaguucucccgccccagccccaucggcuaccuggggcugcucagccagcggacccgcgacaucuacaucucccggcgccggcgcggcacguucaccuggacccugagcgacuccgagagcaacgagaccccgggcggguacugccugacgcgguggaugcucaucgaggccgagcugaagugcuucggcaacaccgccguggccaagugcaacgagaagcacgacgaggaguucugcgacaugcugcgccucuucgacuucugcaagcaggcgauccggcgccugaaggcccccgcccagauguccauccagcugaucaacaaggccgugaacgcccucaucaacgaccagcugaucaugaagaaccaccuccgggacaucauggggauccccuacugcaacuacagcaaguacugcuaccugaaccacaccgucaccggccgcacgucccugccccggugcugccuggugagcaacggguccuaccucaacgagacccacuucagcgacgacaucgagcagcaggcggacaacaugaucaccgagcugcugcagaaggaguacauggaccgccagggcaagaccccgcucggccugguggaccuguucgucuucuccacgagcuucuaccugaucuccaucuuccuccaccuggugaagauccccacccaccggcacgugaucgggaagcccugccccaagccgcaccgccugaaccacaugggcaucugcagcugcgggcucuacaagcaccccggcguccccgugaaguggaagcggugaggacuagucccuguucccagagcccacuuuuuuuucuuuuuuugaaauaaaauagccugucuuucagaucucaaaggcucuuuucagagccaccaaaaaaaaaaaaaaaaaaaaaaaaaaaaaaaaaaaaaaaaaaaaaaaaaaaaaaaaaaaaaaaaaaaaaaaaaaaaaaaaaaaaaaaaaaaaaaaaaaaaa

SEQ ID NO: 27060 - RNA, 1764 nt, Artificial Sequence
  mRNA product Design a-2 (hSL-A100) comprising derived and/or modified sequence from LASV(LASV035-NIG-2009;Clade II)__AIT17588__GPCmut4 (opt1)
aggagaguccgcucagccagguugcagaagcggcuuagcguguguccuaaucuucucucugcguguagguaggccugugccgcaaacaagcuuaccaugggccagaucaucaccuucuuccaggaggugccccacgucaucgaggaggugaugaacaucgugcugaucgcccucagccugcuggccauccucaaggggaucuacaacgucgcgaccugcggccuguucgggcugguguccuuccuccugcugugcggccgcagcugcuccacgaccuacaaggggguguacgagcuccagacccuggagcuggacauggccagccucaacaugugcaugccgcuguccugcaccaagaacaacagccaccacuacaucauggucggcaacgagacgggccuggagcucacccugaccaacaccuccaucaucaaccacaaguucugcaaccugagcgacgcccacaagaagaaccucuacgaccacgcccugauguccaucaucagcacguuccaccuguccauccccaacuucaaccaguacgaggccaugagcugcgacuucaacgggggcaagaucuccgugcaguacaaccucagccacgcguacgccguggacgccgccaaccacugcgggaccaucgcgaacggcguccugcagaccuucaugcggauggccuggggcggguccuacaucgcccuggacagcggcaagggguccugggacugcaucaugaccagcuaccaguaccucaucauccagaacacgaccugggaggaccacugccaguucucccgccccagccccaucggcuaccuggggcugcucagccagcggacccgcgacaucuacaucucccggcgccggcgcggcaccuucacguggacccugagcgacuccgagggcaacgagacccccgggggcuacugccugacccgguggaugcucaucgaggccgagcugaagugcuucgggaacacggccguggcgaagugcaacgagaagcacgacgaggaguucugcgacaugcugcgccucuucgacuucugcaagcaggccauccggcgccugaaggccccggcccagaugagcauccagcugaucaacaaggccgugaacgcgcucaucaacgaccagcugaucaugaagaaccaccuccgggacaucaugggcauccccuacugcaacuacuccaaguacugcuaccugaaccacaccgucaccgggaagaccagccugccccgcugcugccugguguccaacggcagcuaccucaacgagacgcacuucuccgacgacaucgagcagcaggccgacaacaugaucaccgagcugcugcagaaggaguacaucgaccggcagggcaagaccccgcucgggcugguggaccuguucgucuucagcaccuccuucuaccugaucagcaucuuccuccaccuggugaagauccccacgcaccgccacgugaucggcaagcccugccccaagccgcaccggcugaaccacauggggaucugcuccugcggccucuacaagcaccccgggguccccgugaaguggaagcgcugaggacuagucccuguucccagagcccacuuuuuuuucuuuuuuugaaauaaaauagccugucuuucagaucucaaaggcucuuuucagagccaccaaaaaaaaaaaaaaaaaaaaaaaaaaaaaaaaaaaaaaaaaaaaaaaaaaaaaaaaaaaaaaaaaaaaaaaaaaaaaaaaaaaaaaaaaaaaaaaaaaaaa

SEQ ID NO: 27061 - RNA, 1764 nt, Artificial Sequence
  mRNA product Design a-2 (hSL-A100) comprising derived and/or modified sequence from LASV(LASV1000-NIG-2009;Clade II)__AIT17782__GPCmut4 (opt1)
aggagaguccgcucagccagguugcagaagcggcuuagcguguguccuaaucuucucucugcguguagguaggccugugccgcaaacaagcuuaccaugggccagaucaucaccuucuuccaggaggugccccacgucaucgaggaggugaugaacaucgugcugaucgcccucagccugcuggccauccucaaggggaucuacaacgucgcgaccugcggccuguucgggcugguguccuuccuccugcugugcggccgcagcugcuccacgaccuacaaggggguguacgagcuccagacccuggagcuggacauggccagccucaacaugugcaugccgcuguccugcaccaagaacaacagccaccacuacaucauggucggcaacgagacgggccuggagcucacccugaccaacaccuccaucaucaaccacaaguucugcaaccugagcgacgcccacaagaagaaccucuacgaccacgcccugauguccaucaucagcacguuccaccuguccauccccaacuucaaccaguacgaggccaugagcugcgacuucaacgggggcaagaucuccgugcaguacaaccucagccacaccuacgcgguggacgccgccaaccacugcgggaccaucgccaacggcguccugcagaccuucaugcggauggcguggggcggguccuacaucgcccuggacagcggcaagggguccugggacugcaucaugacgagcuaccaguaccucaucauccagaacaccaccugggaggaccacugccaguucucccgccccagccccaucggcuaccuggggcugcucagccagcggacccgcgacaucuacaucucccggcgccggcgcggcacguucaccuggacccugagcgacuccgagggcaacgagacccccgggggcuacugccugacgcgguggaugcucaucgaggccgagcugaagugcuucgggaacaccgccguggccaagugcaacgagaagcacgacgaggaguucugcgacaugcugcgccucuucgacuucugcaagcaggcgaucaagcggcugaagaccccggcccagaugagcauccagcugaucaacaaggccgugaacgcccucaucaacgaccagcugaucaugaagaaccaccuccgcgacaucaugggcauccccuacugcaacuacuccaaguacugcuaccugaaccacaccgucacggggaagaccagccugccccggugcugccugguguccaacggcagcuaccucaacgagacccacuucuccgacgacaucgagcagcaggccgacaacaugaucaccgagcugcugcagaaggaguacaucgaccgccagggcaagacgccgcucgggcugguggaccuguucgucuucagcaccuccuucuaccugaucagcaucuuccuccaccuggugaagauccccacccaccggcacguggucggcaagcccugccccaagccgcaccgccugaaccacauggggaucugcuccugcggccucuacaagcaccccggggugcccgugaaguggaagcggugaggacuagucccuguucccagagcccacuuuuuuuucuuuuuuugaaauaaaauagccugucuuucagaucucaaaggcucuuuucagagccaccaaaaaaaaaaaaaaaaaaaaaaaaaaaaaaaaaaaaaaaaaaaaaaaaaaaaaaaaaaaaaaaaaaaaaaaaaaaaaaaaaaaaaaaaaaaaaaaaaaaaa

SEQ ID NO: 27062 - RNA, 1764 nt, Artificial Sequence
  mRNA product Design a-2 (hSL-A100) comprising derived and/or modified sequence from LASV(LASV221-NIG-2010;Clade II)__AIT17624__GPCmut4 (opt1)
aggagaguccgcucagccagguugcagaagcggcuuagcguguguccuaaucuucucucugcguguagguaggccugugccgcaaacaagcuuaccaugggccagaucaucaccuucuuccaggaggugccccacgucaucgaggaggugaugaacaucgugcugaucgcccucagccugcuggccauccucaaggggaucuacaacgucgcgaccugcggccuguucgggcugguguccuuccuccugcugugcggccgcagcugcuccacgaccuacaaggggguguacgagcuccagacccuggagcuggacauggccagccucaacaugugcaugccgcuguccugcaccaagaacaacagccaccacuacaucauggucggcaacgagacgggccuggagcucacccugaccaacaccuccaucaucaaccacaaguucugcaaccugagcgacgcccacaagaagaaccucuacgaccacgcccugauguccaucaucagcacguuccaccuguccauccccaacuucaaccaguacgaggccaugagcugcgacuucaacgggggcaagaucuccgugcaguacaaccucagccacaccuacgcgaucgacgccgccaaccacugcgggaccaucgccaacggcgugcugcagaccuucaugcggauggcguggggcggguccuacaucgcccuggacagcggcaagggguccugggacugcaucaugacgagcuaccaguaccucaucauccagaacaccaccugggaggaccacugccaguucucccgccccagccccaucggcuaccuggggcugcucagccagcggacccgcgacaucuacaucucccggcgccggcgcggcacguucaccuggacccugagcgacuccgagggcaacgagacccccgggggcuacugccugacgcgguggaugcucaucgaggccgagcugaagugcuucgggaacaccgccgucgccaagugcaacgagaagcacgacgaggaguucugcgacaugcugcgccucuucgacuucugcaagcaggcgauccggcgccugaagaccccggcccagaugagcauccagcugaucaacaaggccgugaacgcccucaucaacgaccagcugaucaugaagaaccaccuccgggacaucaugggcauccccuacugcaacuacuccaaguacugcuaccugaaccacaccgugacggggaagaccagccugccccgcugcugccuggucuccaacggcagcuaccucaacgagacccacuucuccgacgacaucgagcagcaggccgacaacaugaucaccgagaugcugcagaaggaguacauggaccggcagggcaagacgccgcuggggcucguggaccuguucguguucagcaccuccuucuaccugaucagcaucuuccugcaccucgucaagauccccacccaccgccacgugaucggcaagcccugccccaagccgcaccggcugaaccacauggggaucugcuccugcggccuguacaagcaccccggggugcccgucaaguggaagcgcugaggacuagucccuguucccagagcccacuuuuuuuucuuuuuuugaaauaaaauagccugucuuucagaucucaaaggcucuuuucagagccaccaaaaaaaaaaaaaaaaaaaaaaaaaaaaaaaaaaaaaaaaaaaaaaaaaaaaaaaaaaaaaaaaaaaaaaaaaaaaaaaaaaaaaaaaaaaaaaaaaaaaa

SEQ ID NO: 27063 - RNA, 1764 nt, Artificial Sequence
  mRNA product Design a-2 (hSL-A100) comprising derived and/or modified sequence from LASV(LASV237-NIG-2010;Clade II)__AIT17638__GPCmut4 (opt1)
aggagaguccgcucagccagguugcagaagcggcuuagcguguguccuaaucuucucucugcguguagguaggccugugccgcaaacaagcuuaccaugggccagaucaucaccuucuuccaggaggugccccacgucaucgaggaggugaugaacaucgugcugaucgcccucagccugcuggccauccucaaggggaucuacaacgucgcgaccugcggccuguucgggcugguguccuuccuccugcugugcggccgcagcugcuccacgaccuacaaggggguguacgagcuccagacccuggagcuggacauggccagccucaacaugugcaugccgcuguccugcaccaagaacaacagccaccacuacaucauggucggcaacgagacgggccuggagcucacccugaccaacaccuccaucaucaaccacaaguucugcaaccugagcgacgcccacaagaaggaccucuacgaccacgcccugauguccaucaucagcacguuccaccuguccauccccaacuucaaccaguacgaggccaugagcugcgacuucaacgggggcaagaucuccgugcaguacaaccucagccacaccuacgcgguggacgccgccaaccacugcgggaccaucgccaacggcguccugcagaccuucaugcggauggcguggggcggguccuacaucgcccuggacagcggcaagggguccugggacugcaucaugacgagcuaccaguaccucaucauccagaacaccaccugggaggaccacugccaguucucccgccccagccccaucggcuaccuggggcugcucagccagcggacccgcgacaucuacaucucccggcgccggcgcggcacguucaccuggacccugagcgacuccgagggcaacgagacccccgggggcuacugccugacgcgguggaugcucaucgaggccgagcugaagugcuucgggaacaccgccguggccaagugcaacgagaagcacgacgaggaguucugcgacaugcugcgccucuucgacuucugcaagcaggcgauccggcgccugaagaccccggcccagaugagcauccagcugaucaacaaggccgugaacgcccucaucaacgaccagcugaucaugaagaaccaccuccgggacaucaugggcauccccuacugcaacuacuccaaguacugcuaccugaaccacaccgucacggggaagaccagccugccccgcugcugccugguguccaacggcagcuaccucaacgagacccacuucuccgacgacaucgagcagcaggccgacaacaugaucaccgagcugcugcagaaggaguacauggaccggcagggcaagacgccgcucgggcugguggaccuguucgucuucagcaccuccuucuaccugaucagcaucuuccuccaccugaucaagauccccacccaccgccacaucaccggcaagcccugccccaagccgcaccggcugaaccacauggggaucugcuccugcggccucuacaagcaccccggggugcccgugaaguggaagcgcugaggacuagucccuguucccagagcccacuuuuuuuucuuuuuuugaaauaaaauagccugucuuucagaucucaaaggcucuuuucagagccaccaaaaaaaaaaaaaaaaaaaaaaaaaaaaaaaaaaaaaaaaaaaaaaaaaaaaaaaaaaaaaaaaaaaaaaaaaaaaaaaaaaaaaaaaaaaaaaaaaaaaa

SEQ ID NO: 27064 - RNA, 1764 nt, Artificial Sequence
  mRNA product Design a-2 (hSL-A100) comprising derived and/or modified sequence from LASV(LASV253-NIG-2011;Clade II)__AIT17670__GPCmut4 (opt1)
aggagaguccgcucagccagguugcagaagcggcuuagcguguguccuaaucuucucucugcguguagguaggccugugccgcaaacaagcuuaccaugggccagaucaucaccuucuuccaggaggugccccacgucaucgaggaggugaugaacaucgugcugaucgcccucagccugcuggccauccucaaggggaucuacaacgucgcgaccugcggccuguucgggcugguguccuuccuccugcugugcggccgcagcugcuccacgaccuacaaggggguguacgagcuccagacccuggagcuggacauggccagccucaacaugugcaugccgcuguccugcaccaagaacaacagccaccacuacaucauggucggcaacgagacgggccuggagcucacccugaccaacaccuccaucaucaaccacaaguucugcaaccugagcgacgcccacaagaagaaccucuacgaccacgcccugauguccaucaucagcacguuccaccuguccauccccaacuucaaccaguacgaggccaugagcugcgacuucaacgggggcaagaucuccgugcaguacaaccucagccacaccuacgcgguggacgccgccaaccacugcgggaccaucgccaacggcguccugcagaccuucaugcggauggcguggggcggguccuacaucgcccuggacagcggcaagggguccugggacugcaucaugacgagcuaccaguaccucaucauccagaacaccaccugggaggaccacugccaguucucccgccccagccccaucggcuaccuggggcugcucagccagcggacccgcgacaucuacaucucccggcgccggcgcggcacguucaccuggacccugagcgacuccgagggcaacgagacccccgggggcuacugccugacgcgguggaugcucaucgaggccgagcugaagugcuucgggaacaccgccguggccaagugcaacgagaagcacgacgaggaguucugcgacaugcugcgccucuucgacuucugcaagcaggcgauccggcgccugaaggccccggcccagaugagcauccagcugaucaacaaggccgugaacgcccucaucaacgaccagcugaucaugaagaaccaccuccgggacaucaugggcauccccuacugcaacuacuccaaguacugcuaccugaaccacaccgucaccgggcgcacgagccugccccggugcugccugguguccaacggcagcuaccucaacgagacccacuucuccgacgacaucgagcagcaggcggacaacaugaucaccgagcugcugcagaaggaguacaucgaccgccagggcaagaccccgcucgggcugguggaccuguucgucuucagcacguccuucuaccugaucagcaucuuccuccaccuggugaagauccccacccaccggcacaucaucggcaagcccugccccaagccgcaccgccugaaccacauggggaucugcuccugcggccucuacaagcaccccggggugcccgucaaguggaagcggugaggacuagucccuguucccagagcccacuuuuuuuucuuuuuuugaaauaaaauagccugucuuucagaucucaaaggcucuuuucagagccaccaaaaaaaaaaaaaaaaaaaaaaaaaaaaaaaaaaaaaaaaaaaaaaaaaaaaaaaaaaaaaaaaaaaaaaaaaaaaaaaaaaaaaaaaaaaaaaaaaaaaa

SEQ ID NO: 27065 - RNA, 1764 nt, Artificial Sequence
  mRNA product Design a-2 (hSL-A100) comprising derived and/or modified sequence from LASV(LASV254-NIG-2011;Clade II)__AIT17674__GPCmut4 (opt1)
aggagaguccgcucagccagguugcagaagcggcuuagcguguguccuaaucuucucucugcguguagguaggccugugccgcaaacaagcuuaccaugggccagaucaucaccuucuuccaggaggugccccacgucaucgaggaggugaugaacaucgugcugaucgcccucagccugcuggccauccucaaggggaucuacaacgucgcgaccugcggccuguucgggcugguguccuuccuccugcugugcggccgcagcugcuccacgaccuacaaggggguguacgagcuccagacccuggagcuggacaugaccaaccucaacaugugcaugccgcugagcugcacgaagaacaacucccaccacuacaucauggucggcaacgagaccggccuggagcucacccugaccaacacgagcaucaucaaccacaaguucugcaaccuguccgacgcccacaagaagaaccucuacaaccacgcccugaugagcaucaucuccaccuuccaccugagcauccccaacuucaaccaguacgaggccauguccugcgacuucaacgggggcaagaucagcgugcaguacaaccucucccacagcuacgccguggacgcggccaaccacugcgggaccaucgccaacggcguccugcagaccuucaugcggauggccuggggcggguccuacaucgcgcuggacagcggcaaggggaacugggacugcaucaugacguccuaccaguaccucaucauccagaacaccaccugggaggaccacugccaguucagccgccccucccccaucggcuaccuggggcugcucagccagcggacccgcgacaucuacaucagccggcgccggcgcggcacguucaccuggacccuguccgacagcgagggcaacgagacccccgggggcuacugccugacgcgguggaugcucaucgaggccgagcugaagugcuucgggaacaccgccguggccaagugcaacgagaagcacgacgaggaguucugcgacaugcugcgccucuucgacuucugcaagcaggccauccggcgccugaagaccccggcgcaggccaacauccagcugaucaacaaggccgugaacgcccucaucaacgaccagcugaucaugaagaaccaccuccgggacaucaugggcauccccuacugcaacuacuccaaguacugcuaccugaaccacaccgucacggggaagaccagccugccccgcugcugccugguguccaacggcagcuaccucaacgagacccacuucuccgacgacaucgagcagcaggccgacaacaugaucaccgagcugcugcagaaggaguacauggaccggcagggcaagacgccgcucgggcugguggaccuguucgucuucagcaccuccuucuaccugaucagcaucuuccuccaccuggugaagauccccacccaccgccacgugaucggcaagcccugccccaagccgcaccggcugaaccacauggggaucugcuccugcggccucuacaagcaccccgggguccccgugaaguggaagcgcugaggacuagucccuguucccagagcccacuuuuuuuucuuuuuuugaaauaaaauagccugucuuucagaucucaaaggcucuuuucagagccaccaaaaaaaaaaaaaaaaaaaaaaaaaaaaaaaaaaaaaaaaaaaaaaaaaaaaaaaaaaaaaaaaaaaaaaaaaaaaaaaaaaaaaaaaaaaaaaaaaaaaa

SEQ ID NO: 27066 - RNA, 1764 nt, Artificial Sequence
  mRNA product Design a-2 (hSL-A100) comprising derived and/or modified sequence from LASV(Nig08-A19;Clade III)__ADU56618__GPCmut4 (opt1)
aggagaguccgcucagccagguugcagaagcggcuuagcguguguccuaaucuucucucugcguguagguaggccugugccgcaaacaagcuuaccaugggccagaucgugaccuucuuccaggaggucccccacgugaucgaggaggugaugaacaucguccugaucgcccucagcauccuggccauccugaaggggcucuacaacaucgcgaccugcggccugaucgggcuggugacguuccuccugcuguccggccgcagcugcuccaugaccuacaaggggguguacgagcuccagacccuggagcugaacaugaacacccucaacaugugcaugccgcugagcugcacgaagaacaacucccaccacuacaucauggucggcaacgagaccggccuggagcucacccugaccaacacgagccugcuccaccacaaguucugcaaccuguccgacgcccacaagaagaaccuguacgaccacacccucaugagcaucaucuccaccuuccaccugagcauccccaacuucaaccaguacgaggccauguccugcgacuucaacgggggcaagaucaccgugcaguacaaccugagccacuccuacgccaucgacgccgcgaaccacugcgggacgguggccaacggcguccuccagaccuucaugcggauggccuggggcgggagcuacaucgcccuggacuccggccgcgggaagugggacugcaucaugaccagcuaccaguaccugaucauccagaacaccacgugggaggaccacugccaguucucccggcccagccccaucggcuaccucgggcugcugucccagcgcacccgggacaucuacaucagccgccggcgccggggcaccuucaccuggacgcucagcgacuccgagggcaacgagacccccgggggcuacugccugacccgcuggaugcugaucgaggcggagcucaagugcuucgggaacaccgccguggccaagugcaacgagaagcacgacgaggaguucugcgacaugcugcggcuguucgacuucugcaagcaggccauccgccggcucaaggccccggcgcagaugagcauccagcugaucaacaaggccgugaacgcccugaucaacgaccagcucaucaugaagaaccaccuccgcgacaucaugggcauccccuacugcaacuacuccaaguacugcuaccugaaccacacgagcaccgggcggaccucccugccccgcugcugccuggucagcaacggcuccuaccugaacgagacccacuucagcgacgacaucgagcagcaggccgacaacaugaucacggagaugcuccagaaggaguaccuggaccggcagggcaagaccccgcuggggcugguggaccucuucguguucuccaccagcuucuaccugaucuccaucuuccugcaccucgucaagauccccacccaccgccacaucgugggcaagcccugccccaagccgcaccggcugaaccacauggggaucugcagcugcggccuguacaagcagcccggggugcccguccgcuggaagcggugaggacuagucccuguucccagagcccacuuuuuuuucuuuuuuugaaauaaaauagccugucuuucagaucucaaaggcucuuuucagagccaccaaaaaaaaaaaaaaaaaaaaaaaaaaaaaaaaaaaaaaaaaaaaaaaaaaaaaaaaaaaaaaaaaaaaaaaaaaaaaaaaaaaaaaaaaaaaaaaaaaaaa

SEQ ID NO: 27067 - RNA, 1767 nt, Artificial Sequence
  mRNA product Design a-2 (hSL-A100) comprising derived and/or modified sequence from LASV(G1180-SLE-2010;Clade IV)__AIT17168__GPCmut4 (opt1)
aggagaguccgcucagccagguugcagaagcggcuuagcguguguccuaaucuucucucugcguguagguaggccugugccgcaaacaagcuuaccaugggccagaucgugaccuucuuccaggaggucccccacgugaucgaggaggugaugaacaucguccugaucgcccucagcauccuggccgugcugaaggggcucuacaacuucgcgaccugcggccugguggggcugcucacguuccugcugcucugcggccgcuccugcaccgccagccgguacaagggggucuacgagcugcagacccuggagcucaacauggagacccugaacaugugcaugccgcuguccugcacgaagaacaacagccaccacuacaucauggugggcaacgagaccggccucgagcugacccugaccaacacguccaucaucaaccacaaguucugcaaccucagcgacgcccacaagaagaaccuguacgaccacgcccugauguccaucaucagcaccuuccaccucuccauccccaacuucaaccaguacgaggccaugagcugcgacuucaacgggggcaagaucuccgugcaguacaaccugagccacuccuacgcgggggacgccgccaaccacugcggcaccgucgccaacggggugcugcagaccuucaugcgcauggcguggggcggcagcuacaucgcccucgacuccgggcacggcagcugggacugcaucaugacguccuaccaguaccugaucauccagaacaccaccugggaggaccacugccaguucagccggcccucccccaucggguaccugggccuccugagccagcgcacccgggacaucuacaucagccgccggcgccggggcacguucaccuggacccuguccgacagcgaggggaaggacaccccgggcggguacugccucacgcgcuggaugcugaucgaggccgagcugaagugcuucggcaacaccgccguggccaagugcaacgagaagcacgacgaggaguucugcgacaugcuccggcuguucgacuucugcaagcaggcgauccagcgccugaaggcccccgcccagauguccauccagcucaucaacaaggccgucaacgcccugaucaacgaccagcugaucaugaagaaccaccuccgggacaucauggggauccccuacugcaacuacagcaaguacugcuaccugaaccacaccaccacgggcaagaccucccugcccaagugcugccucgugagcaacggcuccuaccugaacgagacccacuucagcgacgacaucgagcagcaggcggacaacaugaucaccgagaugcugcagaaggaguacauggagcgccaggggaagacgccgcucggccugguggaccuguucgucuucuccaccagcuucuaccugaucuccaucuuccuccaccuggugaagauccccacccaccggcacaucgugggcaagagcugccccaagccccaccgccugaaccacauggggaucugcuccugcgggcucuacaagcagccgggcguccccgugaaguggaagcggugaggacuagucccuguucccagagcccacuuuuuuuucuuuuuuugaaauaaaauagccugucuuucagaucucaaaggcucuuuucagagccaccaaaaaaaaaaaaaaaaaaaaaaaaaaaaaaaaaaaaaaaaaaaaaaaaaaaaaaaaaaaaaaaaaaaaaaaaaaaaaaaaaaaaaaaaaaaaaaaaaaaaa

SEQ ID NO: 27068 - RNA, 1767 nt, Artificial Sequence
  mRNA product Design a-2 (hSL-A100) comprising derived and/or modified sequence from LASV(G1442-SLE-2011;Clade IV)__AIT17180__GPCmut4 (opt1)
aggagaguccgcucagccagguugcagaagcggcuuagcguguguccuaaucuucucucugcguguagguaggccugugccgcaaacaagcuuaccaugggccagaucgugaccuucuuccaggaggucccccacgugaucgaggaggugaugaacaucguccugaucgcccucagcauccuggccgugcugaaggggcucuacaacguggcgaccugcggccugaucgggcuggucacguuccuccugcugugcggccgcuccugcaccaccacccucuacaaggggguguacgagcugcagacgcuggagcucaacauggagacccugaacaugugcaugccgcugagcugcaccaagaacaacucccaccacuacauccgggugggcaacgagaccggccucgagcugacgcugaccaacaccagcaucaucaaccacaaguucugcaaccucuccgacgcccacaagaagaaccuguacgaccacgcccugaugagcaucaucuccaccuuccaccucagcauccccaacuucaaccaguacgaggccauguccugcgacuucaacgggggcaagaucagcguccaguacaaccugucccacagcuacgccggggacgcggccaaccacugcggcacgguggccaacggggugcugcagaccuucaugcgcauggccuggggcggcuccuacaucgcgcucgacagcgggcggggcaacugggacugcaucaugaccuccuaccaguaccugaucauccagaacaccacgugggacgaccacugccaguucagccgccccucccccaucggguaccugggccuccugagccagcggacccgcgacgucuacaucucccggcgccggcgcggcaccuucaccuggacgcugagcgacagcgaggggaaggacaccccgggcggguacugccucacccgguggaugcugaucgaggccgagcugaagugcuucggcaacaccgccguggccaagugcaacgagaagcacgacgaggaguucugcgacaugcuccgccuguucgacuucugcaagcaggccauccagcggcugaaggcgcccgcccagauguccauccagcucaucaacaaggccgugaacgcccugaucaacgaccagcugaucaugaagaaccaccuccgcgacaucauggggauccccuacugcaacuacagcaaguacugcuaccugaacaacacggccaccggcaagaccucccugcccaagugcugccucaucagcaacggcuccuaccugaacgagacccacuucagcgacgacaucgagcaggaggcggacaacaugaucacggagaugcugcagaaggaguacauggagcggcaggggaagaccccgcucggccuggucgaccuguucguguucuccaccagcuucuaccugaucuccaucuuccuccaccuggugaagauccccacccaccgccacaucgucggcaagagcugccccaagccccaccggcugaaccacauggggaucugcuccugcgggcucuacaagcagccgggcgugcccgugcgcuggaagcggugaggacuagucccuguucccagagcccacuuuuuuuucuuuuuuugaaauaaaauagccugucuuucagaucucaaaggcucuuuucagagccaccaaaaaaaaaaaaaaaaaaaaaaaaaaaaaaaaaaaaaaaaaaaaaaaaaaaaaaaaaaaaaaaaaaaaaaaaaaaaaaaaaaaaaaaaaaaaaaaaaaaaa

SEQ ID NO: 27069 - RNA, 1767 nt, Artificial Sequence
  mRNA product Design a-2 (hSL-A100) comprising derived and/or modified sequence from LASV(G3010-SLE-2013;Clade IV)__AIT17344__GPCmut4 (opt1)
aggagaguccgcucagccagguugcagaagcggcuuagcguguguccuaaucuucucucugcguguagguaggccugugccgcaaacaagcuuaccaugggccagaucgugaccuucuuccaggaggucccccacgugaucgaggaggugaugaacaucguccugaucgcccucagcauccuggccgugcugaaggggcucuacaacuucgcgaccugcggccugguggggcuggucacguuccuccugcugugcggccgcuccugcaccaccagccucuacaaggggguguacgagcugcagacccuggagcucaacauggagacgcugaacaugugcaugccgcuguccugcaccaagaacaacagccaccacuacaucauggugggcaacgagaccggccucgagcugacccugacgaacaccuccaucaucaaccacaaguucugcaaccucagcgacgcccacaagaagaaccuguacaaccacgcccugauguccaucaucagcaccuuccaccucuccauccccaacuucaaccaguacgaggccaugagcugcgacuucaacgggggcaagaucuccguccaguacaaccugagccacuccuacgccggggacgcggccagccacugcggcaccguggccaacggggugcugcagacguucaugcggauggccuggggcggcuccuacaucgcgcucgacagcggguacggcaagugggacugcaucaugaccuccuaccaguaccugaucauccagaacaccaccugggaggaccacugccaguucagccgccccucccccaucggguaccugggccuccugagccagcggacgcgcgacaucuacaucagccggcgccggcgcggcaccuucaccuggacccuguccgacagcgaggggaaggacacgccgggcggguacugccucacccgguggaugcugaucgaggccgagcugaagugcuucggcaacaccgccgucgccaagugcaacgagaagcacgacgaggaguucugcgacaugcuccgccuguucgacuucugcaagcaggccauccagcggcugaagacccccgcgcagauguccauccagcucaucaacaaggccgugaacgcccugaucaacgaccagcugaucaugaagaaccaccuccgcgacaucauggggauccccuacugcaacuacagcaaguacugcuaccugaaccacacgaccaccggcaagaccucccugcccaagugcugccucgugagcaacggcuccuaccugaacgagacgcacuucagcgacgacaucgagcagcaggccgacaacaugaucaccgagaugcugcagaaggaguacauggagcggcaggggaagaccccgcucggccuggucgaccuguucguguucuccaccagcuucuaccugaucuccaucuuccuccaccuggugaagauccccacgcaccgccacaucgucggcaagagcugccccaagccccaccggcugaaccacauggggaucugcuccugcgggcucuacaagcagccgggcgugcccgugcgcuggaagcggugaggacuagucccuguucccagagcccacuuuuuuuucuuuuuuugaaauaaaauagccugucuuucagaucucaaaggcucuuuucagagccaccaaaaaaaaaaaaaaaaaaaaaaaaaaaaaaaaaaaaaaaaaaaaaaaaaaaaaaaaaaaaaaaaaaaaaaaaaaaaaaaaaaaaaaaaaaaaaaaaaaaaa

SEQ ID NO: 27070 - RNA, 1767 nt, Artificial Sequence
  mRNA product Design a-2 (hSL-A100) comprising derived and/or modified sequence from LASV(G502-SLE-2009;Clade IV)__AIT17126__GPCmut4 (opt1)
aggagaguccgcucagccagguugcagaagcggcuuagcguguguccuaaucuucucucugcguguagguaggccugugccgcaaacaagcuuaccaugggccagaucgugaccuucuuccaggaggucccccacgugaucgaggaggugaugaacaucguccugaucgcccucagcauccuggccgugcugaaggggcucuacaacuucgcgaccugcggccugguggggcugcucacguuccugcugcucugcggccgcuccugcaccaccgggcuguacaagggcgucuacgagcugcagacccucgagcugaacauggagacgcugaacaugugcaugccgcucagcugcaccaagaacaacucccaccacuacaucauggugggcaacgagaccgggcuggagcugacccucacgaacaccagcaucaucaaccacaaguucugcaaccuguccgacgcccacaagaagaaccuguacgaccacgcccucaugagcaucaucuccaccuuccaccugagcauccccaacuucaaccaguacgaggccauguccugcgacuucaacggcgggaagaucagcgugcaguacaaccugucccacagcuacgccggcgacgcggccgaccacugcgggaccgucgccaacggcgugcuccagacguucaugcggauggccuggggcggguccuacaucgcgcuggacagcggccgcgggcggugggacugcaucaugaccuccuaccaguaccugaucauccagaacaccaccugggaggaccacugccaguucagccgccccucccccaucggcuaccucggccugcugagccagcggacgcgcgacaucuacaucucccggcgccggcgcgggaccuucaccuggacccucagcgacagcgagggcaaggacacgcccgggggcuacugccugacccgguggaugcugaucgaggccgagcucaagugcuucgggaacaccgccguggccaagugcaacgagaagcacgacgaggaguucugcgacaugcugcgccuguucgacuucugcaagcaggccauccagcggcucaaggcgccggcccagauguccauccagcugaucaacaaggccgucaacgcccugaucaacgaccagcucgugaugaagaaccaccuccgcgacaucaugggcauccccuacugcaacuacagccgguacugcuaccugaaccacaccacgaccggccgcaccucccugcccaagugcugccuggugagcaacggguccuaccugaacgagacccacuucagcgacgacaucgagcagcaggccgacaacaugaucacggagaugcuccagaaggaguacauggagcggcagggcaagaccccgcuggggcuggucgaccuguucguguucuccaccagcuucuaccucaucuccaucuuccugcaccuggugaagauccccacccaccgccacaucgucggcaagagcugccccaagccccaccggcucaaccacauggggaucugcuccugcggccuguacaagcagccgggcgugcccgugaaguggaagcgcugaggacuagucccuguucccagagcccacuuuuuuuucuuuuuuugaaauaaaauagccugucuuucagaucucaaaggcucuuuucagagccaccaaaaaaaaaaaaaaaaaaaaaaaaaaaaaaaaaaaaaaaaaaaaaaaaaaaaaaaaaaaaaaaaaaaaaaaaaaaaaaaaaaaaaaaaaaaaaaaaaaaaa

SEQ ID NO: 27071 - RNA, 1767 nt, Artificial Sequence
  mRNA product Design a-2 (hSL-A100) comprising derived and/or modified sequence from LASV(G733-SLE-2010;Clade IV)__AIT17154__GPCmut4 (opt1)
aggagaguccgcucagccagguugcagaagcggcuuagcguguguccuaaucuucucucugcguguagguaggccugugccgcaaacaagcuuaccaugggccagaucgugaccuucuuccaggaggucccccacgugaucgaggaggugaugaacaucguccugaucgcccucagcauccuggccgugcugaaggggcucuacaacuucgcgaccugcggcaucguggggcuggucuccuuccugcuccugugcggccgcagcugcacgaccucccuguacaaggggguguacgagcuccagacccuggagcugaacauggagacccucaacaugugcaugccgcugagcugcacgaagaacaacucccaccacuacaucauggugggcaacgagaccggccuggagcucacccugaccaacacgagcaucaucaaccacaaguucugcaaccuguccgacgcccacaagaagaaccucuacgaccacgcccugaugagcaucaucuccaccuuccaccugagcauccccaacuucaaccaguacgaggccauguccugcgacuucaacgggggcaagaucagcguccaguacaaccucucccacagcuacgccggggacgcggccaaccacugcggcaccaucgccaacggggugcugcagaccuucaugcggauggccuggggcggcuccuacaucgcgcuggacagcgggcgcgaccggugggacugcaucaugacguccuaccaguaccucaucauccagaacaccaccugggaggaccacugccaguucagccgccccucccccaucggcuaccuggggcugcucagccagcggacccgcgacaucuacaucagccggcgccggcgcggcacguucaccuggacccuguccgacagcgagggcaaggacacccccgggggcuacugccugacgcgguggaugcucaucgaggccgagcugaagugcuucgggaacaccgccguggccaagugcaacgagaagcacgacgaggaguucugcgacaugcugcgccucuucgacuucugcaagcaggccauccagcggcugaaggcgccggcccagauguccauccagcugaucaacaaggccgucaacgcccucaucaacgaccagcugaucaugaagaaccaccuccgcgacaucaugggcauccccuacugcaacuacagcaaguacugcuaccugaaccacaccaccacggggaagaccucccugcccaagugcugccuggugagcaacggcuccuaccucaacgagacccacuucagcgacgacaucgagcagcaggccgacaacaugaucaccgagaugcugcagaaggaguacauggagcggcagggcaagacgccgcuggggcucguggaccuguucgucuucuccaccagcuucuaccugaucuccaucuuccugcaccucgugaagauccccacccaccgccacguggucggcaagagcugccccaagccccaccggcugaaccacauggggaucugcuccugcggccuguacgggcagccgggcgugcccgugaaguggaagcgcugaggacuagucccuguucccagagcccacuuuuuuuucuuuuuuugaaauaaaauagccugucuuucagaucucaaaggcucuuuucagagccaccaaaaaaaaaaaaaaaaaaaaaaaaaaaaaaaaaaaaaaaaaaaaaaaaaaaaaaaaaaaaaaaaaaaaaaaaaaaaaaaaaaaaaaaaaaaaaaaaaaaaa

SEQ ID NO: 27072 - RNA, 1767 nt, Artificial Sequence
  mRNA product Design a-2 (hSL-A100) comprising derived and/or modified sequence from MOPV/LASV reassortant(IGS-1;Clade IV)__AFY05576__GPCmut4 (opt1)
aggagaguccgcucagccagguugcagaagcggcuuagcguguguccuaaucuucucucugcguguagguaggccugugccgcaaacaagcuuaccaugggccagaucgugaccuucuuccaggaggucccccacgugaucgaggaggugaugaacaucguccugaucgcccucagcgugcuggccgugcugaaggggcucuacaacuucgcgaccugcggccuggucgggcuggugacguuccuccugcugugcggccgcuccugcaccaccagccucuacaaggggguguacgagcugcagacccuggagcucaacauggagacgcugaacaugugcaugccgcuguccugcaccaagaacaacagccaccacuacaucauggucggcaacgagaccggccucgagcugacccugacgaacaccuccaucaucaaccacaaguucugcaaccucagcgacgcccacaagaagaaccuguacgaccacgcccugauguccaucaucagcaccuuccaccucuccauccccaacuucaaccaguacgaggccaugagcugcgacuucaacgggggcaagaucuccgugcaguacaaccugagccacuccuacgccggggacgcggccaaccacugcggcaccguggccaacgggguccugcagacguucaugcggauggccuggggcggcagcuacaucgcgcucgacuccgggcgcggcaacugggacugcaucaugaccagcuaccaguaccugaucauccagaacaccaccugggaggaccacugccaguucucccggcccagccccaucggguaccugggccuccugucccagcgcacgcgggacaucuacaucagccgccggcgccggggcaccuucaccuggacccugagcgacuccgagggggaggacacgccgggcggguacugccucacccgcuggaugcugaucgaggccgagcugaagugcuucggcaacaccgccguggccaagugcaacgagaagcacgacgaggaguucugcgacaugcuccggcuguucgacuucugcaagcaggccauccagcgccugaaggcgcccgcccagaugagcauccagcucaucaacaaggccgugaacgcccugaucaacgaccagcugaucaugaagaaccaccuccgggacaucauggggauccccuacugcaacuacuccaaguacugcuaccugaaccacaccacgaccggccgcaccagccugcccaagugcugccucgucuccaacggcagcuaccugaacgagacccacuucuccgacgacaucgagcagcaggccgacaacaugaucacggagaugcugcagaaggaguacauggagcggcaggggaagaccccgcucggccugguggaccuguucguguucagcaccuccuucuaccugaucagcaucuuccuccaccuggucaagauccccacccaccgccacaucguggggaaguccugccccaagccccaccggcugaaccacaugggcaucugcagcugcgggcucuacaagcagccgggcgugcccgucaaguggaagcgcugaggacuagucccuguucccagagcccacuuuuuuuucuuuuuuugaaauaaaauagccugucuuucagaucucaaaggcucuuuucagagccaccaaaaaaaaaaaaaaaaaaaaaaaaaaaaaaaaaaaaaaaaaaaaaaaaaaaaaaaaaaaaaaaaaaaaaaaaaaaaaaaaaaaaaaaaaaaaaaaaaaaaa

SEQ ID NO: 27073 - RNA, 1767 nt, Artificial Sequence
  mRNA product Design a-2 (hSL-A100) comprising derived and/or modified sequence from LASV(LM765-SLE-2012;Clade IV)__AIT17814__GPCmut4 (opt1)
aggagaguccgcucagccagguugcagaagcggcuuagcguguguccuaaucuucucucugcguguagguaggccugugccgcaaacaagcuuaccaugggccagaucgugaccuucuuccaggaggucccccacgugaucgaggaggugaugaacaucguccugaucgcccucagcauccuggccgugcugaaggggcucuacaacuucgcgaccugcggccugguggggcuggucacguuccuccugcugugcggccgcuccugcaccaccagccucuacaaggggguguacgagcugcagacccuggagcucaacauggagacgcugaacaugugcaugccgcuguccugcaccaagaacaacagccaccacuacaucauggugggcaacgagaccggccucgagcugacccugacgaacaccuccaucaucgaccacaaguucugcaaccucagcgacgcccaccggaagaaccuguacgaccacgcccugauguccaucaucagcaccuuccaccucuccauccccaacuucaaccaguacgaggccaugagcugcgacuucaacgggggcaagaucuccguccaguacaaccugagccacuccuacgccaaggacgcggccgaccacugcgggaccguggccaacggcgugcugcagacguucaugcgcauggccuggggcgggagcuacaucgcgcucgacuccggccgggggcgcugggacugcaucaugaccagcuaccaguaccugaucauccagaacaccaccugggaggaccacugccaguucucccggcccagccccaucggcuaccuggggcuccugucccagcgcacgcgggacaucuacaucagccgccggcgccggggcaccuucaccuggacccugagcgacuccgagggcaaggacacgcccgggggcuacugccucacccgcuggaugcugaucgaggccgagcugaagugcuucgggaacaccgccgucgccaagugcaacgagaagcacgacgaggaguucugcgacaugcuccggcuguucgacuucugcaagcaggccauccagcgccugaaggcgccggcccagaugagcauccagcucaucaacaaggccgugaacgcccugaucaacgaccagcugaucaugaagaaccaccuccgggacaucaugggcauccccuacugcaacuacuccaaguacugcuaccugaaccacaccacgaccgggaagaccagccugcccaagugcugccucguguccaacggcagcuaccugaacgagacccacuucuccgacgacaucgagcagcaggccgacaacaugaucacggagaugcugcagaaggaguacauggagcgccagggcaagaccccgcucgggcuggucgaccuguucguguucagcaccuccuucuaccugaucagcaucuuccuccaccuggugaagauccccacccaccggcacaucgucggcaagcccugccccaagccgcaccgccugaaccacauggggaucugcuccugcggccucuacaagcagcccggggugcccgugaaguggaagcggugaggacuagucccuguucccagagcccacuuuuuuuucuuuuuuugaaauaaaauagccugucuuucagaucucaaaggcucuuuucagagccaccaaaaaaaaaaaaaaaaaaaaaaaaaaaaaaaaaaaaaaaaaaaaaaaaaaaaaaaaaaaaaaaaaaaaaaaaaaaaaaaaaaaaaaaaaaaaaaaaaaaaa

SEQ ID NO: 27074 - RNA, 1767 nt, Artificial Sequence
  mRNA product Design a-2 (hSL-A100) comprising derived and/or modified sequence from LASV(LM776-SLE-2012;Clade IV)__AIT17824__GPCmut4 (opt1)
aggagaguccgcucagccagguugcagaagcggcuuagcguguguccuaaucuucucucugcguguagguaggccugugccgcaaacaagcuuaccaugggccagaucgugaccuucuuccaggaggucccccacgugaucgaggaggugaugaacaucguccugaucgcccucagcauccuggccgugcugaaggggcucuacaacuucgcgaccugcggccugguggggcuggucacguuccuccugcugugcggccgcuccugcaccaccagcguguacaaggggguguacgagcuccagacccuggagcugaacauggagacgcucaacaugugcaugccgcuguccugcaccaagaacaacagccaccacuacaucauggucggcaacgagaccggccuggagcucacccugacgaacaccuccaucaucaaccacaaguucugcaaccugagcgacgcccacaagaagaaccucuacgaccacgcccugauguccaucaucagcaccuuccaccuguccauccccaacuucaaccaguacgaggccaugagcugcgacuucaacgggggcaagaucuccgugcaguacaaccucagccacuccuacgccggggacgcggccaaccacugcggcaccguggccaacgggguccugcagacguucaugcggauggccuggggcggcagcuacaucgcgcuggacuccgggcacggcaagugggacugcaucaugaccagcuaccaguaccucaucauccagaacaccaccugggaggaccacugccaguucucccgccccagccccaucggguaccugggccugcucucccagcggacgcgcgacaucuacaucagccggcgccggcgcggcaccuucaccuggacccugagcgacuccgaggggaaggacacgccgggcggguacugccugacccgguggaugcucaucgaggccgagcugaagugcuucggcaacaccgccguggccaagugcaacgagaagcacgacgaggaguucugcgacaugcugcgccucuucgacuucugcaagcaggccauccagcggcugaaggcgcccgcccagaugagcauccagcugaucaacaaggccgugaacgcccucaucaacgaccagcugaucaugaagaaccaccuccgcgacaucauggggauccccuacugcaacuacuccaaguacugcuaccugaaccacaccacgaccggcaagaccagccugcccaagugcugccuggucuccaacggcagcuaccucaacgagacccacuucuccgacgacaucgagcagcaggccgacaacaugaucacggagaugcugcagaaggaguacauggagcggcaggggaagaccccgcugggccucguggaccuguucguguucagcaccuccuucuaccugaucagcaucuuccugcaccucgucaagauccccacccaccgccacaucguggggaaguccugccccaagccccaccggcugaaccacaugggcaucugcagcugcgggcuguacaagcagccgggcgugcccguccgcuggaagcggugaggacuagucccuguucccagagcccacuuuuuuuucuuuuuuugaaauaaaauagccugucuuucagaucucaaaggcucuuuucagagccaccaaaaaaaaaaaaaaaaaaaaaaaaaaaaaaaaaaaaaaaaaaaaaaaaaaaaaaaaaaaaaaaaaaaaaaaaaaaaaaaaaaaaaaaaaaaaaaaaaaaaa

SEQ ID NO: 27075 - RNA, 1767 nt, Artificial Sequence
  mRNA product Design a-2 (hSL-A100) comprising derived and/or modified sequence from LASV(Mad39;Clade IV)__ANH09722__GPCmut4 (opt1)
aggagaguccgcucagccagguugcagaagcggcuuagcguguguccuaaucuucucucugcguguagguaggccugugccgcaaacaagcuuaccaugggccagaucgugaccuucuuccaggaggucccccacgugaucgaggaggugaugaacaucguccugaucgcccucagcauccuggccgugcugaaggggcucuacaacguggcgaccugcggccugaucgggcuggucacguuccuccugcugugcggccgcuccugcaccaccacccucuacaaggggguguacgagcugcaggcccuggagcucaacauggagacgcugaacaugugcaugccgcugagcugcaccaagaacaacucccaccacuacauccgggugggcaacgagaccggccucgagcugacccugacgaacaccagccucaucaaccacaaguucugcaaccuguccgacgcccacaagaagaaccuguacgaccacgcccucaugagcaucaucuccaccuuccaccugagcauccccaacuucaaccaguacgaggccauguccugcgacuucaacgacgggaagaucagcguccaguacaaccugucccacaccuacgcgggcgacacggccaaccacugcgggaccguggccaacggcgugcuccagaccuucaugcgcauggccuggggcgggagcuacaucgcgcuggacuccggccgcgggggcugggacugcaucaugaccagcuaccaguaccugaucauccagaacacgaccugggaggaccacugccaguucucccggcccagccccaucggguaccucggccugcugucccagcggacccgcgacaucuacaucagccggcgccggcgcggcaccuucacguggacccucuccgacagcgaggggaaggacaccccgggcggguacugccugacccgguggaugcugaucgaggccgagcucaagugcuucggcaacacggccgucgccaagugcaacgagaagcacgacgaggaguucugcgacaugcugcgccuguucgacuucugcaagcaggccauccagcggcucaaggcgcccgcccagaugagcauccagcugaucaacaaggccgugaacgcccugaucaacgaccagcucaucaugaagaaccaccuccgcgacaucauggggauccccuacugcaacuacuccaaguacugcuaccugaaccacaccgugaccggcaagaccagccugcccaagugcugccuggucuccaacggcagcuaccugaacgagacgcacuucuccgacgacaucgagcagcaggccgacaacaugaucaccgagaugcuccagaaggaguacauggagcggcaggggaagaccccgcugggccugguggaccuguucguguucagcaccuccuucuaccucaucagcaucuuccugcaccuggucaagauccccacgcaccgccacgugguggggaagcccugccccaagccgcaccggcucaaccacaugggcaucugcuccugcggguucuacaagcagcccggcguccccgugcgcuggaagcggugaggacuagucccuguucccagagcccacuuuuuuuucuuuuuuugaaauaaaauagccugucuuucagaucucaaaggcucuuuucagagccaccaaaaaaaaaaaaaaaaaaaaaaaaaaaaaaaaaaaaaaaaaaaaaaaaaaaaaaaaaaaaaaaaaaaaaaaaaaaaaaaaaaaaaaaaaaaaaaaaaaaaa

SEQ ID NO: 27076 - RNA, 1767 nt, Artificial Sequence
  mRNA product Design a-2 (hSL-A100) comprising derived and/or modified sequence from LASV(Z0947-SLE-2011;Clade IV)__AIT17840__GPCmut4 (opt1)
aggagaguccgcucagccagguugcagaagcggcuuagcguguguccuaaucuucucucugcguguagguaggccugugccgcaaacaagcuuaccaugggccagaucgugaccuucuuccaggaggucccccacgugaucgaggaggugaugaacaucguccugaucgcccucagcauccuggccgugcugaaggggcucuacaacuucgcgaccugcggccugguggggcuggucacguuccuccugcugugcggccgcuccugcaccaucagccucuacaaggggguguacgagcugcagacccuggagcucaacauggagacccugaacaugugcaugccgcuguccugcacgaagaacaacagccaccacuacaucauggugggcaacgagaccggccucgagcugacccugaccaacacguccaucaucaaccacaaguucugcaaccucagcgacgcccacaagaagaaccuguacgaccacgcccugauguccaucaucagcaccuuccaccucuccauccccaacuucaaccaguacgaggccaugagcugcgacuucaacgggggcaagaucuccguccaguacaaccugagccacuccuacgccggggacgcggccaaccacugcggcaccguggccaacggggugcugcagaccuucaugcggauggccuggggcggcagcuacaucgcgcucgacuccgggcgcgaccggugggacugcaucaugacgagcuaccaguaccugaucauccagaacaccaccugggaggaccacugccaguucucccgccccagccccaucggcuaccuggggcuccugucccagcggacccgcgacaucuacaucagccggcgccggcgcggcacguucaccuggacccugagcgacuccgagggcaaggacacccccgggggcuacugccucacgcgguggaugcugaucgaggccgagcugaagugcuucgggaacaccgccgucgccaagugcaacgagaagcacgacgaggaguucugcgacaugcuccgccuguucgacuucugcaagcaggccauccagcggcugaaggcgccggcccagaugagcauccagcucaucaacaaggccgugaacgcccugaucaacgaccagcugaucaugaagaaccaccuccgcgacaucaugggcauccccuacugcaacuacuccaaguacugcuaccugaaccacaccaccacggggaagaccagccugcccaagugcugccucguguccaacggcagcuaccugaacgagacccacuucuccgacgacaucgagcagcaggccgacaacaugaucaccgagaugcugcagaaggaguacauggagcggcagggcaagacgccgcucgggcuggucgaccuguucguguucagcaccuccuucuaccugaucagcaucuuccuccaccuggugaagauccccacccaccgccacaucgucggcaagcccugccccaagccgcaccggcugaaccacauggggaucugcuccugcggccucuacaagcagcccggggugcccgugaaguggaagcgcugaggacuagucccuguucccagagcccacuuuuuuuucuuuuuuugaaauaaaauagccugucuuucagaucucaaaggcucuuuucagagccaccaaaaaaaaaaaaaaaaaaaaaaaaaaaaaaaaaaaaaaaaaaaaaaaaaaaaaaaaaaaaaaaaaaaaaaaaaaaaaaaaaaaaaaaaaaaaaaaaaaaaa

SEQ ID NO: 27077 - RNA, 1767 nt, Artificial Sequence
  mRNA product Design a-2 (hSL-A100) comprising derived and/or modified sequence from LASV(Josiah;Clade IV)__NP_694870__GPCmut4 (opt4)
aggagaguccgcucagccagguugcagaagcggcuuagcguguguccuaaucuucucucugcguguagguaggccugugccgcaaacaagcuuaccaugggccagaucgugaccuucuuccaggaggugccccacgugaucgaggaggugaugaacaucgugcugaucgcccugagcgugcuggccgugcugaagggccuguacaacuucgccaccugcggccuggugggccuggugaccuuccugcugcugugcggcagaagcugcaccaccagccuguacaagggcguguacgagcugcagacccuggagcugaacauggagacccugaacaugugcaugccccugagcugcaccaagaacaacagccaccacuacaucauggugggcaacgagaccggccuggagcugacccugaccaacaccagcaucaucaaccacaaguucugcaaccugagcgacgcccacaagaagaaccuguacgaccacgcccugaugagcaucaucagcaccuuccaccugagcauccccaacuucaaccaguacgaggccaugagcugcgacuucaacggcggcaagaucagcgugcaguacaaccugagccacagcuacgccggcgacgccgccaaccacugcggcaccguggccaacggcgugcugcagaccuucaugagaauggccuggggcggcagcuacaucgcccuggacagcggcagaggcaacugggacugcaucaugaccagcuaccaguaccugaucauccagaacaccaccugggaggaccacugccaguucagcagacccagccccaucggcuaccugggccugcugagccagagaaccagagacaucuacaucagcagaagaagaagaggcaccuucaccuggacccugagcgacagcgagggcaaggacacccccggcggcuacugccugaccagauggaugcugaucgaggccgagcugaagugcuucggcaacaccgccguggccaagugcaacgagaagcacgacgaggaguucugcgacaugcugagacuguucgacuucugcaagcaggccauccagagacugaaggcccccgcccagaugagcauccagcugaucaacaaggccgugaacgcccugaucaacgaccagcugaucaugaagaaccaccugagagacaucaugggcauccccuacugcaacuacagcaaguacugcuaccugaaccacaccaccaccggcagaaccagccugcccaagugcugccuggugagcaacggcagcuaccugaacgagacccacuucagcgacgacaucgagcagcaggccgacaacaugaucaccgagaugcugcagaaggaguacauggagagacagggcaagaccccccugggccugguggaccuguucguguucagcaccagcuucuaccugaucagcaucuuccugcaccuggugaagauccccacccacagacacaucgugggcaagagcugccccaagccccacagacugaaccacaugggcaucugcagcugcggccuguacaagcagcccggcgugcccgugaaguggaagagaugaggacuagucccuguucccagagcccacuuuuuuuucuuuuuuugaaauaaaauagccugucuuucagaucucaaaggcucuuuucagagccaccaaaaaaaaaaaaaaaaaaaaaaaaaaaaaaaaaaaaaaaaaaaaaaaaaaaaaaaaaaaaaaaaaaaaaaaaaaaaaaaaaaaaaaaaaaaaaaaaaaaaa

SEQ ID NO: 27078 - RNA, 1764 nt, Artificial Sequence
  mRNA product Design a-2 (hSL-A100) comprising derived and/or modified sequence from LASV(LP;Clade I)__AAF86701__GPCmut4 (opt4)
aggagaguccgcucagccagguugcagaagcggcuuagcguguguccuaaucuucucucugcguguagguaggccugugccgcaaacaagcuuaccaugggccagaucaucaccuucuuccaggaggugccccacgugaucgaggaggugaugaacaucgugcugaucgcccugagccugcuggccauccugaagggccuguacaacaucgccaccugcggcaucaucggccugguggccuuccuguuccugugcggcaagagcugcagccugacccugaagggcggcuacgagcugcagacccuggagcugaacauggagacccugaacaugugcaugccccugagcugcaccaagaacagcagccaccacuacaucagagugggcaacgagaccggccuggagcugacccugaccaacaccagcaucaucaaccacaaguucugcaaccugagcgacgcccacaagaagaaccuguacgaccacgcccugaugagcaucaucagcaccuuccaccugagcauccccaacuucaaccaguacgaggccaugagcugcgacuucaacggcggcaagaucagcgugcaguacaaccugagccacagcuacgccggcgacgccgccgagcacugcggcaccguggccaacggcgugcugcagaccuucaugagaauggccuggggcggcagauacaucgcccuggacagcggcaagggcaacugggacugcaucaugaccagcuaccaguaccugaucauccagaacaccaccugggaggaccacugccaguucagcagacccagccccaucggcuaccugggccugcugagccagagaaccagagacaucuacaucagcagaagaagaagaggcaccuucaccuggacccugagcgacagcgagggcaacgagacccccggcggcuacugccugaccagauggaugcugaucgaggccgagcugaagugcuucggcaacaccgccguggccaagugcaacgagaagcacgacgaggaguucugcgacaugcugagacuguucgacuucugcaagcaggccaucagaagacugaaggcccccgcccagaugagcauccagcugaucaacaaggccgugaacgcccugaucaacgaccagcugaucaugaagaaccaccugagagacaucaugggcauccccuacugcaacuacagcaaguacugcuaccugaaccacaccagcagcggcagaaccagccugcccaagugcugccugaucagcaacggcagcuaccugaacgagacccaguucagcgacgacaucgagcagcaggccgacaacaugaucaccgagaugcugcagaaggaguacaucgagagacagggcaagaccccccugggccugguggacaucuucaucuucagcaccagcuucuaccugaucagcaucuuccugcaccugaucaagauccccacccacagacacaucgugggcaagcccugccccaagccccacagacugaaccacaugggcgugugcagcugcggccuguacaagcaccccggcgugcccaccaaguggaagagaugaggacuagucccuguucccagagcccacuuuuuuuucuuuuuuugaaauaaaauagccugucuuucagaucucaaaggcucuuuucagagccaccaaaaaaaaaaaaaaaaaaaaaaaaaaaaaaaaaaaaaaaaaaaaaaaaaaaaaaaaaaaaaaaaaaaaaaaaaaaaaaaaaaaaaaaaaaaaaaaaaaaaa

SEQ ID NO: 27079 - RNA, 1764 nt, Artificial Sequence
  mRNA product Design a-2 (hSL-A100) comprising derived and/or modified sequence from LASV(803213;Clade II)__AAF86703__GPCmut4 (opt4)
aggagaguccgcucagccagguugcagaagcggcuuagcguguguccuaaucuucucucugcguguagguaggccugugccgcaaacaagcuuaccaugggccagaucaucaccuucuuccaggaggugccccacgugaucgaggaggugaugaacaucgugcugaucgcccugagccugcuggccauccugaagggcaucuacaacguggccaccugcggccuguucggccugaucagcuuccugcugcugugcggcagaagcugcagcgugaccuacaagggcguguacgagcugcagacccuggagcugaacauggccaaccugaacaugugcaugccccugagcugcaccaagaacaacagccaccacuacaucauggugggcaacgagaccggccuggagcugacccugaccaacaccagcaucaucaaccacaaguucugcaaccugagcgacgcccacaagaagaaccuguacgaccacgcccugaugagcaucaucagcaccuuccaccugagcauccccaacuucaaccaguacgaggccaugagcugcgacuucaacggcggcaagaucagcgugcaguacaaccugagccacagcuucgccguggacgccgccaaccacugcggcaccaucgccaacggcgugcugcagaccuucaugagaauggccuggggcggcagcuacaucgcccuggacagcggcaagggcaacugggacugcaucaugaccagcuaccaguaccugaucauccagaacaccaccugggaggaccacugccaguucagcagacccagccccaucggcuaccugggccugcugagccagagaaccagagacaucuacaucagcagaagaagaagaggcaccuucaccuggacccugagcgacagcgagggcaacgaggcccccggcggcuacugccugaccagauggaugcugaucgaggccgagcugaagugcuucggcaacaccgccguggccaagugcaacgagaagcacgacgaggaguucugcgacaugcugagacuguucgacuucugcaagcaggccaucaagagacugaagacccccgcccagaugagcauccagcugaucaacaaggccgugaacgcccugaucaacgaccagcugaucaugaagaaccaccugagagacaucaugggcauccccuacugcaacuacagcagauacugcuaccugaaccacaccgugaccggcaagaccagccugcccagaugcugccuggugagcaacggcagcuaccugaacgagacccacuucagcgacgacaucgagcagcaggccgacaacaugaucaccgagaugcugcagaaggaguacauggacagacagggcaagaccccccugggccugguggaccuguucguguucagcaccagcuucuaccugaucagcaucuuccugcaccuggugaagauccccacccacagacacaucgugggcaagcccugccccaagccccacagacugaaccacaugggcaucugcagcugcggccuguacaagcaccccggcgugcccgugaaguggaagagaugaggacuagucccuguucccagagcccacuuuuuuuucuuuuuuugaaauaaaauagccugucuuucagaucucaaaggcucuuuucagagccaccaaaaaaaaaaaaaaaaaaaaaaaaaaaaaaaaaaaaaaaaaaaaaaaaaaaaaaaaaaaaaaaaaaaaaaaaaaaaaaaaaaaaaaaaaaaaaaaaaaaaa

SEQ ID NO: 27080 - RNA, 1764 nt, Artificial Sequence
  mRNA product Design a-2 (hSL-A100) comprising derived and/or modified sequence from LASV(GA391;Clade III)__CAA36645__GPCmut4 (opt4)
aggagaguccgcucagccagguugcagaagcggcuuagcguguguccuaaucuucucucugcguguagguaggccugugccgcaaacaagcuuaccaugggccagaucgugaccuucuuccaggaggugccccacgugaucgaggaggugaugaacaucgugcugaucgcccugagcauccuggccauccugaagggccuguacaacguggccaccugcggccugaucggccuggugaccuuccugcugcugagcggcagaagcugcagccugaucuacaagggcaccuacgagcugcagacccuggagcugaacauggagacccugaacaugugcaugccccugagcugcaccaagaacaacagccaccacuacaucagagugggcaacgagaccggccuggagcugacccugaccaacaccagcauccugaaccacaaguucugcaaccugagcgacgcccacaagagaaaccuguacgaccacagccugaugagcaucaucagcaccuuccaccugagcauccccaacuucaaccaguacgaggccaugagcugcgacuucaacggcggcaagaucaccgugcaguacaaccugagccacagcuucgccguggacgccgccggccacugcggcacccuggccaacggcgugcugcagaccuucaugagaauggccuggggcggcagcuacaucgcccuggacagcggcagaggcaacugggacugcaucaugaccagcuaccaguaccugaucauccagaacaccaccugggacgaccacugccaguucagcagacccagccccaucggcuaccugggccugcugagccagagaaccagagacaucuacaucagcagaagaagaagaggcaccuucaccuggacccugagcgacagcgagggcaacgagacccccggcggcuacugccugaccagauggaugcugaucgaggccgagcugaagugcuucggcaacaccgccguggccaagugcaacgagaagcacgacgaggaguucugcgacaugcugagacuguucgacuucugcaagcaggccaucagaagacugaagacccccgcccagaugagcauccagcugaucaacaaggccgugaacgcccugaucaacgaccagcugaucaugaagaaccaccugagagacaucaugggcauccccuacugcaacuacagcagauacugcuaccugaaccacaccagcaccggcaagaccagccugcccagaugcugccugaucagcaacggcagcuaccugaacgagaccaaguucagcgacgacaucgagcagcaggccgacaacaugaucaccgagaugcugcagaaggaguacaucgacagacagggcaagaccccccugggccugguggaccuguucguguucagcaccagcuucuaccugaucagcaucuuccugcaccuggugaagauccccacccacagacacaucgugggcaagcccugccccaagccccacagacugaaccacaugggcaucugcagcugcggccuguacaagcagcccggcgugcccgugagauggaagagaugaggacuagucccuguucccagagcccacuuuuuuuucuuuuuuugaaauaaaauagccugucuuucagaucucaaaggcucuuuucagagccaccaaaaaaaaaaaaaaaaaaaaaaaaaaaaaaaaaaaaaaaaaaaaaaaaaaaaaaaaaaaaaaaaaaaaaaaaaaaaaaaaaaaaaaaaaaaaaaaaaaaaa

SEQ ID NO: 27081 - RNA, 1767 nt, Artificial Sequence
  mRNA product Design a-2 (hSL-A100) comprising derived and/or modified sequence from LASV(AV;Clade V)__CCA30314__GPCmut4 (opt4)
aggagaguccgcucagccagguugcagaagcggcuuagcguguguccuaaucuucucucugcguguagguaggccugugccgcaaacaagcuuaccaugggccagaucgugaccuucuuccaggaggugccccacgugaucgaggaggugaugaacaucgugcugaucgcccugagcauccuggccgugcugaagggccuguacaacaucgccaccugcggccugaucggccugaucaccuuccugcugcugugcggcagaagcugcagcagcaaccuguacaagggcguguacgagcugcagagccuggaccugaacauggagacccugaacaugugcaugccccugagcugcaccaagaacaacagccaccacuacaucagagugggcaacgacaccggccuggagcugacccugaccaacaccagcauccugaaccacaaguucugcaaccugagcgacgcccacaagaaggaccuguacgaccacgcccugaugagcaucaucagcaccuuccaccugagcauccccaacuucaaccaguacgaggccaugagcugcgacuucaacggcggcaagaucagcgugcaguacaaccugagccacagcuacgccaucgacgccgccaaccacugcggcaccguggccaacggcauccugcagaccuucaugagaauggccuggggcggcagcuacaucgcccuggacagcggcagaggcaacugggacugcaucaugaccagcuaccaguaccugaucauccagaacaccaccugggagaaccacugccaguucagcagacccagccccaucggcuaccugggccugcugagccagagaaccagagacaucuacaucagcagaagaagaagaggcaccuucaccuggacccugagcgacagcgagggcaacgccacccccggcggcuacugccugaccagauggaugcugaucgaggccgagcugaagugcuucggcaacaccgccguggccaagugcaacgagaagcacgacgaggaguucugcgacaugcugagacuguucgacuucugcaagcaggccaucagcagacugaagagccccgcccagaugagcauccagcugaucaacaaggccgugaacgcccugaucaacgaccagcugaucaugaagaaccaccugagagacaucaugggcauccccuacugcaacuacagcaaguacugcuaccugaaccacaccaucaccggcaagaccagccugcccaagugcugccuggugagcaacggcagcuaccugaacgagacccacuucagcgacgacaucgagcagcaggccgacaacaugaucaccgagaugcugcagaaggaguacauggagagacagggcaagaccccccugggccugguggaccuguucguguucagcaccagcuucuaccugaucagcaucuuccugagacuggugaagauccccacccacagacacaucgugggcaagcccugccccaagccccacagacugaaccacaugggcaucugcagcugcggccuguacaagcagcccggcgugcccgugagauggaagagaugaggacuagucccuguucccagagcccacuuuuuuuucuuuuuuugaaauaaaauagccugucuuucagaucucaaaggcucuuuucagagccaccaaaaaaaaaaaaaaaaaaaaaaaaaaaaaaaaaaaaaaaaaaaaaaaaaaaaaaaaaaaaaaaaaaaaaaaaaaaaaaaaaaaaaaaaaaaaaaaaaaaaa

SEQ ID NO: 27082 - RNA, 1764 nt, Artificial Sequence
  mRNA product Design a-2 (hSL-A100) comprising derived and/or modified sequence from LASV(Togo/2016/7082;Clade VI)__AMR44577__GPCmut4 (opt4)
aggagaguccgcucagccagguugcagaagcggcuuagcguguguccuaaucuucucucugcguguagguaggccugugccgcaaacaagcuuaccaugggccagaucaucaccuucuuccaggaggugccccacgugaucgaggaggugaugaacaucgugcugaucgcccugagccugcuggccauccugaagggcguguacaacguggccaccugcggcaucaucggccuggugaccuuccuguuccugugcggcagaagcugcagccugaucuacaagggcagcuacgagcugcagacccuggagcugaacauggagacccugaacaugugcaugccccugagcugcaccaagaacagcagccaccacuacaucagagugggcaacgagaccggccuggagcugacccugaccaacaccagcaucaucaaccacaaguucugcaaccugagcgacgcccacaagagaaaccuguacgaccacgcccugaugagcauccugagcaccuuccaccugagcauccccaacuucaaccaguacgaggccaugagcugcgacuucaacggcggcaagaucagcgugcaguacaaccugagccacgccuacgccguggacgccgccgagcacugcggcaccguggccaacggcgugcugcagaccuucaugagaauggccuggggcggcagcuacaucgcccuggacagcggcagaggcaacugggacugcaucaugaccagcuaccaguaccugaucauccagaacaccaccugggaggaccacugccaguucagcagacccagccccaucggcuaccugggccugcugagccagagaaccagagacaucuacaucagcagaagaagaagaggcaccuucaccuggacccugagcgacagcgagggcaacgagacccccggcggcuacugccugaccagauggaugcugaucgaggccgagcugaagugcuucggcaacaccgccguggccaagugcaacgagaagcacgacgaggaguucugcgacaugcugagacuguucgacuucugcaagcaggccauccagagacugaagagccccgcccagaugagcauccagcugaucaacaaggccgugaacgcccugaucaacgaccagcugaucaugaagaaccaccugagagacaugaugggcauccccuacugcaacuacagcaaguacugcuaccugaaccacaccagcagcggcagaaccagccugcccaagugcugccuggugagcaacggcagcuaccugaacgagacccacuucagcgacgacaucgagcagcaggccgacaacaugaucaccgagaugcugcagaaggaguacaucgacagacagggcaagaccccccugggccugguggaccuguucguguucagcaccagcuucuaccugaucagcaucuuccugcaccugaucaagauccccacccacagacacaucgugggcaagcccugccccaagccccacagacugaaccacaugggcaucugcagcugcggccuguacaagcagcccggcgugcccaccagauggaagagaugaggacuagucccuguucccagagcccacuuuuuuuucuuuuuuugaaauaaaauagccugucuuucagaucucaaaggcucuuuucagagccaccaaaaaaaaaaaaaaaaaaaaaaaaaaaaaaaaaaaaaaaaaaaaaaaaaaaaaaaaaaaaaaaaaaaaaaaaaaaaaaaaaaaaaaaaaaaaaaaaaaaaa

SEQ ID NO: 27083 - RNA, 1764 nt, Artificial Sequence
  mRNA product Design a-2 (hSL-A100) comprising derived and/or modified sequence from LASV(KAK-428;Clade n.d. (VII))__ANH09740__GPCmut4 (opt4)
aggagaguccgcucagccagguugcagaagcggcuuagcguguguccuaaucuucucucugcguguagguaggccugugccgcaaacaagcuuaccaugggccagaucgugaccuucuuccaggaggugccccacgugaucgaggaggugaugaacaucgugcugaucgcccugagccugcuggccauccugaagggccuguacaacuucgccaccugcggcgugaucggccugaucaccuuccugcugcugugcggcagaagcugcagcgccaccuacaagggccaguacgagcugcagacccuggagcugaacauggagagccugaacaugugcaugccccugagcugcaccaagaacaacagccaccacuacaucagagccggcaacaacaccggccuggagcugacccugaccaacaccagcaucaucagccacaaguucugcaaccugagcgacgcccacaagaagaaccuguacgaccacacccugaugagcaucaucaccaccuuccaccugagcauccccaacuucaaccaguacgaggccaugagcugcgacuucaacggcggcaagaucagcauccaguacaaccugagccacagcuacgccggcgacgccgcccagcacugcggcaccguggccaacggcgugcugcagaccuucaugagaauggccuggggcggcagcuaccuggcccuggacagcggcagaagaggcugggacugcaucaucagcagcuaccaguaccugaucauccagaacaccaccugggacgaccacugccaguucagcagacccagccccaucggcuaccugggcuucgugagccagaagaccagagacaucuacaucagcagaagaagaagaggcaccuucaccuggacccugagcgacagcgagggccacgacaugcccggcggcuacugccugaccagauggaugcugaucgaggccgaccugaagugcuucggcaacaccgccguggccaagugcaacgagaagcacgacgaggaguucugcgacauguggagacuguucgacuucugcaagcaggccauccagagacugaaggcccccgcccagaugaacauccagcugaucaacaaggccgugaacgcccugaucaacgaccagcugaugaugaagaaccaccugagagacaucaugggcauccccuacugcaacuacagcaaguucugcuaccugaacaacaccaccaccggcagaaccagccugcccagaugcugccugaucagcaacggcagcuaccugaacgagacccacuucagcgacgacaucgagcagcaggccgacaacaugaucaccgagaugcugcagaaggaguacauggacagacagggcaagaccccccugggccugguggaccuguucguguucagcaccagcuucuaccugaucaccaucuuccugcaccuggugaagauccccacccacagacacaucgugggcaagcccugccccaagccccacagacugaaccacaugggcaucugcagcugcggccuguacaagcagcccggcgugcccgugagauggaagagaugaggacuagucccuguucccagagcccacuuuuuuuucuuuuuuugaaauaaaauagccugucuuucagaucucaaaggcucuuuucagagccaccaaaaaaaaaaaaaaaaaaaaaaaaaaaaaaaaaaaaaaaaaaaaaaaaaaaaaaaaaaaaaaaaaaaaaaaaaaaaaaaaaaaaaaaaaaaaaaaaaaaaa

SEQ ID NO: 27084 - RNA, 1764 nt, Artificial Sequence; identical to SEQ ID NO: 27078
  mRNA product Design a-2 (hSL-A100) comprising derived and/or modified sequence from LASV(Pinneo-NIG-1969;Clade I)__AIT17836__GPCmut4 (opt4)

SEQ ID NO: 27085 - RNA, 1764 nt, Artificial Sequence
  mRNA product Design a-2 (hSL-A100) comprising derived and/or modified sequence from LASV(ISTH0009-NIG-2011;Clade II)__AIT17404__GPCmut4 (opt4)
aggagaguccgcucagccagguugcagaagcggcuuagcguguguccuaaucuucucucugcguguagguaggccugugccgcaaacaagcuuaccaugggccagaucaucaccuucuuccaggaggugccccacgugaucgaggaggugaugaacaucgugcugaucgcccugagccugcuggccauccugaagggcaucuacaacguggccaccugcggccuguucggccuggugagcuuccugcugcugugcggcagaagcugcagcaccaccuacaagggcguguacgagcugcagacccuggagcuggacauggccagccugaacaugugcaugccccugagcugcaccaagaacaacagccaccacuacaucauggugggcaacgagaccggccuggagcugacccugaccaacaccagcaucaucaaccacaaguucugcaaccugagcgacgcccacaagaagaaccuguacgaccacgcccugaugagcaucaucagcaccuuccaccugagcauccccaacuucaaccaguacgaggccaugagcugcgacuucaacggcggcaagaucagcgugcaguacaaccugagccacgccuacgccguggacgccgccaaccacugcggcaccaucgccaacggcgugcugcagaccuucaugagaauggccuggggcggcagcuacaucgcccuggacagcggcaagggcagcugggacugcaucaugaccagcuaccaguaccugaucauccagaacaccaccugggaggaccacugccaguucagcagacccagccccaucggcuaccugggccugcugagccagagaaccagagacaucuacaucagcagaagaagaagaggcaccuucaccuggacccugagcgacagcgagggcaacgagacccccggcggcuacugccugaccagauggaugcugaucgaggccgagcugaagugcuucggcaacaccgccguggccaagugcaacgagaagcacgacgaggaguucugcgacaugcugagacuguucgacuucugcaagcaggccaucagaagacugaagacccccgcccagaugagcauccagcugaucaacaaggccgugaacgcccugaucaacgaccagcugaucaugaagaaccaccugagagacaucaugggcauccccuacugcaacuacagcaaguacugcuaccugaaccacaccgugaccggcaagaccagccugcccagaugcugccuggugagcaacggcagcuaccugaacgagacccacuucagcgacgacaucgagcagcaggccgacaacaugaucaccgagcugcugcagaaggaguacauggacagacagggcaagaccccccugggccugguggaccuguucguguucagcaccagcuucuaccugaucagcaucuuccugcaccugaucaagauccccacccacagacacaucaccggcaagcccugccccaagccccacagacugaaccacaugggcaucugcagcugcggccuguacaagcaccccggcgugcccgugaaguggaagagaugaggacuagucccuguucccagagcccacuuuuuuuucuuuuuuugaaauaaaauagccugucuuucagaucucaaaggcucuuuucagagccaccaaaaaaaaaaaaaaaaaaaaaaaaaaaaaaaaaaaaaaaaaaaaaaaaaaaaaaaaaaaaaaaaaaaaaaaaaaaaaaaaaaaaaaaaaaaaaaaaaaaaa

SEQ ID NO: 27086 - RNA, 1764 nt, Artificial Sequence
  mRNA product Design a-2 (hSL-A100) comprising derived and/or modified sequence from LASV(ISTH2010-NIG-2012;Clade II)__AIT17482__GPCmut4 (opt4)
aggagaguccgcucagccagguugcagaagcggcuuagcguguguccuaaucuucucucugcguguagguaggccugugccgcaaacaagcuuaccaugggccagaucaucaccuucuuccaggaggugccccacgugaucgaggaggugaugaacaucgugcugaucgcccugagccugcuggccauccugaagggcaucuacaacguggccaccugcggccuguucggccuggugagcuuccugcugcugugcggcagaagcugcagcaccaccuacaagggcguguacgagcugcagacccuggagcuggacauggccagccugaacaugugcaugccccugagcugcaccaagaacaacagccaccacuacaucauggugggcaacgagaccggccuggagcugacccugaccaacaccagcaucaucaaccacaaguucugcaaccugagcgacgcccacaagaagaaccuguacgaccacgcccugaugagcaucaucagcaccuuccaccugagcauccccaacuucaaccaguacgaggccaugagcugcgacuucaacggcggcaagaucagcgugcaguacaaccugagccacgccuacgccguggacgccgccaaccacugcggcaccaucgccaacggcgugcugcagaccuucaugagaauggccuggggcggcagcuacaucgcccuggacagcggcaagggcagcugggacugcaucaugaccagcuaccaguaccugaucauccagaacaucaccugggaggaccacugccaguucagcagacccagccccaucggcuaccugggccugcugagccagagaaccagagacaucuacaucagcagaagaagaagaggcaccuucaccuggacccugagcgacagcgagggcaacgagacccccggcggcuacugccugaccagauggaugcugaucgaggccgagcugaagugcuucggcaacaccgccguggccaagugcaacgagaagcacgacgaggaguucugcgacaugcugagacuguucgacuucugcaagcaggccaucagaagacugaagacccccgcccagaugagcauccagcugaucaacaaggccgugaacgcccugaucaacgaccagcugaucaugaagaaccaccugagagacaucaugggcauccccuacugcaacuacagcaaguacugcuaccugaaccacaccgugaccggcaagaccagccugcccagaugcugccuggugagcaacggcagcuaccugaacgagacccacuucagcgacgacaucgagcagcaggccgacaacaugaucaccgagcugcugcagaaggaguacaucgacagacagggcaagaccccccugggccugguggaccuguucguguucagcaccagcuucuaccugaucagcaucuuccugcaccuggugaagauccccacccacagacacguggugggcaagcccugccccaagccccacagacugaaccacaugggcaucugcagcugcggccuguacaagcaccccggcgugcccgugaaguggaagagaugaggacuagucccuguucccagagcccacuuuuuuuucuuuuuuugaaauaaaauagccugucuuucagaucucaaaggcucuuuucagagccaccaaaaaaaaaaaaaaaaaaaaaaaaaaaaaaaaaaaaaaaaaaaaaaaaaaaaaaaaaaaaaaaaaaaaaaaaaaaaaaaaaaaaaaaaaaaaaaaaaaaaa

SEQ ID NO: 27087 - RNA, 1764 nt, Artificial Sequence
  mRNA product Design a-2 (hSL-A100) comprising derived and/or modified sequence from LASV(Lassa virus/H.sapiens-wt/NGA/2015/ISTH_0543;Clade II)__AVO03639__GPCmut4 (opt4)
aggagaguccgcucagccagguugcagaagcggcuuagcguguguccuaaucuucucucugcguguagguaggccugugccgcaaacaagcuuaccaugggccagaucaucaccuucuuccaggaggugccccacgugaucgaggaggugaugaacaucgugcugaucgcccugagccugcuggccauccugaagggcaucuacaacguggccaccugcggccuguucggccuggugagcuuccugcugcugugcggcagaagcugcagcaccaccuacaagggcguguacgagcugcagacccuggagcuggacauggccaaccugaacaugugcaugccccugagcugcaccaagaacaacagccaccacuacaucauggugggcaacgagaccggccuggagcugacccugaccaacaccagcaucaucaaccacaaguucugcaaccugagcgacgcccacaagaagaaccuguacgaccacgcccugaugagcaucaucagcaccuuccaccugagcauccccaacuucaaccaguacgaggccaugagcugcgacuucaacggcggcaagaucagcgugcaguacaaccugagccacaccuacgccguggacgccgccaaccacugcggcaccaucgccaacggcgugcugcagaccuucaugagaauggccuggggcggcagcuacaucgcccuggacagcggcaagggcagcugggacugcaucaugaccagcuaccaguaccuggugauccagaacaccaccugggaggaccacugccaguucagcagacccagccccaucggcuaccugggccugcugagccagagaaccagagacaucuacaucagcagaagaagaagaggcaccuucaccuggacccugagcgacagcgagggcaacgagacccccggcggcuacugccugaccagauggaugcugaucgaggccgagcugaagugcuucggcaacaccgccguggccaagugcaacgagaagcacgacgaggaguucugcgacaugcugagacuguucgacuucugcaagcaggccaucagaagacugaagacccccgcccagaugagcauccagcugaucaacaaggccgugaacgcccugaucaacgaccagcugaucaugaagaaccaccugagagacaucaugggcauccccuacugcaacuacagcaaguacugcuaccugaaccacaccgugaccggcaagaccagccugcccagaugcugccuggugagcaacggcagcuaccugaacgagacccacuucagcgacgacaucgagcagcaggccgacaacaugaucaccgagcugcugcagaaggaguacaucgacagacagggcaagaccccccugggccugguggaccuguucguguucagcaccagcuucuaccugaucagcaucuuccugcaccuggugaagauccccacccacagacacaucaccggcaagcccugccccaagccccacagacugaaccacaugggcaucugcagcugcggccuguacaagcaccccggcgugcccgugaaguggaagagaugaggacuagucccuguucccagagcccacuuuuuuuucuuuuuuugaaauaaaauagccugucuuucagaucucaaaggcucuuuucagagccaccaaaaaaaaaaaaaaaaaaaaaaaaaaaaaaaaaaaaaaaaaaaaaaaaaaaaaaaaaaaaaaaaaaaaaaaaaaaaaaaaaaaaaaaaaaaaaaaaaaaaa

SEQ ID NO: 27088 - RNA, 1764 nt, Artificial Sequence
  mRNA product Design a-2 (hSL-A100) comprising derived and/or modified sequence from LASV(Lassa virus/H.sapiens-wt/NGA/2016/ISTH_0009;Clade II)__AVO03571__GPCmut4 (opt4)
aggagaguccgcucagccagguugcagaagcggcuuagcguguguccuaaucuucucucugcguguagguaggccugugccgcaaacaagcuuaccaugggccagaucaucaccuucuuccaggaggugccccacgugaucgaggaggugaugaacaucgugcugaucgcccugagccugcuggccauccugaagggcaucuacaacguggccaccugcggccugcugggccuggugagcuuccugcugcugugcggcagaagcugcagcaccaccuacaagggcguguacgagcugcagacccuggagcuggacauggccagccugaacaugugcaugccccugagcugcaccaagaacaacagccaccacuacaucauggugggcaacgagaccggccuggagcugacccugaccaacaccagcaucaucaaccacaaguucugcaaccugagcgacgcccacaagaagaaccuguacgaccacgcccugaugagcaucaucagcaccuuccaccugagcauccccaacuucaaccaguacgaggccaugagcugcgacuucaacggcggcagaaucagcgugcaguacaaccugagccacagcuacgccguggacgccgccaaccacugcggcaccaucgccaacggcgugcugcagaccuucaugagaauggccuggggcggcagcuacaucgcccuggacagcggcaagggcagcugggacugcaucaugaccagcuaccaguaccugaucauccagaacaccaccugggaggaccacugccaguucagcagacccagccccaucggcuaccugggccugcugagccagagaaccagagacaucuacaucagcagaagaagaagaggcaccuucaccuggacccugagcgacagcgagggcaacgagacccccggcggcuacugccugaccagauggaugcugaucgaggccgagcugaagugcuucggcaacaccgccguggccaagugcaacgagaagcacgacgaggaguucugcgacaugcugagacuguucgacuucugcaagcaggccaucagaagacugaagacccccgcccagaugagcauccagcugaucaacaaggccgugaacgcccugaucaacgaccagcugaucaugaagaaccaccugagagacaucaugggcauccccuacugcaacuacagcaaguacugcuaccugaaccacaccgugaccggcaagaccagccugcccagaugcugccuggugagcaacggcagcuaccugaacgagacccacuucagcgacgacaucgagcagcaggccgacaacaugaucaccgagcugcugcagaaggaguacaucgacagacagggcaagaccccccugggccugguggaccuguucguguucagcaccagcuucuaccugaucagcaucuuccugcaccuggugaagauccccacccacagacacaucaccggcaagcccugccccaagccccacagacugaaccacaugggcaucugcagcugcggccuguacaaccaccccggcgugcccgugaaguggaagagaugaggacuagucccuguucccagagcccacuuuuuuuucuuuuuuugaaauaaaauagccugucuuucagaucucaaaggcucuuuucagagccaccaaaaaaaaaaaaaaaaaaaaaaaaaaaaaaaaaaaaaaaaaaaaaaaaaaaaaaaaaaaaaaaaaaaaaaaaaaaaaaaaaaaaaaaaaaaaaaaaaaaaa

SEQ ID NO: 27089 - RNA, 1764 nt, Artificial Sequence
  mRNA product Design a-2 (hSL-A100) comprising derived and/or modified sequence from LASV(Lassa virus/H.sapiens-wt/NGA/2016/ISTH_0017;Clade II)__AVO03567__GPCmut4 (opt4)
aggagaguccgcucagccagguugcagaagcggcuuagcguguguccuaaucuucucucugcguguagguaggccugugccgcaaacaagcuuaccaugggccagaucaucaccuucuuccaggaggugccccacgugaucgaggaggugaugaacaucgugcugaucgcccugagccugcuggccauccugaagggcaucuacaacguggccaccugcggccuguucggccuggugagcuuccugcugcugugcggcagaagcugcagcaccaccuacaagggcguguacgagcugcagacccuggagcuggacauggccagccugaacaugugcaugccccugagcugcaccaagaacaacagccaccacuacaucauggugggcaacgagaccggccuggagcugacccugaccaacaccagcaucaucaaccacaaguucugcaaccugagcgacgcccacaagaagaaccuguacgaccacgcccugaugagcaucaucagcaccuuccaccugagcauccccaacuucaaccaguacgaggccaugagcugcgacuucaacggcggcaagaucagcgugcaguacaaccugagccacaccuacgccaucgacgccgccaaccacugcggcaccaucgccaacggcgugcugcagaccuucaugagaauggccuggggcggcagcuacaucgcccuggacagcggcaagggcagcugggacugcaucaugaccagcuaccaguaccugaucauccagaacaccaccugggaggaccacugccaguucagcagacccagccccaucggcuaccugggccugcugagccagagaaccagagacaucuacaucagcagaagaagaagaggcaccuucaccuggacccugagcgacagcgagggcaacgagacccccggcggcuacugccugaccagauggaugcugaucgaggccgagcugaagugcuucggcaacaccgccguggccaagugcaacgagaagcacgacgaggaguucugcgacaugcugagacuguucgacuucugcaagcaggccaucagaagacugaagacccccgcccagaugagcauccagcugaucaacaaggccgugaacgcccugaucaacgaccagcugaucaugaagaaccaccugagagacaucaugggcauccccuacugcaacuacagcaaguacugcuaccugaaccacaccgugaccggcaagaccagccugcccagaugcugccuggugagcaacggcagcuaccugaacgagacccacuucagcgacgacaucgagcagcaggccgacaacaugaucaccgagcugcugcagaaggaguacauggacagacagggcaagaccccccugggccugguggaccuguucguguucagcaccagcuucuaccugaucagcaucuuccugcaccuggugagaauccccacccacagacacgugaucggcaagcccugccccaagccccacagacugaaccacaugggcaucugcagcugcggccuguacaagcaccccggcgugcccgugaaguggaagagaugaggacuagucccuguucccagagcccacuuuuuuuucuuuuuuugaaauaaaauagccugucuuucagaucucaaaggcucuuuucagagccaccaaaaaaaaaaaaaaaaaaaaaaaaaaaaaaaaaaaaaaaaaaaaaaaaaaaaaaaaaaaaaaaaaaaaaaaaaaaaaaaaaaaaaaaaaaaaaaaaaaaaa

SEQ ID NO: 27090 - RNA, 1764 nt, Artificial Sequence
  mRNA product Design a-2 (hSL-A100) comprising derived and/or modified sequence from LASV(Lassa virus/H.sapiens-wt/NGA/2018/ISTH_0959;Clade II)__AVV65099__GPCmut4 (opt4)
aggagaguccgcucagccagguugcagaagcggcuuagcguguguccuaaucuucucucugcguguagguaggccugugccgcaaacaagcuuaccaugggccagaucaucaccuucuuccaggaggugccccacgugaucgaggaggugaugaacaucgugcugaucgcccugagccugcuggccauccugaagggcaucuacaacguggugaccugcggccuguucggccuggugagcuuccugcugcugugcggcagaagcugcagcaccaccuacaagggcguguacgagcugcagacccuggagcuggacauggccagccugaacaugugcaugccccugagcugcaccaagaacaacagccaccacuacaucauggugggcaacgagaccggccuggagcugacccugaccaacaccagcaucaucaaccacaaguucugcaaccugagcgacgcccacaagaagaaccuguacgaccacgcccugaugagcaucaucagcaccuuccaccugagcauccccaacuucaaccaguacgaggccaugagcugcgacuucaacggcggcaagaucagcgugcaguacaaccugagccacgccuacgccaucgacgccgccaaccacugcggcaccaucgccaacggcgugcugcagaccuucaugagaauggccuggggcggcagcuacaucgcccuggacagcggcaagggcagcugggacugcaucaugaccagcuaccaguaccugaucauccagaacaccaccugggaggaccacugccaguucagcagacccagccccaucggcuaccugggccugcugagccagagaaccagagacaucuacaucagcagaagaagaagaggcaccuucaccuggacccugagcgacagcgagggcaacgagacccccggcggcuacugccugaccagauggaugcugaucgaggccgagcugaagugcuucggcaacaccgccguggccaagugcaacgagaagcacgacgaggaguucugcgacaugcugagacuguucgacuucugcaagcaggccaucagaagacugaagacccccgcccagaugagcauccagcugaucaacaaggccgugaacgcccugaucaacgaccagcugaucaugaagaaccaccugagagacaucaugggcauccccuacugcaacuacagcaaguacugcuaccugaaccacaccgugaccggcaagaccagccugcccagaugcugccuggugagcaacggcagcuaccugaacgagacccacuucagcgacgacaucgagcagcaggccgacaacaugaucaccgagcugcugcagaaggaguacaucgacagacagggcaagaccccccugggccugguggaccuguucguguucagcaccagcuucuaccugaucagcaucuuccugcaccuggugaagauccccacccacagacacgugaucggcaagcccugccccaagccccacagacugaaccacaugggcaucugcagcugcggccuguacaagcaccccggcgugcccgugaaguggaagagaugaggacuagucccuguucccagagcccacuuuuuuuucuuuuuuugaaauaaaauagccugucuuucagaucucaaaggcucuuuucagagccaccaaaaaaaaaaaaaaaaaaaaaaaaaaaaaaaaaaaaaaaaaaaaaaaaaaaaaaaaaaaaaaaaaaaaaaaaaaaaaaaaaaaaaaaaaaaaaaaaaaaaa

SEQ ID NO: 27091 - RNA, 1764 nt, Artificial Sequence
  mRNA product Design a-2 (hSL-A100) comprising derived and/or modified sequence from LASV(LASV003-NIG-2008;Clade II)__AIT17580__GPCmut4 (opt4)
aggagaguccgcucagccagguugcagaagcggcuuagcguguguccuaaucuucucucugcguguagguaggccugugccgcaaacaagcuuaccaugggccagaucaucaccuucuuccaggaggugccccacgugaucgaggaggugaugaacaucgugcugaucgcccugagccugcuggccauccugaagggcaucuacaacguggccaccugcggccuguucggccuggugagcuuccugcugcugugcggcagaagcugcagcaccaccuacaagggcguguacgagcugcagacccuggagcuggacauggccagccugaacaugugcaugccccugagcugcaccaagaacaacagccaccacuacaucauggugggcaacgagaccggccuggagcugacccugaccaacaccagcaucaucaaccacaaguucugcaaccugagcgacgcccacaagaagaaccuguacgaccacgcccugaugagcaucaucagcaccuuccaccugagcauccccaacuucaaccaguacgaggccaugagcugcgacuucaacggcggcaagaucagcgugcaguacaaccugagccacaccuacgccguggacgccgccaaccacugcggcaccaucgccaacggcgugcugcagaccuucaugagaauggccuggggcggcagcuacaucgcccuggacagcggcaagggcagcugggacugcaucaugaccagcuaccaguaccugaucauccagaacaccaccugggaggaccacugccaguucagcagacccagccccaucggcuaccugggccugcugagccagagaaccagagacaucuacaucagcagaagaagaagaggcaccuucaccuggacccugagcgacagcgagagcaacgagacccccggcggcuacugccugaccagauggaugcugaucgaggccgagcugaagugcuucggcaacaccgccguggccaagugcaacgagaagcacgacgaggaguucugcgacaugcugagacuguucgacuucugcaagcaggccaucagaagacugaaggcccccgcccagaugagcauccagcugaucaacaaggccgugaacgcccugaucaacgaccagcugaucaugaagaaccaccugagagacaucaugggcauccccuacugcaacuacagcaaguacugcuaccugaaccacaccgugaccggcagaaccagccugcccagaugcugccuggugagcaacggcagcuaccugaacgagacccacuucagcgacgacaucgagcagcaggccgacaacaugaucaccgagcugcugcagaaggaguacauggacagacagggcaagaccccccugggccugguggaccuguucguguucagcaccagcuucuaccugaucagcaucuuccugcaccuggugaagauccccacccacagacacgugaucggcaagcccugccccaagccccacagacugaaccacaugggcaucugcagcugcggccuguacaagcaccccggcgugcccgugaaguggaagagaugaggacuagucccuguucccagagcccacuuuuuuuucuuuuuuugaaauaaaauagccugucuuucagaucucaaaggcucuuuucagagccaccaaaaaaaaaaaaaaaaaaaaaaaaaaaaaaaaaaaaaaaaaaaaaaaaaaaaaaaaaaaaaaaaaaaaaaaaaaaaaaaaaaaaaaaaaaaaaaaaaaaaa

SEQ ID NO: 27092 - RNA, 1764 nt, Artificial Sequence
  mRNA product Design a-2 (hSL-A100) comprising derived and/or modified sequence from LASV(LASV035-NIG-2009;Clade II)__AIT17588__GPCmut4 (opt4)
aggagaguccgcucagccagguugcagaagcggcuuagcguguguccuaaucuucucucugcguguagguaggccugugccgcaaacaagcuuaccaugggccagaucaucaccuucuuccaggaggugccccacgugaucgaggaggugaugaacaucgugcugaucgcccugagccugcuggccauccugaagggcaucuacaacguggccaccugcggccuguucggccuggugagcuuccugcugcugugcggcagaagcugcagcaccaccuacaagggcguguacgagcugcagacccuggagcuggacauggccagccugaacaugugcaugccccugagcugcaccaagaacaacagccaccacuacaucauggugggcaacgagaccggccuggagcugacccugaccaacaccagcaucaucaaccacaaguucugcaaccugagcgacgcccacaagaagaaccuguacgaccacgcccugaugagcaucaucagcaccuuccaccugagcauccccaacuucaaccaguacgaggccaugagcugcgacuucaacggcggcaagaucagcgugcaguacaaccugagccacgccuacgccguggacgccgccaaccacugcggcaccaucgccaacggcgugcugcagaccuucaugagaauggccuggggcggcagcuacaucgcccuggacagcggcaagggcagcugggacugcaucaugaccagcuaccaguaccugaucauccagaacaccaccugggaggaccacugccaguucagcagacccagccccaucggcuaccugggccugcugagccagagaaccagagacaucuacaucagcagaagaagaagaggcaccuucaccuggacccugagcgacagcgagggcaacgagacccccggcggcuacugccugaccagauggaugcugaucgaggccgagcugaagugcuucggcaacaccgccguggccaagugcaacgagaagcacgacgaggaguucugcgacaugcugagacuguucgacuucugcaagcaggccaucagaagacugaaggcccccgcccagaugagcauccagcugaucaacaaggccgugaacgcccugaucaacgaccagcugaucaugaagaaccaccugagagacaucaugggcauccccuacugcaacuacagcaaguacugcuaccugaaccacaccgugaccggcaagaccagccugcccagaugcugccuggugagcaacggcagcuaccugaacgagacccacuucagcgacgacaucgagcagcaggccgacaacaugaucaccgagcugcugcagaaggaguacaucgacagacagggcaagaccccccugggccugguggaccuguucguguucagcaccagcuucuaccugaucagcaucuuccugcaccuggugaagauccccacccacagacacgugaucggcaagcccugccccaagccccacagacugaaccacaugggcaucugcagcugcggccuguacaagcaccccggcgugcccgugaaguggaagagaugaggacuagucccuguucccagagcccacuuuuuuuucuuuuuuugaaauaaaauagccugucuuucagaucucaaaggcucuuuucagagccaccaaaaaaaaaaaaaaaaaaaaaaaaaaaaaaaaaaaaaaaaaaaaaaaaaaaaaaaaaaaaaaaaaaaaaaaaaaaaaaaaaaaaaaaaaaaaaaaaaaaaa

SEQ ID NO: 27093 - RNA, 1764 nt, Artificial Sequence
  mRNA product Design a-2 (hSL-A100) comprising derived and/or modified sequence from LASV(LASV1000-NIG-2009;Clade II)__AIT17782__GPCmut4 (opt4)
aggagaguccgcucagccagguugcagaagcggcuuagcguguguccuaaucuucucucugcguguagguaggccugugccgcaaacaagcuuaccaugggccagaucaucaccuucuuccaggaggugccccacgugaucgaggaggugaugaacaucgugcugaucgcccugagccugcuggccauccugaagggcaucuacaacguggccaccugcggccuguucggccuggugagcuuccugcugcugugcggcagaagcugcagcaccaccuacaagggcguguacgagcugcagacccuggagcuggacauggccagccugaacaugugcaugccccugagcugcaccaagaacaacagccaccacuacaucauggugggcaacgagaccggccuggagcugacccugaccaacaccagcaucaucaaccacaaguucugcaaccugagcgacgcccacaagaagaaccuguacgaccacgcccugaugagcaucaucagcaccuuccaccugagcauccccaacuucaaccaguacgaggccaugagcugcgacuucaacggcggcaagaucagcgugcaguacaaccugagccacaccuacgccguggacgccgccaaccacugcggcaccaucgccaacggcgugcugcagaccuucaugagaauggccuggggcggcagcuacaucgcccuggacagcggcaagggcagcugggacugcaucaugaccagcuaccaguaccugaucauccagaacaccaccugggaggaccacugccaguucagcagacccagccccaucggcuaccugggccugcugagccagagaaccagagacaucuacaucagcagaagaagaagaggcaccuucaccuggacccugagcgacagcgagggcaacgagacccccggcggcuacugccugaccagauggaugcugaucgaggccgagcugaagugcuucggcaacaccgccguggccaagugcaacgagaagcacgacgaggaguucugcgacaugcugagacuguucgacuucugcaagcaggccaucaagagacugaagacccccgcccagaugagcauccagcugaucaacaaggccgugaacgcccugaucaacgaccagcugaucaugaagaaccaccugagagacaucaugggcauccccuacugcaacuacagcaaguacugcuaccugaaccacaccgugaccggcaagaccagccugcccagaugcugccuggugagcaacggcagcuaccugaacgagacccacuucagcgacgacaucgagcagcaggccgacaacaugaucaccgagcugcugcagaaggaguacaucgacagacagggcaagaccccccugggccugguggaccuguucguguucagcaccagcuucuaccugaucagcaucuuccugcaccuggugaagauccccacccacagacacguggugggcaagcccugccccaagccccacagacugaaccacaugggcaucugcagcugcggccuguacaagcaccccggcgugcccgugaaguggaagagaugaggacuagucccuguucccagagcccacuuuuuuuucuuuuuuugaaauaaaauagccugucuuucagaucucaaaggcucuuuucagagccaccaaaaaaaaaaaaaaaaaaaaaaaaaaaaaaaaaaaaaaaaaaaaaaaaaaaaaaaaaaaaaaaaaaaaaaaaaaaaaaaaaaaaaaaaaaaaaaaaaaaaa

SEQ ID NO: 27094 - RNA, 1764 nt, Artificial Sequence
  mRNA product Design a-2 (hSL-A100) comprising derived and/or modified sequence from LASV(LASV221-NIG-2010;Clade II)__AIT17624__GPCmut4 (opt4)
aggagaguccgcucagccagguugcagaagcggcuuagcguguguccuaaucuucucucugcguguagguaggccugugccgcaaacaagcuuaccaugggccagaucaucaccuucuuccaggaggugccccacgugaucgaggaggugaugaacaucgugcugaucgcccugagccugcuggccauccugaagggcaucuacaacguggccaccugcggccuguucggccuggugagcuuccugcugcugugcggcagaagcugcagcaccaccuacaagggcguguacgagcugcagacccuggagcuggacauggccagccugaacaugugcaugccccugagcugcaccaagaacaacagccaccacuacaucauggugggcaacgagaccggccuggagcugacccugaccaacaccagcaucaucaaccacaaguucugcaaccugagcgacgcccacaagaagaaccuguacgaccacgcccugaugagcaucaucagcaccuuccaccugagcauccccaacuucaaccaguacgaggccaugagcugcgacuucaacggcggcaagaucagcgugcaguacaaccugagccacaccuacgccaucgacgccgccaaccacugcggcaccaucgccaacggcgugcugcagaccuucaugagaauggccuggggcggcagcuacaucgcccuggacagcggcaagggcagcugggacugcaucaugaccagcuaccaguaccugaucauccagaacaccaccugggaggaccacugccaguucagcagacccagccccaucggcuaccugggccugcugagccagagaaccagagacaucuacaucagcagaagaagaagaggcaccuucaccuggacccugagcgacagcgagggcaacgagacccccggcggcuacugccugaccagauggaugcugaucgaggccgagcugaagugcuucggcaacaccgccguggccaagugcaacgagaagcacgacgaggaguucugcgacaugcugagacuguucgacuucugcaagcaggccaucagaagacugaagacccccgcccagaugagcauccagcugaucaacaaggccgugaacgcccugaucaacgaccagcugaucaugaagaaccaccugagagacaucaugggcauccccuacugcaacuacagcaaguacugcuaccugaaccacaccgugaccggcaagaccagccugcccagaugcugccuggugagcaacggcagcuaccugaacgagacccacuucagcgacgacaucgagcagcaggccgacaacaugaucaccgagaugcugcagaaggaguacauggacagacagggcaagaccccccugggccugguggaccuguucguguucagcaccagcuucuaccugaucagcaucuuccugcaccuggugaagauccccacccacagacacgugaucggcaagcccugccccaagccccacagacugaaccacaugggcaucugcagcugcggccuguacaagcaccccggcgugcccgugaaguggaagagaugaggacuagucccuguucccagagcccacuuuuuuuucuuuuuuugaaauaaaauagccugucuuucagaucucaaaggcucuuuucagagccaccaaaaaaaaaaaaaaaaaaaaaaaaaaaaaaaaaaaaaaaaaaaaaaaaaaaaaaaaaaaaaaaaaaaaaaaaaaaaaaaaaaaaaaaaaaaaaaaaaaaaa

SEQ ID NO: 27095 - RNA, 1764 nt, Artificial Sequence
  mRNA product Design a-2 (hSL-A100) comprising derived and/or modified sequence from LASV(LASV237-NIG-2010;Clade II)__AIT17638__GPCmut4 (opt4)
aggagaguccgcucagccagguugcagaagcggcuuagcguguguccuaaucuucucucugcguguagguaggccugugccgcaaacaagcuuaccaugggccagaucaucaccuucuuccaggaggugccccacgugaucgaggaggugaugaacaucgugcugaucgcccugagccugcuggccauccugaagggcaucuacaacguggccaccugcggccuguucggccuggugagcuuccugcugcugugcggcagaagcugcagcaccaccuacaagggcguguacgagcugcagacccuggagcuggacauggccagccugaacaugugcaugccccugagcugcaccaagaacaacagccaccacuacaucauggugggcaacgagaccggccuggagcugacccugaccaacaccagcaucaucaaccacaaguucugcaaccugagcgacgcccacaagaaggaccuguacgaccacgcccugaugagcaucaucagcaccuuccaccugagcauccccaacuucaaccaguacgaggccaugagcugcgacuucaacggcggcaagaucagcgugcaguacaaccugagccacaccuacgccguggacgccgccaaccacugcggcaccaucgccaacggcgugcugcagaccuucaugagaauggccuggggcggcagcuacaucgcccuggacagcggcaagggcagcugggacugcaucaugaccagcuaccaguaccugaucauccagaacaccaccugggaggaccacugccaguucagcagacccagccccaucggcuaccugggccugcugagccagagaaccagagacaucuacaucagcagaagaagaagaggcaccuucaccuggacccugagcgacagcgagggcaacgagacccccggcggcuacugccugaccagauggaugcugaucgaggccgagcugaagugcuucggcaacaccgccguggccaagugcaacgagaagcacgacgaggaguucugcgacaugcugagacuguucgacuucugcaagcaggccaucagaagacugaagacccccgcccagaugagcauccagcugaucaacaaggccgugaacgcccugaucaacgaccagcugaucaugaagaaccaccugagagacaucaugggcauccccuacugcaacuacagcaaguacugcuaccugaaccacaccgugaccggcaagaccagccugcccagaugcugccuggugagcaacggcagcuaccugaacgagacccacuucagcgacgacaucgagcagcaggccgacaacaugaucaccgagcugcugcagaaggaguacauggacagacagggcaagaccccccugggccugguggaccuguucguguucagcaccagcuucuaccugaucagcaucuuccugcaccugaucaagauccccacccacagacacaucaccggcaagcccugccccaagccccacagacugaaccacaugggcaucugcagcugcggccuguacaagcaccccggcgugcccgugaaguggaagagaugaggacuagucccuguucccagagcccacuuuuuuuucuuuuuuugaaauaaaauagccugucuuucagaucucaaaggcucuuuucagagccaccaaaaaaaaaaaaaaaaaaaaaaaaaaaaaaaaaaaaaaaaaaaaaaaaaaaaaaaaaaaaaaaaaaaaaaaaaaaaaaaaaaaaaaaaaaaaaaaaaaaaa

SEQ ID NO: 27096 - RNA, 1764 nt, Artificial Sequence
  mRNA product Design a-2 (hSL-A100) comprising derived and/or modified sequence from LASV(LASV253-NIG-2011;Clade II)__AIT17670__GPCmut4 (opt4)
aggagaguccgcucagccagguugcagaagcggcuuagcguguguccuaaucuucucucugcguguagguaggccugugccgcaaacaagcuuaccaugggccagaucaucaccuucuuccaggaggugccccacgugaucgaggaggugaugaacaucgugcugaucgcccugagccugcuggccauccugaagggcaucuacaacguggccaccugcggccuguucggccuggugagcuuccugcugcugugcggcagaagcugcagcaccaccuacaagggcguguacgagcugcagacccuggagcuggacauggccagccugaacaugugcaugccccugagcugcaccaagaacaacagccaccacuacaucauggugggcaacgagaccggccuggagcugacccugaccaacaccagcaucaucaaccacaaguucugcaaccugagcgacgcccacaagaagaaccuguacgaccacgcccugaugagcaucaucagcaccuuccaccugagcauccccaacuucaaccaguacgaggccaugagcugcgacuucaacggcggcaagaucagcgugcaguacaaccugagccacaccuacgccguggacgccgccaaccacugcggcaccaucgccaacggcgugcugcagaccuucaugagaauggccuggggcggcagcuacaucgcccuggacagcggcaagggcagcugggacugcaucaugaccagcuaccaguaccugaucauccagaacaccaccugggaggaccacugccaguucagcagacccagccccaucggcuaccugggccugcugagccagagaaccagagacaucuacaucagcagaagaagaagaggcaccuucaccuggacccugagcgacagcgagggcaacgagacccccggcggcuacugccugaccagauggaugcugaucgaggccgagcugaagugcuucggcaacaccgccguggccaagugcaacgagaagcacgacgaggaguucugcgacaugcugagacuguucgacuucugcaagcaggccaucagaagacugaaggcccccgcccagaugagcauccagcugaucaacaaggccgugaacgcccugaucaacgaccagcugaucaugaagaaccaccugagagacaucaugggcauccccuacugcaacuacagcaaguacugcuaccugaaccacaccgugaccggcagaaccagccugcccagaugcugccuggugagcaacggcagcuaccugaacgagacccacuucagcgacgacaucgagcagcaggccgacaacaugaucaccgagcugcugcagaaggaguacaucgacagacagggcaagaccccccugggccugguggaccuguucguguucagcaccagcuucuaccugaucagcaucuuccugcaccuggugaagauccccacccacagacacaucaucggcaagcccugccccaagccccacagacugaaccacaugggcaucugcagcugcggccuguacaagcaccccggcgugcccgugaaguggaagagaugaggacuagucccuguucccagagcccacuuuuuuuucuuuuuuugaaauaaaauagccugucuuucagaucucaaaggcucuuuucagagccaccaaaaaaaaaaaaaaaaaaaaaaaaaaaaaaaaaaaaaaaaaaaaaaaaaaaaaaaaaaaaaaaaaaaaaaaaaaaaaaaaaaaaaaaaaaaaaaaaaaaaa

SEQ ID NO: 27097 - RNA, 1764 nt, Artificial Sequence
  mRNA product Design a-2 (hSL-A100) comprising derived and/or modified sequence from LASV(LASV254-NIG-2011;Clade II)__AIT17674__GPCmut4 (opt4)
aggagaguccgcucagccagguugcagaagcggcuuagcguguguccuaaucuucucucugcguguagguaggccugugccgcaaacaagcuuaccaugggccagaucaucaccuucuuccaggaggugccccacgugaucgaggaggugaugaacaucgugcugaucgcccugagccugcuggccauccugaagggcaucuacaacguggccaccugcggccuguucggccuggugagcuuccugcugcugugcggcagaagcugcagcaccaccuacaagggcguguacgagcugcagacccuggagcuggacaugaccaaccugaacaugugcaugccccugagcugcaccaagaacaacagccaccacuacaucauggugggcaacgagaccggccuggagcugacccugaccaacaccagcaucaucaaccacaaguucugcaaccugagcgacgcccacaagaagaaccuguacaaccacgcccugaugagcaucaucagcaccuuccaccugagcauccccaacuucaaccaguacgaggccaugagcugcgacuucaacggcggcaagaucagcgugcaguacaaccugagccacagcuacgccguggacgccgccaaccacugcggcaccaucgccaacggcgugcugcagaccuucaugagaauggccuggggcggcagcuacaucgcccuggacagcggcaagggcaacugggacugcaucaugaccagcuaccaguaccugaucauccagaacaccaccugggaggaccacugccaguucagcagacccagccccaucggcuaccugggccugcugagccagagaaccagagacaucuacaucagcagaagaagaagaggcaccuucaccuggacccugagcgacagcgagggcaacgagacccccggcggcuacugccugaccagauggaugcugaucgaggccgagcugaagugcuucggcaacaccgccguggccaagugcaacgagaagcacgacgaggaguucugcgacaugcugagacuguucgacuucugcaagcaggccaucagaagacugaagacccccgcccaggccaacauccagcugaucaacaaggccgugaacgcccugaucaacgaccagcugaucaugaagaaccaccugagagacaucaugggcauccccuacugcaacuacagcaaguacugcuaccugaaccacaccgugaccggcaagaccagccugcccagaugcugccuggugagcaacggcagcuaccugaacgagacccacuucagcgacgacaucgagcagcaggccgacaacaugaucaccgagcugcugcagaaggaguacauggacagacagggcaagaccccccugggccugguggaccuguucguguucagcaccagcuucuaccugaucagcaucuuccugcaccuggugaagauccccacccacagacacgugaucggcaagcccugccccaagccccacagacugaaccacaugggcaucugcagcugcggccuguacaagcaccccggcgugcccgugaaguggaagagaugaggacuagucccuguucccagagcccacuuuuuuuucuuuuuuugaaauaaaauagccugucuuucagaucucaaaggcucuuuucagagccaccaaaaaaaaaaaaaaaaaaaaaaaaaaaaaaaaaaaaaaaaaaaaaaaaaaaaaaaaaaaaaaaaaaaaaaaaaaaaaaaaaaaaaaaaaaaaaaaaaaaaa

SEQ ID NO: 27098 - RNA, 1764 nt, Artificial Sequence
  mRNA product Design a-2 (hSL-A100) comprising derived and/or modified sequence from LASV(Nig08-A19;Clade III)__ADU56618__GPCmut4 (opt4)
aggagaguccgcucagccagguugcagaagcggcuuagcguguguccuaaucuucucucugcguguagguaggccugugccgcaaacaagcuuaccaugggccagaucgugaccuucuuccaggaggugccccacgugaucgaggaggugaugaacaucgugcugaucgcccugagcauccuggccauccugaagggccuguacaacaucgccaccugcggccugaucggccuggugaccuuccugcugcugagcggcagaagcugcagcaugaccuacaagggcguguacgagcugcagacccuggagcugaacaugaacacccugaacaugugcaugccccugagcugcaccaagaacaacagccaccacuacaucauggugggcaacgagaccggccuggagcugacccugaccaacaccagccugcugcaccacaaguucugcaaccugagcgacgcccacaagaagaaccuguacgaccacacccugaugagcaucaucagcaccuuccaccugagcauccccaacuucaaccaguacgaggccaugagcugcgacuucaacggcggcaagaucaccgugcaguacaaccugagccacagcuacgccaucgacgccgccaaccacugcggcaccguggccaacggcgugcugcagaccuucaugagaauggccuggggcggcagcuacaucgcccuggacagcggcagaggcaagugggacugcaucaugaccagcuaccaguaccugaucauccagaacaccaccugggaggaccacugccaguucagcagacccagccccaucggcuaccugggccugcugagccagagaaccagagacaucuacaucagcagaagaagaagaggcaccuucaccuggacccugagcgacagcgagggcaacgagacccccggcggcuacugccugaccagauggaugcugaucgaggccgagcugaagugcuucggcaacaccgccguggccaagugcaacgagaagcacgacgaggaguucugcgacaugcugagacuguucgacuucugcaagcaggccaucagaagacugaaggcccccgcccagaugagcauccagcugaucaacaaggccgugaacgcccugaucaacgaccagcugaucaugaagaaccaccugagagacaucaugggcauccccuacugcaacuacagcaaguacugcuaccugaaccacaccagcaccggcagaaccagccugcccagaugcugccuggugagcaacggcagcuaccugaacgagacccacuucagcgacgacaucgagcagcaggccgacaacaugaucaccgagaugcugcagaaggaguaccuggacagacagggcaagaccccccugggccugguggaccuguucguguucagcaccagcuucuaccugaucagcaucuuccugcaccuggugaagauccccacccacagacacaucgugggcaagcccugccccaagccccacagacugaaccacaugggcaucugcagcugcggccuguacaagcagcccggcgugcccgugagauggaagagaugaggacuagucccuguucccagagcccacuuuuuuuucuuuuuuugaaauaaaauagccugucuuucagaucucaaaggcucuuuucagagccaccaaaaaaaaaaaaaaaaaaaaaaaaaaaaaaaaaaaaaaaaaaaaaaaaaaaaaaaaaaaaaaaaaaaaaaaaaaaaaaaaaaaaaaaaaaaaaaaaaaaaa

SEQ ID NO: 27099 - RNA, 1767 nt, Artificial Sequence
  mRNA product Design a-2 (hSL-A100) comprising derived and/or modified sequence from LASV(G1180-SLE-2010;Clade IV)__AIT17168__GPCmut4 (opt4)
aggagaguccgcucagccagguugcagaagcggcuuagcguguguccuaaucuucucucugcguguagguaggccugugccgcaaacaagcuuaccaugggccagaucgugaccuucuuccaggaggugccccacgugaucgaggaggugaugaacaucgugcugaucgcccugagcauccuggccgugcugaagggccuguacaacuucgccaccugcggccuggugggccugcugaccuuccugcugcugugcggcagaagcugcaccgccagcagauacaagggcguguacgagcugcagacccuggagcugaacauggagacccugaacaugugcaugccccugagcugcaccaagaacaacagccaccacuacaucauggugggcaacgagaccggccuggagcugacccugaccaacaccagcaucaucaaccacaaguucugcaaccugagcgacgcccacaagaagaaccuguacgaccacgcccugaugagcaucaucagcaccuuccaccugagcauccccaacuucaaccaguacgaggccaugagcugcgacuucaacggcggcaagaucagcgugcaguacaaccugagccacagcuacgccggcgacgccgccaaccacugcggcaccguggccaacggcgugcugcagaccuucaugagaauggccuggggcggcagcuacaucgcccuggacagcggccacggcagcugggacugcaucaugaccagcuaccaguaccugaucauccagaacaccaccugggaggaccacugccaguucagcagacccagccccaucggcuaccugggccugcugagccagagaaccagagacaucuacaucagcagaagaagaagaggcaccuucaccuggacccugagcgacagcgagggcaaggacacccccggcggcuacugccugaccagauggaugcugaucgaggccgagcugaagugcuucggcaacaccgccguggccaagugcaacgagaagcacgacgaggaguucugcgacaugcugagacuguucgacuucugcaagcaggccauccagagacugaaggcccccgcccagaugagcauccagcugaucaacaaggccgugaacgcccugaucaacgaccagcugaucaugaagaaccaccugagagacaucaugggcauccccuacugcaacuacagcaaguacugcuaccugaaccacaccaccaccggcaagaccagccugcccaagugcugccuggugagcaacggcagcuaccugaacgagacccacuucagcgacgacaucgagcagcaggccgacaacaugaucaccgagaugcugcagaaggaguacauggagagacagggcaagaccccccugggccugguggaccuguucguguucagcaccagcuucuaccugaucagcaucuuccugcaccuggugaagauccccacccacagacacaucgugggcaagagcugccccaagccccacagacugaaccacaugggcaucugcagcugcggccuguacaagcagcccggcgugcccgugaaguggaagagaugaggacuagucccuguucccagagcccacuuuuuuuucuuuuuuugaaauaaaauagccugucuuucagaucucaaaggcucuuuucagagccaccaaaaaaaaaaaaaaaaaaaaaaaaaaaaaaaaaaaaaaaaaaaaaaaaaaaaaaaaaaaaaaaaaaaaaaaaaaaaaaaaaaaaaaaaaaaaaaaaaaaaa

SEQ ID NO: 27100 - RNA, 1767 nt, Artificial Sequence
  mRNA product Design a-2 (hSL-A100) comprising derived and/or modified sequence from LASV(G1442-SLE-2011;Clade IV)__AIT17180__GPCmut4 (opt4)
aggagaguccgcucagccagguugcagaagcggcuuagcguguguccuaaucuucucucugcguguagguaggccugugccgcaaacaagcuuaccaugggccagaucgugaccuucuuccaggaggugccccacgugaucgaggaggugaugaacaucgugcugaucgcccugagcauccuggccgugcugaagggccuguacaacguggccaccugcggccugaucggccuggugaccuuccugcugcugugcggcagaagcugcaccaccacccuguacaagggcguguacgagcugcagacccuggagcugaacauggagacccugaacaugugcaugccccugagcugcaccaagaacaacagccaccacuacaucagagugggcaacgagaccggccuggagcugacccugaccaacaccagcaucaucaaccacaaguucugcaaccugagcgacgcccacaagaagaaccuguacgaccacgcccugaugagcaucaucagcaccuuccaccugagcauccccaacuucaaccaguacgaggccaugagcugcgacuucaacggcggcaagaucagcgugcaguacaaccugagccacagcuacgccggcgacgccgccaaccacugcggcaccguggccaacggcgugcugcagaccuucaugagaauggccuggggcggcagcuacaucgcccuggacagcggcagaggcaacugggacugcaucaugaccagcuaccaguaccugaucauccagaacaccaccugggacgaccacugccaguucagcagacccagccccaucggcuaccugggccugcugagccagagaaccagagacguguacaucagcagaagaagaagaggcaccuucaccuggacccugagcgacagcgagggcaaggacacccccggcggcuacugccugaccagauggaugcugaucgaggccgagcugaagugcuucggcaacaccgccguggccaagugcaacgagaagcacgacgaggaguucugcgacaugcugagacuguucgacuucugcaagcaggccauccagagacugaaggcccccgcccagaugagcauccagcugaucaacaaggccgugaacgcccugaucaacgaccagcugaucaugaagaaccaccugagagacaucaugggcauccccuacugcaacuacagcaaguacugcuaccugaacaacaccgccaccggcaagaccagccugcccaagugcugccugaucagcaacggcagcuaccugaacgagacccacuucagcgacgacaucgagcaggaggccgacaacaugaucaccgagaugcugcagaaggaguacauggagagacagggcaagaccccccugggccugguggaccuguucguguucagcaccagcuucuaccugaucagcaucuuccugcaccuggugaagauccccacccacagacacaucgugggcaagagcugccccaagccccacagacugaaccacaugggcaucugcagcugcggccuguacaagcagcccggcgugcccgugagauggaagagaugaggacuagucccuguucccagagcccacuuuuuuuucuuuuuuugaaauaaaauagccugucuuucagaucucaaaggcucuuuucagagccaccaaaaaaaaaaaaaaaaaaaaaaaaaaaaaaaaaaaaaaaaaaaaaaaaaaaaaaaaaaaaaaaaaaaaaaaaaaaaaaaaaaaaaaaaaaaaaaaaaaaaa

SEQ ID NO: 27101 - RNA, 1767 nt, Artificial Sequence
  mRNA product Design a-2 (hSL-A100) comprising derived and/or modified sequence from LASV(G3010-SLE-2013;Clade IV)__AIT17344__GPCmut4 (opt4)
aggagaguccgcucagccagguugcagaagcggcuuagcguguguccuaaucuucucucugcguguagguaggccugugccgcaaacaagcuuaccaugggccagaucgugaccuucuuccaggaggugccccacgugaucgaggaggugaugaacaucgugcugaucgcccugagcauccuggccgugcugaagggccuguacaacuucgccaccugcggccuggugggccuggugaccuuccugcugcugugcggcagaagcugcaccaccagccuguacaagggcguguacgagcugcagacccuggagcugaacauggagacccugaacaugugcaugccccugagcugcaccaagaacaacagccaccacuacaucauggugggcaacgagaccggccuggagcugacccugaccaacaccagcaucaucaaccacaaguucugcaaccugagcgacgcccacaagaagaaccuguacaaccacgcccugaugagcaucaucagcaccuuccaccugagcauccccaacuucaaccaguacgaggccaugagcugcgacuucaacggcggcaagaucagcgugcaguacaaccugagccacagcuacgccggcgacgccgccagccacugcggcaccguggccaacggcgugcugcagaccuucaugagaauggccuggggcggcagcuacaucgcccuggacagcggcuacggcaagugggacugcaucaugaccagcuaccaguaccugaucauccagaacaccaccugggaggaccacugccaguucagcagacccagccccaucggcuaccugggccugcugagccagagaaccagagacaucuacaucagcagaagaagaagaggcaccuucaccuggacccugagcgacagcgagggcaaggacacccccggcggcuacugccugaccagauggaugcugaucgaggccgagcugaagugcuucggcaacaccgccguggccaagugcaacgagaagcacgacgaggaguucugcgacaugcugagacuguucgacuucugcaagcaggccauccagagacugaagacccccgcccagaugagcauccagcugaucaacaaggccgugaacgcccugaucaacgaccagcugaucaugaagaaccaccugagagacaucaugggcauccccuacugcaacuacagcaaguacugcuaccugaaccacaccaccaccggcaagaccagccugcccaagugcugccuggugagcaacggcagcuaccugaacgagacccacuucagcgacgacaucgagcagcaggccgacaacaugaucaccgagaugcugcagaaggaguacauggagagacagggcaagaccccccugggccugguggaccuguucguguucagcaccagcuucuaccugaucagcaucuuccugcaccuggugaagauccccacccacagacacaucgugggcaagagcugccccaagccccacagacugaaccacaugggcaucugcagcugcggccuguacaagcagcccggcgugcccgugagauggaagagaugaggacuagucccuguucccagagcccacuuuuuuuucuuuuuuugaaauaaaauagccugucuuucagaucucaaaggcucuuuucagagccaccaaaaaaaaaaaaaaaaaaaaaaaaaaaaaaaaaaaaaaaaaaaaaaaaaaaaaaaaaaaaaaaaaaaaaaaaaaaaaaaaaaaaaaaaaaaaaaaaaaaaa

SEQ ID NO: 27102 - RNA, 1767 nt, Artificial Sequence
  mRNA product Design a-2 (hSL-A100) comprising derived and/or modified sequence from LASV(G502-SLE-2009;Clade IV)__AIT17126__GPCmut4 (opt4)
aggagaguccgcucagccagguugcagaagcggcuuagcguguguccuaaucuucucucugcguguagguaggccugugccgcaaacaagcuuaccaugggccagaucgugaccuucuuccaggaggugccccacgugaucgaggaggugaugaacaucgugcugaucgcccugagcauccuggccgugcugaagggccuguacaacuucgccaccugcggccuggugggccugcugaccuuccugcugcugugcggcagaagcugcaccaccggccuguacaagggcguguacgagcugcagacccuggagcugaacauggagacccugaacaugugcaugccccugagcugcaccaagaacaacagccaccacuacaucauggugggcaacgagaccggccuggagcugacccugaccaacaccagcaucaucaaccacaaguucugcaaccugagcgacgcccacaagaagaaccuguacgaccacgcccugaugagcaucaucagcaccuuccaccugagcauccccaacuucaaccaguacgaggccaugagcugcgacuucaacggcggcaagaucagcgugcaguacaaccugagccacagcuacgccggcgacgccgccgaccacugcggcaccguggccaacggcgugcugcagaccuucaugagaauggccuggggcggcagcuacaucgcccuggacagcggcagaggcagaugggacugcaucaugaccagcuaccaguaccugaucauccagaacaccaccugggaggaccacugccaguucagcagacccagccccaucggcuaccugggccugcugagccagagaaccagagacaucuacaucagcagaagaagaagaggcaccuucaccuggacccugagcgacagcgagggcaaggacacccccggcggcuacugccugaccagauggaugcugaucgaggccgagcugaagugcuucggcaacaccgccguggccaagugcaacgagaagcacgacgaggaguucugcgacaugcugagacuguucgacuucugcaagcaggccauccagagacugaaggcccccgcccagaugagcauccagcugaucaacaaggccgugaacgcccugaucaacgaccagcuggugaugaagaaccaccugagagacaucaugggcauccccuacugcaacuacagcagauacugcuaccugaaccacaccaccaccggcagaaccagccugcccaagugcugccuggugagcaacggcagcuaccugaacgagacccacuucagcgacgacaucgagcagcaggccgacaacaugaucaccgagaugcugcagaaggaguacauggagagacagggcaagaccccccugggccugguggaccuguucguguucagcaccagcuucuaccugaucagcaucuuccugcaccuggugaagauccccacccacagacacaucgugggcaagagcugccccaagccccacagacugaaccacaugggcaucugcagcugcggccuguacaagcagcccggcgugcccgugaaguggaagagaugaggacuagucccuguucccagagcccacuuuuuuuucuuuuuuugaaauaaaauagccugucuuucagaucucaaaggcucuuuucagagccaccaaaaaaaaaaaaaaaaaaaaaaaaaaaaaaaaaaaaaaaaaaaaaaaaaaaaaaaaaaaaaaaaaaaaaaaaaaaaaaaaaaaaaaaaaaaaaaaaaaaaa

SEQ ID NO: 27103 - RNA, 1767 nt, Artificial Sequence
  mRNA product Design a-2 (hSL-A100) comprising derived and/or modified sequence from LASV(G733-SLE-2010;Clade IV)__AIT17154__GPCmut4 (opt4)
aggagaguccgcucagccagguugcagaagcggcuuagcguguguccuaaucuucucucugcguguagguaggccugugccgcaaacaagcuuaccaugggccagaucgugaccuucuuccaggaggugccccacgugaucgaggaggugaugaacaucgugcugaucgcccugagcauccuggccgugcugaagggccuguacaacuucgccaccugcggcaucgugggccuggugagcuuccugcugcugugcggcagaagcugcaccaccagccuguacaagggcguguacgagcugcagacccuggagcugaacauggagacccugaacaugugcaugccccugagcugcaccaagaacaacagccaccacuacaucauggugggcaacgagaccggccuggagcugacccugaccaacaccagcaucaucaaccacaaguucugcaaccugagcgacgcccacaagaagaaccuguacgaccacgcccugaugagcaucaucagcaccuuccaccugagcauccccaacuucaaccaguacgaggccaugagcugcgacuucaacggcggcaagaucagcgugcaguacaaccugagccacagcuacgccggcgacgccgccaaccacugcggcaccaucgccaacggcgugcugcagaccuucaugagaauggccuggggcggcagcuacaucgcccuggacagcggcagagacagaugggacugcaucaugaccagcuaccaguaccugaucauccagaacaccaccugggaggaccacugccaguucagcagacccagccccaucggcuaccugggccugcugagccagagaaccagagacaucuacaucagcagaagaagaagaggcaccuucaccuggacccugagcgacagcgagggcaaggacacccccggcggcuacugccugaccagauggaugcugaucgaggccgagcugaagugcuucggcaacaccgccguggccaagugcaacgagaagcacgacgaggaguucugcgacaugcugagacuguucgacuucugcaagcaggccauccagagacugaaggcccccgcccagaugagcauccagcugaucaacaaggccgugaacgcccugaucaacgaccagcugaucaugaagaaccaccugagagacaucaugggcauccccuacugcaacuacagcaaguacugcuaccugaaccacaccaccaccggcaagaccagccugcccaagugcugccuggugagcaacggcagcuaccugaacgagacccacuucagcgacgacaucgagcagcaggccgacaacaugaucaccgagaugcugcagaaggaguacauggagagacagggcaagaccccccugggccugguggaccuguucguguucagcaccagcuucuaccugaucagcaucuuccugcaccuggugaagauccccacccacagacacguggugggcaagagcugccccaagccccacagacugaaccacaugggcaucugcagcugcggccuguacggccagcccggcgugcccgugaaguggaagagaugaggacuagucccuguucccagagcccacuuuuuuuucuuuuuuugaaauaaaauagccugucuuucagaucucaaaggcucuuuucagagccaccaaaaaaaaaaaaaaaaaaaaaaaaaaaaaaaaaaaaaaaaaaaaaaaaaaaaaaaaaaaaaaaaaaaaaaaaaaaaaaaaaaaaaaaaaaaaaaaaaaaaa

SEQ ID NO: 27104 - RNA, 1767 nt, Artificial Sequence
  mRNA product Design a-2 (hSL-A100) comprising derived and/or modified sequence from MOPV/LASV reassortant(IGS-1;Clade IV)__AFY05576__GPCmut4 (opt4)
aggagaguccgcucagccagguugcagaagcggcuuagcguguguccuaaucuucucucugcguguagguaggccugugccgcaaacaagcuuaccaugggccagaucgugaccuucuuccaggaggugccccacgugaucgaggaggugaugaacaucgugcugaucgcccugagcgugcuggccgugcugaagggccuguacaacuucgccaccugcggccuggugggccuggugaccuuccugcugcugugcggcagaagcugcaccaccagccuguacaagggcguguacgagcugcagacccuggagcugaacauggagacccugaacaugugcaugccccugagcugcaccaagaacaacagccaccacuacaucauggugggcaacgagaccggccuggagcugacccugaccaacaccagcaucaucaaccacaaguucugcaaccugagcgacgcccacaagaagaaccuguacgaccacgcccugaugagcaucaucagcaccuuccaccugagcauccccaacuucaaccaguacgaggccaugagcugcgacuucaacggcggcaagaucagcgugcaguacaaccugagccacagcuacgccggcgacgccgccaaccacugcggcaccguggccaacggcgugcugcagaccuucaugagaauggccuggggcggcagcuacaucgcccuggacagcggcagaggcaacugggacugcaucaugaccagcuaccaguaccugaucauccagaacaccaccugggaggaccacugccaguucagcagacccagccccaucggcuaccugggccugcugagccagagaaccagagacaucuacaucagcagaagaagaagaggcaccuucaccuggacccugagcgacagcgagggcgaggacacccccggcggcuacugccugaccagauggaugcugaucgaggccgagcugaagugcuucggcaacaccgccguggccaagugcaacgagaagcacgacgaggaguucugcgacaugcugagacuguucgacuucugcaagcaggccauccagagacugaaggcccccgcccagaugagcauccagcugaucaacaaggccgugaacgcccugaucaacgaccagcugaucaugaagaaccaccugagagacaucaugggcauccccuacugcaacuacagcaaguacugcuaccugaaccacaccaccaccggcagaaccagccugcccaagugcugccuggugagcaacggcagcuaccugaacgagacccacuucagcgacgacaucgagcagcaggccgacaacaugaucaccgagaugcugcagaaggaguacauggagagacagggcaagaccccccugggccugguggaccuguucguguucagcaccagcuucuaccugaucagcaucuuccugcaccuggugaagauccccacccacagacacaucgugggcaagagcugccccaagccccacagacugaaccacaugggcaucugcagcugcggccuguacaagcagcccggcgugcccgugaaguggaagagaugaggacuagucccuguucccagagcccacuuuuuuuucuuuuuuugaaauaaaauagccugucuuucagaucucaaaggcucuuuucagagccaccaaaaaaaaaaaaaaaaaaaaaaaaaaaaaaaaaaaaaaaaaaaaaaaaaaaaaaaaaaaaaaaaaaaaaaaaaaaaaaaaaaaaaaaaaaaaaaaaaaaaa

SEQ ID NO: 27105 - RNA, 1767 nt, Artificial Sequence
  mRNA product Design a-2 (hSL-A100) comprising derived and/or modified sequence from LASV(LM765-SLE-2012;Clade IV)__AIT17814__GPCmut4 (opt4)
aggagaguccgcucagccagguugcagaagcggcuuagcguguguccuaaucuucucucugcguguagguaggccugugccgcaaacaagcuuaccaugggccagaucgugaccuucuuccaggaggugccccacgugaucgaggaggugaugaacaucgugcugaucgcccugagcauccuggccgugcugaagggccuguacaacuucgccaccugcggccuggugggccuggugaccuuccugcugcugugcggcagaagcugcaccaccagccuguacaagggcguguacgagcugcagacccuggagcugaacauggagacccugaacaugugcaugccccugagcugcaccaagaacaacagccaccacuacaucauggugggcaacgagaccggccuggagcugacccugaccaacaccagcaucaucgaccacaaguucugcaaccugagcgacgcccacagaaagaaccuguacgaccacgcccugaugagcaucaucagcaccuuccaccugagcauccccaacuucaaccaguacgaggccaugagcugcgacuucaacggcggcaagaucagcgugcaguacaaccugagccacagcuacgccaaggacgccgccgaccacugcggcaccguggccaacggcgugcugcagaccuucaugagaauggccuggggcggcagcuacaucgcccuggacagcggcagaggcagaugggacugcaucaugaccagcuaccaguaccugaucauccagaacaccaccugggaggaccacugccaguucagcagacccagccccaucggcuaccugggccugcugagccagagaaccagagacaucuacaucagcagaagaagaagaggcaccuucaccuggacccugagcgacagcgagggcaaggacacccccggcggcuacugccugaccagauggaugcugaucgaggccgagcugaagugcuucggcaacaccgccguggccaagugcaacgagaagcacgacgaggaguucugcgacaugcugagacuguucgacuucugcaagcaggccauccagagacugaaggcccccgcccagaugagcauccagcugaucaacaaggccgugaacgcccugaucaacgaccagcugaucaugaagaaccaccugagagacaucaugggcauccccuacugcaacuacagcaaguacugcuaccugaaccacaccaccaccggcaagaccagccugcccaagugcugccuggugagcaacggcagcuaccugaacgagacccacuucagcgacgacaucgagcagcaggccgacaacaugaucaccgagaugcugcagaaggaguacauggagagacagggcaagaccccccugggccugguggaccuguucguguucagcaccagcuucuaccugaucagcaucuuccugcaccuggugaagauccccacccacagacacaucgugggcaagcccugccccaagccccacagacugaaccacaugggcaucugcagcugcggccuguacaagcagcccggcgugcccgugaaguggaagagaugaggacuagucccuguucccagagcccacuuuuuuuucuuuuuuugaaauaaaauagccugucuuucagaucucaaaggcucuuuucagagccaccaaaaaaaaaaaaaaaaaaaaaaaaaaaaaaaaaaaaaaaaaaaaaaaaaaaaaaaaaaaaaaaaaaaaaaaaaaaaaaaaaaaaaaaaaaaaaaaaaaaaa

SEQ ID NO: 27106 - RNA, 1767 nt, Artificial Sequence
  mRNA product Design a-2 (hSL-A100) comprising derived and/or modified sequence from LASV(LM776-SLE-2012;Clade IV)__AIT17824__GPCmut4 (opt4)
aggagaguccgcucagccagguugcagaagcggcuuagcguguguccuaaucuucucucugcguguagguaggccugugccgcaaacaagcuuaccaugggccagaucgugaccuucuuccaggaggugccccacgugaucgaggaggugaugaacaucgugcugaucgcccugagcauccuggccgugcugaagggccuguacaacuucgccaccugcggccuggugggccuggugaccuuccugcugcugugcggcagaagcugcaccaccagcguguacaagggcguguacgagcugcagacccuggagcugaacauggagacccugaacaugugcaugccccugagcugcaccaagaacaacagccaccacuacaucauggugggcaacgagaccggccuggagcugacccugaccaacaccagcaucaucaaccacaaguucugcaaccugagcgacgcccacaagaagaaccuguacgaccacgcccugaugagcaucaucagcaccuuccaccugagcauccccaacuucaaccaguacgaggccaugagcugcgacuucaacggcggcaagaucagcgugcaguacaaccugagccacagcuacgccggcgacgccgccaaccacugcggcaccguggccaacggcgugcugcagaccuucaugagaauggccuggggcggcagcuacaucgcccuggacagcggccacggcaagugggacugcaucaugaccagcuaccaguaccugaucauccagaacaccaccugggaggaccacugccaguucagcagacccagccccaucggcuaccugggccugcugagccagagaaccagagacaucuacaucagcagaagaagaagaggcaccuucaccuggacccugagcgacagcgagggcaaggacacccccggcggcuacugccugaccagauggaugcugaucgaggccgagcugaagugcuucggcaacaccgccguggccaagugcaacgagaagcacgacgaggaguucugcgacaugcugagacuguucgacuucugcaagcaggccauccagagacugaaggcccccgcccagaugagcauccagcugaucaacaaggccgugaacgcccugaucaacgaccagcugaucaugaagaaccaccugagagacaucaugggcauccccuacugcaacuacagcaaguacugcuaccugaaccacaccaccaccggcaagaccagccugcccaagugcugccuggugagcaacggcagcuaccugaacgagacccacuucagcgacgacaucgagcagcaggccgacaacaugaucaccgagaugcugcagaaggaguacauggagagacagggcaagaccccccugggccugguggaccuguucguguucagcaccagcuucuaccugaucagcaucuuccugcaccuggugaagauccccacccacagacacaucgugggcaagagcugccccaagccccacagacugaaccacaugggcaucugcagcugcggccuguacaagcagcccggcgugcccgugagauggaagagaugaggacuagucccuguucccagagcccacuuuuuuuucuuuuuuugaaauaaaauagccugucuuucagaucucaaaggcucuuuucagagccaccaaaaaaaaaaaaaaaaaaaaaaaaaaaaaaaaaaaaaaaaaaaaaaaaaaaaaaaaaaaaaaaaaaaaaaaaaaaaaaaaaaaaaaaaaaaaaaaaaaaaa

SEQ ID NO: 27107 - RNA, 1767 nt, Artificial Sequence
  mRNA product Design a-2 (hSL-A100) comprising derived and/or modified sequence from LASV(Mad39;Clade IV)__ANH09722__GPCmut4 (opt4)
aggagaguccgcucagccagguugcagaagcggcuuagcguguguccuaaucuucucucugcguguagguaggccugugccgcaaacaagcuuaccaugggccagaucgugaccuucuuccaggaggugccccacgugaucgaggaggugaugaacaucgugcugaucgcccugagcauccuggccgugcugaagggccuguacaacguggccaccugcggccugaucggccuggugaccuuccugcugcugugcggcagaagcugcaccaccacccuguacaagggcguguacgagcugcaggcccuggagcugaacauggagacccugaacaugugcaugccccugagcugcaccaagaacaacagccaccacuacaucagagugggcaacgagaccggccuggagcugacccugaccaacaccagccugaucaaccacaaguucugcaaccugagcgacgcccacaagaagaaccuguacgaccacgcccugaugagcaucaucagcaccuuccaccugagcauccccaacuucaaccaguacgaggccaugagcugcgacuucaacgacggcaagaucagcgugcaguacaaccugagccacaccuacgccggcgacaccgccaaccacugcggcaccguggccaacggcgugcugcagaccuucaugagaauggccuggggcggcagcuacaucgcccuggacagcggcagaggcggcugggacugcaucaugaccagcuaccaguaccugaucauccagaacaccaccugggaggaccacugccaguucagcagacccagccccaucggcuaccugggccugcugagccagagaaccagagacaucuacaucagcagaagaagaagaggcaccuucaccuggacccugagcgacagcgagggcaaggacacccccggcggcuacugccugaccagauggaugcugaucgaggccgagcugaagugcuucggcaacaccgccguggccaagugcaacgagaagcacgacgaggaguucugcgacaugcugagacuguucgacuucugcaagcaggccauccagagacugaaggcccccgcccagaugagcauccagcugaucaacaaggccgugaacgcccugaucaacgaccagcugaucaugaagaaccaccugagagacaucaugggcauccccuacugcaacuacagcaaguacugcuaccugaaccacaccgugaccggcaagaccagccugcccaagugcugccuggugagcaacggcagcuaccugaacgagacccacuucagcgacgacaucgagcagcaggccgacaacaugaucaccgagaugcugcagaaggaguacauggagagacagggcaagaccccccugggccugguggaccuguucguguucagcaccagcuucuaccugaucagcaucuuccugcaccuggugaagauccccacccacagacacguggugggcaagcccugccccaagccccacagacugaaccacaugggcaucugcagcugcggcuucuacaagcagcccggcgugcccgugagauggaagagaugaggacuagucccuguucccagagcccacuuuuuuuucuuuuuuugaaauaaaauagccugucuuucagaucucaaaggcucuuuucagagccaccaaaaaaaaaaaaaaaaaaaaaaaaaaaaaaaaaaaaaaaaaaaaaaaaaaaaaaaaaaaaaaaaaaaaaaaaaaaaaaaaaaaaaaaaaaaaaaaaaaaaa

SEQ ID NO: 27108 - RNA, 1767 nt, Artificial Sequence
  mRNA product Design a-2 (hSL-A100) comprising derived and/or modified sequence from LASV(Z0947-SLE-2011;Clade IV)__AIT17840__GPCmut4 (opt4)
aggagaguccgcucagccagguugcagaagcggcuuagcguguguccuaaucuucucucugcguguagguaggccugugccgcaaacaagcuuaccaugggccagaucgugaccuucuuccaggaggugccccacgugaucgaggaggugaugaacaucgugcugaucgcccugagcauccuggccgugcugaagggccuguacaacuucgccaccugcggccuggugggccuggugaccuuccugcugcugugcggcagaagcugcaccaucagccuguacaagggcguguacgagcugcagacccuggagcugaacauggagacccugaacaugugcaugccccugagcugcaccaagaacaacagccaccacuacaucauggugggcaacgagaccggccuggagcugacccugaccaacaccagcaucaucaaccacaaguucugcaaccugagcgacgcccacaagaagaaccuguacgaccacgcccugaugagcaucaucagcaccuuccaccugagcauccccaacuucaaccaguacgaggccaugagcugcgacuucaacggcggcaagaucagcgugcaguacaaccugagccacagcuacgccggcgacgccgccaaccacugcggcaccguggccaacggcgugcugcagaccuucaugagaauggccuggggcggcagcuacaucgcccuggacagcggcagagacagaugggacugcaucaugaccagcuaccaguaccugaucauccagaacaccaccugggaggaccacugccaguucagcagacccagccccaucggcuaccugggccugcugagccagagaaccagagacaucuacaucagcagaagaagaagaggcaccuucaccuggacccugagcgacagcgagggcaaggacacccccggcggcuacugccugaccagauggaugcugaucgaggccgagcugaagugcuucggcaacaccgccguggccaagugcaacgagaagcacgacgaggaguucugcgacaugcugagacuguucgacuucugcaagcaggccauccagagacugaaggcccccgcccagaugagcauccagcugaucaacaaggccgugaacgcccugaucaacgaccagcugaucaugaagaaccaccugagagacaucaugggcauccccuacugcaacuacagcaaguacugcuaccugaaccacaccaccaccggcaagaccagccugcccaagugcugccuggugagcaacggcagcuaccugaacgagacccacuucagcgacgacaucgagcagcaggccgacaacaugaucaccgagaugcugcagaaggaguacauggagagacagggcaagaccccccugggccugguggaccuguucguguucagcaccagcuucuaccugaucagcaucuuccugcaccuggugaagauccccacccacagacacaucgugggcaagcccugccccaagccccacagacugaaccacaugggcaucugcagcugcggccuguacaagcagcccggcgugcccgugaaguggaagagaugaggacuagucccuguucccagagcccacuuuuuuuucuuuuuuugaaauaaaauagccugucuuucagaucucaaaggcucuuuucagagccaccaaaaaaaaaaaaaaaaaaaaaaaaaaaaaaaaaaaaaaaaaaaaaaaaaaaaaaaaaaaaaaaaaaaaaaaaaaaaaaaaaaaaaaaaaaaaaaaaaaaaa

SEQ ID NO: 27109 - RNA, 1767 nt, Artificial Sequence
  mRNA product Design a-2 (hSL-A100) comprising derived and/or modified sequence from LASV(Josiah;Clade IV)__NP_694870__GPCmut4 (opt5)
aggagaguccgcucagccagguugcagaagcggcuuagcguguguccuaaucuucucucugcguguagguaggccugugccgcaaacaagcuuaccaugggccagaucgugaccuucuuucaagaggucccccacguuauugaagaggugaugaacaucgugcugauugcccucagcguccuggcugugcuuaaggggcuguacaauuucgccacaugcggacucguuggccuggugacguuucuucugcucugugggagauccugcaccacaucucuguauaaaggagucuacgaacugcagacccucgagcugaacauggaaacacuuaauauguguaugccucugagcugcaccaagaacaauucccaucacuauaucauggugggcaacgagacagggcucgagcugacccuuacgaauaccucuauuaucaaccauaaauucuguaaucugagcgacgcgcacaagaaaaaccucuacgaucaugcucugauguccaucauuucuacauuucaccugagcaucccgaauuucaaccaguaugaagccauguccugcgacuuuaauggaggcaagauuagcguucaguacaaccucucucacuccuaugccggcgaugcugccaaucauugugggaccguggcuaacggaguccugcaaacauucaugcggauggccuggggcgggagcuacaucgcgcuugacucuggacgcggcaacugggauugcauuaugaccuccuaccaguaucugaucauucagaauacgacaugggaggaccacugucaguuuagcagacccucuccuaucggguaccucggacugcuuucccaacggacccgcgauaucuauauuagcagacggcgcagaggcacauucaccuggacccuguccgacucugaaggcaaggauacacccgggggauacugccucacgcgguggaugcugaucgaggccgagcugaaauguuuuggcaacaccgcuguggccaagugcaaugaaaaacaugacgaggaguucugcgauaugcuccgccuguuugacuucuguaagcaggcuauucagagacuuaaagccccugcgcagaugagcauccaacugauuaacaaggccgugaaugcucucaucaacgaucagcugaucaugaagaaucaccuucgggacauuauggggauccccuauugcaacuacuccaaauauuguuaccugaaucacacaaccacaggacgcaccagccucccuaagugcugucuggucucuaacggcuccuaccugaaugaaacgcauuucagcgacgauauugaacagcaagccgacaacaugaucacagagaugcuccagaaagaguauauggaaagacaggggaagaccccgcugggacuuguugaucuguuuguguucucuaccagcuuuuaccucauuuccaucuuccugcaccuggugaaaauccccacacaucggcacauugucggcaagucuugcccuaaaccccaucgccuuaaucacaugggcaucuguagcugcgggcucuauaagcagccuggagugcccguuaaguggaaaagaugaggacuagucccuguucccagagcccacuuuuuuuucuuuuuuugaaauaaaauagccugucuuucagaucucaaaggcucuuuucagagccaccaaaaaaaaaaaaaaaaaaaaaaaaaaaaaaaaaaaaaaaaaaaaaaaaaaaaaaaaaaaaaaaaaaaaaaaaaaaaaaaaaaaaaaaaaaaaaaaaaaaaa

SEQ ID NO: 27110 - RNA, 1764 nt, Artificial Sequence
  mRNA product Design a-2 (hSL-A100) comprising derived and/or modified sequence from LASV(LP;Clade I)__AAF86701__GPCmut4 (opt5)
aggagaguccgcucagccagguugcagaagcggcuuagcguguguccuaaucuucucucugcguguagguaggccugugccgcaaacaagcuuaccaugggccagaucauuaccuucuuucaagaggugccccacgucaucgaagagguuaugaacauugugcugaucgcccucagccugcuugcuauucugaaggggcucuacaauaucgccacaugcggaaucauuggccugguggcguuccuuuuucugugugggaaauccugcucucucacgcugaagggaggcuaugaacugcagacccucgagcugaacauggaaacacuuaauauguguaugccucugagcugcaccaaaaacuccucucaucacuacaucagagucgggaaugagacaggacucgagcugacccuuacaaacaccagcauuaucaaucauaaguucuguaaccuguccgacgcucacaaaaagaaucucuaugaucaugcccugaugucuauuaucagcacguuucaccuguccauuccgaacuucaaucaguacgaagccaugagcugcgacuuuaacggcggcaagaucucugugcaguauaaucucucccacagcuacgcuggggaugccgcugagcauuguggaaccguugccaacggcgugcugcaaacauucaugcggauggcguggggagggcgcuauaucgcccuugacucuggcaaagggaauugggauugcauuaugaccuccuaccaguaccugaucauucagaacacaaccugggaagaccacugucaguuuagcagacccucuccuaucggauaucucggccugcuuucccaacggacgcgcgauauuuacaucagcagacggcgcagaggcacauucaccuggacacuguccgacucugaggggaacgagacccccggaggcuauugccucacccgguggaugcugaucgaagcugagcugaaguguuuugggaauacagccgucgcuaaaugcaacgaaaagcaugaugaggaguucugcgacaugcuccgccuguuugauuucuguaaacaggccauuagacggcuuaaggcgccugcccagaugagcauccagcugauuaauaaggcugugaacgcccucaucaaugaccaacugauuaugaaaaaccaccuucgcgauaucaugggaauccccuacugcaauuauuccaaguacuguuaucugaaccacacgagcucuggcagaaccucccucccuaaaugcugucugauuagcaaugggucuuaccugaacgaaacacaguucagcgacgacaucgagcagcaagcugauaauaugauuaccgaaaugcuccagaaggaguacaucgaacggcagggaaaaacaccgcugggccuuguugacauuuuuaucuucuccaccucuuuuuaucugauuagcaucuuccuccaucugaucaagauucccacgcaccgccauaucgugggcaaaccuugccccaagccucacagacugaaccauaugggggucuguuccugcggacuuuacaagcaccccggcgugccgacaaaauggaagcggugaggacuagucccuguucccagagcccacuuuuuuuucuuuuuuugaaauaaaauagccugucuuucagaucucaaaggcucuuuucagagccaccaaaaaaaaaaaaaaaaaaaaaaaaaaaaaaaaaaaaaaaaaaaaaaaaaaaaaaaaaaaaaaaaaaaaaaaaaaaaaaaaaaaaaaaaaaaaaaaaaaaaa

SEQ ID NO: 27111 - RNA, 1764 nt, Artificial Sequence
  mRNA product Design a-2 (hSL-A100) comprising derived and/or modified sequence from LASV(803213;Clade II)__AAF86703__GPCmut4 (opt5)
aggagaguccgcucagccagguugcagaagcggcuuagcguguguccuaaucuucucucugcguguagguaggccugugccgcaaacaagcuuaccaugggccagaucauuaccuucuuucaagaggugccccacgucaucgaagagguuaugaacauugugcugaucgcccucagccugcuugcuauucugaaggggaucuacaauguggccacaugcggacucuucggccugaucuccuuucuucugcucugugggagaucuugcagcgucacguauaaaggaguguacgaacugcagacccuggagcucaacauggcgaaucugaacauguguaugccucuuuccugcacaaagaauaacucucaucacuauauuaugguuggcaaugaaaccgggcuggagcucacacugaccaacacaagcaucauuaaucauaaauucuguaaccuuuccgacgcucacaagaaaaaucuguacgaucaugcccucaugucuaucauuagcaccuuucaccuguccaucccgaacuucaaucaguaugaggccaugagcugcgacuuuaacggaggcaagauuucugugcaguacaaucugucccacagcuucgcugucgaugccgcuaaccauuguggcacgaucgccaacggggugcuccaaaccuuuaugcggauggcguggggaggcucuuauaucgcccuggacuccgggaagggaaauugggauugcauuaugacaagcuaccaguaccuuaucauucagaacaccacaugggaagaccacugucaguucucucgccccuccccuaucggcuaucuggggcuccugagccaaagaacccgggauauuuacaucucccgcagacggcgcggaacguuuacauggacccuuucugacagcgagggcaaugaagcucccggcggguauugccugacaagauggaugcucaucgaggccgagcugaaauguuucggaaacaccgcuguugccaagugcaaugaaaaacaugaugaggaauuuugcgacaugcugcgccucuucgauuucuguaagcaggcgauuaaacggcugaagaccccugcccagauguccauccagcuuauuaacaaggcugugaaugcccugaucaacgaccaacucauuaugaaaaaucaccugagagauaucaugggcauccccuacugcaacuauagccgguacuguuaucuuaaucacacagucacggggaagaccucucugccucgcugcugucucguguccaacggaagcuaccugaaugagacacauuuuucugacgacauugaacagcaggcugauaacaugaucaccgagaugcugcaaaaagaguacauggacagacagggcaagacaccgcucgggcugguggaucuuuucgucuuuagcaccuccuucuaucugauuucuaucuuucuccaccugguuaaaauucccacgcaucggcacaucgugggaaagccuugccccaaaccucaucgccugaaucacaugggcauuuguagcugcggccuuuacaagcaccccggggugccggucaaguggaaaagaugaggacuagucccuguucccagagcccacuuuuuuuucuuuuuuugaaauaaaauagccugucuuucagaucucaaaggcucuuuucagagccaccaaaaaaaaaaaaaaaaaaaaaaaaaaaaaaaaaaaaaaaaaaaaaaaaaaaaaaaaaaaaaaaaaaaaaaaaaaaaaaaaaaaaaaaaaaaaaaaaaaaaa

SEQ ID NO: 27112 - RNA, 1764 nt, Artificial Sequence
  mRNA product Design a-2 (hSL-A100) comprising derived and/or modified sequence from LASV(GA391;Clade III)__CAA36645__GPCmut4 (opt5)
aggagaguccgcucagccagguugcagaagcggcuuagcguguguccuaaucuucucucugcguguagguaggccugugccgcaaacaagcuuaccaugggccagaucgugaccuucuuucaagaggucccccacguuauugaagaggugaugaacaucgugcugauugcccucagcauccuggcuauucuuaaggggcuguacaaugucgccacaugcggacucaucggccuggugacguuccuucugcucuccgggagaucuuguagccugaucuauaaaggaaccuacgaacugcagacacucgagcugaacauggaaacccuuaauaugugcaugccucuguccuguacaaagaacaauucucaucacuauauucggguuggcaacgagaccgggcucgagcugacacuuaccaauacgagcauccugaaccauaaauuuugcaaucucuccgacgcgcacaagcgcaaccuguacgaucauucucugaugagcauuaucuccaccuuccaccucagcauuccgaauuuuaaccaguaugaagcuaugucuugugacuucaauggaggcaaaaucacagugcaguacaaccugucccacagcuuugccgucgaugccgcuggccauugcgggacccuugccaauggagugcugcaaacauucaugagaauggcuuggggcgggucuuauauugcccucgacuccggacggggcaacugggauuguaucaugaccagcuaccaguaccugaucauucagaacacgacaugggacgaucacugccaguuuucucgccccuccccuaucggguaucuuggacugcucagccaaagaacccgggacauuuacaucucccgcagacggcgcggcacauucaccuggacccugucugauagcgagggcaaugaaacacccgggggauauugucugacgagauggaugcucauugaggcggagcugaagugcuuuggcaacaccgccguugcuaaguguaaugaaaaacaugacgaggaguucugcgauaugcuucggcuguuugacuucugcaagcaggccauccgcagacucaaaaccccugcucagauguccauccagcugauuaacaaggccgugaaugcgcuuaucaacgaucaacugauuaugaaaaaucaccuccgggacaucauggggauucccuacuguaacuauagccgcuacugcuaucugaaucacacaucuacaggaaagaccucccugccuagauguugccucaucagcaacggcucuuaccugaaugaaacgaaguucagcgacgauaucgaacagcaggccgacaacaugauuacagagaugcuucaaaaagaguacaucgaucggcaggggaagaccccgcugggacucgucgaccuguuuguguucuccaccucuuuuuaucugauuagcaucuuccuucaucucgugaaaauucccacacacagacauaucgucggcaagccuugucccaaaccucaccgccugaaucauaugggcauuugcuccugugggcuguacaagcagcccggaguuccggugcgguggaaaagaugaggacuagucccuguucccagagcccacuuuuuuuucuuuuuuugaaauaaaauagccugucuuucagaucucaaaggcucuuuucagagccaccaaaaaaaaaaaaaaaaaaaaaaaaaaaaaaaaaaaaaaaaaaaaaaaaaaaaaaaaaaaaaaaaaaaaaaaaaaaaaaaaaaaaaaaaaaaaaaaaaaaaa

SEQ ID NO: 27113 - RNA, 1767 nt, Artificial Sequence
  mRNA product Design a-2 (hSL-A100) comprising derived and/or modified sequence from LASV(AV;Clade V)__CCA30314__GPCmut4 (opt5)
aggagaguccgcucagccagguugcagaagcggcuuagcguguguccuaaucuucucucugcguguagguaggccugugccgcaaacaagcuuaccaugggccagaucgugaccuucuuucaagaggucccccacguuauugaagaggugaugaacaucgugcugauugcccucagcauccuggcuguccuuaaggggcuguacaauauugccacaugcggacucaucggccugaucacguuccuucugcucugugggagauccugcucuagcaaccuguauaaaggaguguacgaacugcagucccucgaccugaauauggagacccuuaacauguguaugccucugucuugcacaaagaauaacagccaucacuauauucggguuggcaaugauaccgggcucgaacugacacuuaccaacacauccauccugaaucauaaauuuuguaaccucucugacgcgcacaagaaagaucuguacgaccaugcucugaugagcauuaucuccaccuuccaccucagcauuccgaauuuuaaccaguaugaggccaugucuugcgauuucaauggaggcaagaucuccgugcaguacaaccugagccacucuuaugccauugacgcugccaaucauuguggcacggucgcuaacgggauccuucaaaccuuuaugcgcauggccuggggaggcuccuacaucgcgcuggauagcgggagaggaaacugggacugcauuaugacaucuuaccaguaucucaucauucagaauaccacaugggagaaccacugucaguucucccggcccagcccuaucggcuaccuggggcuucugucccaacgcaccagagauauuuauaucucucggcgcagacggggaacguuuacauggacccucagcgacuccgaaggcaaugccacacccggcggguacugccugacccgcuggaugcugaucgaggcugaacucaaguguuucggaaacaccgccguggcuaaaugcaaugagaagcaugaugaggaauuuugcgacaugcugagacuuuucgauuuuuguaaacaggccauuagccggcugaagucuccugcgcagauguccauccagcucauuaacaaagccguuaaugcucugaucaacgaccaacuuauuaugaagaaucaucugcgcgacaucaugggcauccccuauugcaacuacagcaaguauuguuaccucaaucacacaauuacggggaaaaccucucugccuaagugcugucuggugagcaacggauccuaccucaaugagacacacuucucugaugacaucgaacagcaggccgauaacaugauuaccgagaugcugcaaaaagaauauauggagagacagggcaagacaccgcuugggcuggucgaccucuucguguuuagcaccuccuucuaccugaucagcauuuuucugcggcuugugaaaauccccacgcaccgccauauugucggaaagccuugccccaaaccucacagacucaaucauaugggcaucuguucuugcggccuguauaagcagcccgggguuccggugcgguggaagagaugaggacuagucccuguucccagagcccacuuuuuuuucuuuuuuugaaauaaaauagccugucuuucagaucucaaaggcucuuuucagagccaccaaaaaaaaaaaaaaaaaaaaaaaaaaaaaaaaaaaaaaaaaaaaaaaaaaaaaaaaaaaaaaaaaaaaaaaaaaaaaaaaaaaaaaaaaaaaaaaaaaaaa

SEQ ID NO: 27114 - RNA, 1764 nt, Artificial Sequence
  mRNA product Design a-2 (hSL-A100) comprising derived and/or modified sequence from LASV(Togo/2016/7082;Clade VI)__AMR44577__GPCmut4 (opt5)
aggagaguccgcucagccagguugcagaagcggcuuagcguguguccuaaucuucucucugcguguagguaggccugugccgcaaacaagcuuaccaugggccagaucauuaccuucuuucaagaggugccccacgucaucgaagagguuaugaacauugugcugaucgcccucagccugcuugcuauucugaaggggguguacaaugucgccacaugcggaaucaucggccucgugacguuccuguuucuuugugggagauccugcucucugauuuauaaaggaagcuacgaacuccagacccuggagcugaacauggaaacacucaauauguguaugccucuguccugcaccaagaacucuagccaucacuauauccggguuggcaaugagacagggcuugagcugacccucacaaacaccuccauuaucaaucauaaauucuguaaccugucugacgcgcacaagcgcaaucuuuacgaucaugcucugaugagcauucucuccacguuucaccugagcaucccgaacuucaaucaguaugaagccaugucuugcgacuuuaacggaggcaaaauuuccgugcaguacaaucugagccacgccuaugcugucgaugccgcugagcauuguggcaccguggccaacgggguucuccaaacauucaugagaauggcguggggaggcucuuacaucgcccuggacuccgggcggggaaauugggauugcaucaugaccagcuaccaguaucuuauuauccagaacacaaccugggaagaccacugucaguuuucucgccccuccccuauuggcuaccuggggcuccugagccaaagaacgcgggauaucuauauuucccgcagacggcgcggaacauucaccuggacacuuucugacagcgagggcaacgagacccccggcggguacugccugaccagauggaugcucaucgaagcugagcugaaguguuuuggaaauacagccguggcuaagugcaacgaaaaacaugaugaggaguucugcgacaugcugcggcucuuugauuucuguaagcaggccauccagcgccugaaauccccugcgcagaugagcauucaacuuaucaauaaggccgucaacgcucugauuaaugaccagcucaucaugaaaaaccaccugagagauaugaugggcauucccuauugcaauuacucuaaguauuguuaccuuaaccacacguccagcgggcggaccucucugccuaagugcugucucgugagcaauggauccuaccugaacgaaacacauuucucugacgacaucgagcagcaagccgauaauaugaucaccgaaaugcugcagaaagaguauauugaccgccagggcaagacaccgcucgggcugguggaucuuuuugucuucagcaccuccuuuuaccugaucagcauuuuccuccaccugaucaaaauucccacgcauagacacaucguuggaaagccuugccccaaaccucaucggcugaaccacaugggcauuuguucuugcggccuuuauaagcagcccggggugccgacaagauggaaacgcugaggacuagucccuguucccagagcccacuuuuuuuucuuuuuuugaaauaaaauagccugucuuucagaucucaaaggcucuuuucagagccaccaaaaaaaaaaaaaaaaaaaaaaaaaaaaaaaaaaaaaaaaaaaaaaaaaaaaaaaaaaaaaaaaaaaaaaaaaaaaaaaaaaaaaaaaaaaaaaaaaaaaa

SEQ ID NO: 27115 - RNA, 1764 nt, Artificial Sequence
  mRNA product Design a-2 (hSL-A100) comprising derived and/or modified sequence from LASV(KAK-428;Clade n.d. (VII))__ANH09740__GPCmut4 (opt5)
aggagaguccgcucagccagguugcagaagcggcuuagcguguguccuaaucuucucucugcguguagguaggccugugccgcaaacaagcuuaccaugggccagaucgugaccuucuuucaagaggucccccacguuauugaagaggugaugaacaucgugcugauugcccucagccugcuugcuauccugaaggggcucuacaauuucgccacaugcggagucauuggccugaucacguuucuucugcucugugggagauccugcucugcgaccuauaaaggacaguacgaacugcagacacuggagcucaacauggaaagccugaauauguguaugccucuuuccugcaccaagaacaauucucaucacuauauccgggcuggcaacaauacagggcuggagcucacccugacaaacaccagcauuaucucccauaaauucuguaaucuuucugacgcccacaagaaaaaccuguacgaucauacgcucaugagcauuaucaccacauuucaccuguccauuccgaauuucaaccaguaugaggccaugagcugcgacuuuaauggaggcaagaucucuauucaauacaaccugucccacagcuaugcuggcgaugccgcucagcauugugggaccguggccaauggaguucuccagacauucaugcgcauggcguggggcgggucuuaccuggcccuugacuccggaagacggggcugggauugcaucaucagcucuuaccaguaucugauuauccaaaacaccacgugggacgaucacugucaguuuucccgccccagcccuauuggguaccucggauucgugucccagaagacaagagacaucuauauuucucggcgcagacggggcaccuuuacauggacccugagcgauuccgaaggccaugacaugcccgggggauacugccuuacccgcuggaugcugaucgaggcugaucucaaauguuucggcaacacagccgucgcuaagugcaaugaaaaacacgacgaggaguuuugcgauauguggagacuguucgacuucuguaagcaggccauccaacggcugaaagcgccugcccagaugaacauucagcucaucaauaaggcugugaacgcccugauuaaugaccaacuuaugaugaagaaccaucugcgcgauaucauggggauucccuauugcaauuacagcaaauuuuguuaucucaacaauacgaccacaggaagaaccucucugccucggugcugucuuaucuccaacggcagcuaccugaaugaaacacacuucucugacgauaucgagcagcaggcugacaacaugauuaccgaaaugcuccagaaggaguacauggaucgccaagggaaaacgccgcugggacugguugaccucuuuguguucagcacauccuuuuaucugaucaccauuuuccuucaccuggucaagauccccacccauagacacauugugggcaaaccuugccccaagccucaucggcucaaucacaugggcaucuguucuugcgggcuguacaaacagcccggagugccggucagauggaagcgcugaggacuagucccuguucccagagcccacuuuuuuuucuuuuuuugaaauaaaauagccugucuuucagaucucaaaggcucuuuucagagccaccaaaaaaaaaaaaaaaaaaaaaaaaaaaaaaaaaaaaaaaaaaaaaaaaaaaaaaaaaaaaaaaaaaaaaaaaaaaaaaaaaaaaaaaaaaaaaaaaaaaaa

SEQ ID NO: 27116 - RNA, 1764 nt, Artificial Sequence; identical to SEQ ID NO: 27110
  mRNA product Design a-2 (hSL-A100) comprising derived and/or modified sequence from LASV(Pinneo-NIG-1969;Clade I)__AIT17836__GPCmut4 (opt5)

SEQ ID NO: 27117 - RNA, 1764 nt, Artificial Sequence
  mRNA product Design a-2 (hSL-A100) comprising derived and/or modified sequence from LASV(ISTH0009-NIG-2011;Clade II)__AIT17404__GPCmut4 (opt5)
aggagaguccgcucagccagguugcagaagcggcuuagcguguguccuaaucuucucucugcguguagguaggccugugccgcaaacaagcuuaccaugggccagaucauuaccuucuuucaagaggugccccacgucaucgaagagguuaugaacauugugcugaucgcccucagccugcuugcuauucugaaggggaucuacaauguggccacaugcggacucuucggccuggucuccuuucuucugcucugugggagaucuugcagcacgaccuauaaaggaguguacgaacugcagacacuggagcucgacauggcgucccugaacauguguaugccucuuucuugcaccaagaauaacagccaucacuauaucaugguuggcaaugaaacagggcuggagcucacccugacaaacaccuccauuaucaaucauaaauucuguaaccuuucugaugcucacaagaaaaaucuguacgaccaugcccucaugagcauuaucuccacguuucaccugagcauuccgaacuucaaucaguaugaggccaugucuugcgauuuuaacggaggcaagaucuccgugcaguacaaucugagccacgcuuaugccgucgacgcugccaaccauuguggcaccauugcgaauggggugcuccaaacauucaugcggauggccuggggaggcucuuacaucgcucuggauuccgggaagggaagcugggacugcaucaugaccucuuaccaguaucuuauuauccagaacacaaccugggaagaucacugucaguuuucccgccccagcccuauuggcuaccuggggcuccugucccaaagaacgcgggacaucuauauuucucgcagacggcgcggaacauucaccuggacacuuagcgauuccgagggcaacgaaacccccggcggguacugccugaccagauggaugcucaucgaggccgagcugaaauguuuuggaaauacagcuguugccaagugcaacgaaaaacaugacgaggaguucugcgauaugcugcggcucuuugacuucuguaagcaggcgauccgcagacugaaaacgccugcccagaugagcauucagcuuaucaauaaggcugugaacgcccugauuaaugaucaacucaucaugaagaaccaucugcgggacauuaugggcauccccuauugcaauuacucuaaauauuguuaccuuaaccacaccgucacagggaagaccucccugccucgcugcugucucgugagcaauggaucuuaccugaacgaaacacacuucagcgacgauaucgaacagcaggcugacaauaugauuaccgagcugcuccaaaaagaguauauggauagacagggcaagacgccgcuggggcuuguggaccuguuugucuucuccacaucuuuuuaccucaucagcauuuuccugcaccugaucaaaauucccacccaucggcacaucaccggaaagccuugccccaaaccucaucgccuuaaccacaugggcauuuguuccugcggccucuauaagcaccccgggguuccggugaaguggaaaagaugaggacuagucccuguucccagagcccacuuuuuuuucuuuuuuugaaauaaaauagccugucuuucagaucucaaaggcucuuuucagagccaccaaaaaaaaaaaaaaaaaaaaaaaaaaaaaaaaaaaaaaaaaaaaaaaaaaaaaaaaaaaaaaaaaaaaaaaaaaaaaaaaaaaaaaaaaaaaaaaaaaaaa

SEQ ID NO: 27118 - RNA, 1764 nt, Artificial Sequence
  mRNA product Design a-2 (hSL-A100) comprising derived and/or modified sequence from LASV(ISTH2010-NIG-2012;Clade II)__AIT17482__GPCmut4 (opt5)
aggagaguccgcucagccagguugcagaagcggcuuagcguguguccuaaucuucucucugcguguagguaggccugugccgcaaacaagcuuaccaugggccagaucauuaccuucuuucaagaggugccccacgucaucgaagagguuaugaacauugugcugaucgcccucagccugcuugcuauucugaaggggaucuacaauguggccacaugcggacucuucggccuggucuccuuucuucugcucugugggagaucuugcagcacgaccuauaaaggaguguacgaacugcagacacuggagcucgacauggcgucccugaacauguguaugccucuuucuugcaccaagaauaacagccaucacuauaucaugguuggcaaugaaacagggcuggagcucacccugacaaacaccuccauuaucaaucauaaauucuguaaccuuucugaugcucacaagaaaaaucuguacgaccaugcccucaugagcauuaucuccacguuucaccugagcauuccgaacuucaaucaguaugaggccaugucuugcgauuuuaacggaggcaagaucuccgugcaguacaaucugagccacgcuuaugccgucgacgcugccaaccauuguggcaccauugcgaauggggugcuccaaacauucaugcggauggccuggggaggcucuuacaucgcucuggauuccgggaagggaagcugggacugcaucaugaccucuuaccaguaucuuauuauccagaacauuacaugggaagaucacugucaguuuucccgccccagcccuaucggcuaccuggggcuccugucccaaagaacccgggacauuuauaucucucgcagacggcgcggaacguucacauggacccuuagcgauuccgagggcaacgaaacacccggcggguacugccugaccagauggaugcucaucgaggccgagcugaaauguuuuggaaauaccgcuguugccaagugcaacgaaaaacaugacgaggaguucugcgauaugcugcggcucuuugacuucuguaagcaggcgauucgcagacugaaaacgccugcccagaugagcauccagcuuauuaauaaggcugugaacgcccugaucaaugaucaacucauuaugaagaaccaucugcgggacaucaugggcauccccuauugcaauuacucuaaauauuguuaccuuaaccacacagucaccgggaagacaucccugccucgcugcugucucgugagcaauggaucuuaccugaacgaaacccacuucagcgacgauauugaacagcaggcugacaauaugaucacagagcugcuccaaaaagaguauauugauagacagggcaagaccccgcuggggcuuguggaccuguuugucuucuccacgucuuuuuaccucaucagcauuuuccugcaccugguuaaaauccccacacaucggcacguggugggaaagccuugccccaaaccucaucgccuuaaccacaugggcauuuguuccugcggccucuauaagcaccccggggucccggugaaguggaaaagaugaggacuagucccuguucccagagcccacuuuuuuuucuuuuuuugaaauaaaauagccugucuuucagaucucaaaggcucuuuucagagccaccaaaaaaaaaaaaaaaaaaaaaaaaaaaaaaaaaaaaaaaaaaaaaaaaaaaaaaaaaaaaaaaaaaaaaaaaaaaaaaaaaaaaaaaaaaaaaaaaaaaaa

SEQ ID NO: 27119 - RNA, 1764 nt, Artificial Sequence
  mRNA product Design a-2 (hSL-A100) comprising derived and/or modified sequence from LASV(Lassa virus/H.sapiens-wt/NGA/2015/ISTH_0543;Clade II)__AVO03639__GPCmut4 (opt5)
aggagaguccgcucagccagguugcagaagcggcuuagcguguguccuaaucuucucucugcguguagguaggccugugccgcaaacaagcuuaccaugggccagaucauuaccuucuuucaagaggugccccacgucaucgaagagguuaugaacauugugcugaucgcccucagccugcuugcuauucugaaggggaucuacaauguggccacaugcggacucuucggccuggucuccuuucuucugcucugugggagaucuugcagcacgaccuauaaaggaguguacgaacugcagacacuggagcucgacauggcgaaccugaauauguguaugccucuuuccugcaccaagaacaauucucaucacuauaucaugguuggcaacgaaacagggcuggagcucacccugacaaauaccagcauuaucaaccauaaauucuguaaucuuuccgaugcucacaagaaaaaccuguacgaccaugcccucaugucuauuaucagcacguuucaccuguccauuccgaauuucaaccaguaugaggccaugagcugcgauuuuaauggaggcaagaucucugugcaguacaaccugucccacaccuaugcugucgacgccgcuaaucauuguggcacaauugccaacggggugcuccaaaccuucaugcggauggcguggggaggcagcuacaucgcccuggauucugggaagggauccugggacugcaucaugacaagcuaccaguaucuuguuauucagaacaccacgugggaagaucacugucaguuuucucgccccuccccuaucggcuaccuggggcuccugagccaaagaacacgggacauuuauaucucccgcagacggcgcggaaccuucacauggacccuuucugauagcgagggcaaugaaacccccggcggguacugccugacaagauggaugcucauugaggcugagcugaaauguuuuggaaacacggccguggcuaagugcaaugaaaaacaugacgaggaguucugcgauaugcugcggcucuuugacuucuguaagcaggccauccgcagacugaaaaccccugcgcagauguccauccagcuuauuaacaaggccgucaaugcucugaucaacgaucaacucauuaugaagaaucaucugcgggacaucaugggcauucccuauugcaacuacagcaaauauuguuaccuuaaucacacagugaccgggaagacaucucugccucgcugcugucucguguccaacggaagcuaccugaaugaaacccacuucucugacgauaucgaacagcaggccgacaacaugaucacggagcugcuccaaaaagaguauauugauagacagggcaagacaccgcuggggcuugucgaccuguuuguuuucagcaccuccuuuuaccucaucucuauuuuccugcaccuggugaaaauccccacccaucggcacauuacaggaaagccuugccccaaaccucaucgccuuaaucacaugggcaucuguagcugcggccucuauaagcaccccggggugccggucaaguggaaaagaugaggacuagucccuguucccagagcccacuuuuuuuucuuuuuuugaaauaaaauagccugucuuucagaucucaaaggcucuuuucagagccaccaaaaaaaaaaaaaaaaaaaaaaaaaaaaaaaaaaaaaaaaaaaaaaaaaaaaaaaaaaaaaaaaaaaaaaaaaaaaaaaaaaaaaaaaaaaaaaaaaaaaa

SEQ ID NO: 27120 - RNA, 1764 nt, Artificial Sequence
  mRNA product Design a-2 (hSL-A100) comprising derived and/or modified sequence from LASV(Lassa virus/H.sapiens-wt/NGA/2016/ISTH_0009;Clade II)__AVO03571__GPCmut4 (opt5)
aggagaguccgcucagccagguugcagaagcggcuuagcguguguccuaaucuucucucugcguguagguaggccugugccgcaaacaagcuuaccaugggccagaucauuaccuucuuucaagaggugccccacgucaucgaagagguuaugaacauugugcugaucgcccucagccugcuugcuauucugaaggggaucuacaauguggccacaugcggacuccugggccuugucuccuuccugcuccugugugggagaucuugcagcacgaccuauaaaggaguguacgaacugcagacacucgagcuggacauggcgucccuuaacauguguaugccucugucuugcaccaagaauaacagccaucacuauaucaugguuggcaaugaaacagggcucgagcugacccuuacaaacaccuccauuaucaaucauaaauuuuguaaccugucugaugcucacaagaaaaaucucuacgaccaugcccugaugagcauuaucuccacguuccaccugagcauuccgaacuuuaaucaguaugaggccaugucuugcgauuucaacggaggccggaucuccgugcaguacaaucucagccacucuuaugcugucgacgccgcuaaccauuguggcaccauugccaauggggugcugcaaacauuuaugcgcauggcguggggaggcuccuacaucgcccuugauagcgggaagggaucuugggacugcaucaugaccuccuaccaguaucugauuauccagaacacaaccugggaagaucacugucaguucagcagacccuccccuauuggcuaccucgggcugcuuucucaacggacgcgcgacaucuauauuagcagacggcgcagaggaacauuuaccuggacacuguccgauagcgagggcaacgaaacccccggcggguacugccucacccgguggaugcugaucgaggcugagcugaaguguuucggaaauacagccguugcuaaaugcaacgaaaagcaugacgaggaauuuugcgauaugcuccgccuguucgacuuuuguaaacaggccaucagacggcuuaagacgccugcgcagaugucuauucagcugaucaauaaagccgugaacgcucucauuaaugaucaacugaucaugaagaaccaccuucgcgacauuaugggcauccccuauugcaauuacuccaaguauuguuaccugaaccacaccgucacagggaaaaccagccucccuagaugcugucuggugucuaauggaagcuaccugaacgagacacauuucuccgacgauaucgaacagcaggccgacaauaugauuaccgagcuccugcaaaaggaguauaucgaucggcagggcaaaacgccgcuugggcugguggaccucuucgucuuuucuaccagcuucuaccugauuuccaucuuucugcaccuuguuaagauucccacacaucgccacaucaccggaaaaccuugccccaagccucauagacucaaccacaugggcauuuguagcugcggccuguauaaucaccccggggugccggugaaauggaagcggugaggacuagucccuguucccagagcccacuuuuuuuucuuuuuuugaaauaaaauagccugucuuucagaucucaaaggcucuuuucagagccaccaaaaaaaaaaaaaaaaaaaaaaaaaaaaaaaaaaaaaaaaaaaaaaaaaaaaaaaaaaaaaaaaaaaaaaaaaaaaaaaaaaaaaaaaaaaaaaaaaaaaa

SEQ ID NO: 27121 - RNA, 1764 nt, Artificial Sequence
  mRNA product Design a-2 (hSL-A100) comprising derived and/or modified sequence from LASV(Lassa virus/H.sapiens-wt/NGA/2016/ISTH_0017;Clade II)__AVO03567__GPCmut4 (opt5)
aggagaguccgcucagccagguugcagaagcggcuuagcguguguccuaaucuucucucugcguguagguaggccugugccgcaaacaagcuuaccaugggccagaucauuaccuucuuucaagaggugccccacgucaucgaagagguuaugaacauugugcugaucgcccucagccugcuugcuauucugaaggggaucuacaauguggccacaugcggacucuucggccuggucuccuuucuucugcucugugggagaucuugcagcacgaccuauaaaggaguguacgaacugcagacacuggagcucgacauggcgucccugaacauguguaugccucuuucuugcaccaagaauaacagccaucacuauaucaugguuggcaaugaaacagggcuggagcucacccugacaaacaccuccauuaucaaucauaaauucuguaaccuuucugaugcucacaagaaaaaucuguacgaccaugcccucaugagcauuaucuccacguuucaccugagcauuccgaacuucaaucaguaugaggccaugucuugcgauuuuaacggaggcaagaucuccgugcaguacaaucugagccacaccuaugcuauugacgccgcuaaccauuguggcacaaucgccaaugggguccuccaaaccuucaugcggauggcguggggaggcucuuacaucgcccuggauuccgggaagggaagcugggacugcauuaugacaucuuaccaguaucuuaucauucagaacaccacgugggaagaucacugucaguuuucccgccccagcccuaucggcuaccuggggcuccugucccaaagaacacgggacauuuauaucucucgcagacggcgcggaaccuucacauggacccuuagcgauuccgagggcaacgaaacccccggcggguacugccugacaagauggaugcucaucgaggcugagcugaaauguuuuggaaauacggccguggcuaagugcaacgaaaaacaugacgaggaguucugcgauaugcugcggcucuuugacuucuguaagcaggccauucgcagacugaaaaccccugcgcagaugagcauccagcuuauuaauaaggccguuaacgcucugaucaaugaucaacucauuaugaagaaccaucugcgggacaucaugggcauccccuauugcaauuacucuaaauauuguuaccuuaaccacacagugaccgggaagacaucccugccucgcugcugucucgucagcaauggaucuuaccugaacgaaacccacuucagcgacgauauugaacagcaggccgacaauaugaucacggagcugcuccaaaaagaguauauggauagacagggcaagacaccgcuggggcuuguggaccuguuuguguucuccaccucuuuuuaccucauuagcaucuuccugcaccugguccggauucccacccaucgccacguuaucggaaaaccuugccccaagccucauagacuuaaccacaugggcauuuguuccugcggccucuauaaacaccccggggugccggugaaguggaagcggugaggacuagucccuguucccagagcccacuuuuuuuucuuuuuuugaaauaaaauagccugucuuucagaucucaaaggcucuuuucagagccaccaaaaaaaaaaaaaaaaaaaaaaaaaaaaaaaaaaaaaaaaaaaaaaaaaaaaaaaaaaaaaaaaaaaaaaaaaaaaaaaaaaaaaaaaaaaaaaaaaaaaa

SEQ ID NO: 27122 - RNA, 1764 nt, Artificial Sequence
  mRNA product Design a-2 (hSL-A100) comprising derived and/or modified sequence from LASV(Lassa virus/H.sapiens-wt/NGA/2018/ISTH_0959;Clade II)__AVV65099__GPCmut4 (opt5)
aggagaguccgcucagccagguugcagaagcggcuuagcguguguccuaaucuucucucugcguguagguaggccugugccgcaaacaagcuuaccaugggccagaucauuaccuucuuucaagaggugccccacgucaucgaagagguuaugaacauugugcugaucgcccucagccugcuugcuauucugaaggggaucuacaauguggucacaugcggacucuucggccugguguccuuucuucugcucugugggagaucuugcagcacgaccuauaaaggaguuuacgaacugcagacacuggagcucgacauggccucccugaacauguguaugccucuuucuugcaccaagaauaacagccaucacuauaucauggugggcaaugaaacagggcuggagcucacccugacaaacaccuccauuaucaaucauaaauucuguaaccuuucugaugcgcacaagaaaaaucuguacgaccaugcucucaugagcauuaucuccacguuucaccugagcauuccgaacuucaaucaguaugaggccaugucuugcgauuuuaacggaggcaagaucuccguccaguacaaucugagccacgccuaugcuauugacgccgcuaaccauuguggcaccaucgccaauggggugcuccaaacauucaugcggauggcguggggaggcucuuacaucgcccuggauuccgggaagggaagcugggacugcauuaugaccucuuaccaguaucuuaucauucagaacacaaccugggaagaucacugucaguuuucccgccccagcccuaucggcuaccuggggcuccugucccaaagaacgcgggacauuuauaucucucgcagacggcgcggaacauucaccuggacacuuagcgauuccgagggcaacgaaacccccggcggguacugccugaccagauggaugcucaucgaggcugagcugaaauguuuuggaaauacagccguugcuaagugcaacgaaaaacaugacgaggaguucugcgauaugcugcggcucuuugacuucuguaagcaggccauucgcagacugaaaacgccugcgcagaugagcauccagcuuauuaauaaggccgugaacgcucugaucaaugaucaacucauuaugaagaaccaucugcgggacaucaugggcauccccuauugcaauuacucuaaauauuguuaccuuaaccacaccgucacagggaagaccucccugccucgcugcugucucgugagcaauggaucuuaccugaacgaaacacacuucagcgacgauauugaacagcaggccgacaauaugaucaccgagcugcuccaaaaagaguauauugauagacagggcaagacgccgcuggggcuuguggaccuguuugucuucuccacaucuuuuuaccucaucagcauuuuccugcaccugguuaaaauccccacccaucggcacgugauuggaaagccuugccccaaaccucaucgccuuaaccacaugggcaucuguuccugcggccucuauaagcaccccggggugccggucaaguggaaaagaugaggacuagucccuguucccagagcccacuuuuuuuucuuuuuuugaaauaaaauagccugucuuucagaucucaaaggcucuuuucagagccaccaaaaaaaaaaaaaaaaaaaaaaaaaaaaaaaaaaaaaaaaaaaaaaaaaaaaaaaaaaaaaaaaaaaaaaaaaaaaaaaaaaaaaaaaaaaaaaaaaaaaa

SEQ ID NO: 27123 - RNA, 1764 nt, Artificial Sequence
  mRNA product Design a-2 (hSL-A100) comprising derived and/or modified sequence from LASV(LASV003-NIG-2008;Clade II)__AIT17580__GPCmut4 (opt5)
aggagaguccgcucagccagguugcagaagcggcuuagcguguguccuaaucuucucucugcguguagguaggccugugccgcaaacaagcuuaccaugggccagaucauuaccuucuuucaagaggugccccacgucaucgaagagguuaugaacauugugcugaucgcccucagccugcuugcuauucugaaggggaucuacaauguggccacaugcggacucuucggccuggucuccuuucuucugcucugugggagaucuugcagcacgaccuauaaaggaguguacgaacugcagacacuggagcucgacauggcgucccugaacauguguaugccucuuucuugcaccaagaauaacagccaucacuauaucaugguuggcaaugaaacagggcuggagcucacccugacaaacaccuccauuaucaaucauaaauucuguaaccuuucugaugcucacaagaaaaaucuguacgaccaugcccucaugagcauuaucuccacguuucaccugagcauuccgaacuucaaucaguaugaggccaugucuugcgauuuuaacggaggcaagaucuccgugcaguacaaucugagccacaccuaugcugucgacgccgcuaaccauuguggcacaauugccaauggggugcuccaaaccuucaugcggauggcguggggaggcucuuacaucgcccuggauuccgggaagggaagcugggacugcaucaugacaucuuaccaguaucuuauuauccagaacaccacgugggaagaucacugucaguuuucccgccccagcccuauuggcuaccuggggcuccugucccaaagaacacgggacaucuauauuucucgcagacggcgcggaaccuucacauggacccuuagcgauuccgagagcaacgaaacccccggcggcuacugccugacaagauggaugcucaucgaggcugagcugaaauguuuugggaauacggccguugcuaagugcaacgaaaaacaugacgaggaguucugcgauaugcugcggcucuuugacuucuguaagcaggccauccgcagacugaaagcgccugcccagaugucuauucagcuuaucaauaaggcugugaacgcccugauuaaugaucaacucaucaugaagaaccaucugcgggacauuaugggaauccccuauugcaauuacuccaaauauuguuaccuuaaccacaccgucacaggccgcaccagccugccuagaugcugucucgugucuaaugggagcuaccugaacgaaacacacuucuccgacgauaucgaacagcaggcugacaauaugauuaccgagcugcuccaaaaggaguauauggaucggcagggaaaaacgccgcugggccuuguggaccuguuugucuucucuaccagcuuuuaccucaucuccauuuuccugcaccugguuaagauccccacacaucgccacgugauugggaaaccuugccccaagccucauagacuuaaccacaugggaaucuguagcugcggccucuauaaacaccccggcgugccggucaaguggaagcggugaggacuagucccuguucccagagcccacuuuuuuuucuuuuuuugaaauaaaauagccugucuuucagaucucaaaggcucuuuucagagccaccaaaaaaaaaaaaaaaaaaaaaaaaaaaaaaaaaaaaaaaaaaaaaaaaaaaaaaaaaaaaaaaaaaaaaaaaaaaaaaaaaaaaaaaaaaaaaaaaaaaaa

SEQ ID NO: 27124 - RNA, 1764 nt, Artificial Sequence
  mRNA product Design a-2 (hSL-A100) comprising derived and/or modified sequence from LASV(LASV035-NIG-2009;Clade II)__AIT17588__GPCmut4 (opt5)
aggagaguccgcucagccagguugcagaagcggcuuagcguguguccuaaucuucucucugcguguagguaggccugugccgcaaacaagcuuaccaugggccagaucauuaccuucuuucaagaggugccccacgucaucgaagagguuaugaacauugugcugaucgcccucagccugcuugcuauucugaaggggaucuacaauguggccacaugcggacucuucggccuggucuccuuucuucugcucugugggagaucuugcagcacgaccuauaaaggaguguacgaacugcagacacuggagcucgacauggcgucccugaacauguguaugccucuuucuugcaccaagaauaacagccaucacuauaucaugguuggcaaugaaacagggcuggagcucacccugacaaacaccuccauuaucaaucauaaauucuguaaccuuucugaugcucacaagaaaaaucuguacgaccaugcccucaugagcauuaucuccacguuucaccugagcauuccgaacuucaaucaguaugaggccaugucuugcgauuuuaacggaggcaagaucuccgugcaguacaaucugagccacgcuuaugccgucgacgcugccaaccauuguggcaccauugcgaauggggugcuccaaacauucaugcggauggccuggggaggcucuuacaucgcucuggauuccgggaagggaagcugggacugcaucaugaccucuuaccaguaucuuauuauccagaacacaaccugggaagaucacugucaguuuucccgccccagcccuauuggcuaccuggggcuccugucccaaagaacgcgggacaucuauauuucucgcagacggcgcggaacauucaccuggacacuuagcgauuccgagggcaacgaaacccccggcggguacugccugaccagauggaugcucaucgaggccgagcugaaauguuuuggaaauacagcuguugccaagugcaacgaaaaacaugacgaggaguucugcgauaugcugcggcucuuugacuucuguaagcaggcgauccgcagacugaaagccccugcucagaugagcauucagcuuaucaauaaggccgugaacgcucugauuaaugaucaacucaucaugaagaaccaucugcgggacauuaugggcauccccuauugcaauuacucuaaauauuguuaccuuaaccacacggucaccgggaagacaucccugccucgcugcugucucgugagcaauggaucuuaccugaacgaaacccacuucagcgacgauaucgaacagcaggccgacaauaugauuacagagcugcuccaaaaagaguauaucgauagacagggcaagaccccgcuggggcuuguggaccuguuugucuucuccacgucuuuuuaccucauuagcaucuuccugcaccugguuaaaauucccacacaucggcacgugaucggaaagccuugccccaaaccucaucgccuuaaccacaugggcauuuguuccugcggccucuauaagcaccccggggugccggucaaguggaaaagaugaggacuagucccuguucccagagcccacuuuuuuuucuuuuuuugaaauaaaauagccugucuuucagaucucaaaggcucuuuucagagccaccaaaaaaaaaaaaaaaaaaaaaaaaaaaaaaaaaaaaaaaaaaaaaaaaaaaaaaaaaaaaaaaaaaaaaaaaaaaaaaaaaaaaaaaaaaaaaaaaaaaaa

SEQ ID NO: 27125 - RNA, 1764 nt, Artificial Sequence
  mRNA product Design a-2 (hSL-A100) comprising derived and/or modified sequence from LASV(LASV1000-NIG-2009;Clade II)__AIT17782__GPCmut4 (opt5)
aggagaguccgcucagccagguugcagaagcggcuuagcguguguccuaaucuucucucugcguguagguaggccugugccgcaaacaagcuuaccaugggccagaucauuaccuucuuucaagaggugccccacgucaucgaagagguuaugaacauugugcugaucgcccucagccugcuugcuauucugaaggggaucuacaauguggccacaugcggacucuucggccuggucuccuuucuucugcucugugggagaucuugcagcacgaccuauaaaggaguguacgaacugcagacacuggagcucgacauggcgucccugaacauguguaugccucuuucuugcaccaagaauaacagccaucacuauaucaugguuggcaaugaaacagggcuggagcucacccugacaaacaccuccauuaucaaucauaaauucuguaaccuuucugaugcucacaagaaaaaucuguacgaccaugcccucaugagcauuaucuccacguuucaccugagcauuccgaacuucaaucaguaugaggccaugucuugcgauuuuaacggaggcaagaucuccgugcaguacaaucugagccacaccuaugcugucgacgccgcuaaccauuguggcacaauugccaauggggugcuccaaaccuucaugcggauggcguggggaggcucuuacaucgcccuggauuccgggaagggaagcugggacugcaucaugacaucuuaccaguaucuuauuauccagaacaccacgugggaagaucacugucaguuuucccgccccagcccuauuggcuaccuggggcuccugucccaaagaacacgggacaucuauauuucucgcagacggcgcggaaccuucacauggacccuuagcgauuccgagggcaacgaaacccccggcggguacugccugacaagauggaugcucaucgaggcugagcugaaauguuuuggaaauacggccguugcuaagugcaacgaaaaacaugacgaggaguucugcgauaugcugcggcucuuugacuucuguaagcaggccaucaaacgccugaagaccccugcgcagaugagcauucagcuuaucaauaaggccgugaacgcucugauuaaugaucaacucaucaugaaaaaccaccugagagacauuaugggcauccccuauugcaauuacucuaaguauuguuaccuuaaccacacagucaccgggaaaacaucccugccucggugcugucucgugagcaauggaucuuaccugaacgaaacccauuucagcgacgauaucgaacagcaggccgacaauaugauuacggagcugcuccaaaaggaguauaucgaucgccagggcaaaacaccgcuggggcuuguggaccuguuugucuucuccaccucuuuuuaccucauuagcaucuuccugcaccugguuaagauucccacccauagacacguggugggaaaaccuugccccaagccucaucggcuuaaccacaugggcaucuguuccugcggccucuauaagcaccccggggucccggugaaauggaagcgcugaggacuagucccuguucccagagcccacuuuuuuuucuuuuuuugaaauaaaauagccugucuuucagaucucaaaggcucuuuucagagccaccaaaaaaaaaaaaaaaaaaaaaaaaaaaaaaaaaaaaaaaaaaaaaaaaaaaaaaaaaaaaaaaaaaaaaaaaaaaaaaaaaaaaaaaaaaaaaaaaaaaaa

SEQ ID NO: 27126 - RNA, 1764 nt, Artificial Sequence
  mRNA product Design a-2 (hSL-A100) comprising derived and/or modified sequence from LASV(LASV221-NIG-2010;Clade II)__AIT17624__GPCmut4 (opt5)
aggagaguccgcucagccagguugcagaagcggcuuagcguguguccuaaucuucucucugcguguagguaggccugugccgcaaacaagcuuaccaugggccagaucauuaccuucuuucaagaggugccccacgucaucgaagagguuaugaacauugugcugaucgcccucagccugcuugcuauucugaaggggaucuacaauguggccacaugcggacucuucggccuggucuccuuucuucugcucugugggagaucuugcagcacgaccuauaaaggaguguacgaacugcagacacuggagcucgacauggcgucccugaacauguguaugccucuuucuugcaccaagaauaacagccaucacuauaucaugguuggcaaugaaacagggcuggagcucacccugacaaacaccuccauuaucaaucauaaauucuguaaccuuucugaugcucacaagaaaaaucuguacgaccaugcccucaugagcauuaucuccacguuucaccugagcauuccgaacuucaaucaguaugaggccaugucuugcgauuuuaacggaggcaagaucuccgugcaguacaaucugagccacaccuaugcuauugacgccgcuaaccauuguggcacaaucgccaaugggguccuccaaaccuucaugcggauggcguggggaggcucuuacaucgcccuggauuccgggaagggaagcugggacugcauuaugacaucuuaccaguaucuuaucauucagaacaccacgugggaagaucacugucaguuuucccgccccagcccuaucggcuaccuggggcuccugucccaaagaacacgggacauuuauaucucucgcagacggcgcggaaccuucacauggacccuuagcgauuccgagggcaacgaaacccccggcggguacugccugacaagauggaugcucaucgaggcugagcugaaauguuuuggaaauacggccguggcuaagugcaacgaaaaacaugacgaggaguucugcgauaugcugcggcucuuugacuucuguaagcaggccauucgcagacugaaaaccccugcgcagaugagcauccagcuuauuaauaaggccguuaacgcucugaucaaugaucaacucauuaugaagaaccaucugcgggacaucaugggcauccccuauugcaauuacucuaaauauuguuaccuuaaccacacagugaccgggaagacaucccugccucgcugcugucucgucagcaauggaucuuaccugaacgaaacccacuucagcgacgauauugaacagcaggccgacaauaugaucacggagaugcugcaaaaagaguauauggauagacagggcaagacaccgcucgggcugguggaccuuuuuguguucuccaccucuuuuuaccugauuagcaucuuccuccaccuggucaaaauucccacccaucggcacguuaucggaaagccuugccccaaaccucaucgccugaaccacaugggcauuuguuccugcggccuuuauaagcaccccggggugccggugaaguggaaaagaugaggacuagucccuguucccagagcccacuuuuuuuucuuuuuuugaaauaaaauagccugucuuucagaucucaaaggcucuuuucagagccaccaaaaaaaaaaaaaaaaaaaaaaaaaaaaaaaaaaaaaaaaaaaaaaaaaaaaaaaaaaaaaaaaaaaaaaaaaaaaaaaaaaaaaaaaaaaaaaaaaaaaa

SEQ ID NO: 27127 - RNA, 1764 nt, Artificial Sequence
  mRNA product Design a-2 (hSL-A100) comprising derived and/or modified sequence from LASV(LASV237-NIG-2010;Clade II)__AIT17638__GPCmut4 (opt5)
aggagaguccgcucagccagguugcagaagcggcuuagcguguguccuaaucuucucucugcguguagguaggccugugccgcaaacaagcuuaccaugggccagaucauuaccuucuuucaagaggugccccacgucaucgaagagguuaugaacauugugcugaucgcccucagccugcuugcuauucugaaggggaucuacaauguggccacaugcggacucuucggccuggucuccuuucuucugcucugugggagaucuugcagcacgaccuauaaaggaguguacgaacugcagacacuggagcucgacauggcgucccugaacauguguaugccucuuucuugcaccaagaauaacagccaucacuauaucaugguuggcaaugaaacagggcuggagcucacccugacaaacaccuccauuaucaaucauaaauucuguaaccuuucugaugcucacaagaaagaccuguacgaucaugcccucaugagcauuaucuccacguuucaccugagcauuccgaauuucaaccaguaugaggccaugucuugcgacuuuaauggaggcaagaucuccgugcaguacaaccugagccacaccuaugcugucgaugccgcuaaucauuguggcacaauugccaacggggugcuccaaaccuucaugcggauggcguggggaggcucuuacaucgcccuggacuccgggaagggaagcugggauugcaucaugacaucuuaccaguaucuuauuauccagaauaccacgugggaagaccacugucaguuuucccgccccagcccuauuggcuaccuggggcuccugucccaaagaacacgggauaucuauauuucucgcagacggcgcggaaccuucacauggacccuuagcgacuccgagggcaacgaaacccccggcggguacugccugacaagauggaugcucaucgaggcugagcugaaauguuuuggaaacacggccguugcuaagugcaaugaaaaacaugaugaggaguucugcgacaugcugcggcucuuugauuucuguaagcaggccauccgcagacugaaaaccccugcgcagaugagcauucagcuuaucaacaaggccgugaaugcucugauuaacgaccaacucaucaugaagaaucaucugcgggacauuaugggcauccccuauugcaacuacucuaaauauuguuaccuuaaucacacagucaccgggaagacaucccugccucgcugcugucucgugagcaacggaucuuaccugaaugaaacccacuucagcgaugacaucgaacagcaggccgauaacaugauuacggagcugcuccaaaaagaguauauggacagacagggcaagacaccgcuggggcuuguggaucuguuugucuucuccaccucuuuuuaccucaucagcauuuuccugcaccugaucaaaauucccacccaucggcacaucacaggaaagccuugccccaaaccucaucgccuuaaucacaugggcauuuguuccugcggccucuauaagcaccccgggguuccggugaaguggaaaagaugaggacuagucccuguucccagagcccacuuuuuuuucuuuuuuugaaauaaaauagccugucuuucagaucucaaaggcucuuuucagagccaccaaaaaaaaaaaaaaaaaaaaaaaaaaaaaaaaaaaaaaaaaaaaaaaaaaaaaaaaaaaaaaaaaaaaaaaaaaaaaaaaaaaaaaaaaaaaaaaaaaaaa

SEQ ID NO: 27128 - RNA, 1764 nt, Artificial Sequence
  mRNA product Design a-2 (hSL-A100) comprising derived and/or modified sequence from LASV(LASV253-NIG-2011;Clade II)__AIT17670__GPCmut4 (opt5)
aggagaguccgcucagccagguugcagaagcggcuuagcguguguccuaaucuucucucugcguguagguaggccugugccgcaaacaagcuuaccaugggccagaucauuaccuucuuucaagaggugccccacgucaucgaagagguuaugaacauugugcugaucgcccucagccugcuugcuauucugaaggggaucuacaauguggccacaugcggacucuucggccuggucuccuuucuucugcucugugggagaucuugcagcacgaccuauaaaggaguguacgaacugcagacacuggagcucgacauggcgucccugaacauguguaugccucuuucuugcaccaagaauaacagccaucacuauaucaugguuggcaaugaaacagggcuggagcucacccugacaaacaccuccauuaucaaucauaaauucuguaaccuuucugaugcucacaagaaaaaucuguacgaccaugcccucaugagcauuaucuccacguuucaccugagcauuccgaacuucaaucaguaugaggccaugucuugcgauuuuaacggaggcaagaucuccgugcaguacaaucugagccacaccuaugcugucgacgccgcuaaccauuguggcacaauugccaauggggugcuccaaaccuucaugcggauggcguggggaggcucuuacaucgcccuggauuccgggaagggaagcugggacugcaucaugacaucuuaccaguaucuuauuauccagaacaccacgugggaagaucacugucaguuuucccgccccagcccuauuggcuaccuggggcuccugucccaaagaacacgggacaucuauauuucucgcagacggcgcggaaccuucacauggacccuuagcgauuccgagggcaacgaaacccccggcggguacugccugacaagauggaugcucaucgaggcugagcugaaauguuuuggaaauacggccguugcuaagugcaacgaaaaacaugacgaggaguucugcgauaugcugcggcucuuugacuucuguaagcaggccauccgcagacugaaagcgccugcccagaugagcauucagcuuaucaauaaggcugugaacgcccugauuaaugaucaacucaucaugaagaaccaucugcgggacauuaugggcauccccuauugcaauuacucuaaauauuguuaccuuaaccacaccgucacagggcgcaccucccugccuagaugcugucucgugagcaauggaucuuaccugaacgaaacacacuucagcgacgauaucgaacagcaggcugacaauaugauuaccgagcugcuccaaaaggaguauaucgaucggcagggcaaaacgccgcuggggcuuguggaccuguuugucuucuccacaucuuuuuaccucauuagcaucuuccugcaccugguuaagauucccacccaucgccacaucauuggaaaaccuugccccaagccucauagacuuaaccacaugggcaucuguuccugcggccucuauaaacaccccggggugccggugaaguggaagcggugaggacuagucccuguucccagagcccacuuuuuuuucuuuuuuugaaauaaaauagccugucuuucagaucucaaaggcucuuuucagagccaccaaaaaaaaaaaaaaaaaaaaaaaaaaaaaaaaaaaaaaaaaaaaaaaaaaaaaaaaaaaaaaaaaaaaaaaaaaaaaaaaaaaaaaaaaaaaaaaaaaaaa

SEQ ID NO: 27129 - RNA, 1764 nt, Artificial Sequence
  mRNA product Design a-2 (hSL-A100) comprising derived and/or modified sequence from LASV(LASV254-NIG-2011;Clade II)__AIT17674__GPCmut4 (opt5)
aggagaguccgcucagccagguugcagaagcggcuuagcguguguccuaaucuucucucugcguguagguaggccugugccgcaaacaagcuuaccaugggccagaucauuaccuucuuucaagaggugccccacgucaucgaagagguuaugaacauugugcugaucgcccucagccugcuugcuauucugaaggggaucuacaauguggccacaugcggacucuucggccuggucuccuuucuucugcucugugggagaucuugcagcacgaccuauaaaggaguguacgaacugcagacacuggagcucgacaugaccaaccugaauauguguaugccucuuuccugcacaaagaacaauucucaucacuauaucaugguuggcaacgaaaccgggcuggagcucacacugaccaauacgagcauuaucaaccauaaauucuguaaucuuuccgaugcgcacaagaaaaaccuguacaaucaugcucucaugucuauuaucagcaccuuucaccuguccauuccgaacuucaaucaguaugaggccaugagcugcgacuuuaacggaggcaagaucucugugcaguacaaucugucccacagcuaugccgucgaugcugccaaccauuguggcacaauugcuaacggggugcuccaaaccuucaugcggauggccuggggaggcucuuacaucgcgcuggacuccgggaagggaaauugggauugcaucaugacaagcuaccaguaucuuauuauccagaacaccacgugggaagaccacugucaguuuucucgccccuccccuauuggcuaccuggggcuccugagccaaagaacacgggauaucuauauuucccgcagacggcgcggaaccuucacauggacccuuucugacagcgagggcaaugaaacccccggcggguacugccugacaagauggaugcucaucgaggccgagcugaaauguuuuggaaacacggcuguugccaagugcaaugaaaaacaugaugaggaguucugcgacaugcugcggcucuuugauuucuguaagcaggcuauccgcagacugaaaaccccugcccaggcgaacauucagcuuaucaauaaggccgugaacgcucugauuaaugaccaacucaucaugaagaaccaucugcgggauauuaugggcauccccuauugcaauuacuccaaauauuguuaccuuaaccacacagucaccgggaagacaagccugccucgcugcugucucgugucuaauggauccuaccugaacgaaacccacuucagcgacgacaucgaacagcaggccgauaauaugauuacggagcugcuccaaaaagaguauauggacagacagggcaagacaccgcuggggcuuguggaucuguuugucuucucuaccagcuuuuaccucaucuccauuuuccugcaccugguuaaaauccccacccaucggcacgugauuggaaagccuugccccaaaccucaucgccuuaaccacaugggcaucuguucuugcggccucuauaagcaccccggggugccggucaaguggaaaagaugaggacuagucccuguucccagagcccacuuuuuuuucuuuuuuugaaauaaaauagccugucuuucagaucucaaaggcucuuuucagagccaccaaaaaaaaaaaaaaaaaaaaaaaaaaaaaaaaaaaaaaaaaaaaaaaaaaaaaaaaaaaaaaaaaaaaaaaaaaaaaaaaaaaaaaaaaaaaaaaaaaaaa

SEQ ID NO: 27130 - RNA, 1764 nt, Artificial Sequence
  mRNA product Design a-2 (hSL-A100) comprising derived and/or modified sequence from LASV(Nig08-A19;Clade III)__ADU56618__GPCmut4 (opt5)
aggagaguccgcucagccagguugcagaagcggcuuagcguguguccuaaucuucucucugcguguagguaggccugugccgcaaacaagcuuaccaugggccagaucgugaccuucuuucaagaggucccccacguuauugaagaggugaugaacaucgugcugauugcccucagcauccuggcuauucuuaaggggcuguacaauaucgccacaugcggacucaucggccuggucacguuccuucugcucuccgggagaucuuguagcaugaccuauaaaggaguguacgaacugcagacacuggagcucaacaugaauacccugaacaugugcaugccucuuuccuguacaaagaauaacucucaucacuauauuaugguuggcaaugaaaccgggcuggagcucacacugaccaacacgagccuucugcaucacaaauuuugcaaucucuccgacgcgcauaagaaaaaccuguacgaucacacccugaugucuaucauuagcacauuccaccucuccaucccgaauuuuaaccaguaugaggcuaugagcugugacuucaauggaggcaagauuaccgugcaguacaaccugucucauuccuaugccaucgaugccgcuaaucacugcggcacagucgccaacggggugcuucaaaccuuuaugcggauggcuuggggaggcagcuacauugcccuggacucugggcgcggaaagugggauuguaucaugacguccuaccaguaucucaucauucagaacacaaccugggaagaccauugccaguucagcagacccucuccuaucggcuaccuggggcuucugucccaacggacacgcgauauuuauaucagcagacggcgcagaggaaccuuuaccuggacacucuccgacucugagggcaaugaaacgcccggcggguacugucugacccgguggaugcugauugaggcggagcucaaaugcuucggaaacacagccguugcuaaguguaaugaaaaacacgaugaggaauuuugcgacaugcugcgccuuuucgauuuuugcaagcaggccaucagacggcugaaagcuccugcccagaugagcauccagcucauuaacaaggcggugaaugcccugaucaacgaccaacuuauuaugaagaaucaucugcgcgauaucaugggcauucccuauuguaacuacuccaaauauugcuaccucaaucacaccagcacagggagaaccucucugccucgguguugccuggucuccaacggaagcuaccucaaugagacgcacuucucugacgacaucgaacagcaggcugauaacaugaucacagagaugcugcaaaaggaguaucuugaccgccagggcaaaaccccgcuggggcucguggaucuguucguguuuagcaccuccuucuaccugauuucuaucuuucuucaucucgucaagauucccacacacagacauaucguuggaaaaccuugucccaagccucaccggcugaaucacaugggcauuugcagcuguggccuguauaaacagcccggggugccggugagauggaagcgcugaggacuagucccuguucccagagcccacuuuuuuuucuuuuuuugaaauaaaauagccugucuuucagaucucaaaggcucuuuucagagccaccaaaaaaaaaaaaaaaaaaaaaaaaaaaaaaaaaaaaaaaaaaaaaaaaaaaaaaaaaaaaaaaaaaaaaaaaaaaaaaaaaaaaaaaaaaaaaaaaaaaaa

SEQ ID NO: 27131 - RNA, 1767 nt, Artificial Sequence
  mRNA product Design a-2 (hSL-A100) comprising derived and/or modified sequence from LASV(G1180-SLE-2010;Clade IV)__AIT17168__GPCmut4 (opt5)
aggagaguccgcucagccagguugcagaagcggcuuagcguguguccuaaucuucucucugcguguagguaggccugugccgcaaacaagcuuaccaugggccagaucgugaccuucuuucaagaggucccccacguuauugaagaggugaugaacaucgugcugauugcccucagcauccuggcuguccuuaaggggcuguacaauuucgccacaugcggacucgugggccugcuuacguuucugcuccugugugggagauccugcaccgcgucucgguauaaaggaguuuacgaacugcagacacucgagcugaacauggaaacccuuaauauguguaugccucugagcugcacaaagaacaauucccaucacuauauuauggugggcaacgagaccgggcucgagcugacacuuaccaauacgucuaucaucaaccauaaauucuguaaucugagcgacgcucacaagaaaaaccucuacgaucaugcccugauguccauuaucucuaccuuucaccugagcauuccgaauuucaaccaguaugaagccauguccugcgacuuuaauggaggcaagaucagcguccaguacaaccucucucacuccuaugcuggcgaugccgcuaaucauugugggacaguggccaacggaguucugcaaaccuucaugcgcauggcguggggcgggagcuacauugcccuugacucuggacacggcuccugggauugcaucaugacaagcuaccaguaucugauuauccagaacaccacgugggaggaccauugucaguuuucuagacccuccccuaucggguaccucggacugcuuagccaacggacacgcgauauuuauaucuccagacggcgcagaggcaccuucacauggacccugucugacagcgaaggcaaggauacccccgggggauacugccucacacgguggaugcugauugaggcugagcugaaauguuuuggcaauacggccguggcuaagugcaacgaaaaacacgacgaggaguucugcgauaugcuccgccuguuugacuucuguaagcaggccauccagagacuuaaagcgccugcccagauguccauucaacugaucaauaaggcugucaacgcccucaucaaugaucagcugauuaugaagaaccaccuucgggacaucauggggauucccuauugcaauuacagcaaauauuguuaccugaaccauaccacaaccggaaagacaucucucccuaaaugcugucugguguccaauggcagcuaccugaacgaaacccacuucucugacgauaucgaacagcaagcugacaauaugauuacggagaugcuccagaaggaguauauggaacgccaggggaaaacaccgcugggacuuguggaucuguuugucuucagcaccuccuuuuaccucaucucuaucuuccugcaucugguuaagauucccacccacagacauaucgugggcaaaagcugcccuaagccccaccggcuuaaccacaugggcauuuguuccugcgggcucuauaagcagccuggagugcccgucaaauggaagcgcugaggacuagucccuguucccagagcccacuuuuuuuucuuuuuuugaaauaaaauagccugucuuucagaucucaaaggcucuuuucagagccaccaaaaaaaaaaaaaaaaaaaaaaaaaaaaaaaaaaaaaaaaaaaaaaaaaaaaaaaaaaaaaaaaaaaaaaaaaaaaaaaaaaaaaaaaaaaaaaaaaaaaa

SEQ ID NO: 27132 - RNA, 1767 nt, Artificial Sequence
  mRNA product Design a-2 (hSL-A100) comprising derived and/or modified sequence from LASV(G1442-SLE-2011;Clade IV)__AIT17180__GPCmut4 (opt5)
aggagaguccgcucagccagguugcagaagcggcuuagcguguguccuaaucuucucucugcguguagguaggccugugccgcaaacaagcuuaccaugggccagaucgugaccuucuuucaagaggucccccacguuauugaagaggugaugaacaucgugcugauugcccucagcauccuggcuguccuuaaggggcuguacaauguggccacaugcggacucauuggccugguuacguuccuucugcucugugggagauccugcaccacaacccuguauaaaggaguguacgaacugcagacacucgagcugaacauggaaacccuuaauauguguaugccucugucuugcacaaagaacaauagccaucacuauauccgggucggcaacgagaccgggcucgagcugacgcuuaccaauacauccaucauuaaccauaaauuuuguaaucugucugacgcgcacaagaaaaaccucuacgaucaugcucugaugagcaucauuuccaccuuccaccugucuaucccgaauuuuaaccaguaugaagccaugagcugcgacuucaauggaggcaagauuuccgugcaguacaaccucagccacucuuaugccggcgaugcugccaaucauugugggacaguugcuaacggagugcugcaaaccuuuaugcgcauggccuggggcggguccuacaucgcgcuugacagcggaagaggcaacugggauugcauuaugacgucuuaccaguaucugaucauccagaauacaaccugggacgaucacugucaguucucccggcccagcccuauuggguaccucggacugcuuucucaacgcacaagagacgucuauaucucccggcgcagacggggcaccuuuaccuggacacugagcgauuccgagggcaaggacacgcccgggggauacugccucacccgcuggaugcugauugaagccgagcugaaauguuucggcaacacagcuguggccaagugcaaugagaaacaugaugaagaguuuugcgacaugcucagacuguucgauuuuuguaagcaggcuauccagcggcuuaaagccccugcgcagaugucuauucaacugaucaacaaggccgugaaugcucucaucaacgaccagcugauuaugaagaaucaccuucgcgacaucauggggauucccuauugcaacuacagcaaauauuguuaccugaauaacaccgccacaggaaagaccucccucccuaaaugcugucugaucagcaauggcucuuaccugaacgaaacgcacuucuccgaugacauugagcaggaagcugauaauaugaucacagagaugcuccaaaaggaguauauggaaagacaggggaaaaccccgcugggacuugucgaccuguucguuuuuagcaccucuuucuaccucaucagcauuuuucugcaucuggugaagauccccacacaccggcauauugugggcaaauccugcccuaagccccaccgccuuaaccauaugggcaucuguucuugcgggcucuauaagcagccuggaguccccgugagauggaaacggugaggacuagucccuguucccagagcccacuuuuuuuucuuuuuuugaaauaaaauagccugucuuucagaucucaaaggcucuuuucagagccaccaaaaaaaaaaaaaaaaaaaaaaaaaaaaaaaaaaaaaaaaaaaaaaaaaaaaaaaaaaaaaaaaaaaaaaaaaaaaaaaaaaaaaaaaaaaaaaaaaaaaa

SEQ ID NO: 27133 - RNA, 1767 nt, Artificial Sequence
  mRNA product Design a-2 (hSL-A100) comprising derived and/or modified sequence from LASV(G3010-SLE-2013;Clade IV)__AIT17344__GPCmut4 (opt5)
aggagaguccgcucagccagguugcagaagcggcuuagcguguguccuaaucuucucucugcguguagguaggccugugccgcaaacaagcuuaccaugggccagaucgugaccuucuuucaagaggucccccacguuauugaagaggugaugaacaucgugcugauugcccucagcauccuggcuguccuuaaggggcuguacaauuucgccacaugcggacucgugggccugguuacguuucuucugcucugugggagauccugcaccacaucucuguauaaaggaguguacgaacugcagacccucgagcugaacauggaaacacuuaauauguguaugccucugagcugcaccaagaacaauucccaucacuauauuauggucggcaacgagacagggcucgagcugacccuuacgaauaccucuaucaucaaccauaaauucuguaaucugagcgacgcgcacaagaaaaaccucuacaaucaugcucugauguccauuaucucuacauuucaccugagcauuccgaacuucaaucaguaugaagccauguccugcgauuuuaacggaggcaagaucagcgugcaguacaaucucucucacuccuaugccggcgacgcugccagccauugugggaccguugcuaacggagugcugcaaacauucaugcggauggccuggggcgggucuuacauugcgcuugauuccggauacggcaagugggacugcaucaugaccagcuaucaguaccugauuauccagaacacgacaugggaggaucacugucaguuuucucgccccuccccuaucggguaucucggacugcuuagccaaagaacccgggacauuuacaucucccgcagacggcgcggcacauucaccuggacccugucugauagcgaaggcaaagacacacccgggggauauugccucacgagauggaugcugauugaggccgagcugaaguguuuuggcaauaccgcugucgccaaaugcaacgaaaagcaugaugaggaguucugcgacaugcuccggcuguuugauuucuguaaacaggcuauccagcgccuuaagaccccugcccagauguccauucaacugaucaauaaggcggugaacgcccucaucaaugaccagcugauuaugaaaaaccaccuuagagauaucauggggauucccuacugcaauuauagcaaguacuguuaccugaaccacacaacaaccggaaaaacgucucucccuaagugcugucugguguccaauggcagcuaucugaacgaaacacauuucucugacgacaucgaacagcaagcugauaauaugauuaccgagaugcuccagaaagaguacauggaacggcaggggaagaccccgcugggacuugucgaccuguuuguuuucagcacauccuuuuaucucaucucuaucuuccugcaccuggugaaaauucccacccaucgccacaucgugggcaagagcugcccuaagccccauagacuuaaccacaugggcauuuguuccugcgggcucuacaaacagccuggaguccccgugcgguggaagcgcugaggacuagucccuguucccagagcccacuuuuuuuucuuuuuuugaaauaaaauagccugucuuucagaucucaaaggcucuuuucagagccaccaaaaaaaaaaaaaaaaaaaaaaaaaaaaaaaaaaaaaaaaaaaaaaaaaaaaaaaaaaaaaaaaaaaaaaaaaaaaaaaaaaaaaaaaaaaaaaaaaaaaa

SEQ ID NO: 27134 - RNA, 1767 nt, Artificial Sequence
  mRNA product Design a-2 (hSL-A100) comprising derived and/or modified sequence from LASV(G502-SLE-2009;Clade IV)__AIT17126__GPCmut4 (opt5)
aggagaguccgcucagccagguugcagaagcggcuuagcguguguccuaaucuucucucugcguguagguaggccugugccgcaaacaagcuuaccaugggccagaucgugaccuucuuucaagaggucccccacguuauugaagaggugaugaacaucgugcugauugcccucagcauccuggcuguccuuaaggggcuguacaauuucgccacaugcggacucgugggccugcuuacguuucugcuccugugugggagauccugcaccacaggacuguauaaaggcguuuacgaacuccagacccuggagcuuaacauggaaacacugaauauguguaugccucucucuugcaccaagaacaauagccaucacuauauuaugguggggaacgagacaggacuggagcuuacccugacgaauaccuccaucaucaaccauaaauucuguaaucucucugacgcgcacaagaaaaaccuguacgaucaugcucugaugagcauuaucuccacauuucaccucucuauuccgaauuucaaccaguaugaagccaugagcugcgacuuuaauggcggcaagaucuccguccaguacaaccugagccacucuuaugccggggaugcugccgaccauuguggaaccguggcuaauggcguucuucaaacauucaugcggauggccuggggaggguccuacauugcgcuggauagcggccgcgggagaugggacugcaucaugaccucuuaccaguaucucauuauccagaacacgacaugggaggaucacugucaguuuucccggcccagcccuaucggauaccugggccuucugucucaacgcaccagagacauuuauaucucccggcgcagacggggcacauucaccuggacccucagcgauuccgaagggaaggacacacccggaggcuacugccugacgcgcuggaugcugauugaggccgagcucaaauguuuugggaacaccgcuguggccaagugcaaugaaaaacaugaugaggaguucugcgacaugcugagacuuuuugauuucuguaagcaggcuauccagcggcugaaagccccugcgcagaugucuauucaacucaucaacaaggccgucaaugcucugaucaacgaccagcuugugaugaagaaucaucugcgcgacauuaugggaauccccuauugcaacuacagcagauauuguuaccucaaucacacaaccacaggccggaccucccugccuaaaugcugucuggugagcaacgggucuuaccucaaugaaacgcacuucuccgaugacauugaacagcaagccgauaacaugaucacagagaugcugcagaaggaguauauggaacgccagggaaaaaccccgcuuggccuggucgaccucuuuguuuucagcaccucuuuuuaccugauuagcaucuuccugcaccuugugaagauccccacacauagacacauugugggcaaauccugcccuaagccccaucggcucaaucacauggggaucuguucuugcggacuguauaaacagccuggcguccccgugaaguggaagagaugaggacuagucccuguucccagagcccacuuuuuuuucuuuuuuugaaauaaaauagccugucuuucagaucucaaaggcucuuuucagagccaccaaaaaaaaaaaaaaaaaaaaaaaaaaaaaaaaaaaaaaaaaaaaaaaaaaaaaaaaaaaaaaaaaaaaaaaaaaaaaaaaaaaaaaaaaaaaaaaaaaaaa

SEQ ID NO: 27135 - RNA, 1767 nt, Artificial Sequence
  mRNA product Design a-2 (hSL-A100) comprising derived and/or modified sequence from LASV(G733-SLE-2010;Clade IV)__AIT17154__GPCmut4 (opt5)
aggagaguccgcucagccagguugcagaagcggcuuagcguguguccuaaucuucucucugcguguagguaggccugugccgcaaacaagcuuaccaugggccagaucgugaccuucuuucaagaggucccccacguuauugaagaggugaugaacaucgugcugauugcccucagcauccuggcuguccuuaaggggcuguacaauuucgccacaugcggaauugugggccucguuuccuuucugcuucugugugggagaucuugcacgaccagccucuauaaaggaguguacgaacugcagacacuggagcucaacauggaaacccugaauauguguaugccucuuuccugcacaaagaacaauucucaucacuauaucauggucggcaacgagaccgggcuggagcucacacugaccaauacgagcaucauuaaccauaaauucuguaaucuuuccgacgcgcacaagaaaaaccuguacgaucaugcucucaugucuaucauuagcaccuuucaccuguccaucccgaauuucaaccaguaugaagccaugagcugcgacuuuaauggaggcaagauuucugugcaguacaaccugucccacagcuaugccggcgaugcugccaaucauugugggacaaucgcuaacggaguucuccaaaccuucaugcggauggccuggggcgggucuuacauugcgcuggacuccggacgcgauagaugggacugcaucaugacaagcuaccaguaucuuaucauucagaacaccacgugggaggaucacugucaguuuucucggcccuccccuaucggcuaccuggggcuccugagccaacgcacaagagacauuuauaucucccggcgcagacggggaaccuucacauggacccuuucugauagcgaaggcaaggacacccccggcggguacugccugacacgcuggaugcucauugaggccgagcugaaauguuuuggaaauacggcuguggccaagugcaacgaaaaacaugaugaggaguucugcgacaugcugagacucuuugauuucuguaagcaggcuauccagcggcugaaagccccugcgcagauguccauccaacuuauuaauaaggccgucaacgcucugaucaaugaccagcucauuaugaagaaccaucugcgcgacaucaugggcauucccuauugcaauuacagcaaauauuguuaccuuaaccacaccacaaccgggaagacaucucugccuaaaugcugucucguguccaauggaagcuaccugaacgaaacccacuucucugaugacaucgaacagcaagccgauaauaugaucacggagaugcugcagaaggaguauauggaaagacagggcaaaacaccgcucgggcugguggaccuuuuugucuucagcaccuccuuuuaccugauuucuaucuuccuccaccugguuaagauucccacccaucggcacguggugggaaaaagcugcccuaagccccaucgccugaaccacaugggcaucuguuccugcggccuuuaugggcagccuggaguccccgugaaguggaaaagaugaggacuagucccuguucccagagcccacuuuuuuuucuuuuuuugaaauaaaauagccugucuuucagaucucaaaggcucuuuucagagccaccaaaaaaaaaaaaaaaaaaaaaaaaaaaaaaaaaaaaaaaaaaaaaaaaaaaaaaaaaaaaaaaaaaaaaaaaaaaaaaaaaaaaaaaaaaaaaaaaaaaaa

SEQ ID NO: 27136 - RNA, 1767 nt, Artificial Sequence
  mRNA product Design a-2 (hSL-A100) comprising derived and/or modified sequence from MOPV/LASV reassortant(IGS-1;Clade IV)__AFY05576__GPCmut4 (opt5)
aggagaguccgcucagccagguugcagaagcggcuuagcguguguccuaaucuucucucugcguguagguaggccugugccgcaaacaagcuuaccaugggccagaucgugaccuucuuucaagaggucccccacguuauugaagaggugaugaacaucgugcugauugcccucagcguccuggcugugcuuaaggggcuguacaauuucgccacaugcggacucguuggccuggugacguuucuucugcucugugggagauccugcaccacaucucuguauaaaggagucuacgaacugcagacccucgagcugaacauggaaacacuuaauauguguaugccucugagcugcaccaagaacaauucccaucacuauaucauggugggcaacgagacagggcucgagcugacccuuacgaauaccucuauuaucaaccauaaauucuguaaucugagcgacgcgcacaagaaaaaccucuacgaucaugcucugauguccaucauuucuacauuucaccugagcaucccgaauuucaaccaguaugaagccauguccugcgacuuuaauggaggcaagauuagcguucaguacaaccucucucacuccuaugccggcgaugcugccaaucauugugggaccguggcuaacggaguccugcaaacauucaugcggauggccuggggcgggagcuacaucgcgcuugacucuggacgcggcaacugggauugcauuaugaccuccuaccaguaucugaucauucagaauacgacaugggaggaccacugucaguuuagcagacccucuccuaucggguaccucggacugcuuucccaacggacccgcgauaucuauauuagcagacggcgcagaggcacauucaccuggacccuguccgacucugaaggcgaggauacacccgggggauacugccucacgcgguggaugcugaucgaggccgaacugaaguguuuuggcaacaccgcuguggccaaaugcaaugagaagcaugacgaagaguucugcgauaugcuccgccuguuugacuucuguaaacaggcuauucagagacuuaaggccccugcgcagaugagcauccaacugauuaacaaagccgugaaugcucucaucaacgaucagcugaucaugaagaaucaccuucgggacauuauggggauccccuauugcaacuacuccaaguauuguuaccugaaucacacaaccacaggacgcaccagccucccuaaaugcugucuggucucuaacggcuccuaccugaaugaaacgcauuucagcgacgauauugagcagcaagccgacaacaugaucacagagaugcuccagaaggaauauauggagagacaggggaaaaccccgcugggacuuguugaucuguuuguguucucuaccagcuuuuaccucauuuccaucuuccugcaccuggugaagauccccacacaucggcacauugucggcaaaucuugcccuaagccccaucgccuuaaucacaugggcaucuguagcugcgggcucuauaaacagccuggagugcccguuaaguggaagagaugaggacuagucccuguucccagagcccacuuuuuuuucuuuuuuugaaauaaaauagccugucuuucagaucucaaaggcucuuuucagagccaccaaaaaaaaaaaaaaaaaaaaaaaaaaaaaaaaaaaaaaaaaaaaaaaaaaaaaaaaaaaaaaaaaaaaaaaaaaaaaaaaaaaaaaaaaaaaaaaaaaaaa

SEQ ID NO: 27137 - RNA, 1767 nt, Artificial Sequence
  mRNA product Design a-2 (hSL-A100) comprising derived and/or modified sequence from LASV(LM765-SLE-2012;Clade IV)__AIT17814__GPCmut4 (opt5)
aggagaguccgcucagccagguugcagaagcggcuuagcguguguccuaaucuucucucugcguguagguaggccugugccgcaaacaagcuuaccaugggccagaucgugaccuucuuucaagaggucccccacguuauugaagaggugaugaacaucgugcugauugcccucagcauccuggcuguccuuaaggggcuguacaauuucgccacaugcggacucgugggccugguuacguuucuucugcucugugggagauccugcaccacaucucuguauaaaggaguguacgaacugcagacccucgagcugaacauggaaacacuuaauauguguaugccucugagcugcaccaagaacaauucccaucacuauauuauggucggcaacgagacagggcucgagcugacccuuacgaauaccucuaucaucgaccauaaauucuguaaccugagcgaugcgcaccggaagaaucucuacgaccaugcucugauguccauuaucucuacauuucaccugagcauuccgaacuucaaucaguaugaagccauguccugcgauuuuaacggaggcaaaaucagcgugcaguacaaucucucucacuccuaugccaaggacgcugccgaucauuguggcaccguugcuaacggggugcugcaaacauucaugcgcauggccuggggaggcagcuacauugcgcuugacucugggagaggacggugggauugcaucaugaccuccuaccaguaucugauuauccagaauacgacaugggaggaccacugucaguuuagccgccccucuccuaucggcuaccucgggcugcuuucccaaagaacccgggauauuuauaucagccgcagacggcgcggaacauucaccuggacccuguccgacucugaaggcaaggauacacccggcggguacugccucacgagauggaugcugauugaggccgagcugaaauguuuuggaaacaccgcugucgccaagugcaacgaaaaacaugacgaggaguucugcgauaugcuccggcuguuugacuucuguaagcaggcuauccagcgccuuaaagccccugcgcagaugagcauucaacugaucaauaaggccgugaacgcucucaucaaugaccagcugauuaugaagaaccaccuuagagauaucaugggcauucccuauugcaauuacuccaaauauuguuaccugaaccacacaaccacagggaagaccagccucccuaaaugcugucuggugucuaauggauccuaccugaacgaaacgcauuucagcgacgauaucgaacagcaagccgacaauaugauuacagagaugcuccagaaggaguauauggaacggcagggcaaaaccccgcuggggcuugucgaucuguuuguuuucucuaccagcuuuuaccucaucuccaucuuccugcaccuggugaagauucccacacaucgccacaucgugggaaaaccuugccccaagccucauagacuuaaccacaugggcauuuguucuugcggccucuauaagcagcccggggucccggugaaauggaagcggugaggacuagucccuguucccagagcccacuuuuuuuucuuuuuuugaaauaaaauagccugucuuucagaucucaaaggcucuuuucagagccaccaaaaaaaaaaaaaaaaaaaaaaaaaaaaaaaaaaaaaaaaaaaaaaaaaaaaaaaaaaaaaaaaaaaaaaaaaaaaaaaaaaaaaaaaaaaaaaaaaaaaa

SEQ ID NO: 27138 - RNA, 1767 nt, Artificial Sequence
  mRNA product Design a-2 (hSL-A100) comprising derived and/or modified sequence from LASV(LM776-SLE-2012;Clade IV)__AIT17824__GPCmut4 (opt5)
aggagaguccgcucagccagguugcagaagcggcuuagcguguguccuaaucuucucucugcguguagguaggccugugccgcaaacaagcuuaccaugggccagaucgugaccuucuuucaagaggucccccacguuauugaagaggugaugaacaucgugcugauugcccucagcauccuggcuguccuuaaggggcuguacaauuucgccacaugcggacucgugggccugguuacguuucuucugcucugugggagauccugcaccacaucuguguauaaaggagucuacgaacugcagacccuggagcucaacauggaaacacugaauauguguaugccucuuagcugcaccaagaacaauucccaucacuauauuauggugggcaacgagacagggcuggagcucacccugacgaauaccucuaucaucaaccauaaauucuguaaucuuagcgacgcgcacaagaaaaaccuguacgaucaugcucucauguccauuaucucuacauuucaccugagcauuccgaauuucaaccaguaugaagccauguccugcgacuuuaauggaggcaagaucagcguucaguacaaccugucucacuccuaugccggcgaugcugccaaucauugugggaccguggcuaacggaguccuccaaacauucaugcggauggccuggggcgggagcuacauugcgcuggacucuggacacggcaagugggauugcaucaugaccuccuaccaguaucuuauuauccagaacacgacaugggaggaccauugucaguuuagccgccccucuccuaucggguaccugggacuccugucccaaagaacccgggauauuuauaucagccgcagacggcgcggcacauucaccuggacccuuuccgacucugaaggcaaagauacacccgggggauacugccugacgagauggaugcucauugaggccgagcugaaguguuuuggcaauaccgcuguggccaaaugcaacgaaaagcacgacgaggaguucugcgauaugcugcggcucuuugacuucuguaaacaggcuauccagcgccugaaggccccugcgcagaugagcauucaacuuaucaauaaggccgugaacgcucugaucaaugaucagcucauuaugaaaaaccaccugagagacaucauggggauucccuauugcaauuacuccaaguauuguuaccuuaaccauacaaccacaggaaaaaccagccugccuaagugcugucucgucucuaauggcuccuaccugaacgaaacgcacuucagcgacgauaucgaacagcaagccgacaauaugauuacagagaugcugcagaaagaguauauggaacggcaggggaagaccccgcucggacugguugaucuuuuuguguucucuaccagcuuuuaccugaucuccaucuuccuccaucuggugaaaauucccacacaccgccauaucgucggcaagucuugcccuaagccccacagacugaaccacaugggcauuuguagcugcgggcuuuauaaacagccuggagugcccguucgguggaagcgcugaggacuagucccuguucccagagcccacuuuuuuuucuuuuuuugaaauaaaauagccugucuuucagaucucaaaggcucuuuucagagccaccaaaaaaaaaaaaaaaaaaaaaaaaaaaaaaaaaaaaaaaaaaaaaaaaaaaaaaaaaaaaaaaaaaaaaaaaaaaaaaaaaaaaaaaaaaaaaaaaaaaaa

SEQ ID NO: 27139 - RNA, 1767 nt, Artificial Sequence
  mRNA product Design a-2 (hSL-A100) comprising derived and/or modified sequence from LASV(Mad39;Clade IV)__ANH09722__GPCmut4 (opt5)
aggagaguccgcucagccagguugcagaagcggcuuagcguguguccuaaucuucucucugcguguagguaggccugugccgcaaacaagcuuaccaugggccagaucgugaccuucuuucaagaggucccccacguuauugaagaggugaugaacaucgugcugauugcccucagcauccuggcuguccuuaaggggcuguacaauguggccacaugcggacucauuggccugguuacguuccuucugcucugugggagauccugcaccacaacccuguauaaaggaguguacgaacugcaggcgcucgagcugaacauggaaacacuuaauauguguaugccucugucuugcaccaagaacaauagccaucacuauauccgggucggcaacgagacagggcucgagcugacccuuacgaauaccucccugaucaaccauaaauuuuguaaucucucugacgcucacaagaaaaaccuguacgaucaugcccugaugagcauuaucuccacauuccaccucucuauuccgaauuuuaaccaguaugaagccaugagcugcgacuucaaugauggaaagaucuccgugcaguacaaccugagccacaccuaugcuggcgacacagccaaucauuguggcaccguugcuaacggggugcuucaaacguuuaugcgcauggccuggggaggcucuuacauugcgcuggauuccgggagaggaggcugggacugcaucaugacaagcuaccaguaucucauuauccagaacaccacaugggaggaucacugucaguucucucggcccuccccuaucggguaccugggacuucugagccaacgcaccagagacauuuauaucucucggcgcagacggggcaccuuuacauggacgcucuccgauagcgaaggcaaggacacccccgggggauacugccugacacgcuggaugcugauugaggccgagcucaaauguuucggcaauaccgcugucgccaagugcaacgaaaaacaugaugaggaauuuugcgacaugcugagacuuuucgauuuuuguaagcaggcuauccagcggcugaaagccccugcgcagauguccauucaacucaucaauaaggccgugaacgcucugaucaaugaccagcuuauuaugaagaaccaucugcgcgacaucauggggauucccuauugcaauuacucuaaauauuguuaccucaaccacacagugaccggaaagacgagccugccuaaaugcugucuggucuccaauggcagcuaccucaacgagacacacuucucugaugacaucgaacagcaagccgauaauaugauuaccgagaugcugcagaaggaguauauggaaagacaggggaaaaccccgcuuggacugguugaccucuucguguuuuccaccagcuucuaccugaucucuaucuuucugcaccuugugaagauucccacacaucggcacgucgugggcaaaccuugccccaagccucaucgccucaaccacaugggcaucuguagcugcggguucuauaagcagcccggaguuccggugagauggaaacggugaggacuagucccuguucccagagcccacuuuuuuuucuuuuuuugaaauaaaauagccugucuuucagaucucaaaggcucuuuucagagccaccaaaaaaaaaaaaaaaaaaaaaaaaaaaaaaaaaaaaaaaaaaaaaaaaaaaaaaaaaaaaaaaaaaaaaaaaaaaaaaaaaaaaaaaaaaaaaaaaaaaaa

SEQ ID NO: 27140 - RNA, 1767 nt, Artificial Sequence
  mRNA product Design a-2 (hSL-A100) comprising derived and/or modified sequence from LASV(Z0947-SLE-2011;Clade IV)__AIT17840__GPCmut4 (opt5)
aggagaguccgcucagccagguugcagaagcggcuuagcguguguccuaaucuucucucugcguguagguaggccugugccgcaaacaagcuuaccaugggccagaucgugaccuucuuucaagaggucccccacguuauugaagaggugaugaacaucgugcugauugcccucagcauccuggcuguccuuaaggggcuguacaauuucgccacaugcggacucgugggccugguuacguuucuucugcucugugggagauccugcaccauuucucuguauaaaggaguguacgaacugcagacacucgagcugaacauggaaacccuuaauauguguaugccucugagcugcacaaagaacaauucccaucacuauaucauggucggcaacgagaccgggcucgagcugacacuuaccaauacgucuaucauuaaccauaaauucuguaaucugagcgacgcgcacaagaaaaaccucuacgaucaugcucugauguccaucauuucuaccuuucaccugagcaucccgaauuucaaccaguaugaagccauguccugcgacuuuaauggaggcaagauuagcgugcaguacaaccucucucacuccuaugccggcgaugcugccaaucauugugggacaguugcuaacggagugcugcaaaccuucaugcggauggccuggggcgggagcuacaucgcgcuugacucuggacgcgauagaugggacugcauuaugacauccuaccaguaucugaucauccagaacaccacgugggaggaucacugucaguuuagccggcccucuccuauuggcuaccucgggcugcuuucccaacgcacaagagacaucuauauuagccggcgcagacggggaaccuucacauggacccuguccgauucugaaggcaaggacacccccggcggguacugccucacacgcuggaugcugaucgaggccgagcugaaauguuuuggaaauacggcugucgccaagugcaacgaaaaacaugaugaggaguucugcgacaugcucagacuguuugauuucuguaagcaggcuauucagcggcuuaaagccccugcgcagaugagcauccaacugaucaauaaggccgugaacgcucucauuaaugaccagcugaucaugaagaaccaccuucgcgacauuaugggcauccccuauugcaauuacuccaaauauuguuaccugaaccacaccacaaccgggaagacaagccucccuaaaugcugucuggugucuaauggauccuaccugaacgaaacccauuucagcgaugacauugaacagcaagccgauaauaugaucacggagaugcuccagaaggaguauauggaaagacagggcaaaacaccgcuggggcuugucgaccuguuuguuuucucuaccagcuuuuaccucaucuccauuuuccugcaccuggugaagauccccacccaucggcacauugugggaaaaccuugccccaagccucaucgccuuaaccacaugggcaucuguucuugcggccucuauaagcagcccggggucccggugaaauggaagagaugaggacuagucccuguucccagagcccacuuuuuuuucuuuuuuugaaauaaaauagccugucuuucagaucucaaaggcucuuuucagagccaccaaaaaaaaaaaaaaaaaaaaaaaaaaaaaaaaaaaaaaaaaaaaaaaaaaaaaaaaaaaaaaaaaaaaaaaaaaaaaaaaaaaaaaaaaaaaaaaaaaaaa

SEQ ID NO: 27141 - RNA, 1743 nt, Artificial Sequence
  mRNA product Design a-2 (A100) comprising derived and/or modified sequence from LASV(Josiah;Clade IV)__NP_694870__GPCmut4 (opt1)
aggagaguccgcucagccagguugcagaagcggcuuagcguguguccuaaucuucucucugcguguagguaggccugugccgcaaacaagcuuaccaugggccagaucgugaccuucuuccaggaggucccccacgugaucgaggaggugaugaacaucguccugaucgcccucagcgugcuggccgugcugaaggggcucuacaacuucgcgaccugcggccuggucgggcuggugacguuccuccugcugugcggccgcuccugcaccaccagccucuacaaggggguguacgagcugcagacccuggagcucaacauggagacgcugaacaugugcaugccgcuguccugcaccaagaacaacagccaccacuacaucauggucggcaacgagaccggccucgagcugacgcugaccaacaccuccaucaucaaccacaaguucugcaaccucagcgacgcccacaagaagaaccuguacgaccacgcccugauguccaucaucagcaccuuccaccucuccauccccaacuucaaccaguacgaggccaugagcugcgacuucaacgggggcaagaucuccgugcaguacaaccugagccacuccuacgccggggacgcggccaaccacugcggcacgguggccaacgggguccugcagaccuucaugcggauggccuggggcggcagcuacaucgcgcucgacuccgggcgcggcaacugggacugcaucaugaccagcuaccaguaccugaucauccagaacaccacgugggaggaccacugccaguucucccggcccagccccaucggguaccugggccuccugucccagcgcacccgggacaucuacaucagccgccggcgccggggcaccuucaccuggacgcugagcgacuccgaggggaaggacaccccgggcggguacugccugacccgcuggaugcucaucgaggccgagcugaagugcuucggcaacaccgccguggccaagugcaacgagaagcacgacgaggaguucugcgacaugcugcggcuguucgacuucugcaagcaggccauccagcgccugaaggcgcccgcccagaugagcauccagcugaucaacaaggccgugaacgcccucaucaacgaccagcugaucaugaagaaccaccuccgggacaucauggggauccccuacugcaacuacuccaaguacugcuaccucaaccacacgaccaccggccgcaccagccugcccaagugcugccuggucuccaacggcagcuaccucaacgagacgcacuucuccgacgacaucgagcagcaggccgacaacaugaucaccgagaugcugcagaaggaguacauggagcggcaggggaagacgccccugggccucguggaccuguucguguucagcaccuccuucuaccugaucagcaucuuccugcaccucgucaagaucccgacccaccgccacaucguggggaaguccugccccaagccccaccggcugaaccacaugggcaucugcagcugcgggcuguacaagcagcccggcgugccggucaaguggaagcgcugaggacuagucccuguucccagagcccacuuuuuuuucuuuuuuugaaauaaaauagccugucuuucagaucuaaaaaaaaaaaaaaaaaaaaaaaaaaaaaaaaaaaaaaaaaaaaaaaaaaaaaaaaaaaaaaaaaaaaaaaaaaaaaaaaaaaaaaaaaaaaaaaaaaaa

SEQ ID NO: 27142 - RNA, 1740 nt, Artificial Sequence
  mRNA product Design a-2 (A100) comprising derived and/or modified sequence from LASV(LP;Clade I)__AAF86701__GPCmut4 (opt1)
aggagaguccgcucagccagguugcagaagcggcuuagcguguguccuaaucuucucucugcguguagguaggccugugccgcaaacaagcuuaccaugggccagaucaucaccuucuuccaggaggugccccacgucaucgaggaggugaugaacaucgugcugaucgcccucagccugcuggccauccucaaggggcuguacaacaucgcgaccugcggcaucaucgggcuggucgccuuccucuuccugugcggcaaguccugcagccugacgcucaagggcggguacgagcugcagacccuggagcucaacauggagacccugaacaugugcaugccgcuguccugcacgaagaacagcucccaccacuacauccgcgugggcaacgagaccgggcucgagcugacccugaccaacacgagcaucaucaaccacaaguucugcaaccucuccgacgcccacaagaagaaccuguacgaccacgcccugaugagcaucaucuccaccuuccaccucagcauccccaacuucaaccaguacgaggccauguccugcgacuucaacggcgggaagaucagcgugcaguacaaccugucccacagcuacgcgggcgacgccgccgagcacugcgggaccgucgccaacggcgugcugcagaccuucaugcggauggcguggggcgggcgcuacaucgcccucgacuccggcaaggggaacugggacugcaucaugacgagcuaccaguaccugaucauccagaacaccaccugggaggaccacugccaguucucccggcccagccccaucggcuaccugggccuccugucccagcgcacccgggacaucuacaucagccgccggcgccgggggacguucaccuggacccugagcgacuccgagggcaacgagacccccgggggcuacugccugacgcgcuggaugcucaucgaggccgagcugaagugcuucgggaacaccgccguggccaagugcaacgagaagcacgacgaggaguucugcgacaugcugcggcuguucgacuucugcaagcaggcgauccgccggcugaaggcccccgcccagaugagcauccagcugaucaacaaggccgucaacgcccucaucaacgaccagcugaucaugaagaaccaccuccgcgacaucaugggcauccccuacugcaacuacuccaaguacugcuaccucaaccacaccagcuccggccggaccagccugcccaagugcugccugaucuccaacgggagcuaccucaacgagacgcaguucuccgacgacaucgagcagcaggcggacaacaugaucaccgagaugcugcagaaggaguacaucgagcgccagggcaagaccccgcuggggcucguggacaucuucaucuucagcaccuccuucuaccugaucagcaucuuccugcaccugaucaagaucccgacgcaccggcacaucgugggcaagcccugccccaagccccaccgccucaaccacaugggggucugcuccugcggccuguacaagcacccgggcgugcccaccaaguggaagcggugaggacuagucccuguucccagagcccacuuuuuuuucuuuuuuugaaauaaaauagccugucuuucagaucuaaaaaaaaaaaaaaaaaaaaaaaaaaaaaaaaaaaaaaaaaaaaaaaaaaaaaaaaaaaaaaaaaaaaaaaaaaaaaaaaaaaaaaaaaaaaaaaaaaaa

SEQ ID NO: 27143 - RNA, 1740 nt, Artificial Sequence
  mRNA product Design a-2 (A100) comprising derived and/or modified sequence from LASV(803213;Clade II)__AAF86703__GPCmut4 (opt1)
aggagaguccgcucagccagguugcagaagcggcuuagcguguguccuaaucuucucucugcguguagguaggccugugccgcaaacaagcuuaccaugggccagaucaucaccuucuuccaggaggugccccacgucaucgaggaggugaugaacaucgugcugaucgcccucagccugcuggccauccucaaggggaucuacaacgucgcgaccugcggccuguucgggcugaucuccuuccuccugcugugcggccgcagcugcuccgugacguacaaggggguguacgagcuccagacccuggagcugaacauggccaaccucaacaugugcaugccgcugagcugcaccaagaacaacucccaccacuacaucauggucggcaacgagacgggccuggagcucacccugaccaacaccagcaucaucaaccacaaguucugcaaccuguccgacgcccacaagaagaaccucuacgaccacgcccugaugagcaucaucuccacguuccaccugagcauccccaacuucaaccaguacgaggccauguccugcgacuucaacgggggcaagaucagcgugcaguacaaccucucccacagcuucgcgguggacgccgccaaccacugcgggaccaucgccaacggcguccugcagaccuucaugcggauggcguggggcggguccuacaucgcccuggacagcggcaaggggaacugggacugcaucaugaccuccuaccaguaccucaucauccagaacacgaccugggaggaccacugccaguucagccgccccucccccaucggcuaccuggggcugcucagccagcggacccgcgacaucuacaucagccggcgccgccggggcaccuucacguggacccucuccgacagcgagggcaacgaggcccccgggggcuacugccugacccgguggaugcugaucgaggccgagcucaagugcuucgggaacaccgccguggcgaagugcaacgagaagcacgacgaggaguucugcgacaugcugcgccuguucgacuucugcaagcaggccaucaagcggcucaagacgcccgcccagauguccauccagcugaucaacaaggccgugaacgcccugaucaacgaccagcucaucaugaagaaccaccuccgcgacaucaugggcauccccuacugcaacuacagccgguacugcuaccugaaccacaccgucaccgggaagaccucccugccccgcugcugccuggugagcaacggcuccuaccugaacgagacgcacuucagcgacgacaucgagcagcaggcggacaacaugaucaccgagaugcuccagaaggaguacauggaccggcagggcaagaccccgcuggggcugguggaccucuucgucuucuccaccagcuucuaccugaucuccaucuuccugcaccuggugaagaucccgacgcaccgccacaucgugggcaagcccugccccaagccccaccggcucaaccacauggggaucugcagcugcggccuguacaagcacccggggguccccgugaaguggaagcgcugaggacuagucccuguucccagagcccacuuuuuuuucuuuuuuugaaauaaaauagccugucuuucagaucuaaaaaaaaaaaaaaaaaaaaaaaaaaaaaaaaaaaaaaaaaaaaaaaaaaaaaaaaaaaaaaaaaaaaaaaaaaaaaaaaaaaaaaaaaaaaaaaaaaaa

SEQ ID NO: 27144 - RNA, 1740 nt, Artificial Sequence
  mRNA product Design a-2 (A100) comprising derived and/or modified sequence from LASV(GA391;Clade III)__CAA36645__GPCmut4 (opt1)
aggagaguccgcucagccagguugcagaagcggcuuagcguguguccuaaucuucucucugcguguagguaggccugugccgcaaacaagcuuaccaugggccagaucgugaccuucuuccaggaggucccccacgugaucgaggaggugaugaacaucguccugaucgcccucagcauccuggccauccugaaggggcucuacaacguggcgaccugcggccugaucgggcuggugacguuccuccugcuguccggccgcagcugcucccucaucuacaaggggaccuacgagcugcagacccuggagcucaacauggagacccugaacaugugcaugccgcugagcugcaccaagaacaacucccaccacuacauccgggucggcaacgagaccggccucgagcugacccugacgaacaccagcauccucaaccacaaguucugcaaccuguccgacgcccacaagcgcaaccuguacgaccacagccucauguccaucaucagcaccuuccaccuguccauccccaacuucaaccaguacgaggccaugagcugcgacuucaacgggggcaagaucaccgugcaguacaaccugucccacagcuucgccguggacgccgcggggcacugcggcacgcucgccaacgggguccugcagaccuucaugcggauggccuggggcggcuccuacaucgcccuggacagcgggcgcggcaacugggacugcaucaugaccuccuaccaguaccucaucauccagaacaccacgugggacgaccacugccaguucagccggcccucccccaucggguaccugggccugcucagccagcgcacccgggacaucuacaucagccgccggcgccggggcaccuucaccuggacgcucuccgacagcgaggggaacgagaccccgggcggguacugccugacccgcuggaugcugaucgaggcggagcucaagugcuucggcaacaccgccguggccaagugcaacgagaagcacgacgaggaguucugcgacaugcugcggcuguucgacuucugcaagcaggccauccgccggcucaagacgcccgcccagauguccauccagcugaucaacaaggcggugaacgcccugaucaacgaccagcucaucaugaagaaccaccuccgcgacaucauggggauccccuacugcaacuacagccgguacugcuaccugaaccacaccuccaccggcaagaccagccugccccgcugcugccugaucuccaacggcagcuaccugaacgagacgaaguucuccgacgacaucgagcagcaggccgacaacaugaucaccgagaugcuccagaaggaguacaucgaccggcaggggaagacgccccugggccuggucgaccuguucguguucagcaccuccuucuaccucaucagcaucuuccugcaccuggugaagaucccgacccaccgccacaucgucgggaagcccugccccaagccccaccggcucaaccacaugggcaucugcuccugcgggcuguacaagcagccgggcgugcccgugcgcuggaagcggugaggacuagucccuguucccagagcccacuuuuuuuucuuuuuuugaaauaaaauagccugucuuucagaucuaaaaaaaaaaaaaaaaaaaaaaaaaaaaaaaaaaaaaaaaaaaaaaaaaaaaaaaaaaaaaaaaaaaaaaaaaaaaaaaaaaaaaaaaaaaaaaaaaaaa

SEQ ID NO: 27145 - RNA, 1743 nt, Artificial Sequence
  mRNA product Design a-2 (A100) comprising derived and/or modified sequence from LASV(AV;Clade V)__CCA30314__GPCmut4 (opt1)
aggagaguccgcucagccagguugcagaagcggcuuagcguguguccuaaucuucucucugcguguagguaggccugugccgcaaacaagcuuaccaugggccagaucgugaccuucuuccaggaggucccccacgugaucgaggaggugaugaacaucguccugaucgcccucagcauccuggccgugcugaaggggcucuacaacaucgcgaccugcggccugaucgggcugaucacguuccuccugcugugcggccgcuccugcagcuccaaccucuacaaggggguguacgagcugcagagccuggaccucaacauggagacccugaacaugugcaugccgcuguccugcaccaagaacaacagccaccacuacauccgggucggcaacgacacgggccucgagcugacccugaccaacaccuccauccucaaccacaaguucugcaaccugagcgacgcccacaagaaggaccuguacgaccacgcccucauguccaucaucagcacguuccaccuguccauccccaacuucaaccaguacgaggccaugagcugcgacuucaacgggggcaagaucuccgugcaguacaaccugagccacuccuacgccaucgacgcggccaaccacugcgggaccguggccaacggcauccuccagaccuucaugcgcauggccuggggcgggagcuacaucgcgcuggacuccggccgggggaacugggacugcaucaugaccagcuaccaguaccugaucauccagaacacgaccugggagaaccacugccaguucucccgccccagccccaucggcuaccucgggcugcugagccagcggacccgcgacaucuacaucucccggcgccgccggggcaccuucacguggacccugagcgacuccgagggcaacgccacccccgggggcuacugccucacccgguggaugcugaucgaggccgagcugaagugcuucgggaacacggccgucgccaagugcaacgagaagcacgacgaggaguucugcgacaugcuccgccuguucgacuucugcaagcaggcgaucagccggcugaagucccccgcccagaugagcauccagcucaucaacaaggccgugaacgcccugaucaacgaccagcugaucaugaagaaccaccuccgcgacaucaugggcauccccuacugcaacuacuccaaguacugcuaccugaaccacaccaucaccgggaagaccagccugcccaagugcugccucguguccaacggcagcuaccugaacgagacgcacuucuccgacgacaucgagcagcaggccgacaacaugaucaccgagaugcugcagaaggaguacauggagcggcagggcaagaccccgcucgggcuggucgaccuguucguguucagcaccuccuucuaccugaucagcaucuuccuccgccuggugaagaucccgacgcaccggcacaucgucggcaagcccugccccaagccccaccgccugaaccacauggggaucugcuccugcggccucuacaagcagccgggggugcccgugcgguggaagcgcugaggacuagucccuguucccagagcccacuuuuuuuucuuuuuuugaaauaaaauagccugucuuucagaucuaaaaaaaaaaaaaaaaaaaaaaaaaaaaaaaaaaaaaaaaaaaaaaaaaaaaaaaaaaaaaaaaaaaaaaaaaaaaaaaaaaaaaaaaaaaaaaaaaaaa

SEQ ID NO: 27146 - RNA, 1740 nt, Artificial Sequence
  mRNA product Design a-2 (A100) comprising derived and/or modified sequence from LASV(Togo/2016/7082;Clade VI)__AMR44577__GPCmut4 (opt1)
aggagaguccgcucagccagguugcagaagcggcuuagcguguguccuaaucuucucucugcguguagguaggccugugccgcaaacaagcuuaccaugggccagaucaucaccuucuuccaggaggugccccacgucaucgaggaggugaugaacaucgugcugaucgcccucagccugcuggccauccucaagggggucuacaacguggcgaccugcggcaucaucgggcuggugacguuccuguuccucugcggccgcuccugcagccugaucuacaagggguccuacgagcugcagacccucgagcugaacauggagacccugaacaugugcaugccgcucagcugcacgaagaacuccagccaccacuacauccgggucggcaacgagaccggccuggagcugacccucaccaacacguccaucaucaaccacaaguucugcaaccugagcgacgcccacaagcgcaaccuguacgaccacgcccucauguccauccugagcaccuuccaccuguccauccccaacuucaaccaguacgaggccaugagcugcgacuucaacgggggcaagaucuccgugcaguacaaccucagccacgccuacgcgguggacgccgccgagcacugcgggaccgucgccaacggcgugcugcagaccuucaugcggauggcguggggcggguccuacaucgcccuggacagcggccgcgggaacugggacugcaucaugacguccuaccaguaccucaucauccagaacaccaccugggaggaccacugccaguucagccggcccucccccaucggcuaccuggggcugcucagccagcgcacccgggacaucuacaucagccgccggcgccggggcacguucaccuggacccucuccgacagcgagggcaacgagacccccgggggcuacugccugacgcgcuggaugcugaucgaggccgagcucaagugcuucgggaacaccgccguggccaagugcaacgagaagcacgacgaggaguucugcgacaugcugcggcuguucgacuucugcaagcaggcgauccagcgccucaagucccccgcccagaugagcauccagcugaucaacaaggccgucaacgcccugaucaacgaccagcucaucaugaagaaccaccuccgggacaugaugggcauccccuacugcaacuacuccaaguacugcuaccugaaccacaccagcuccgggcgcaccagccugcccaagugcugccugguguccaacggcagcuaccugaacgagacgcacuucuccgacgacaucgagcagcaggccgacaacaugaucaccgagaugcuccagaaggaguacaucgaccggcagggcaagaccccgcuggggcugguggaccucuucgucuucagcaccuccuucuaccugaucagcaucuuccugcaccugaucaagaucccgacgcaccgccacaucgugggcaagcccugccccaagccccaccggcucaaccacauggggaucugcuccugcggccuguacaagcagccgggggugcccacccgcuggaagcggugaggacuagucccuguucccagagcccacuuuuuuuucuuuuuuugaaauaaaauagccugucuuucagaucuaaaaaaaaaaaaaaaaaaaaaaaaaaaaaaaaaaaaaaaaaaaaaaaaaaaaaaaaaaaaaaaaaaaaaaaaaaaaaaaaaaaaaaaaaaaaaaaaaaaa

SEQ ID NO: 27147 - RNA, 1740 nt, Artificial Sequence
  mRNA product Design a-2 (A100) comprising derived and/or modified sequence from LASV(KAK-428;Clade n.d. (VII))__ANH09740__GPCmut4 (opt1)
aggagaguccgcucagccagguugcagaagcggcuuagcguguguccuaaucuucucucugcguguagguaggccugugccgcaaacaagcuuaccaugggccagaucgugaccuucuuccaggaggucccccacgugaucgaggaggugaugaacaucguccugaucgcccucagccugcuggccauccucaaggggcuguacaacuucgcgaccugcggcgugaucgggcugaucacguuccuccugcugugcggccgcuccugcagcgccaccuacaaggggcaguacgagcuccagacccuggagcugaacauggagucccucaacaugugcaugccgcugagcugcacgaagaacaacucccaccacuacauccgggccggcaacaacaccggccuggagcucacccugaccaacacgagcaucaucucccacaaguucugcaaccugagcgacgcccacaagaagaaccucuacgaccacacccugauguccaucaucaccaccuuccaccugagcauccccaacuucaaccaguacgaggccauguccugcgacuucaacgggggcaagaucagcauccaguacaaccucucccacagcuacgcgggggacgccgcccagcacugcggcacgguggccaacgggguccugcagaccuucaugcgcauggcguggggcggcuccuaccuggcccucgacagcgggcggcgcggcugggacugcaucaucuccagcuaccaguaccugaucauccagaacaccaccugggacgaccacugccaguucucccggcccagccccaucggguaccugggcuucgugagccagaagacgcgcgacaucuacaucucccggcgccgccggggcaccuucaccuggacccugagcgacuccgaggggcacgacaugccgggcggguacugccucacgcgguggaugcugaucgaggccgaccugaagugcuucggcaacaccgccguggccaagugcaacgagaagcacgacgaggaguucugcgacauguggcgccucuucgacuucugcaagcaggcgauccagcggcugaaggcccccgcccagaugaacauccagcugaucaacaaggccgucaacgcccucaucaacgaccagcugaugaugaagaaccaccuccgcgacaucauggggauccccuacugcaacuacagcaaguucugcuaccugaacaacaccaccacgggccggaccucccugccccgcugcugccugaucagcaacggcuccuaccucaacgagacccacuucagcgacgacaucgagcagcaggcggacaacaugaucaccgagaugcugcagaaggaguacauggaccggcaggggaagacgccccugggccucguggaccuguucguguucuccaccagcuucuaccugaucaccaucuuccuccaccuggucaagaucccgacccaccgccacaucguggggaagcccugccccaagccccaccggcugaaccacaugggcaucugcuccugcgggcuguacaagcagccgggcgugcccguccgcuggaagcggugaggacuagucccuguucccagagcccacuuuuuuuucuuuuuuugaaauaaaauagccugucuuucagaucuaaaaaaaaaaaaaaaaaaaaaaaaaaaaaaaaaaaaaaaaaaaaaaaaaaaaaaaaaaaaaaaaaaaaaaaaaaaaaaaaaaaaaaaaaaaaaaaaaaaa

SEQ ID NO: 27148 - RNA, 1740 nt, Artificial Sequence; identical to SEQ ID NO: 27142
  mRNA product Design a-2 (A100) comprising derived and/or modified sequence from LASV(Pinneo-NIG-1969;Clade I)__AIT17836__GPCmut4 (opt1)

SEQ ID NO: 27149 - RNA, 1740 nt, Artificial Sequence
  mRNA product Design a-2 (A100) comprising derived and/or modified sequence from LASV(ISTH0009-NIG-2011;Clade II)__AIT17404__GPCmut4 (opt1)
aggagaguccgcucagccagguugcagaagcggcuuagcguguguccuaaucuucucucugcguguagguaggccugugccgcaaacaagcuuaccaugggccagaucaucaccuucuuccaggaggugccccacgucaucgaggaggugaugaacaucgugcugaucgcccucagccugcuggccauccucaaggggaucuacaacgucgcgaccugcggccuguucgggcugguguccuuccuccugcugugcggccgcagcugcuccacgaccuacaaggggguguacgagcuccagacccuggagcuggacauggccagccucaacaugugcaugccgcuguccugcacgaagaacaacagccaccacuacaucauggucggcaacgagaccggccuggagcucacccugaccaacacguccaucaucaaccacaaguucugcaaccugagcgacgcccacaagaagaaccucuacgaccacgcccugauguccaucaucagcaccuuccaccuguccauccccaacuucaaccaguacgaggccaugagcugcgacuucaacgggggcaagaucuccgugcaguacaaccucagccacgcguacgccguggacgccgccaaccacugcgggaccaucgcgaacggcguccugcagaccuucaugcggauggccuggggcggguccuacaucgcccuggacagcggcaagggguccugggacugcaucaugacgagcuaccaguaccucaucauccagaacaccaccugggaggaccacugccaguucucccgccccagccccaucggcuaccuggggcugcucagccagcggacccgcgacaucuacaucucccggcgccgccggggcacguucaccuggacccucagcgacuccgagggcaacgagacccccgggggcuacugccugacgcgguggaugcugaucgaggccgagcucaagugcuucgggaacaccgccguggcgaagugcaacgagaagcacgacgaggaguucugcgacaugcugcgccuguucgacuucugcaagcaggccauccggcgccucaagacccccgcccagaugagcauccagcugaucaacaaggccgugaacgcccugaucaacgaccagcucaucaugaagaaccaccuccgggacaucaugggcaucccguacugcaacuacuccaaguacugcuaccugaaccacaccgucacggggaagaccagccugccccgcugcugccugguguccaacggcagcuaccugaacgagacccacuucuccgacgacaucgagcagcaggcggacaacaugaucaccgagcuccugcagaaggaguacauggaccggcagggcaagacgccccuggggcucguggaccuguucgucuucagcaccuccuucuaccugaucagcaucuuccugcaccucaucaagaucccgacccaccgccacaucaccggcaagcccugccccaagccccaccggcugaaccacauggggaucugcuccugcggccuguacaagcacccgggggugcccgugaaguggaagcgcugaggacuagucccuguucccagagcccacuuuuuuuucuuuuuuugaaauaaaauagccugucuuucagaucuaaaaaaaaaaaaaaaaaaaaaaaaaaaaaaaaaaaaaaaaaaaaaaaaaaaaaaaaaaaaaaaaaaaaaaaaaaaaaaaaaaaaaaaaaaaaaaaaaaaa

SEQ ID NO: 27150 - RNA, 1740 nt, Artificial Sequence
  mRNA product Design a-2 (A100) comprising derived and/or modified sequence from LASV(ISTH2010-NIG-2012;Clade II)__AIT17482__GPCmut4 (opt1)
aggagaguccgcucagccagguugcagaagcggcuuagcguguguccuaaucuucucucugcguguagguaggccugugccgcaaacaagcuuaccaugggccagaucaucaccuucuuccaggaggugccccacgucaucgaggaggugaugaacaucgugcugaucgcccucagccugcuggccauccucaaggggaucuacaacgucgcgaccugcggccuguucgggcugguguccuuccuccugcugugcggccgcagcugcuccacgaccuacaaggggguguacgagcuccagacccuggagcuggacauggccagccucaacaugugcaugccgcuguccugcacgaagaacaacagccaccacuacaucauggucggcaacgagaccggccuggagcucacccugaccaacacguccaucaucaaccacaaguucugcaaccugagcgacgcccacaagaagaaccucuacgaccacgcccugauguccaucaucagcaccuuccaccuguccauccccaacuucaaccaguacgaggccaugagcugcgacuucaacgggggcaagaucuccgugcaguacaaccucagccacgcguacgccguggacgccgccaaccacugcgggaccaucgcgaacggcguccugcagaccuucaugcggauggccuggggcggguccuacaucgcccuggacagcggcaagggguccugggacugcaucaugacgagcuaccaguaccucaucauccagaacaucaccugggaggaccacugccaguucucccgccccagccccaucggcuaccuggggcugcucagccagcggacccgcgacaucuacaucucccggcgccgccggggcaccuucacguggacccucagcgacuccgagggcaacgagacccccgggggcuacugccugacccgguggaugcugaucgaggccgagcucaagugcuucgggaacacggccguggcgaagugcaacgagaagcacgacgaggaguucugcgacaugcugcgccuguucgacuucugcaagcaggccauccggcgccucaagacccccgcccagaugagcauccagcugaucaacaaggccgugaacgcccugaucaacgaccagcucaucaugaagaaccaccuccgggacaucaugggcauccccuacugcaacuacuccaaguacugcuaccugaaccacaccgucaccgggaagacgagccugccccgcugcugccugguguccaacggcagcuaccugaacgagacccacuucuccgacgacaucgagcagcaggcggacaacaugaucaccgagcuccugcagaaggaguacaucgaccggcagggcaagaccccgcuggggcucguggaccuguucgucuucagcacguccuucuaccugaucagcaucuuccugcaccucgugaagaucccgacccaccgccacguggucggcaagcccugccccaagccccaccggcugaaccacauggggaucugcuccugcggccuguacaagcacccgggggugcccgugaaguggaagcgcugaggacuagucccuguucccagagcccacuuuuuuuucuuuuuuugaaauaaaauagccugucuuucagaucuaaaaaaaaaaaaaaaaaaaaaaaaaaaaaaaaaaaaaaaaaaaaaaaaaaaaaaaaaaaaaaaaaaaaaaaaaaaaaaaaaaaaaaaaaaaaaaaaaaaa

SEQ ID NO: 27151 - RNA, 1740 nt, Artificial Sequence
  mRNA product Design a-2 (A100) comprising derived and/or modified sequence from LASV(Lassa virus/H.sapiens-wt/NGA/2015/ISTH_0543;Clade II)__AVO03639__GPCmut4 (opt1)
aggagaguccgcucagccagguugcagaagcggcuuagcguguguccuaaucuucucucugcguguagguaggccugugccgcaaacaagcuuaccaugggccagaucaucaccuucuuccaggaggugccccacgucaucgaggaggugaugaacaucgugcugaucgcccucagccugcuggccauccucaaggggaucuacaacgucgcgaccugcggccuguucgggcugguguccuuccuccugcugugcggccgcagcugcuccacgaccuacaaggggguguacgagcuccagacccuggagcuggacauggccaaccucaacaugugcaugccgcugagcugcacgaagaacaacucccaccacuacaucauggucggcaacgagaccggccuggagcucacccugaccaacacgagcaucaucaaccacaaguucugcaaccuguccgacgcccacaagaagaaccucuacgaccacgcccugaugagcaucaucuccaccuuccaccugagcauccccaacuucaaccaguacgaggccauguccugcgacuucaacgggggcaagaucagcgugcaguacaaccucucccacaccuacgcgguggacgccgccaaccacugcgggaccaucgccaacggcguccugcagacguucaugcggauggcguggggcgggagcuacaucgcccuggacuccggcaaggggagcugggacugcaucaugaccuccuaccaguaccucgugauccagaacaccaccugggaggaccacugccaguucagccgccccucccccaucggcuaccuggggcugcucagccagcggacgcgcgacaucuacaucagccggcgccgccggggcaccuucaccuggacccucuccgacagcgagggcaacgagacgcccgggggcuacugccugacccgguggaugcugaucgaggccgagcucaagugcuucgggaacaccgccguggccaagugcaacgagaagcacgacgaggaguucugcgacaugcugcgccuguucgacuucugcaagcaggcgauccggcgccucaagacccccgcccagauguccauccagcugaucaacaaggccgucaacgcccugaucaacgaccagcucaucaugaagaaccaccuccgggacaucaugggcauccccuacugcaacuacagcaaguacugcuaccugaaccacacggugaccgggaagaccucccugccccgcugcugccuggugagcaacggcuccuaccugaacgagacccacuucagcgacgacaucgagcagcaggccgacaacaugaucacggagcuccugcagaaggaguacaucgaccggcagggcaagaccccgcuggggcucgucgaccuguucguguucuccaccagcuucuaccugaucuccaucuuccugcaccucgugaagaucccgacccaccgccacaucacgggcaagcccugccccaagccccaccggcugaaccacauggggaucugcagcugcggccuguacaagcacccggggguccccgugaaguggaagcgcugaggacuagucccuguucccagagcccacuuuuuuuucuuuuuuugaaauaaaauagccugucuuucagaucuaaaaaaaaaaaaaaaaaaaaaaaaaaaaaaaaaaaaaaaaaaaaaaaaaaaaaaaaaaaaaaaaaaaaaaaaaaaaaaaaaaaaaaaaaaaaaaaaaaaa

SEQ ID NO: 27152 - RNA, 1740 nt, Artificial Sequence
  mRNA product Design a-2 (A100) comprising derived and/or modified sequence from LASV(Lassa virus/H.sapiens-wt/NGA/2016/ISTH_0009;Clade II)__AVO03571__GPCmut4 (opt1)
aggagaguccgcucagccagguugcagaagcggcuuagcguguguccuaaucuucucucugcguguagguaggccugugccgcaaacaagcuuaccaugggccagaucaucaccuucuuccaggaggugccccacgucaucgaggaggugaugaacaucgugcugaucgcccucagccugcuggccauccucaaggggaucuacaacgucgcgaccugcggccugcuggggcucguguccuuccugcugcucugcggccgcagcugcuccacgaccuacaaggggguguacgagcugcagacccuggagcucgacauggccagccugaacaugugcaugccgcuguccugcacgaagaacaacagccaccacuacaucauggucggcaacgagaccggccucgagcugacccugaccaacacguccaucaucaaccacaaguucugcaaccucagcgacgcccacaagaagaaccuguacgaccacgcccugauguccaucaucagcaccuuccaccucuccauccccaacuucaaccaguacgaggccaugagcugcgacuucaacgggggccggaucuccgugcaguacaaccugagccacuccuacgcgguggacgccgccaaccacugcgggaccaucgccaacggcguccugcagaccuucaugcgcauggcguggggcgggagcuacaucgcccucgacuccggcaaggggagcugggacugcaucaugacguccuaccaguaccugaucauccagaacaccaccugggaggaccacugccaguucagccggcccagccccaucggcuaccuggggcuccugucccagcgcacccgggacaucuacaucagccgccggcgccggggcacguucaccuggacccuguccgacagcgagggcaacgagacccccgggggcuacugccugacgcgcuggaugcucaucgaggccgagcugaagugcuucgggaacaccgccguggccaagugcaacgagaagcacgacgaggaguucugcgacaugcugcggcuguucgacuucugcaagcaggcgauccgccggcugaagacccccgcccagauguccauccagcugaucaacaaggccgugaacgcccucaucaacgaccagcugaucaugaagaaccaccuccgcgacaucaugggcaucccguacugcaacuacagcaaguacugcuaccucaaccacaccgucacggggaagaccucccugccccggugcugccuggugagcaacggcuccuaccucaacgagacccacuucagcgacgacaucgagcagcaggccgacaacaugaucaccgagcugcugcagaaggaguacaucgaccgccagggcaagacgccccucgggcugguggaccuguucgucuucuccaccagcuucuaccugaucuccaucuuccuccaccuggugaagaucccgacccaccggcacaucaccggcaagcccugccccaagccccaccgccugaaccacauggggaucugcagcugcggccucuacaaccacccgggggugcccgucaaguggaagcggugaggacuagucccuguucccagagcccacuuuuuuuucuuuuuuugaaauaaaauagccugucuuucagaucuaaaaaaaaaaaaaaaaaaaaaaaaaaaaaaaaaaaaaaaaaaaaaaaaaaaaaaaaaaaaaaaaaaaaaaaaaaaaaaaaaaaaaaaaaaaaaaaaaaaa

SEQ ID NO: 27153 - RNA, 1740 nt, Artificial Sequence
  mRNA product Design a-2 (A100) comprising derived and/or modified sequence from LASV(Lassa virus/H.sapiens-wt/NGA/2016/ISTH_0017;Clade II)__AVO03567__GPCmut4 (opt1)
aggagaguccgcucagccagguugcagaagcggcuuagcguguguccuaaucuucucucugcguguagguaggccugugccgcaaacaagcuuaccaugggccagaucaucaccuucuuccaggaggugccccacgucaucgaggaggugaugaacaucgugcugaucgcccucagccugcuggccauccucaaggggaucuacaacgucgcgaccugcggccuguucgggcugguguccuuccuccugcugugcggccgcagcugcuccacgaccuacaaggggguguacgagcuccagacccuggagcuggacauggccagccucaacaugugcaugccgcuguccugcacgaagaacaacagccaccacuacaucauggucggcaacgagaccggccuggagcucacccugaccaacacguccaucaucaaccacaaguucugcaaccugagcgacgcccacaagaagaaccucuacgaccacgcccugauguccaucaucagcaccuuccaccuguccauccccaacuucaaccaguacgaggccaugagcugcgacuucaacgggggcaagaucuccgugcaguacaaccucagccacaccuacgcgaucgacgccgccaaccacugcgggaccaucgccaacggcgugcugcagacguucaugcggauggcguggggcggguccuacaucgcccuggacagcggcaagggguccugggacugcaucaugaccagcuaccaguaccucaucauccagaacaccaccugggaggaccacugccaguucucccgccccagccccaucggcuaccuggggcugcucagccagcggacgcgcgacaucuacaucucccggcgccgccggggcaccuucaccuggacccucagcgacuccgagggcaacgagacgcccgggggcuacugccugacccgguggaugcugaucgaggccgagcucaagugcuucgggaacaccgccgucgccaagugcaacgagaagcacgacgaggaguucugcgacaugcugcgccuguucgacuucugcaagcaggcgauccggcgccucaagacccccgcccagaugagcauccagcugaucaacaaggccgugaacgcccugaucaacgaccagcucaucaugaagaaccaccuccgggacaucaugggcauccccuacugcaacuacuccaaguacugcuaccugaaccacacggugaccgggaagaccagccugccccgcugcugccuggucuccaacggcagcuaccugaacgagacccacuucuccgacgacaucgagcagcaggccgacaacaugaucacggagcuccugcagaaggaguacauggaccggcagggcaagaccccgcuggggcucguggaccuguucguguucagcaccuccuucuaccugaucagcaucuuccugcaccucguccgcaucccgacccaccggcacgugaucggcaagcccugccccaagccccaccgccugaaccacauggggaucugcuccugcggccuguacaagcacccgggggugcccgucaaguggaagcggugaggacuagucccuguucccagagcccacuuuuuuuucuuuuuuugaaauaaaauagccugucuuucagaucuaaaaaaaaaaaaaaaaaaaaaaaaaaaaaaaaaaaaaaaaaaaaaaaaaaaaaaaaaaaaaaaaaaaaaaaaaaaaaaaaaaaaaaaaaaaaaaaaaaaa

SEQ ID NO: 27154 - RNA, 1740 nt, Artificial Sequence
  mRNA product Design a-2 (A100) comprising derived and/or modified sequence from LASV(Lassa virus/H.sapiens-wt/NGA/2018/ISTH_0959;Clade II)__AVV65099__GPCmut4 (opt1)
aggagaguccgcucagccagguugcagaagcggcuuagcguguguccuaaucuucucucugcguguagguaggccugugccgcaaacaagcuuaccaugggccagaucaucaccuucuuccaggaggugccccacgucaucgaggaggugaugaacaucgugcugaucgcccucagccugcuggccauccucaaggggaucuacaacgucgugaccugcggccuguucgggcugguguccuuccuccugcugugcggccgcagcugcuccacgaccuacaagggggucuacgagcuccagacccuggagcuggacauggcgagccucaacaugugcaugccgcuguccugcacgaagaacaacagccaccacuacaucauggugggcaacgagaccggccuggagcucacccugaccaacacguccaucaucaaccacaaguucugcaaccugagcgacgcccacaagaagaaccucuacgaccacgcccugauguccaucaucagcaccuuccaccuguccauccccaacuucaaccaguacgaggccaugagcugcgacuucaacgggggcaagaucuccgugcaguacaaccucagccacgccuacgcgaucgacgccgccaaccacugcgggaccaucgccaacggcguccugcagaccuucaugcggauggcguggggcggguccuacaucgcccuggacagcggcaagggguccugggacugcaucaugacgagcuaccaguaccucaucauccagaacaccaccugggaggaccacugccaguucucccgccccagccccaucggcuaccuggggcugcucagccagcggacccgcgacaucuacaucucccggcgccgccggggcacguucaccuggacccucagcgacuccgagggcaacgagacccccgggggcuacugccugacgcgguggaugcugaucgaggccgagcucaagugcuucgggaacaccgccguggccaagugcaacgagaagcacgacgaggaguucugcgacaugcugcgccuguucgacuucugcaagcaggcgauccggcgccucaagacccccgcccagaugagcauccagcugaucaacaaggccgugaacgcccugaucaacgaccagcucaucaugaagaaccaccuccgggacaucaugggcaucccguacugcaacuacuccaaguacugcuaccugaaccacaccgucacggggaagaccagccugccccgcugcugccugguguccaacggcagcuaccugaacgagacccacuucuccgacgacaucgagcagcaggccgacaacaugaucaccgagcuccugcagaaggaguacaucgaccggcagggcaagacgccccuggggcucguggaccuguucgucuucagcaccuccuucuaccugaucagcaucuuccugcaccucgugaagaucccgacccaccgccacgugaucggcaagcccugccccaagccccaccggcugaaccacauggggaucugcuccugcggccuguacaagcacccggggguccccgugaaguggaagcgcugaggacuagucccuguucccagagcccacuuuuuuuucuuuuuuugaaauaaaauagccugucuuucagaucuaaaaaaaaaaaaaaaaaaaaaaaaaaaaaaaaaaaaaaaaaaaaaaaaaaaaaaaaaaaaaaaaaaaaaaaaaaaaaaaaaaaaaaaaaaaaaaaaaaaa

SEQ ID NO: 27155 - RNA, 1740 nt, Artificial Sequence
  mRNA product Design a-2 (A100) comprising derived and/or modified sequence from LASV(LASV003-NIG-2008;Clade II)__AIT17580__GPCmut4 (opt1)
aggagaguccgcucagccagguugcagaagcggcuuagcguguguccuaaucuucucucugcguguagguaggccugugccgcaaacaagcuuaccaugggccagaucaucaccuucuuccaggaggugccccacgucaucgaggaggugaugaacaucgugcugaucgcccucagccugcuggccauccucaaggggaucuacaacgucgcgaccugcggccuguucgggcugguguccuuccuccugcugugcggccgcagcugcuccacgaccuacaaggggguguacgagcuccagacccuggagcuggacauggccagccucaacaugugcaugccgcuguccugcacgaagaacaacagccaccacuacaucauggucggcaacgagaccggccuggagcucacccugaccaacacguccaucaucaaccacaaguucugcaaccugagcgacgcccacaagaagaaccucuacgaccacgcccugauguccaucaucagcaccuuccaccuguccauccccaacuucaaccaguacgaggccaugagcugcgacuucaacgggggcaagaucuccgugcaguacaaccucagccacaccuacgcgguggacgccgccaaccacugcgggaccaucgccaacggcguccugcagacguucaugcggauggcguggggcggguccuacaucgcccuggacagcggcaagggguccugggacugcaucaugaccagcuaccaguaccucaucauccagaacaccaccugggaggaccacugccaguucucccgccccagccccaucggcuaccuggggcugcucagccagcggacgcgcgacaucuacaucucccggcgccgccggggcaccuucaccuggacccucagcgacuccgagagcaacgagacgccgggcggguacugccugacccgguggaugcugaucgaggccgagcucaagugcuucggcaacaccgccguggccaagugcaacgagaagcacgacgaggaguucugcgacaugcugcgccuguucgacuucugcaagcaggcgauccggcgccucaaggcccccgcccagauguccauccagcugaucaacaaggccgugaacgcccugaucaacgaccagcucaucaugaagaaccaccuccgggacaucauggggauccccuacugcaacuacagcaaguacugcuaccugaaccacaccgucacgggccgcaccucccugccccggugcugccuggugagcaacggguccuaccugaacgagacccacuucagcgacgacaucgagcagcaggcggacaacaugaucaccgagcuccugcagaaggaguacauggaccgccagggcaagacgccccugggccucguggaccuguucgucuucuccaccagcuucuaccugaucuccaucuuccugcaccucgugaagaucccgacccaccggcacgugaucgggaagcccugccccaagccccaccgccugaaccacaugggcaucugcagcugcgggcuguacaagcacccgggcguccccgugaaguggaagcggugaggacuagucccuguucccagagcccacuuuuuuuucuuuuuuugaaauaaaauagccugucuuucagaucuaaaaaaaaaaaaaaaaaaaaaaaaaaaaaaaaaaaaaaaaaaaaaaaaaaaaaaaaaaaaaaaaaaaaaaaaaaaaaaaaaaaaaaaaaaaaaaaaaaaa

SEQ ID NO: 27156 - RNA, 1740 nt, Artificial Sequence
  mRNA product Design a-2 (A100) comprising derived and/or modified sequence from LASV(LASV035-NIG-2009;Clade II)__AIT17588__GPCmut4 (opt1)
aggagaguccgcucagccagguugcagaagcggcuuagcguguguccuaaucuucucucugcguguagguaggccugugccgcaaacaagcuuaccaugggccagaucaucaccuucuuccaggaggugccccacgucaucgaggaggugaugaacaucgugcugaucgcccucagccugcuggccauccucaaggggaucuacaacgucgcgaccugcggccuguucgggcugguguccuuccuccugcugugcggccgcagcugcuccacgaccuacaaggggguguacgagcuccagacccuggagcuggacauggccagccucaacaugugcaugccgcuguccugcacgaagaacaacagccaccacuacaucauggucggcaacgagaccggccuggagcucacccugaccaacacguccaucaucaaccacaaguucugcaaccugagcgacgcccacaagaagaaccucuacgaccacgcccugauguccaucaucagcaccuuccaccuguccauccccaacuucaaccaguacgaggccaugagcugcgacuucaacgggggcaagaucuccgugcaguacaaccucagccacgcguacgccguggacgccgccaaccacugcgggaccaucgcgaacggcguccugcagaccuucaugcggauggccuggggcggguccuacaucgcccuggacagcggcaagggguccugggacugcaucaugacgagcuaccaguaccucaucauccagaacaccaccugggaggaccacugccaguucucccgccccagccccaucggcuaccuggggcugcucagccagcggacccgcgacaucuacaucucccggcgccgccggggcacguucaccuggacccucagcgacuccgagggcaacgagacccccgggggcuacugccugacgcgguggaugcugaucgaggccgagcucaagugcuucgggaacaccgccguggcgaagugcaacgagaagcacgacgaggaguucugcgacaugcugcgccuguucgacuucugcaagcaggccauccggcgccucaaggcccccgcccagaugagcauccagcugaucaacaaggccgugaacgcgcugaucaacgaccagcucaucaugaagaaccaccuccgggacaucaugggcauccccuacugcaacuacuccaaguacugcuaccugaaccacaccgucaccgggaagacgagccugccccgcugcugccugguguccaacggcagcuaccugaacgagacccacuucuccgacgacaucgagcagcaggccgacaacaugaucaccgagcuccugcagaaggaguacaucgaccggcagggcaagaccccgcuggggcucguggaccuguucgucuucagcacguccuucuaccugaucagcaucuuccugcaccucgugaagaucccgacccaccgccacgugaucggcaagcccugccccaagccccaccggcugaaccacauggggaucugcuccugcggccuguacaagcacccggggguccccgugaaguggaagcgcugaggacuagucccuguucccagagcccacuuuuuuuucuuuuuuugaaauaaaauagccugucuuucagaucuaaaaaaaaaaaaaaaaaaaaaaaaaaaaaaaaaaaaaaaaaaaaaaaaaaaaaaaaaaaaaaaaaaaaaaaaaaaaaaaaaaaaaaaaaaaaaaaaaaaa

SEQ ID NO: 27157 - RNA, 1740 nt, Artificial Sequence
  mRNA product Design a-2 (A100) comprising derived and/or modified sequence from LASV(LASV1000-NIG-2009;Clade II)__AIT17782__GPCmut4 (opt1)
aggagaguccgcucagccagguugcagaagcggcuuagcguguguccuaaucuucucucugcguguagguaggccugugccgcaaacaagcuuaccaugggccagaucaucaccuucuuccaggaggugccccacgucaucgaggaggugaugaacaucgugcugaucgcccucagccugcuggccauccucaaggggaucuacaacgucgcgaccugcggccuguucgggcugguguccuuccuccugcugugcggccgcagcugcuccacgaccuacaaggggguguacgagcuccagacccuggagcuggacauggccagccucaacaugugcaugccgcuguccugcacgaagaacaacagccaccacuacaucauggucggcaacgagaccggccuggagcucacccugaccaacacguccaucaucaaccacaaguucugcaaccugagcgacgcccacaagaagaaccucuacgaccacgcccugauguccaucaucagcaccuuccaccuguccauccccaacuucaaccaguacgaggccaugagcugcgacuucaacgggggcaagaucuccgugcaguacaaccucagccacaccuacgcgguggacgccgccaaccacugcgggaccaucgccaacggcguccugcagacguucaugcggauggcguggggcggguccuacaucgcccuggacagcggcaagggguccugggacugcaucaugaccagcuaccaguaccucaucauccagaacaccaccugggaggaccacugccaguucucccgccccagccccaucggcuaccuggggcugcucagccagcggacgcgcgacaucuacaucucccggcgccgccggggcaccuucaccuggacccucagcgacuccgagggcaacgagacgcccgggggcuacugccugacccgguggaugcugaucgaggccgagcucaagugcuucgggaacaccgccguggccaagugcaacgagaagcacgacgaggaguucugcgacaugcugcgccuguucgacuucugcaagcaggcgaucaagcggcucaagacccccgcccagaugagcauccagcugaucaacaaggccgugaacgcccugaucaacgaccagcucaucaugaagaaccaccuccgcgacaucaugggcauccccuacugcaacuacuccaaguacugcuaccugaaccacacggucaccgggaagaccagccugccccggugcugccugguguccaacggcagcuaccugaacgagacccacuucuccgacgacaucgagcagcaggccgacaacaugaucacggagcuccugcagaaggaguacaucgaccgccagggcaagaccccgcuggggcucguggaccuguucgucuucagcaccuccuucuaccugaucagcaucuuccugcaccucgugaagaucccgacccaccggcacguggucggcaagcccugccccaagccccaccgccugaaccacauggggaucugcuccugcggccuguacaagcacccgggggugcccgugaaguggaagcggugaggacuagucccuguucccagagcccacuuuuuuuucuuuuuuugaaauaaaauagccugucuuucagaucuaaaaaaaaaaaaaaaaaaaaaaaaaaaaaaaaaaaaaaaaaaaaaaaaaaaaaaaaaaaaaaaaaaaaaaaaaaaaaaaaaaaaaaaaaaaaaaaaaaaa

SEQ ID NO: 27158 - RNA, 1740 nt, Artificial Sequence
  mRNA product Design a-2 (A100) comprising derived and/or modified sequence from LASV(LASV221-NIG-2010;Clade II)__AIT17624__GPCmut4 (opt1)
aggagaguccgcucagccagguugcagaagcggcuuagcguguguccuaaucuucucucugcguguagguaggccugugccgcaaacaagcuuaccaugggccagaucaucaccuucuuccaggaggugccccacgucaucgaggaggugaugaacaucgugcugaucgcccucagccugcuggccauccucaaggggaucuacaacgucgcgaccugcggccuguucgggcugguguccuuccuccugcugugcggccgcagcugcuccacgaccuacaaggggguguacgagcuccagacccuggagcuggacauggccagccucaacaugugcaugccgcuguccugcacgaagaacaacagccaccacuacaucauggucggcaacgagaccggccuggagcucacccugaccaacacguccaucaucaaccacaaguucugcaaccugagcgacgcccacaagaagaaccucuacgaccacgcccugauguccaucaucagcaccuuccaccuguccauccccaacuucaaccaguacgaggccaugagcugcgacuucaacgggggcaagaucuccgugcaguacaaccucagccacaccuacgcgaucgacgccgccaaccacugcgggaccaucgccaacggcgugcugcagacguucaugcggauggcguggggcggguccuacaucgcccuggacagcggcaagggguccugggacugcaucaugaccagcuaccaguaccucaucauccagaacaccaccugggaggaccacugccaguucucccgccccagccccaucggcuaccuggggcugcucagccagcggacgcgcgacaucuacaucucccggcgccgccggggcaccuucaccuggacccucagcgacuccgagggcaacgagacgcccgggggcuacugccugacccgguggaugcugaucgaggccgagcucaagugcuucgggaacaccgccgucgccaagugcaacgagaagcacgacgaggaguucugcgacaugcugcgccuguucgacuucugcaagcaggcgauccggcgccucaagacccccgcccagaugagcauccagcugaucaacaaggccgugaacgcccugaucaacgaccagcucaucaugaagaaccaccuccgggacaucaugggcauccccuacugcaacuacuccaaguacugcuaccugaaccacacggugaccgggaagaccagccugccccgcugcugccuggucuccaacggcagcuaccugaacgagacccacuucuccgacgacaucgagcagcaggccgacaacaugaucacggagaugcuccagaaggaguacauggaccggcagggcaagaccccgcuggggcugguggaccucuucguguucagcaccuccuucuaccugaucagcaucuuccugcaccuggucaagaucccgacccaccgccacgugaucggcaagcccugccccaagccccaccggcucaaccacauggggaucugcuccugcggccuguacaagcacccgggggugcccgucaaguggaagcgcugaggacuagucccuguucccagagcccacuuuuuuuucuuuuuuugaaauaaaauagccugucuuucagaucuaaaaaaaaaaaaaaaaaaaaaaaaaaaaaaaaaaaaaaaaaaaaaaaaaaaaaaaaaaaaaaaaaaaaaaaaaaaaaaaaaaaaaaaaaaaaaaaaaaaa

SEQ ID NO: 27159 - RNA, 1740 nt, Artificial Sequence
  mRNA product Design a-2 (A100) comprising derived and/or modified sequence from LASV(LASV237-NIG-2010;Clade II)__AIT17638__GPCmut4 (opt1)
aggagaguccgcucagccagguugcagaagcggcuuagcguguguccuaaucuucucucugcguguagguaggccugugccgcaaacaagcuuaccaugggccagaucaucaccuucuuccaggaggugccccacgucaucgaggaggugaugaacaucgugcugaucgcccucagccugcuggccauccucaaggggaucuacaacgucgcgaccugcggccuguucgggcugguguccuuccuccugcugugcggccgcagcugcuccacgaccuacaaggggguguacgagcuccagacccuggagcuggacauggccagccucaacaugugcaugccgcuguccugcacgaagaacaacagccaccacuacaucauggucggcaacgagaccggccuggagcucacccugaccaacacguccaucaucaaccacaaguucugcaaccugagcgacgcccacaagaaggaccucuacgaccacgcccugauguccaucaucagcaccuuccaccuguccauccccaacuucaaccaguacgaggccaugagcugcgacuucaacgggggcaagaucuccgugcaguacaaccucagccacaccuacgcgguggacgccgccaaccacugcgggaccaucgccaacggcguccugcagacguucaugcggauggcguggggcggguccuacaucgcccuggacagcggcaagggguccugggacugcaucaugaccagcuaccaguaccucaucauccagaacaccaccugggaggaccacugccaguucucccgccccagccccaucggcuaccuggggcugcucagccagcggacgcgcgacaucuacaucucccggcgccgccggggcaccuucaccuggacccucagcgacuccgagggcaacgagacgcccgggggcuacugccugacccgguggaugcugaucgaggccgagcucaagugcuucgggaacaccgccguggccaagugcaacgagaagcacgacgaggaguucugcgacaugcugcgccuguucgacuucugcaagcaggcgauccggcgccucaagacccccgcccagaugagcauccagcugaucaacaaggccgugaacgcccugaucaacgaccagcucaucaugaagaaccaccuccgggacaucaugggcauccccuacugcaacuacuccaaguacugcuaccugaaccacacggucaccgggaagaccagccugccccgcugcugccugguguccaacggcagcuaccugaacgagacccacuucuccgacgacaucgagcagcaggccgacaacaugaucacggagcuccugcagaaggaguacauggaccggcagggcaagaccccgcuggggcucguggaccuguucgucuucagcaccuccuucuaccugaucagcaucuuccugcaccucaucaagaucccgacccaccgccacaucacgggcaagcccugccccaagccccaccggcugaaccacauggggaucugcuccugcggccuguacaagcacccgggggugcccgugaaguggaagcgcugaggacuagucccuguucccagagcccacuuuuuuuucuuuuuuugaaauaaaauagccugucuuucagaucuaaaaaaaaaaaaaaaaaaaaaaaaaaaaaaaaaaaaaaaaaaaaaaaaaaaaaaaaaaaaaaaaaaaaaaaaaaaaaaaaaaaaaaaaaaaaaaaaaaaa

SEQ ID NO: 27160 - RNA, 1740 nt, Artificial Sequence
  mRNA product Design a-2 (A100) comprising derived and/or modified sequence from LASV(LASV253-NIG-2011;Clade II)__AIT17670__GPCmut4 (opt1)
aggagaguccgcucagccagguugcagaagcggcuuagcguguguccuaaucuucucucugcguguagguaggccugugccgcaaacaagcuuaccaugggccagaucaucaccuucuuccaggaggugccccacgucaucgaggaggugaugaacaucgugcugaucgcccucagccugcuggccauccucaaggggaucuacaacgucgcgaccugcggccuguucgggcugguguccuuccuccugcugugcggccgcagcugcuccacgaccuacaaggggguguacgagcuccagacccuggagcuggacauggccagccucaacaugugcaugccgcuguccugcacgaagaacaacagccaccacuacaucauggucggcaacgagaccggccuggagcucacccugaccaacacguccaucaucaaccacaaguucugcaaccugagcgacgcccacaagaagaaccucuacgaccacgcccugauguccaucaucagcaccuuccaccuguccauccccaacuucaaccaguacgaggccaugagcugcgacuucaacgggggcaagaucuccgugcaguacaaccucagccacaccuacgcgguggacgccgccaaccacugcgggaccaucgccaacggcguccugcagacguucaugcggauggcguggggcggguccuacaucgcccuggacagcggcaagggguccugggacugcaucaugaccagcuaccaguaccucaucauccagaacaccaccugggaggaccacugccaguucucccgccccagccccaucggcuaccuggggcugcucagccagcggacgcgcgacaucuacaucucccggcgccgccggggcaccuucaccuggacccucagcgacuccgagggcaacgagacgcccgggggcuacugccugacccgguggaugcugaucgaggccgagcucaagugcuucgggaacaccgccguggccaagugcaacgagaagcacgacgaggaguucugcgacaugcugcgccuguucgacuucugcaagcaggcgauccggcgccucaaggcccccgcccagaugagcauccagcugaucaacaaggccgugaacgcccugaucaacgaccagcucaucaugaagaaccaccuccgggacaucaugggcaucccguacugcaacuacuccaaguacugcuaccugaaccacaccgucacggggcgcaccagccugccccggugcugccugguguccaacggcagcuaccugaacgagacccacuucuccgacgacaucgagcagcaggcggacaacaugaucaccgagcuccugcagaaggaguacaucgaccgccagggcaagacgccccuggggcucguggaccuguucgucuucagcaccuccuucuaccugaucagcaucuuccugcaccucgugaagaucccgacccaccggcacaucaucggcaagcccugccccaagccccaccgccugaaccacauggggaucugcuccugcggccuguacaagcacccgggggugcccgucaaguggaagcggugaggacuagucccuguucccagagcccacuuuuuuuucuuuuuuugaaauaaaauagccugucuuucagaucuaaaaaaaaaaaaaaaaaaaaaaaaaaaaaaaaaaaaaaaaaaaaaaaaaaaaaaaaaaaaaaaaaaaaaaaaaaaaaaaaaaaaaaaaaaaaaaaaaaaa

SEQ ID NO: 27161 - RNA, 1740 nt, Artificial Sequence
  mRNA product Design a-2 (A100) comprising derived and/or modified sequence from LASV(LASV254-NIG-2011;Clade II)__AIT17674__GPCmut4 (opt1)
aggagaguccgcucagccagguugcagaagcggcuuagcguguguccuaaucuucucucugcguguagguaggccugugccgcaaacaagcuuaccaugggccagaucaucaccuucuuccaggaggugccccacgucaucgaggaggugaugaacaucgugcugaucgcccucagccugcuggccauccucaaggggaucuacaacgucgcgaccugcggccuguucgggcugguguccuuccuccugcugugcggccgcagcugcuccacgaccuacaaggggguguacgagcuccagacccuggagcuggacaugaccaaccucaacaugugcaugccgcugagcugcaccaagaacaacucccaccacuacaucauggucggcaacgagaccggccuggagcucacccugacgaacaccagcaucaucaaccacaaguucugcaaccuguccgacgcccacaagaagaaccucuacaaccacgcccugaugagcaucaucuccaccuuccaccugagcauccccaacuucaaccaguacgaggccauguccugcgacuucaacgggggcaagaucagcgugcaguacaaccucucccacagcuacgccguggacgcggccaaccacugcgggaccaucgccaacggcguccugcagacguucaugcggauggccuggggcggguccuacaucgcgcuggacagcggcaaggggaacugggacugcaucaugaccuccuaccaguaccucaucauccagaacaccaccugggaggaccacugccaguucagccgccccucccccaucggcuaccuggggcugcucagccagcggacgcgcgacaucuacaucagccggcgccgccggggcaccuucaccuggacccucuccgacagcgagggcaacgagacgcccgggggcuacugccugacccgguggaugcugaucgaggccgagcucaagugcuucgggaacaccgccguggccaagugcaacgagaagcacgacgaggaguucugcgacaugcugcgccuguucgacuucugcaagcaggccauccggcgccucaagacccccgcgcaggccaacauccagcugaucaacaaggccgugaacgcccugaucaacgaccagcucaucaugaagaaccaccuccgggacaucaugggcauccccuacugcaacuacuccaaguacugcuaccugaaccacacggucaccgggaagaccagccugccccgcugcugccugguguccaacggcagcuaccugaacgagacccacuucuccgacgacaucgagcagcaggccgacaacaugaucacggagcuccugcagaaggaguacauggaccggcagggcaagaccccgcuggggcucguggaccuguucgucuucagcaccuccuucuaccugaucagcaucuuccugcaccucgugaagaucccgacccaccgccacgugaucggcaagcccugccccaagccccaccggcugaaccacauggggaucugcuccugcggccuguacaagcacccggggguccccgugaaguggaagcgcugaggacuagucccuguucccagagcccacuuuuuuuucuuuuuuugaaauaaaauagccugucuuucagaucuaaaaaaaaaaaaaaaaaaaaaaaaaaaaaaaaaaaaaaaaaaaaaaaaaaaaaaaaaaaaaaaaaaaaaaaaaaaaaaaaaaaaaaaaaaaaaaaaaaaa

SEQ ID NO: 27162 - RNA, 1740 nt, Artificial Sequence
  mRNA product Design a-2 (A100) comprising derived and/or modified sequence from LASV(Nig08-A19;Clade III)__ADU56618__GPCmut4 (opt1)
aggagaguccgcucagccagguugcagaagcggcuuagcguguguccuaaucuucucucugcguguagguaggccugugccgcaaacaagcuuaccaugggccagaucgugaccuucuuccaggaggucccccacgugaucgaggaggugaugaacaucguccugaucgcccucagcauccuggccauccugaaggggcucuacaacaucgcgaccugcggccugaucgggcuggugacguuccuccugcuguccggccgcagcugcuccaugaccuacaaggggguguacgagcuccagacccuggagcugaacaugaacacccucaacaugugcaugccgcugagcugcaccaagaacaacucccaccacuacaucauggucggcaacgagaccggccuggagcucacccugacgaacaccagccugcuccaccacaaguucugcaaccuguccgacgcccacaagaagaaccuguacgaccacacccucaugagcaucaucuccaccuuccaccugagcauccccaacuucaaccaguacgaggccauguccugcgacuucaacgggggcaagaucacggugcaguacaaccugagccacuccuacgccaucgacgccgcgaaccacugcgggaccguggccaacggcguccuccagaccuucaugcggauggccuggggcgggagcuacaucgcccuggacuccggccgcgggaagugggacugcaucaugaccagcuaccaguaccugaucauccagaacacgaccugggaggaccacugccaguucucccggcccagccccaucggcuaccucgggcugcugucccagcgcacccgggacaucuacaucagccgccggcgccggggcaccuucacguggacccugagcgacuccgagggcaacgagacccccgggggcuacugccucacccgcuggaugcugaucgaggcggagcugaagugcuucgggaacacggccguggccaagugcaacgagaagcacgacgaggaguucugcgacaugcuccggcuguucgacuucugcaagcaggccauccgccggcugaaggcccccgcgcagaugagcauccagcucaucaacaaggccgugaacgcccugaucaacgaccagcugaucaugaagaaccaccuccgcgacaucaugggcauccccuacugcaacuacuccaaguacugcuaccugaaccacaccagcaccgggcggaccucccugccccgcugcugccucgucagcaacggcuccuaccugaacgagacgcacuucagcgacgacaucgagcagcaggccgacaacaugaucaccgagaugcugcagaaggaguaccucgaccggcagggcaagaccccgcuggggcugguggaccuguucguguucuccaccagcuucuaccucaucuccaucuuccugcaccuggucaagaucccgacgcaccgccacaucgugggcaagcccugccccaagccccaccggcucaaccacauggggaucugcagcugcggccuguacaagcagccgggggugcccguccgcuggaagcggugaggacuagucccuguucccagagcccacuuuuuuuucuuuuuuugaaauaaaauagccugucuuucagaucuaaaaaaaaaaaaaaaaaaaaaaaaaaaaaaaaaaaaaaaaaaaaaaaaaaaaaaaaaaaaaaaaaaaaaaaaaaaaaaaaaaaaaaaaaaaaaaaaaaaa

SEQ ID NO: 27163 - RNA, 1743 nt, Artificial Sequence
  mRNA product Design a-2 (A100) comprising derived and/or modified sequence from LASV(G1180-SLE-2010;Clade IV)__AIT17168__GPCmut4 (opt1)
aggagaguccgcucagccagguugcagaagcggcuuagcguguguccuaaucuucucucugcguguagguaggccugugccgcaaacaagcuuaccaugggccagaucgugaccuucuuccaggaggucccccacgugaucgaggaggugaugaacaucguccugaucgcccucagcauccuggccgugcugaaggggcucuacaacuucgcgaccugcggccugguggggcugcucaccuuccugcugcucugcggccgcuccugcaccgccagccgguacaagggggucuacgagcugcagacccuggagcucaacauggagacccugaacaugugcaugccgcuguccugcaccaagaacaacagccaccacuacaucauggugggcaacgagaccggccucgagcugacccugacgaacaccuccaucaucaaccacaaguucugcaaccucagcgacgcccacaagaagaaccuguacgaccacgcccugauguccaucaucagcaccuuccaccucuccauccccaacuucaaccaguacgaggccaugagcugcgacuucaacgggggcaagaucuccgugcaguacaaccugagccacuccuacgcgggggacgccgccaaccacugcggcaccgucgccaacggggugcugcagacguucaugcgcauggcguggggcggcagcuacaucgcccucgacuccgggcacggcagcugggacugcaucaugaccuccuaccaguaccugaucauccagaacaccaccugggaggaccacugccaguucagccggcccucccccaucggguaccugggccuccugagccagcgcacgcgggacaucuacaucagccgccggcgccggggcaccuucaccuggacccuguccgacagcgaggggaaggacacgccgggcggguacugccugacccgcuggaugcucaucgaggccgagcugaagugcuucggcaacaccgccguggccaagugcaacgagaagcacgacgaggaguucugcgacaugcugcggcuguucgacuucugcaagcaggcgauccagcgccugaaggcccccgcccagauguccauccagcugaucaacaaggccgucaacgcccucaucaacgaccagcugaucaugaagaaccaccuccgggacaucauggggauccccuacugcaacuacagcaaguacugcuaccucaaccacaccacgaccggcaagaccucccugcccaagugcugccuggugagcaacggcuccuaccucaacgagacccacuucagcgacgacaucgagcagcaggcggacaacaugaucacggagaugcugcagaaggaguacauggagcgccaggggaagacgccccugggccucguggaccuguucgucuucuccaccagcuucuaccugaucuccaucuuccugcaccucgugaagaucccgacccaccggcacaucgugggcaagagcugccccaagccccaccgccugaaccacauggggaucugcuccugcgggcuguacaagcagcccggcgucccggugaaguggaagcggugaggacuagucccuguucccagagcccacuuuuuuuucuuuuuuugaaauaaaauagccugucuuucagaucuaaaaaaaaaaaaaaaaaaaaaaaaaaaaaaaaaaaaaaaaaaaaaaaaaaaaaaaaaaaaaaaaaaaaaaaaaaaaaaaaaaaaaaaaaaaaaaaaaaaa

SEQ ID NO: 27164 - RNA, 1743 nt, Artificial Sequence
  mRNA product Design a-2 (A100) comprising derived and/or modified sequence from LASV(G1442-SLE-2011;Clade IV)__AIT17180__GPCmut4 (opt1)
aggagaguccgcucagccagguugcagaagcggcuuagcguguguccuaaucuucucucugcguguagguaggccugugccgcaaacaagcuuaccaugggccagaucgugaccuucuuccaggaggucccccacgugaucgaggaggugaugaacaucguccugaucgcccucagcauccuggccgugcugaaggggcucuacaacguggcgaccugcggccugaucgggcuggucacguuccuccugcugugcggccgcuccugcaccaccacccucuacaaggggguguacgagcugcagacgcuggagcucaacauggagacccugaacaugugcaugccgcugagcugcaccaagaacaacucccaccacuacauccgggugggcaacgagacgggccucgagcugacccugaccaacaccagcaucaucaaccacaaguucugcaaccucuccgacgcccacaagaagaaccuguacgaccacgcccugaugagcaucaucuccacguuccaccucagcauccccaacuucaaccaguacgaggccauguccugcgacuucaacgggggcaagaucagcguccaguacaaccugucccacagcuacgccggggacgcggccaaccacugcggcaccguggccaacggggugcugcagaccuucaugcgcauggccuggggcggcuccuacaucgcgcucgacagcgggcggggcaacugggacugcaucaugaccuccuaccaguaccugaucauccagaacacgaccugggacgaccacugccaguucagccgccccucccccaucggguaccugggccuccugagccagcggacccgcgacgucuacaucucccggcgccgccggggcaccuucacguggacccugagcgacagcgaggggaaggacaccccgggcggguacugccugacccgguggaugcucaucgaggccgagcugaagugcuucggcaacacggccguggccaagugcaacgagaagcacgacgaggaguucugcgacaugcugcgccucuucgacuucugcaagcaggccauccagcggcugaaggcgcccgcccagauguccauccagcugaucaacaaggccgugaacgcccucaucaacgaccagcugaucaugaagaaccaccuccgcgacaucauggggauccccuacugcaacuacagcaaguacugcuaccugaacaacaccgccaccggcaagaccucccugcccaagugcugccugaucagcaacggcuccuaccucaacgagacgcacuucagcgacgacaucgagcaggaggcggacaacaugaucaccgagaugcugcagaaggaguacauggagcggcaggggaagacgccccugggccucgucgaccuguucguguucuccaccagcuucuaccugaucuccaucuuccugcaccucgugaagaucccgacccaccgccacaucgucggcaagagcugccccaagccccaccggcugaaccacauggggaucugcuccugcgggcuguacaagcagcccggcgugccggugcgcuggaagcggugaggacuagucccuguucccagagcccacuuuuuuuucuuuuuuugaaauaaaauagccugucuuucagaucuaaaaaaaaaaaaaaaaaaaaaaaaaaaaaaaaaaaaaaaaaaaaaaaaaaaaaaaaaaaaaaaaaaaaaaaaaaaaaaaaaaaaaaaaaaaaaaaaaaaa

SEQ ID NO: 27165 - RNA, 1743 nt, Artificial Sequence
  mRNA product Design a-2 (A100) comprising derived and/or modified sequence from LASV(G3010-SLE-2013;Clade IV)__AIT17344__GPCmut4 (opt1)
aggagaguccgcucagccagguugcagaagcggcuuagcguguguccuaaucuucucucugcguguagguaggccugugccgcaaacaagcuuaccaugggccagaucgugaccuucuuccaggaggucccccacgugaucgaggaggugaugaacaucguccugaucgcccucagcauccuggccgugcugaaggggcucuacaacuucgcgaccugcggccugguggggcuggucacguuccuccugcugugcggccgcuccugcaccaccagccucuacaaggggguguacgagcugcagacccuggagcucaacauggagacgcugaacaugugcaugccgcuguccugcaccaagaacaacagccaccacuacaucauggugggcaacgagaccggccucgagcugacgcugaccaacaccuccaucaucaaccacaaguucugcaaccucagcgacgcccacaagaagaaccuguacaaccacgcccugauguccaucaucagcaccuuccaccucuccauccccaacuucaaccaguacgaggccaugagcugcgacuucaacgggggcaagaucuccguccaguacaaccugagccacuccuacgccggggacgcggccagccacugcggcacgguggccaacggggugcugcagaccuucaugcggauggccuggggcggcuccuacaucgcgcucgacagcggguacggcaagugggacugcaucaugaccuccuaccaguaccugaucauccagaacaccacgugggaggaccacugccaguucagccgccccucccccaucggguaccugggccuccugagccagcggacccgcgacaucuacaucagccggcgccgccggggcaccuucaccuggacgcuguccgacagcgaggggaaggacaccccgggcggguacugccugacccgguggaugcucaucgaggccgagcugaagugcuucggcaacaccgccgucgccaagugcaacgagaagcacgacgaggaguucugcgacaugcugcgccucuucgacuucugcaagcaggccauccagcggcugaagacgcccgcgcagauguccauccagcugaucaacaaggccgugaacgcccucaucaacgaccagcugaucaugaagaaccaccuccgcgacaucauggggauccccuacugcaacuacagcaaguacugcuaccugaaccacaccaccaccggcaagacgucccugcccaagugcugccuggugagcaacggcuccuaccucaacgagacccacuucagcgacgacaucgagcagcaggccgacaacaugaucaccgagaugcugcagaaggaguacauggagcggcaggggaagacgccccugggccucgucgaccuguucguguucuccaccagcuucuaccugaucuccaucuuccugcaccucgugaagaucccgacccaccgccacaucgucggcaagagcugccccaagccccaccggcugaaccacauggggaucugcuccugcgggcuguacaagcagcccggcgugccggugcgcuggaagcggugaggacuagucccuguucccagagcccacuuuuuuuucuuuuuuugaaauaaaauagccugucuuucagaucuaaaaaaaaaaaaaaaaaaaaaaaaaaaaaaaaaaaaaaaaaaaaaaaaaaaaaaaaaaaaaaaaaaaaaaaaaaaaaaaaaaaaaaaaaaaaaaaaaaaa

SEQ ID NO: 27166 - RNA, 1743 nt, Artificial Sequence
  mRNA product Design a-2 (A100) comprising derived and/or modified sequence from LASV(G502-SLE-2009;Clade IV)__AIT17126__GPCmut4 (opt1)
aggagaguccgcucagccagguugcagaagcggcuuagcguguguccuaaucuucucucugcguguagguaggccugugccgcaaacaagcuuaccaugggccagaucgugaccuucuuccaggaggucccccacgugaucgaggaggugaugaacaucguccugaucgcccucagcauccuggccgugcugaaggggcucuacaacuucgcgaccugcggccugguggggcugcucacguuccugcugcucugcggccgcuccugcaccaccgggcuguacaagggcgucuacgagcugcagacccucgagcugaacauggagacgcugaacaugugcaugccgcucagcugcaccaagaacaacucccaccacuacaucauggugggcaacgagaccgggcuggagcugacgcucaccaacaccagcaucaucaaccacaaguucugcaaccuguccgacgcccacaagaagaaccuguacgaccacgcccucaugagcaucaucuccaccuuccaccugagcauccccaacuucaaccaguacgaggccauguccugcgacuucaacggcgggaagaucagcgugcaguacaaccugucccacagcuacgccggcgacgcggccgaccacugcgggacggucgccaacggcgugcuccagaccuucaugcggauggccuggggcggguccuacaucgcgcuggacagcggccgcgggcggugggacugcaucaugaccuccuaccaguaccugaucauccagaacaccacgugggaggaccacugccaguucagccgccccucccccaucggcuaccucggccugcugagccagcggacccgcgacaucuacaucucccggcgccgccgggggaccuucaccuggacgcugagcgacagcgagggcaaggacacccccgggggcuacugccucacccgguggaugcugaucgaggccgagcugaagugcuucgggaacaccgccguggccaagugcaacgagaagcacgacgaggaguucugcgacaugcuccgccuguucgacuucugcaagcaggccauccagcggcugaaggcgcccgcccagauguccauccagcucaucaacaaggccgucaacgcccugaucaacgaccagcuggugaugaagaaccaccuccgcgacaucaugggcauccccuacugcaacuacagccgguacugcuaccugaaccacacgaccaccggccgcaccucccugcccaagugcugccucgugagcaacggguccuaccugaacgagacgcacuucagcgacgacaucgagcagcaggccgacaacaugaucaccgagaugcugcagaaggaguacauggagcggcagggcaagaccccgcucgggcuggucgaccuguucguguucuccaccagcuucuaccugaucuccaucuuccuccaccuggugaagaucccgacgcaccgccacaucgucggcaagagcugccccaagccccaccggcugaaccacauggggaucugcuccugcggccucuacaagcagcccggcgugccggugaaguggaagcgcugaggacuagucccuguucccagagcccacuuuuuuuucuuuuuuugaaauaaaauagccugucuuucagaucuaaaaaaaaaaaaaaaaaaaaaaaaaaaaaaaaaaaaaaaaaaaaaaaaaaaaaaaaaaaaaaaaaaaaaaaaaaaaaaaaaaaaaaaaaaaaaaaaaaaa

SEQ ID NO: 27167 - RNA, 1743 nt, Artificial Sequence
  mRNA product Design a-2 (A100) comprising derived and/or modified sequence from LASV(G733-SLE-2010;Clade IV)__AIT17154__GPCmut4 (opt1)
aggagaguccgcucagccagguugcagaagcggcuuagcguguguccuaaucuucucucugcguguagguaggccugugccgcaaacaagcuuaccaugggccagaucgugaccuucuuccaggaggucccccacgugaucgaggaggugaugaacaucguccugaucgcccucagcauccuggccgugcugaaggggcucuacaacuucgcgaccugcggcaucguggggcuggucuccuuccugcuccugugcggccgcagcugcacgaccucccuguacaaggggguguacgagcuccagacccuggagcugaacauggagacccucaacaugugcaugccgcugagcugcaccaagaacaacucccaccacuacaucauggugggcaacgagaccggccuggagcucacccugacgaacaccagcaucaucaaccacaaguucugcaaccuguccgacgcccacaagaagaaccucuacgaccacgcccugaugagcaucaucuccaccuuccaccugagcauccccaacuucaaccaguacgaggccauguccugcgacuucaacgggggcaagaucagcguccaguacaaccucucccacagcuacgccggggacgcggccaaccacugcggcaccaucgccaacggggugcugcagacguucaugcggauggccuggggcggcuccuacaucgcgcuggacagcgggcgcgaccggugggacugcaucaugaccuccuaccaguaccucaucauccagaacaccaccugggaggaccacugccaguucagccgccccucccccaucggcuaccuggggcugcucagccagcggacgcgcgacaucuacaucagccggcgccgccggggcaccuucaccuggacccucuccgacagcgagggcaaggacacgcccgggggcuacugccugacccgguggaugcugaucgaggccgagcucaagugcuucgggaacaccgccguggccaagugcaacgagaagcacgacgaggaguucugcgacaugcugcgccuguucgacuucugcaagcaggccauccagcggcucaaggcgcccgcccagauguccauccagcugaucaacaaggccgucaacgcccugaucaacgaccagcucaucaugaagaaccaccuccgcgacaucaugggcauccccuacugcaacuacagcaaguacugcuaccugaaccacaccacgaccgggaagaccucccugcccaagugcugccuggugagcaacggcuccuaccugaacgagacccacuucagcgacgacaucgagcagcaggccgacaacaugaucacggagaugcuccagaaggaguacauggagcggcagggcaagaccccgcuggggcugguggaccucuucgucuucuccaccagcuucuaccugaucuccaucuuccugcaccuggugaagaucccgacccaccgccacguggucggcaagagcugccccaagccccaccggcucaaccacauggggaucugcuccugcggccuguacgggcagcccggcgugccggugaaguggaagcgcugaggacuagucccuguucccagagcccacuuuuuuuucuuuuuuugaaauaaaauagccugucuuucagaucuaaaaaaaaaaaaaaaaaaaaaaaaaaaaaaaaaaaaaaaaaaaaaaaaaaaaaaaaaaaaaaaaaaaaaaaaaaaaaaaaaaaaaaaaaaaaaaaaaaaa

SEQ ID NO: 27168 - RNA, 1743 nt, Artificial Sequence
  mRNA product Design a-2 (A100) comprising derived and/or modified sequence from MOPV/LASV reassortant(IGS-1;Clade IV)__AFY05576__GPCmut4 (opt1)
aggagaguccgcucagccagguugcagaagcggcuuagcguguguccuaaucuucucucugcguguagguaggccugugccgcaaacaagcuuaccaugggccagaucgugaccuucuuccaggaggucccccacgugaucgaggaggugaugaacaucguccugaucgcccucagcgugcuggccgugcugaaggggcucuacaacuucgcgaccugcggccuggucgggcuggugacguuccuccugcugugcggccgcuccugcaccaccagccucuacaaggggguguacgagcugcagacccuggagcucaacauggagacgcugaacaugugcaugccgcuguccugcaccaagaacaacagccaccacuacaucauggucggcaacgagaccggccucgagcugacgcugaccaacaccuccaucaucaaccacaaguucugcaaccucagcgacgcccacaagaagaaccuguacgaccacgcccugauguccaucaucagcaccuuccaccucuccauccccaacuucaaccaguacgaggccaugagcugcgacuucaacgggggcaagaucuccgugcaguacaaccugagccacuccuacgccggggacgcggccaaccacugcggcacgguggccaacgggguccugcagaccuucaugcggauggccuggggcggcagcuacaucgcgcucgacuccgggcgcggcaacugggacugcaucaugaccagcuaccaguaccugaucauccagaacaccacgugggaggaccacugccaguucucccggcccagccccaucggguaccugggccuccugucccagcgcacccgggacaucuacaucagccgccggcgccggggcaccuucaccuggacgcugagcgacuccgagggggaggacaccccgggcggguacugccugacccgcuggaugcucaucgaggccgagcugaagugcuucggcaacaccgccguggccaagugcaacgagaagcacgacgaggaguucugcgacaugcugcggcuguucgacuucugcaagcaggccauccagcgccugaaggcgcccgcccagaugagcauccagcugaucaacaaggccgugaacgcccucaucaacgaccagcugaucaugaagaaccaccuccgggacaucauggggauccccuacugcaacuacuccaaguacugcuaccucaaccacacgaccaccggccgcaccagccugcccaagugcugccuggucuccaacggcagcuaccucaacgagacgcacuucuccgacgacaucgagcagcaggccgacaacaugaucaccgagaugcugcagaaggaguacauggagcggcaggggaagacgccccugggccucguggaccuguucguguucagcaccuccuucuaccugaucagcaucuuccugcaccucgucaagaucccgacccaccgccacaucguggggaaguccugccccaagccccaccggcugaaccacaugggcaucugcagcugcgggcuguacaagcagcccggcgugccggucaaguggaagcgcugaggacuagucccuguucccagagcccacuuuuuuuucuuuuuuugaaauaaaauagccugucuuucagaucuaaaaaaaaaaaaaaaaaaaaaaaaaaaaaaaaaaaaaaaaaaaaaaaaaaaaaaaaaaaaaaaaaaaaaaaaaaaaaaaaaaaaaaaaaaaaaaaaaaaa

SEQ ID NO: 27169 - RNA, 1743 nt, Artificial Sequence
  mRNA product Design a-2 (A100) comprising derived and/or modified sequence from LASV(LM765-SLE-2012;Clade IV)__AIT17814__GPCmut4 (opt1)
aggagaguccgcucagccagguugcagaagcggcuuagcguguguccuaaucuucucucugcguguagguaggccugugccgcaaacaagcuuaccaugggccagaucgugaccuucuuccaggaggucccccacgugaucgaggaggugaugaacaucguccugaucgcccucagcauccuggccgugcugaaggggcucuacaacuucgcgaccugcggccugguggggcuggucacguuccuccugcugugcggccgcuccugcaccaccagccucuacaaggggguguacgagcugcagacccuggagcucaacauggagacgcugaacaugugcaugccgcuguccugcaccaagaacaacagccaccacuacaucauggugggcaacgagaccggccucgagcugacgcugaccaacaccuccaucaucgaccacaaguucugcaaccucagcgacgcccaccggaagaaccuguacgaccacgcccugauguccaucaucagcaccuuccaccucuccauccccaacuucaaccaguacgaggccaugagcugcgacuucaacgggggcaagaucuccguccaguacaaccugagccacuccuacgccaaggacgcggccgaccacugcgggacgguggccaacggcgugcugcagaccuucaugcgcauggccuggggcgggagcuacaucgcgcucgacuccggccgggggcgcugggacugcaucaugaccagcuaccaguaccugaucauccagaacaccacgugggaggaccacugccaguucucccggcccagccccaucggcuaccuggggcuccugucccagcgcacccgggacaucuacaucagccgccggcgccggggcaccuucaccuggacgcugagcgacuccgagggcaaggacacccccgggggcuacugccugacccgcuggaugcucaucgaggccgagcugaagugcuucgggaacaccgccgucgccaagugcaacgagaagcacgacgaggaguucugcgacaugcugcggcuguucgacuucugcaagcaggccauccagcgccugaaggcgcccgcccagaugagcauccagcugaucaacaaggccgugaacgcccucaucaacgaccagcugaucaugaagaaccaccuccgggacaucaugggcauccccuacugcaacuacuccaaguacugcuaccucaaccacacgaccaccgggaagaccagccugcccaagugcugccugguguccaacggcagcuaccucaacgagacgcacuucuccgacgacaucgagcagcaggccgacaacaugaucaccgagaugcugcagaaggaguacauggagcgccagggcaagaccccgcuggggcucgucgaccuguucguguucagcaccuccuucuaccugaucagcaucuuccugcaccucgugaagaucccgacgcaccggcacaucgucggcaagcccugccccaagccccaccgccugaaccacauggggaucugcuccugcggccuguacaagcagccgggggugcccgugaaguggaagcggugaggacuagucccuguucccagagcccacuuuuuuuucuuuuuuugaaauaaaauagccugucuuucagaucuaaaaaaaaaaaaaaaaaaaaaaaaaaaaaaaaaaaaaaaaaaaaaaaaaaaaaaaaaaaaaaaaaaaaaaaaaaaaaaaaaaaaaaaaaaaaaaaaaaaa

SEQ ID NO: 27170 - RNA, 1743 nt, Artificial Sequence
  mRNA product Design a-2 (A100) comprising derived and/or modified sequence from LASV(LM776-SLE-2012;Clade IV)__AIT17824__GPCmut4 (opt1)
aggagaguccgcucagccagguugcagaagcggcuuagcguguguccuaaucuucucucugcguguagguaggccugugccgcaaacaagcuuaccaugggccagaucgugaccuucuuccaggaggucccccacgugaucgaggaggugaugaacaucguccugaucgcccucagcauccuggccgugcugaaggggcucuacaacuucgcgaccugcggccugguggggcuggucacguuccuccugcugugcggccgcuccugcaccaccagcguguacaaggggguguacgagcuccagacccuggagcugaacauggagacgcucaacaugugcaugccgcuguccugcaccaagaacaacagccaccacuacaucauggucggcaacgagaccggccuggagcucacgcugaccaacaccuccaucaucaaccacaaguucugcaaccugagcgacgcccacaagaagaaccucuacgaccacgcccugauguccaucaucagcaccuuccaccuguccauccccaacuucaaccaguacgaggccaugagcugcgacuucaacgggggcaagaucuccgugcaguacaaccucagccacuccuacgccggggacgcggccaaccacugcggcacgguggccaacgggguccugcagaccuucaugcggauggccuggggcggcagcuacaucgcgcuggacuccgggcacggcaagugggacugcaucaugaccagcuaccaguaccucaucauccagaacaccacgugggaggaccacugccaguucucccgccccagccccaucggguaccugggccugcucucccagcggacccgcgacaucuacaucagccggcgccgccggggcaccuucaccuggacgcucagcgacuccgaggggaaggacaccccgggcggguacugccugacccgguggaugcugaucgaggccgagcucaagugcuucggcaacaccgccguggccaagugcaacgagaagcacgacgaggaguucugcgacaugcugcgccuguucgacuucugcaagcaggccauccagcggcucaaggcgcccgcccagaugagcauccagcugaucaacaaggccgugaacgcccugaucaacgaccagcucaucaugaagaaccaccuccgcgacaucauggggauccccuacugcaacuacuccaaguacugcuaccugaaccacacgaccaccggcaagaccagccugcccaagugcugccuggucuccaacggcagcuaccugaacgagacgcacuucuccgacgacaucgagcagcaggccgacaacaugaucaccgagaugcuccagaaggaguacauggagcggcaggggaagacgccccugggccugguggaccucuucguguucagcaccuccuucuaccugaucagcaucuuccugcaccuggucaagaucccgacccaccgccacaucguggggaaguccugccccaagccccaccggcucaaccacaugggcaucugcagcugcgggcuguacaagcagcccggcgugccgguccgcuggaagcggugaggacuagucccuguucccagagcccacuuuuuuuucuuuuuuugaaauaaaauagccugucuuucagaucuaaaaaaaaaaaaaaaaaaaaaaaaaaaaaaaaaaaaaaaaaaaaaaaaaaaaaaaaaaaaaaaaaaaaaaaaaaaaaaaaaaaaaaaaaaaaaaaaaaaa

SEQ ID NO: 27171 - RNA, 1743 nt, Artificial Sequence
  mRNA product Design a-2 (A100) comprising derived and/or modified sequence from LASV(Mad39;Clade IV)__ANH09722__GPCmut4 (opt1)
aggagaguccgcucagccagguugcagaagcggcuuagcguguguccuaaucuucucucugcguguagguaggccugugccgcaaacaagcuuaccaugggccagaucgugaccuucuuccaggaggucccccacgugaucgaggaggugaugaacaucguccugaucgcccucagcauccuggccgugcugaaggggcucuacaacguggcgaccugcggccugaucgggcuggucacguuccuccugcugugcggccgcuccugcaccaccacccucuacaaggggguguacgagcugcaggcccuggagcucaacauggagacgcugaacaugugcaugccgcugagcugcaccaagaacaacucccaccacuacauccgggugggcaacgagaccggccucgagcugacgcugaccaacaccagccucaucaaccacaaguucugcaaccuguccgacgcccacaagaagaaccuguacgaccacgcccucaugagcaucaucuccaccuuccaccugagcauccccaacuucaaccaguacgaggccauguccugcgacuucaacgacgggaagaucagcguccaguacaaccugucccacacguacgcgggcgacaccgccaaccacugcgggaccguggccaacggcgugcuccagaccuucaugcgcauggccuggggcgggagcuacaucgcgcuggacuccggccgcgggggcugggacugcaucaugacgagcuaccaguaccugaucauccagaacaccaccugggaggaccacugccaguucucccggcccagccccaucggguaccucggccugcugucccagcggacccgcgacaucuacaucagccggcgccgccggggcacguucaccuggacccuguccgacagcgaggggaaggacaccccgggcggguacugccucacgcgguggaugcugaucgaggccgagcugaagugcuucggcaacaccgccgucgccaagugcaacgagaagcacgacgaggaguucugcgacaugcuccgccuguucgacuucugcaagcaggccauccagcggcugaaggcgcccgcccagaugagcauccagcucaucaacaaggccgugaacgcccugaucaacgaccagcugaucaugaagaaccaccuccgcgacaucauggggauccccuacugcaacuacuccaaguacugcuaccugaaccacaccgugaccggcaagacgagccugcccaagugcugccucgucuccaacggcagcuaccugaacgagacccacuucuccgacgacaucgagcagcaggccgacaacaugaucaccgagaugcugcagaaggaguacauggagcggcaggggaagacgccccucggccugguggaccuguucguguucagcaccuccuucuaccugaucagcaucuuccuccaccuggucaagaucccgacccaccgccacgugguggggaagcccugccccaagccccaccggcugaaccacaugggcaucugcuccugcggguucuacaagcagccgggcguccccgugcgcuggaagcggugaggacuagucccuguucccagagcccacuuuuuuuucuuuuuuugaaauaaaauagccugucuuucagaucuaaaaaaaaaaaaaaaaaaaaaaaaaaaaaaaaaaaaaaaaaaaaaaaaaaaaaaaaaaaaaaaaaaaaaaaaaaaaaaaaaaaaaaaaaaaaaaaaaaaa

SEQ ID NO: 27172 - RNA, 1743 nt, Artificial Sequence
  mRNA product Design a-2 (A100) comprising derived and/or modified sequence from LASV(Z0947-SLE-2011;Clade IV)__AIT17840__GPCmut4 (opt1)
aggagaguccgcucagccagguugcagaagcggcuuagcguguguccuaaucuucucucugcguguagguaggccugugccgcaaacaagcuuaccaugggccagaucgugaccuucuuccaggaggucccccacgugaucgaggaggugaugaacaucguccugaucgcccucagcauccuggccgugcugaaggggcucuacaacuucgcgaccugcggccugguggggcuggucacguuccuccugcugugcggccgcuccugcaccaucagccucuacaaggggguguacgagcugcagacccuggagcucaacauggagacccugaacaugugcaugccgcuguccugcaccaagaacaacagccaccacuacaucauggugggcaacgagaccggccucgagcugacccugacgaacaccuccaucaucaaccacaaguucugcaaccucagcgacgcccacaagaagaaccuguacgaccacgcccugauguccaucaucagcaccuuccaccucuccauccccaacuucaaccaguacgaggccaugagcugcgacuucaacgggggcaagaucuccguccaguacaaccugagccacuccuacgccggggacgcggccaaccacugcggcaccguggccaacggggugcugcagacguucaugcggauggccuggggcggcagcuacaucgcgcucgacuccgggcgcgaccggugggacugcaucaugaccagcuaccaguaccugaucauccagaacaccaccugggaggaccacugccaguucucccgccccagccccaucggcuaccuggggcuccugucccagcggacgcgcgacaucuacaucagccggcgccgccggggcaccuucaccuggacccugagcgacuccgagggcaaggacacgcccgggggcuacugccugacccgguggaugcucaucgaggccgagcugaagugcuucgggaacaccgccgucgccaagugcaacgagaagcacgacgaggaguucugcgacaugcugcgccucuucgacuucugcaagcaggccauccagcggcugaaggcgcccgcccagaugagcauccagcugaucaacaaggccgugaacgcccucaucaacgaccagcugaucaugaagaaccaccuccgcgacaucaugggcauccccuacugcaacuacuccaaguacugcuaccugaaccacaccacgaccgggaagaccagccugcccaagugcugccugguguccaacggcagcuaccucaacgagacccacuucuccgacgacaucgagcagcaggccgacaacaugaucacggagaugcugcagaaggaguacauggagcggcagggcaagaccccgcuggggcucgucgaccuguucguguucagcaccuccuucuaccugaucagcaucuuccugcaccucgugaagaucccgacccaccgccacaucgucggcaagcccugccccaagccccaccggcugaaccacauggggaucugcuccugcggccuguacaagcagccgggggugcccgugaaguggaagcgcugaggacuagucccuguucccagagcccacuuuuuuuucuuuuuuugaaauaaaauagccugucuuucagaucuaaaaaaaaaaaaaaaaaaaaaaaaaaaaaaaaaaaaaaaaaaaaaaaaaaaaaaaaaaaaaaaaaaaaaaaaaaaaaaaaaaaaaaaaaaaaaaaaaaaa

SEQ ID NO: 27173 - RNA, 1743 nt, Artificial Sequence
  mRNA product Design a-2 (A100) comprising derived and/or modified sequence from LASV(Josiah;Clade IV)__NP_694870__GPCmut4 (opt1)
aggagaguccgcucagccagguugcagaagcggcuuagcguguguccuaaucuucucucugcguguagguaggccugugccgcaaacaagcuuaccaugggccagaucgugaccuucuuccaggaggucccccacgugaucgaggaggugaugaacaucguccugaucgcccucagcgugcuggccgugcugaaggggcucuacaacuucgcgaccugcggccuggucgggcuggugacguuccuccugcugugcggccgcuccugcaccaccagccucuacaaggggguguacgagcugcagacccuggagcucaacauggagacgcugaacaugugcaugccgcuguccugcaccaagaacaacagccaccacuacaucauggucggcaacgagaccggccucgagcugacccugacgaacaccuccaucaucaaccacaaguucugcaaccucagcgacgcccacaagaagaaccuguacgaccacgcccugauguccaucaucagcaccuuccaccucuccauccccaacuucaaccaguacgaggccaugagcugcgacuucaacgggggcaagaucuccgugcaguacaaccugagccacuccuacgccggggacgcggccaaccacugcggcaccguggccaacgggguccugcagacguucaugcggauggccuggggcggcagcuacaucgcgcucgacuccgggcgcggcaacugggacugcaucaugaccagcuaccaguaccugaucauccagaacaccaccugggaggaccacugccaguucucccggcccagccccaucggguaccugggccuccugucccagcgcacgcgggacaucuacaucagccgccggcgccggggcaccuucaccuggacccugagcgacuccgaggggaaggacacgccgggcggguacugccucacccgcuggaugcugaucgaggccgagcugaagugcuucggcaacaccgccguggccaagugcaacgagaagcacgacgaggaguucugcgacaugcuccggcuguucgacuucugcaagcaggccauccagcgccugaaggcgcccgcccagaugagcauccagcucaucaacaaggccgugaacgcccugaucaacgaccagcugaucaugaagaaccaccuccgggacaucauggggauccccuacugcaacuacuccaaguacugcuaccugaaccacaccacgaccggccgcaccagccugcccaagugcugccucgucuccaacggcagcuaccugaacgagacccacuucuccgacgacaucgagcagcaggccgacaacaugaucacggagaugcugcagaaggaguacauggagcggcaggggaagaccccgcucggccugguggaccuguucguguucagcaccuccuucuaccugaucagcaucuuccuccaccuggucaagauccccacccaccgccacaucguggggaaguccugccccaagccccaccggcugaaccacaugggcaucugcagcugcgggcucuacaagcagccgggcgugcccgucaaguggaagcgcugaggacuagucccuguucccagagcccacuuuuuuuucuuuuuuugaaauaaaauagccugucuuucagaucuaaaaaaaaaaaaaaaaaaaaaaaaaaaaaaaaaaaaaaaaaaaaaaaaaaaaaaaaaaaaaaaaaaaaaaaaaaaaaaaaaaaaaaaaaaaaaaaaaaaa

SEQ ID NO: 27174 - RNA, 1740 nt, Artificial Sequence
  mRNA product Design a-2 (A100) comprising derived and/or modified sequence from LASV(LP;Clade I)__AAF86701__GPCmut4 (opt1)
aggagaguccgcucagccagguugcagaagcggcuuagcguguguccuaaucuucucucugcguguagguaggccugugccgcaaacaagcuuaccaugggccagaucaucaccuucuuccaggaggugccccacgucaucgaggaggugaugaacaucgugcugaucgcccucagccugcuggccauccucaaggggcuguacaacaucgcgaccugcggcaucaucgggcuggucgccuuccucuuccugugcggcaaguccugcagccugacgcucaagggcggguacgagcugcagacccuggagcucaacauggagacccugaacaugugcaugccgcuguccugcaccaagaacagcucccaccacuacauccgcgugggcaacgagacggggcucgagcugacccugaccaacaccagcaucaucaaccacaaguucugcaaccucuccgacgcccacaagaagaaccuguacgaccacgcccugaugagcaucaucuccacguuccaccucagcauccccaacuucaaccaguacgaggccauguccugcgacuucaacggcgggaagaucagcgugcaguacaaccugucccacagcuacgcgggcgacgccgccgagcacugcgggaccgucgccaacggcgugcugcagaccuucaugcggauggcguggggcgggcgcuacaucgcccucgacuccggcaaggggaacugggacugcaucaugaccagcuaccaguaccugaucauccagaacacgaccugggaggaccacugccaguucucccggcccagccccaucggcuaccugggccuccugucccagcgcacccgggacaucuacaucagccgccggcgccgggggaccuucacguggacccugagcgacuccgagggcaacgagacccccgggggcuacugccucacccgcuggaugcugaucgaggccgagcugaagugcuucgggaacacggccguggccaagugcaacgagaagcacgacgaggaguucugcgacaugcuccggcuguucgacuucugcaagcaggcgauccgccggcugaaggccccggcccagaugagcauccagcucaucaacaaggccgucaacgcccugaucaacgaccagcugaucaugaagaaccaccuccgcgacaucaugggcauccccuacugcaacuacuccaaguacugcuaccugaaccacaccagcuccggccggaccagccugcccaagugcugccucaucuccaacgggagcuaccugaacgagacccaguucuccgacgacaucgagcagcaggcggacaacaugaucacggagaugcugcagaaggaguacaucgagcgccagggcaagaccccgcucgggcugguggacaucuucaucuucagcaccuccuucuaccugaucagcaucuuccugcaccucaucaagauccccacccaccggcacaucgugggcaagcccugccccaagccgcaccgccugaaccacaugggggucugcuccugcggccuguacaagcaccccggcgugcccacgaaguggaagcggugaggacuagucccuguucccagagcccacuuuuuuuucuuuuuuugaaauaaaauagccugucuuucagaucuaaaaaaaaaaaaaaaaaaaaaaaaaaaaaaaaaaaaaaaaaaaaaaaaaaaaaaaaaaaaaaaaaaaaaaaaaaaaaaaaaaaaaaaaaaaaaaaaaaaa

SEQ ID NO: 27175 - RNA, 1740 nt, Artificial Sequence
  mRNA product Design a-2 (A100) comprising derived and/or modified sequence from LASV(803213;Clade II)__AAF86703__GPCmut4 (opt1)
aggagaguccgcucagccagguugcagaagcggcuuagcguguguccuaaucuucucucugcguguagguaggccugugccgcaaacaagcuuaccaugggccagaucaucaccuucuuccaggaggugccccacgucaucgaggaggugaugaacaucgugcugaucgcccucagccugcuggccauccucaaggggaucuacaacgucgcgaccugcggccuguucgggcugaucuccuuccuccugcugugcggccgcagcugcuccgugacguacaaggggguguacgagcuccagacccuggagcugaacauggccaaccucaacaugugcaugccgcugagcugcaccaagaacaacucccaccacuacaucauggucggcaacgagaccggccuggagcucacgcugaccaacaccagcaucaucaaccacaaguucugcaaccuguccgacgcccacaagaagaaccucuacgaccacgcccugaugagcaucaucuccaccuuccaccugagcauccccaacuucaaccaguacgaggccauguccugcgacuucaacgggggcaagaucagcgugcaguacaaccucucccacagcuucgcgguggacgccgccaaccacugcgggacgaucgccaacggcguccugcagaccuucaugcggauggcguggggcggguccuacaucgcccuggacagcggcaaggggaacugggacugcaucaugaccuccuaccaguaccucaucauccagaacaccacgugggaggaccacugccaguucagccgccccucccccaucggcuaccuggggcugcucagccagcggacccgcgacaucuacaucagccggcgccggcgcggcaccuucaccuggacgcuguccgacagcgagggcaacgaggcccccgggggcuacugccugacccgguggaugcucaucgaggccgagcugaagugcuucgggaacaccgccguggcgaagugcaacgagaagcacgacgaggaguucugcgacaugcugcgccucuucgacuucugcaagcaggccaucaagcggcugaagaccccggcccagauguccauccagcugaucaacaaggccgugaacgcccucaucaacgaccagcugaucaugaagaaccaccuccgcgacaucaugggcauccccuacugcaacuacagccgguacugcuaccugaaccacacggucaccgggaagaccucccugccccgcugcugccuggugagcaacggcuccuaccucaacgagacccacuucagcgacgacaucgagcagcaggcggacaacaugaucacggagaugcugcagaaggaguacauggaccggcagggcaagaccccgcuggggcucguggaccuguucgucuucuccaccagcuucuaccugaucuccaucuuccugcaccucgugaagauccccacccaccgccacaucgugggcaagcccugccccaagccgcaccggcugaaccacauggggaucugcagcugcggccuguacaagcaccccgggguccccgugaaguggaagcgcugaggacuagucccuguucccagagcccacuuuuuuuucuuuuuuugaaauaaaauagccugucuuucagaucuaaaaaaaaaaaaaaaaaaaaaaaaaaaaaaaaaaaaaaaaaaaaaaaaaaaaaaaaaaaaaaaaaaaaaaaaaaaaaaaaaaaaaaaaaaaaaaaaaaaa

SEQ ID NO: 27176 - RNA, 1740 nt, Artificial Sequence
  mRNA product Design a-2 (A100) comprising derived and/or modified sequence from LASV(GA391;Clade III)__CAA36645__GPCmut4 (opt1)
aggagaguccgcucagccagguugcagaagcggcuuagcguguguccuaaucuucucucugcguguagguaggccugugccgcaaacaagcuuaccaugggccagaucgugaccuucuuccaggaggucccccacgugaucgaggaggugaugaacaucguccugaucgcccucagcauccuggccauccugaaggggcucuacaacguggcgaccugcggccugaucgggcuggugacguuccuccugcuguccggccgcagcugcucccucaucuacaaggggaccuacgagcugcagacccuggagcucaacauggagacccugaacaugugcaugccgcugagcugcacgaagaacaacucccaccacuacauccgggucggcaacgagaccggccucgagcugacccugaccaacacgagcauccucaaccacaaguucugcaaccuguccgacgcccacaagcgcaaccuguacgaccacagccucauguccaucaucagcaccuuccaccuguccauccccaacuucaaccaguacgaggccaugagcugcgacuucaacgggggcaagaucaccgugcaguacaaccugucccacagcuucgccguggacgccgcggggcacugcggcacccucgccaacgggguccugcagacguucaugcggauggccuggggcggcuccuacaucgcccuggacagcgggcgcggcaacugggacugcaucaugaccuccuaccaguaccucaucauccagaacaccaccugggacgaccacugccaguucagccggcccucccccaucggguaccugggccugcucagccagcgcacgcgggacaucuacaucagccgccggcgccggggcaccuucaccuggacccuguccgacagcgaggggaacgagacgccgggcggguacugccugacccgcuggaugcucaucgaggcggagcugaagugcuucggcaacaccgccguggccaagugcaacgagaagcacgacgaggaguucugcgacaugcugcggcuguucgacuucugcaagcaggccauccgccggcugaagacccccgcccagauguccauccagcugaucaacaaggcggugaacgcccucaucaacgaccagcugaucaugaagaaccaccuccgcgacaucauggggauccccuacugcaacuacagccgguacugcuaccucaaccacacguccaccggcaagaccagccugccccgcugcugccugaucuccaacggcagcuaccucaacgagaccaaguucuccgacgacaucgagcagcaggccgacaacaugaucacggagaugcugcagaaggaguacaucgaccggcaggggaagaccccgcugggccuggucgaccucuucguguucagcaccuccuucuaccugaucagcaucuuccugcaccucgugaagauccccacccaccgccacaucgucgggaagcccugccccaagccgcaccggcugaaccacaugggcaucugcuccugcgggcuguacaagcagcccggcgugcccgugcgcuggaagcgcugaggacuagucccuguucccagagcccacuuuuuuuucuuuuuuugaaauaaaauagccugucuuucagaucuaaaaaaaaaaaaaaaaaaaaaaaaaaaaaaaaaaaaaaaaaaaaaaaaaaaaaaaaaaaaaaaaaaaaaaaaaaaaaaaaaaaaaaaaaaaaaaaaaaaa

SEQ ID NO: 27177 - RNA, 1743 nt, Artificial Sequence
  mRNA product Design a-2 (A100) comprising derived and/or modified sequence from LASV(AV;Clade V)__CCA30314__GPCmut4 (opt1)
aggagaguccgcucagccagguugcagaagcggcuuagcguguguccuaaucuucucucugcguguagguaggccugugccgcaaacaagcuuaccaugggccagaucgugaccuucuuccaggaggucccccacgugaucgaggaggugaugaacaucguccugaucgcccucagcauccuggccgugcugaaggggcucuacaacaucgcgaccugcggccugaucgggcugaucacguuccuccugcugugcggccgcuccugcagcuccaaccucuacaaggggguguacgagcugcagagccuggaccucaacauggagacccugaacaugugcaugccgcuguccugcaccaagaacaacagccaccacuacauccgggucggcaacgacaccggccucgagcugacgcugaccaacaccuccauccucaaccacaaguucugcaaccugagcgacgcccacaagaaggaccuguacgaccacgcccucauguccaucaucagcaccuuccaccuguccauccccaacuucaaccaguacgaggccaugagcugcgacuucaacgggggcaagaucuccgugcaguacaaccugagccacuccuacgccaucgacgcggccaaccacugcgggacgguggccaacggcauccuccagaccuucaugcgcauggccuggggcgggagcuacaucgcgcuggacuccggccgggggaacugggacugcaucaugaccagcuaccaguaccugaucauccagaacaccacgugggagaaccacugccaguucucccgccccagccccaucggcuaccucgggcugcugagccagcggacccgcgacaucuacaucucccggcgccggcgcggcaccuucaccuggacgcucagcgacuccgagggcaacgccacccccgggggcuacugccugacccgguggaugcugaucgaggccgagcucaagugcuucgggaacaccgccgucgccaagugcaacgagaagcacgacgaggaguucugcgacaugcugcgccuguucgacuucugcaagcaggcgaucagccggcucaaguccccggcccagaugagcauccagcugaucaacaaggccgugaacgcccugaucaacgaccagcucaucaugaagaaccaccuccgcgacaucaugggcauccccuacugcaacuacuccaaguacugcuaccugaaccacacgaucaccgggaagaccagccugcccaagugcugccugguguccaacggcagcuaccugaacgagacccacuucuccgacgacaucgagcagcaggccgacaacaugaucacggagaugcuccagaaggaguacauggagcggcagggcaagaccccgcuggggcuggucgaccuguucguguucagcaccuccuucuaccucaucagcaucuuccugcgccuggugaagauccccacccaccggcacaucgucggcaagcccugccccaagccgcaccgccucaaccacauggggaucugcuccugcggccuguacaagcagcccggggugcccgugcgguggaagcgcugaggacuagucccuguucccagagcccacuuuuuuuucuuuuuuugaaauaaaauagccugucuuucagaucuaaaaaaaaaaaaaaaaaaaaaaaaaaaaaaaaaaaaaaaaaaaaaaaaaaaaaaaaaaaaaaaaaaaaaaaaaaaaaaaaaaaaaaaaaaaaaaaaaaaa

SEQ ID NO: 27178 - RNA, 1740 nt, Artificial Sequence
  mRNA product Design a-2 (A100) comprising derived and/or modified sequence from LASV(Togo/2016/7082;Clade VI)__AMR44577__GPCmut4 (opt1)
aggagaguccgcucagccagguugcagaagcggcuuagcguguguccuaaucuucucucugcguguagguaggccugugccgcaaacaagcuuaccaugggccagaucaucaccuucuuccaggaggugccccacgucaucgaggaggugaugaacaucgugcugaucgcccucagccugcuggccauccucaagggggucuacaacguggcgaccugcggcaucaucgggcuggugacguuccuguuccucugcggccgcuccugcagccugaucuacaagggguccuacgagcugcagacccucgagcugaacauggagacccugaacaugugcaugccgcucagcugcaccaagaacuccagccaccacuacauccgggucggcaacgagacgggccuggagcugacccucaccaacaccuccaucaucaaccacaaguucugcaaccugagcgacgcccacaagcgcaaccuguacgaccacgcccucauguccauccugagcacguuccaccuguccauccccaacuucaaccaguacgaggccaugagcugcgacuucaacgggggcaagaucuccgugcaguacaaccucagccacgccuacgcgguggacgccgccgagcacugcgggaccgucgccaacggcgugcugcagaccuucaugcggauggcguggggcggguccuacaucgcccuggacagcggccgcgggaacugggacugcaucaugaccuccuaccaguaccucaucauccagaacacgaccugggaggaccacugccaguucagccggcccucccccaucggcuaccuggggcugcucagccagcgcacccgggacaucuacaucagccgccggcgccggggcaccuucacguggacccuguccgacagcgagggcaacgagacccccgggggcuacugccugacccgcuggaugcucaucgaggccgagcugaagugcuucgggaacacggccguggccaagugcaacgagaagcacgacgaggaguucugcgacaugcugcggcuguucgacuucugcaagcaggcgauccagcgccugaaguccccggcccagaugagcauccagcugaucaacaaggccgucaacgcccucaucaacgaccagcugaucaugaagaaccaccuccgggacaugaugggcauccccuacugcaacuacuccaaguacugcuaccucaaccacaccagcuccgggcgcaccagccugcccaagugcugccugguguccaacggcagcuaccucaacgagacccacuucuccgacgacaucgagcagcaggccgacaacaugaucacggagaugcugcagaaggaguacaucgaccggcagggcaagaccccgcuggggcucguggaccuguucgucuucagcaccuccuucuaccugaucagcaucuuccugcaccucaucaagauccccacccaccgccacaucgugggcaagcccugccccaagccgcaccggcugaaccacauggggaucugcuccugcggccuguacaagcagcccggggugcccacgcgcuggaagcggugaggacuagucccuguucccagagcccacuuuuuuuucuuuuuuugaaauaaaauagccugucuuucagaucuaaaaaaaaaaaaaaaaaaaaaaaaaaaaaaaaaaaaaaaaaaaaaaaaaaaaaaaaaaaaaaaaaaaaaaaaaaaaaaaaaaaaaaaaaaaaaaaaaaaa

SEQ ID NO: 27179 - RNA, 1740 nt, Artificial Sequence
  mRNA product Design a-2 (A100) comprising derived and/or modified sequence from LASV(KAK-428;Clade n.d. (VII))__ANH09740__GPCmut4 (opt1)
aggagaguccgcucagccagguugcagaagcggcuuagcguguguccuaaucuucucucugcguguagguaggccugugccgcaaacaagcuuaccaugggccagaucgugaccuucuuccaggaggucccccacgugaucgaggaggugaugaacaucguccugaucgcccucagccugcuggccauccucaaggggcuguacaacuucgcgaccugcggcgugaucgggcugaucacguuccuccugcugugcggccgcuccugcagcgccaccuacaaggggcaguacgagcuccagacccuggagcugaacauggagucccucaacaugugcaugccgcugagcugcaccaagaacaacucccaccacuacauccgggccggcaacaacacgggccuggagcucacccugaccaacaccagcaucaucucccacaaguucugcaaccugagcgacgcccacaagaagaaccucuacgaccacacgcugauguccaucaucaccaccuuccaccugagcauccccaacuucaaccaguacgaggccauguccugcgacuucaacgggggcaagaucagcauccaguacaaccucucccacagcuacgcgggggacgccgcccagcacugcggcaccguggccaacgggguccugcagacguucaugcgcauggcguggggcggcuccuaccuggcccucgacagcgggcggcgcggcugggacugcaucaucuccagcuaccaguaccugaucauccagaacaccaccugggacgaccacugccaguucucccggcccagccccaucggguaccugggcuucgugagccagaagacccgcgacaucuacaucucccggcgccggcgcggcacguucaccuggacccucagcgacuccgaggggcacgacaugccgggcggguacugccugacccgguggaugcugaucgaggccgaccucaagugcuucggcaacacggccguggccaagugcaacgagaagcacgacgaggaguucugcgacauguggcgccuguucgacuucugcaagcaggcgauccagcggcugaaggcccccgcccagaugaacauccagcucaucaacaaggccgucaacgcccugaucaacgaccagcugaugaugaagaaccaccuccgcgacaucauggggauccccuacugcaacuacagcaaguucugcuaccugaacaacaccaccaccggccggacgucccugccccgcugcugccucaucagcaacggcuccuaccugaacgagacccacuucagcgacgacaucgagcagcaggcggacaacaugaucaccgagaugcugcagaaggaguacauggaccggcaggggaagaccccgcucggccugguggaccuguucguguucuccacgagcuucuaccucaucaccaucuuccugcaccuggucaagauccccacccaccgccacaucguggggaagcccugccccaagccgcaccggcugaaccacaugggcaucugcuccugcgggcucuacaagcagcccggcgugcccguccgcuggaagcggugaggacuagucccuguucccagagcccacuuuuuuuucuuuuuuugaaauaaaauagccugucuuucagaucuaaaaaaaaaaaaaaaaaaaaaaaaaaaaaaaaaaaaaaaaaaaaaaaaaaaaaaaaaaaaaaaaaaaaaaaaaaaaaaaaaaaaaaaaaaaaaaaaaaaa

SEQ ID NO: 27180 - RNA, 1740 nt, Artificial Sequence; identical to SEQ ID NO: 27174
  mRNA product Design a-2 (A100) comprising derived and/or modified sequence from LASV(Pinneo-NIG-1969;Clade I)__AIT17836__GPCmut4 (opt1)

SEQ ID NO: 27181 - RNA, 1740 nt, Artificial Sequence
  mRNA product Design a-2 (A100) comprising derived and/or modified sequence from LASV(ISTH0009-NIG-2011;Clade II)__AIT17404__GPCmut4 (opt1)
aggagaguccgcucagccagguugcagaagcggcuuagcguguguccuaaucuucucucugcguguagguaggccugugccgcaaacaagcuuaccaugggccagaucaucaccuucuuccaggaggugccccacgucaucgaggaggugaugaacaucgugcugaucgcccucagccugcuggccauccucaaggggaucuacaacgucgcgaccugcggccuguucgggcugguguccuuccuccugcugugcggccgcagcugcuccacgaccuacaaggggguguacgagcuccagacccuggagcuggacauggccagccucaacaugugcaugccgcuguccugcaccaagaacaacagccaccacuacaucauggucggcaacgagacgggccuggagcucacccugaccaacaccuccaucaucaaccacaaguucugcaaccugagcgacgcccacaagaagaaccucuacgaccacgcccugauguccaucaucagcacguuccaccuguccauccccaacuucaaccaguacgaggccaugagcugcgacuucaacgggggcaagaucuccgugcaguacaaccucagccacgcguacgccguggacgccgccaaccacugcgggaccaucgcgaacggcguccugcagaccuucaugcggauggccuggggcggguccuacaucgcccuggacagcggcaagggguccugggacugcaucaugaccagcuaccaguaccucaucauccagaacacgaccugggaggaccacugccaguucucccgccccagccccaucggcuaccuggggcugcucagccagcggacccgcgacaucuacaucucccggcgccggcgcggcaccuucacguggacccugagcgacuccgagggcaacgagacccccgggggcuacugccugacccgguggaugcucaucgaggccgagcugaagugcuucgggaacacggccguggcgaagugcaacgagaagcacgacgaggaguucugcgacaugcugcgccucuucgacuucugcaagcaggccauccggcgccugaagaccccggcccagaugagcauccagcugaucaacaaggccgugaacgcccucaucaacgaccagcugaucaugaagaaccaccuccgggacaucaugggcauccccuacugcaacuacuccaaguacugcuaccugaaccacaccgucaccgggaagacgagccugccccgcugcugccugguguccaacggcagcuaccucaacgagacccacuucuccgacgacaucgagcagcaggcggacaacaugaucaccgagcugcugcagaaggaguacauggaccggcagggcaagaccccgcucgggcugguggaccuguucgucuucagcacguccuucuaccugaucagcaucuuccuccaccugaucaagauccccacccaccgccacaucaccggcaagcccugccccaagccgcaccggcugaaccacauggggaucugcuccugcggccucuacaagcaccccggggugcccgugaaguggaagcgcugaggacuagucccuguucccagagcccacuuuuuuuucuuuuuuugaaauaaaauagccugucuuucagaucuaaaaaaaaaaaaaaaaaaaaaaaaaaaaaaaaaaaaaaaaaaaaaaaaaaaaaaaaaaaaaaaaaaaaaaaaaaaaaaaaaaaaaaaaaaaaaaaaaaaa

SEQ ID NO: 27182 - RNA, 1740 nt, Artificial Sequence
  mRNA product Design a-2 (A100) comprising derived and/or modified sequence from LASV(ISTH2010-NIG-2012;Clade II)__AIT17482__GPCmut4 (opt1)
aggagaguccgcucagccagguugcagaagcggcuuagcguguguccuaaucuucucucugcguguagguaggccugugccgcaaacaagcuuaccaugggccagaucaucaccuucuuccaggaggugccccacgucaucgaggaggugaugaacaucgugcugaucgcccucagccugcuggccauccucaaggggaucuacaacgucgcgaccugcggccuguucgggcugguguccuuccuccugcugugcggccgcagcugcuccacgaccuacaaggggguguacgagcuccagacccuggagcuggacauggccagccucaacaugugcaugccgcuguccugcaccaagaacaacagccaccacuacaucauggucggcaacgagacgggccuggagcucacccugaccaacaccuccaucaucaaccacaaguucugcaaccugagcgacgcccacaagaagaaccucuacgaccacgcccugauguccaucaucagcacguuccaccuguccauccccaacuucaaccaguacgaggccaugagcugcgacuucaacgggggcaagaucuccgugcaguacaaccucagccacgcguacgccguggacgccgccaaccacugcgggaccaucgcgaacggcguccugcagaccuucaugcggauggccuggggcggguccuacaucgcccuggacagcggcaagggguccugggacugcaucaugaccagcuaccaguaccucaucauccagaacaucacgugggaggaccacugccaguucucccgccccagccccaucggcuaccuggggcugcucagccagcggacccgcgacaucuacaucucccggcgccggcgcggcaccuucaccuggacgcugagcgacuccgagggcaacgagacccccgggggcuacugccugacccgguggaugcucaucgaggccgagcugaagugcuucgggaacaccgccguggcgaagugcaacgagaagcacgacgaggaguucugcgacaugcugcgccucuucgacuucugcaagcaggccauccggcgccugaagacgccggcccagaugagcauccagcugaucaacaaggccgugaacgcccucaucaacgaccagcugaucaugaagaaccaccuccgggacaucaugggcauccccuacugcaacuacuccaaguacugcuaccugaaccacaccgucaccgggaagaccagccugccccgcugcugccugguguccaacggcagcuaccucaacgagacgcacuucuccgacgacaucgagcagcaggcggacaacaugaucaccgagcugcugcagaaggaguacaucgaccggcagggcaagaccccgcucgggcugguggaccuguucgucuucagcaccuccuucuaccugaucagcaucuuccuccaccuggugaagauccccacgcaccgccacguggucggcaagcccugccccaagccgcaccggcugaaccacauggggaucugcuccugcggccucuacaagcaccccggggugcccgugaaguggaagcgcugaggacuagucccuguucccagagcccacuuuuuuuucuuuuuuugaaauaaaauagccugucuuucagaucuaaaaaaaaaaaaaaaaaaaaaaaaaaaaaaaaaaaaaaaaaaaaaaaaaaaaaaaaaaaaaaaaaaaaaaaaaaaaaaaaaaaaaaaaaaaaaaaaaaaa

SEQ ID NO: 27183 - RNA, 1740 nt, Artificial Sequence
  mRNA product Design a-2 (A100) comprising derived and/or modified sequence from LASV(Lassa virus/H.sapiens-wt/NGA/2015/ISTH_0543;Clade II)__AVO03639__GPCmut4 (opt1)
aggagaguccgcucagccagguugcagaagcggcuuagcguguguccuaaucuucucucugcguguagguaggccugugccgcaaacaagcuuaccaugggccagaucaucaccuucuuccaggaggugccccacgucaucgaggaggugaugaacaucgugcugaucgcccucagccugcuggccauccucaaggggaucuacaacgucgcgaccugcggccuguucgggcugguguccuuccuccugcugugcggccgcagcugcuccacgaccuacaaggggguguacgagcuccagacccuggagcuggacauggccaaccucaacaugugcaugccgcugagcugcaccaagaacaacucccaccacuacaucauggucggcaacgagacgggccuggagcucacccugaccaacaccagcaucaucaaccacaaguucugcaaccuguccgacgcccacaagaagaaccucuacgaccacgcccugaugagcaucaucuccacguuccaccugagcauccccaacuucaaccaguacgaggccauguccugcgacuucaacgggggcaagaucagcgugcaguacaaccucucccacaccuacgcgguggacgccgccaaccacugcgggaccaucgccaacggcguccugcagaccuucaugcggauggcguggggcgggagcuacaucgcccuggacuccggcaaggggagcugggacugcaucaugacguccuaccaguaccucgugauccagaacaccaccugggaggaccacugccaguucagccgccccucccccaucggcuaccuggggcugcucagccagcggacccgcgacaucuacaucagccggcgccggcgcggcacguucaccuggacccuguccgacagcgagggcaacgagacccccgggggcuacugccugacgcgguggaugcucaucgaggccgagcugaagugcuucgggaacaccgccguggccaagugcaacgagaagcacgacgaggaguucugcgacaugcugcgccucuucgacuucugcaagcaggcgauccggcgccugaagaccccggcccagauguccauccagcugaucaacaaggccgucaacgcccucaucaacgaccagcugaucaugaagaaccaccuccgggacaucaugggcauccccuacugcaacuacagcaaguacugcuaccugaaccacaccgugacggggaagaccucccugccccgcugcugccuggugagcaacggcuccuaccucaacgagacccacuucagcgacgacaucgagcagcaggccgacaacaugaucaccgagcugcugcagaaggaguacaucgaccggcagggcaagacgccgcucgggcuggucgaccuguucguguucuccaccagcuucuaccugaucuccaucuuccuccaccuggugaagauccccacccaccgccacaucaccggcaagcccugccccaagccgcaccggcugaaccacauggggaucugcagcugcggccucuacaagcaccccgggguccccgugaaguggaagcgcugaggacuagucccuguucccagagcccacuuuuuuuucuuuuuuugaaauaaaauagccugucuuucagaucuaaaaaaaaaaaaaaaaaaaaaaaaaaaaaaaaaaaaaaaaaaaaaaaaaaaaaaaaaaaaaaaaaaaaaaaaaaaaaaaaaaaaaaaaaaaaaaaaaaaa

SEQ ID NO: 27184 - RNA, 1740 nt, Artificial Sequence
  mRNA product Design a-2 (A100) comprising derived and/or modified sequence from LASV(Lassa virus/H.sapiens-wt/NGA/2016/ISTH_0009;Clade II)__AVO03571__GPCmut4 (opt1)
aggagaguccgcucagccagguugcagaagcggcuuagcguguguccuaaucuucucucugcguguagguaggccugugccgcaaacaagcuuaccaugggccagaucaucaccuucuuccaggaggugccccacgucaucgaggaggugaugaacaucgugcugaucgcccucagccugcuggccauccucaaggggaucuacaacgucgcgaccugcggccugcuggggcucguguccuuccugcugcucugcggccgcagcugcuccacgaccuacaaggggguguacgagcugcagacccuggagcucgacauggccagccugaacaugugcaugccgcuguccugcaccaagaacaacagccaccacuacaucauggucggcaacgagacgggccucgagcugacccugaccaacaccuccaucaucaaccacaaguucugcaaccucagcgacgcccacaagaagaaccuguacgaccacgcccugauguccaucaucagcacguuccaccucuccauccccaacuucaaccaguacgaggccaugagcugcgacuucaacgggggccggaucuccgugcaguacaaccugagccacuccuacgcgguggacgccgccaaccacugcgggaccaucgccaacggcguccugcagaccuucaugcgcauggcguggggcgggagcuacaucgcccucgacuccggcaaggggagcugggacugcaucaugaccuccuaccaguaccugaucauccagaacacgaccugggaggaccacugccaguucagccggcccagccccaucggcuaccuggggcuccugucccagcgcacccgggacaucuacaucagccgccggcgccggggcaccuucacguggacccuguccgacagcgagggcaacgagacccccgggggcuacugccucacccgcuggaugcugaucgaggccgagcugaagugcuucgggaacacggccguggccaagugcaacgagaagcacgacgaggaguucugcgacaugcuccggcuguucgacuucugcaagcaggcgauccgccggcugaagaccccggcccagauguccauccagcucaucaacaaggccgugaacgcccugaucaacgaccagcugaucaugaagaaccaccuccgcgacaucaugggcauccccuacugcaacuacagcaaguacugcuaccugaaccacaccgucaccgggaagacgucccugccccggugcugccucgugagcaacggcuccuaccugaacgagacccacuucagcgacgacaucgagcagcaggccgacaacaugaucaccgagcugcuccagaaggaguacaucgaccgccagggcaagaccccgcuggggcugguggaccuguucgucuucuccacgagcuucuaccucaucuccaucuuccugcaccuggugaagauccccacccaccggcacaucaccggcaagcccugccccaagccgcaccgccucaaccacauggggaucugcagcugcggccuguacaaccaccccggggugcccgucaaguggaagcggugaggacuagucccuguucccagagcccacuuuuuuuucuuuuuuugaaauaaaauagccugucuuucagaucuaaaaaaaaaaaaaaaaaaaaaaaaaaaaaaaaaaaaaaaaaaaaaaaaaaaaaaaaaaaaaaaaaaaaaaaaaaaaaaaaaaaaaaaaaaaaaaaaaaaa

SEQ ID NO: 27185 - RNA, 1740 nt, Artificial Sequence
  mRNA product Design a-2 (A100) comprising derived and/or modified sequence from LASV(Lassa virus/H.sapiens-wt/NGA/2016/ISTH_0017;Clade II)__AVO03567__GPCmut4 (opt1)
aggagaguccgcucagccagguugcagaagcggcuuagcguguguccuaaucuucucucugcguguagguaggccugugccgcaaacaagcuuaccaugggccagaucaucaccuucuuccaggaggugccccacgucaucgaggaggugaugaacaucgugcugaucgcccucagccugcuggccauccucaaggggaucuacaacgucgcgaccugcggccuguucgggcugguguccuuccuccugcugugcggccgcagcugcuccacgaccuacaaggggguguacgagcuccagacccuggagcuggacauggccagccucaacaugugcaugccgcuguccugcaccaagaacaacagccaccacuacaucauggucggcaacgagacgggccuggagcucacccugaccaacaccuccaucaucaaccacaaguucugcaaccugagcgacgcccacaagaagaaccucuacgaccacgcccugauguccaucaucagcacguuccaccuguccauccccaacuucaaccaguacgaggccaugagcugcgacuucaacgggggcaagaucuccgugcaguacaaccucagccacaccuacgcgaucgacgccgccaaccacugcgggaccaucgccaacggcgugcugcagaccuucaugcggauggcguggggcggguccuacaucgcccuggacagcggcaagggguccugggacugcaucaugacgagcuaccaguaccucaucauccagaacaccaccugggaggaccacugccaguucucccgccccagccccaucggcuaccuggggcugcucagccagcggacccgcgacaucuacaucucccggcgccggcgcggcacguucaccuggacccugagcgacuccgagggcaacgagacccccgggggcuacugccugacgcgguggaugcucaucgaggccgagcugaagugcuucgggaacaccgccgucgccaagugcaacgagaagcacgacgaggaguucugcgacaugcugcgccucuucgacuucugcaagcaggcgauccggcgccugaagaccccggcccagaugagcauccagcugaucaacaaggccgugaacgcccucaucaacgaccagcugaucaugaagaaccaccuccgggacaucaugggcauccccuacugcaacuacuccaaguacugcuaccugaaccacaccgugacggggaagaccagccugccccgcugcugccuggucuccaacggcagcuaccucaacgagacccacuucuccgacgacaucgagcagcaggccgacaacaugaucaccgagcugcugcagaaggaguacauggaccggcagggcaagacgccgcucgggcugguggaccuguucguguucagcaccuccuucuaccugaucagcaucuuccuccaccugguccgcauccccacccaccggcacgugaucggcaagcccugccccaagccgcaccgccugaaccacauggggaucugcuccugcggccucuacaagcaccccggggugcccgucaaguggaagcggugaggacuagucccuguucccagagcccacuuuuuuuucuuuuuuugaaauaaaauagccugucuuucagaucuaaaaaaaaaaaaaaaaaaaaaaaaaaaaaaaaaaaaaaaaaaaaaaaaaaaaaaaaaaaaaaaaaaaaaaaaaaaaaaaaaaaaaaaaaaaaaaaaaaaa

SEQ ID NO: 27186 - RNA, 1740 nt, Artificial Sequence
  mRNA product Design a-2 (A100) comprising derived and/or modified sequence from LASV(Lassa virus/H.sapiens-wt/NGA/2018/ISTH_0959;Clade II)__AVV65099__GPCmut4 (opt1)
aggagaguccgcucagccagguugcagaagcggcuuagcguguguccuaaucuucucucugcguguagguaggccugugccgcaaacaagcuuaccaugggccagaucaucaccuucuuccaggaggugccccacgucaucgaggaggugaugaacaucgugcugaucgcccucagccugcuggccauccucaaggggaucuacaacgucgugaccugcggccuguucgggcugguguccuuccuccugcugugcggccgcagcugcuccacgaccuacaagggggucuacgagcuccagacccuggagcuggacauggcgagccucaacaugugcaugccgcuguccugcaccaagaacaacagccaccacuacaucauggugggcaacgagacgggccuggagcucacccugaccaacaccuccaucaucaaccacaaguucugcaaccugagcgacgcccacaagaagaaccucuacgaccacgcccugauguccaucaucagcacguuccaccuguccauccccaacuucaaccaguacgaggccaugagcugcgacuucaacgggggcaagaucuccgugcaguacaaccucagccacgccuacgcgaucgacgccgccaaccacugcgggaccaucgccaacggcguccugcagaccuucaugcggauggcguggggcggguccuacaucgcccuggacagcggcaagggguccugggacugcaucaugaccagcuaccaguaccucaucauccagaacacgaccugggaggaccacugccaguucucccgccccagccccaucggcuaccuggggcugcucagccagcggacccgcgacaucuacaucucccggcgccggcgcggcaccuucacguggacccugagcgacuccgagggcaacgagacccccgggggcuacugccugacccgguggaugcucaucgaggccgagcugaagugcuucgggaacacggccguggccaagugcaacgagaagcacgacgaggaguucugcgacaugcugcgccucuucgacuucugcaagcaggcgauccggcgccugaagaccccggcccagaugagcauccagcugaucaacaaggccgugaacgcccucaucaacgaccagcugaucaugaagaaccaccuccgggacaucaugggcauccccuacugcaacuacuccaaguacugcuaccugaaccacaccgucaccgggaagacgagccugccccgcugcugccugguguccaacggcagcuaccucaacgagacccacuucuccgacgacaucgagcagcaggccgacaacaugaucaccgagcugcugcagaaggaguacaucgaccggcagggcaagaccccgcucgggcugguggaccuguucgucuucagcacguccuucuaccugaucagcaucuuccuccaccuggugaagauccccacccaccgccacgugaucggcaagcccugccccaagccgcaccggcugaaccacauggggaucugcuccugcggccucuacaagcaccccgggguccccgugaaguggaagcgcugaggacuagucccuguucccagagcccacuuuuuuuucuuuuuuugaaauaaaauagccugucuuucagaucuaaaaaaaaaaaaaaaaaaaaaaaaaaaaaaaaaaaaaaaaaaaaaaaaaaaaaaaaaaaaaaaaaaaaaaaaaaaaaaaaaaaaaaaaaaaaaaaaaaaa

SEQ ID NO: 27187 - RNA, 1740 nt, Artificial Sequence
  mRNA product Design a-2 (A100) comprising derived and/or modified sequence from LASV(LASV003-NIG-2008;Clade II)__AIT17580__GPCmut4 (opt1)
aggagaguccgcucagccagguugcagaagcggcuuagcguguguccuaaucuucucucugcguguagguaggccugugccgcaaacaagcuuaccaugggccagaucaucaccuucuuccaggaggugccccacgucaucgaggaggugaugaacaucgugcugaucgcccucagccugcuggccauccucaaggggaucuacaacgucgcgaccugcggccuguucgggcugguguccuuccuccugcugugcggccgcagcugcuccacgaccuacaaggggguguacgagcuccagacccuggagcuggacauggccagccucaacaugugcaugccgcuguccugcaccaagaacaacagccaccacuacaucauggucggcaacgagacgggccuggagcucacccugaccaacaccuccaucaucaaccacaaguucugcaaccugagcgacgcccacaagaagaaccucuacgaccacgcccugauguccaucaucagcacguuccaccuguccauccccaacuucaaccaguacgaggccaugagcugcgacuucaacgggggcaagaucuccgugcaguacaaccucagccacaccuacgcgguggacgccgccaaccacugcgggaccaucgccaacggcguccugcagaccuucaugcggauggcguggggcggguccuacaucgcccuggacagcggcaagggguccugggacugcaucaugacgagcuaccaguaccucaucauccagaacaccaccugggaggaccacugccaguucucccgccccagccccaucggcuaccuggggcugcucagccagcggacccgcgacaucuacaucucccggcgccggcgcggcacguucaccuggacccugagcgacuccgagagcaacgagaccccgggcggguacugccugacgcgguggaugcucaucgaggccgagcugaagugcuucggcaacaccgccguggccaagugcaacgagaagcacgacgaggaguucugcgacaugcugcgccucuucgacuucugcaagcaggcgauccggcgccugaaggcccccgcccagauguccauccagcugaucaacaaggccgugaacgcccucaucaacgaccagcugaucaugaagaaccaccuccgggacaucauggggauccccuacugcaacuacagcaaguacugcuaccugaaccacaccgucaccggccgcacgucccugccccggugcugccuggugagcaacggguccuaccucaacgagacccacuucagcgacgacaucgagcagcaggcggacaacaugaucaccgagcugcugcagaaggaguacauggaccgccagggcaagaccccgcucggccugguggaccuguucgucuucuccacgagcuucuaccugaucuccaucuuccuccaccuggugaagauccccacccaccggcacgugaucgggaagcccugccccaagccgcaccgccugaaccacaugggcaucugcagcugcgggcucuacaagcaccccggcguccccgugaaguggaagcggugaggacuagucccuguucccagagcccacuuuuuuuucuuuuuuugaaauaaaauagccugucuuucagaucuaaaaaaaaaaaaaaaaaaaaaaaaaaaaaaaaaaaaaaaaaaaaaaaaaaaaaaaaaaaaaaaaaaaaaaaaaaaaaaaaaaaaaaaaaaaaaaaaaaaa

SEQ ID NO: 27188 - RNA, 1740 nt, Artificial Sequence
  mRNA product Design a-2 (A100) comprising derived and/or modified sequence from LASV(LASV035-NIG-2009;Clade II)__AIT17588__GPCmut4 (opt1)
aggagaguccgcucagccagguugcagaagcggcuuagcguguguccuaaucuucucucugcguguagguaggccugugccgcaaacaagcuuaccaugggccagaucaucaccuucuuccaggaggugccccacgucaucgaggaggugaugaacaucgugcugaucgcccucagccugcuggccauccucaaggggaucuacaacgucgcgaccugcggccuguucgggcugguguccuuccuccugcugugcggccgcagcugcuccacgaccuacaaggggguguacgagcuccagacccuggagcuggacauggccagccucaacaugugcaugccgcuguccugcaccaagaacaacagccaccacuacaucauggucggcaacgagacgggccuggagcucacccugaccaacaccuccaucaucaaccacaaguucugcaaccugagcgacgcccacaagaagaaccucuacgaccacgcccugauguccaucaucagcacguuccaccuguccauccccaacuucaaccaguacgaggccaugagcugcgacuucaacgggggcaagaucuccgugcaguacaaccucagccacgcguacgccguggacgccgccaaccacugcgggaccaucgcgaacggcguccugcagaccuucaugcggauggccuggggcggguccuacaucgcccuggacagcggcaagggguccugggacugcaucaugaccagcuaccaguaccucaucauccagaacacgaccugggaggaccacugccaguucucccgccccagccccaucggcuaccuggggcugcucagccagcggacccgcgacaucuacaucucccggcgccggcgcggcaccuucacguggacccugagcgacuccgagggcaacgagacccccgggggcuacugccugacccgguggaugcucaucgaggccgagcugaagugcuucgggaacacggccguggcgaagugcaacgagaagcacgacgaggaguucugcgacaugcugcgccucuucgacuucugcaagcaggccauccggcgccugaaggccccggcccagaugagcauccagcugaucaacaaggccgugaacgcgcucaucaacgaccagcugaucaugaagaaccaccuccgggacaucaugggcauccccuacugcaacuacuccaaguacugcuaccugaaccacaccgucaccgggaagaccagccugccccgcugcugccugguguccaacggcagcuaccucaacgagacgcacuucuccgacgacaucgagcagcaggccgacaacaugaucaccgagcugcugcagaaggaguacaucgaccggcagggcaagaccccgcucgggcugguggaccuguucgucuucagcaccuccuucuaccugaucagcaucuuccuccaccuggugaagauccccacgcaccgccacgugaucggcaagcccugccccaagccgcaccggcugaaccacauggggaucugcuccugcggccucuacaagcaccccgggguccccgugaaguggaagcgcugaggacuagucccuguucccagagcccacuuuuuuuucuuuuuuugaaauaaaauagccugucuuucagaucuaaaaaaaaaaaaaaaaaaaaaaaaaaaaaaaaaaaaaaaaaaaaaaaaaaaaaaaaaaaaaaaaaaaaaaaaaaaaaaaaaaaaaaaaaaaaaaaaaaaa

SEQ ID NO: 27189 - RNA, 1740 nt, Artificial Sequence
  mRNA product Design a-2 (A100) comprising derived and/or modified sequence from LASV(LASV1000-NIG-2009;Clade II)__AIT17782__GPCmut4 (opt1)
aggagaguccgcucagccagguugcagaagcggcuuagcguguguccuaaucuucucucugcguguagguaggccugugccgcaaacaagcuuaccaugggccagaucaucaccuucuuccaggaggugccccacgucaucgaggaggugaugaacaucgugcugaucgcccucagccugcuggccauccucaaggggaucuacaacgucgcgaccugcggccuguucgggcugguguccuuccuccugcugugcggccgcagcugcuccacgaccuacaaggggguguacgagcuccagacccuggagcuggacauggccagccucaacaugugcaugccgcuguccugcaccaagaacaacagccaccacuacaucauggucggcaacgagacgggccuggagcucacccugaccaacaccuccaucaucaaccacaaguucugcaaccugagcgacgcccacaagaagaaccucuacgaccacgcccugauguccaucaucagcacguuccaccuguccauccccaacuucaaccaguacgaggccaugagcugcgacuucaacgggggcaagaucuccgugcaguacaaccucagccacaccuacgcgguggacgccgccaaccacugcgggaccaucgccaacggcguccugcagaccuucaugcggauggcguggggcggguccuacaucgcccuggacagcggcaagggguccugggacugcaucaugacgagcuaccaguaccucaucauccagaacaccaccugggaggaccacugccaguucucccgccccagccccaucggcuaccuggggcugcucagccagcggacccgcgacaucuacaucucccggcgccggcgcggcacguucaccuggacccugagcgacuccgagggcaacgagacccccgggggcuacugccugacgcgguggaugcucaucgaggccgagcugaagugcuucgggaacaccgccguggccaagugcaacgagaagcacgacgaggaguucugcgacaugcugcgccucuucgacuucugcaagcaggcgaucaagcggcugaagaccccggcccagaugagcauccagcugaucaacaaggccgugaacgcccucaucaacgaccagcugaucaugaagaaccaccuccgcgacaucaugggcauccccuacugcaacuacuccaaguacugcuaccugaaccacaccgucacggggaagaccagccugccccggugcugccugguguccaacggcagcuaccucaacgagacccacuucuccgacgacaucgagcagcaggccgacaacaugaucaccgagcugcugcagaaggaguacaucgaccgccagggcaagacgccgcucgggcugguggaccuguucgucuucagcaccuccuucuaccugaucagcaucuuccuccaccuggugaagauccccacccaccggcacguggucggcaagcccugccccaagccgcaccgccugaaccacauggggaucugcuccugcggccucuacaagcaccccggggugcccgugaaguggaagcggugaggacuagucccuguucccagagcccacuuuuuuuucuuuuuuugaaauaaaauagccugucuuucagaucuaaaaaaaaaaaaaaaaaaaaaaaaaaaaaaaaaaaaaaaaaaaaaaaaaaaaaaaaaaaaaaaaaaaaaaaaaaaaaaaaaaaaaaaaaaaaaaaaaaaa

SEQ ID NO: 27190 - RNA, 1740 nt, Artificial Sequence
  mRNA product Design a-2 (A100) comprising derived and/or modified sequence from LASV(LASV221-NIG-2010;Clade II)__AIT17624__GPCmut4 (opt1)
aggagaguccgcucagccagguugcagaagcggcuuagcguguguccuaaucuucucucugcguguagguaggccugugccgcaaacaagcuuaccaugggccagaucaucaccuucuuccaggaggugccccacgucaucgaggaggugaugaacaucgugcugaucgcccucagccugcuggccauccucaaggggaucuacaacgucgcgaccugcggccuguucgggcugguguccuuccuccugcugugcggccgcagcugcuccacgaccuacaaggggguguacgagcuccagacccuggagcuggacauggccagccucaacaugugcaugccgcuguccugcaccaagaacaacagccaccacuacaucauggucggcaacgagacgggccuggagcucacccugaccaacaccuccaucaucaaccacaaguucugcaaccugagcgacgcccacaagaagaaccucuacgaccacgcccugauguccaucaucagcacguuccaccuguccauccccaacuucaaccaguacgaggccaugagcugcgacuucaacgggggcaagaucuccgugcaguacaaccucagccacaccuacgcgaucgacgccgccaaccacugcgggaccaucgccaacggcgugcugcagaccuucaugcggauggcguggggcggguccuacaucgcccuggacagcggcaagggguccugggacugcaucaugacgagcuaccaguaccucaucauccagaacaccaccugggaggaccacugccaguucucccgccccagccccaucggcuaccuggggcugcucagccagcggacccgcgacaucuacaucucccggcgccggcgcggcacguucaccuggacccugagcgacuccgagggcaacgagacccccgggggcuacugccugacgcgguggaugcucaucgaggccgagcugaagugcuucgggaacaccgccgucgccaagugcaacgagaagcacgacgaggaguucugcgacaugcugcgccucuucgacuucugcaagcaggcgauccggcgccugaagaccccggcccagaugagcauccagcugaucaacaaggccgugaacgcccucaucaacgaccagcugaucaugaagaaccaccuccgggacaucaugggcauccccuacugcaacuacuccaaguacugcuaccugaaccacaccgugacggggaagaccagccugccccgcugcugccuggucuccaacggcagcuaccucaacgagacccacuucuccgacgacaucgagcagcaggccgacaacaugaucaccgagaugcugcagaaggaguacauggaccggcagggcaagacgccgcuggggcucguggaccuguucguguucagcaccuccuucuaccugaucagcaucuuccugcaccucgucaagauccccacccaccgccacgugaucggcaagcccugccccaagccgcaccggcugaaccacauggggaucugcuccugcggccuguacaagcaccccggggugcccgucaaguggaagcgcugaggacuagucccuguucccagagcccacuuuuuuuucuuuuuuugaaauaaaauagccugucuuucagaucuaaaaaaaaaaaaaaaaaaaaaaaaaaaaaaaaaaaaaaaaaaaaaaaaaaaaaaaaaaaaaaaaaaaaaaaaaaaaaaaaaaaaaaaaaaaaaaaaaaaa

SEQ ID NO: 27191 - RNA, 1740 nt, Artificial Sequence
  mRNA product Design a-2 (A100) comprising derived and/or modified sequence from LASV(LASV237-NIG-2010;Clade II)__AIT17638__GPCmut4 (opt1)
aggagaguccgcucagccagguugcagaagcggcuuagcguguguccuaaucuucucucugcguguagguaggccugugccgcaaacaagcuuaccaugggccagaucaucaccuucuuccaggaggugccccacgucaucgaggaggugaugaacaucgugcugaucgcccucagccugcuggccauccucaaggggaucuacaacgucgcgaccugcggccuguucgggcugguguccuuccuccugcugugcggccgcagcugcuccacgaccuacaaggggguguacgagcuccagacccuggagcuggacauggccagccucaacaugugcaugccgcuguccugcaccaagaacaacagccaccacuacaucauggucggcaacgagacgggccuggagcucacccugaccaacaccuccaucaucaaccacaaguucugcaaccugagcgacgcccacaagaaggaccucuacgaccacgcccugauguccaucaucagcacguuccaccuguccauccccaacuucaaccaguacgaggccaugagcugcgacuucaacgggggcaagaucuccgugcaguacaaccucagccacaccuacgcgguggacgccgccaaccacugcgggaccaucgccaacggcguccugcagaccuucaugcggauggcguggggcggguccuacaucgcccuggacagcggcaagggguccugggacugcaucaugacgagcuaccaguaccucaucauccagaacaccaccugggaggaccacugccaguucucccgccccagccccaucggcuaccuggggcugcucagccagcggacccgcgacaucuacaucucccggcgccggcgcggcacguucaccuggacccugagcgacuccgagggcaacgagacccccgggggcuacugccugacgcgguggaugcucaucgaggccgagcugaagugcuucgggaacaccgccguggccaagugcaacgagaagcacgacgaggaguucugcgacaugcugcgccucuucgacuucugcaagcaggcgauccggcgccugaagaccccggcccagaugagcauccagcugaucaacaaggccgugaacgcccucaucaacgaccagcugaucaugaagaaccaccuccgggacaucaugggcauccccuacugcaacuacuccaaguacugcuaccugaaccacaccgucacggggaagaccagccugccccgcugcugccugguguccaacggcagcuaccucaacgagacccacuucuccgacgacaucgagcagcaggccgacaacaugaucaccgagcugcugcagaaggaguacauggaccggcagggcaagacgccgcucgggcugguggaccuguucgucuucagcaccuccuucuaccugaucagcaucuuccuccaccugaucaagauccccacccaccgccacaucaccggcaagcccugccccaagccgcaccggcugaaccacauggggaucugcuccugcggccucuacaagcaccccggggugcccgugaaguggaagcgcugaggacuagucccuguucccagagcccacuuuuuuuucuuuuuuugaaauaaaauagccugucuuucagaucuaaaaaaaaaaaaaaaaaaaaaaaaaaaaaaaaaaaaaaaaaaaaaaaaaaaaaaaaaaaaaaaaaaaaaaaaaaaaaaaaaaaaaaaaaaaaaaaaaaaa

SEQ ID NO: 27192 - RNA, 1740 nt, Artificial Sequence
  mRNA product Design a-2 (A100) comprising derived and/or modified sequence from LASV(LASV253-NIG-2011;Clade II)__AIT17670__GPCmut4 (opt1)
aggagaguccgcucagccagguugcagaagcggcuuagcguguguccuaaucuucucucugcguguagguaggccugugccgcaaacaagcuuaccaugggccagaucaucaccuucuuccaggaggugccccacgucaucgaggaggugaugaacaucgugcugaucgcccucagccugcuggccauccucaaggggaucuacaacgucgcgaccugcggccuguucgggcugguguccuuccuccugcugugcggccgcagcugcuccacgaccuacaaggggguguacgagcuccagacccuggagcuggacauggccagccucaacaugugcaugccgcuguccugcaccaagaacaacagccaccacuacaucauggucggcaacgagacgggccuggagcucacccugaccaacaccuccaucaucaaccacaaguucugcaaccugagcgacgcccacaagaagaaccucuacgaccacgcccugauguccaucaucagcacguuccaccuguccauccccaacuucaaccaguacgaggccaugagcugcgacuucaacgggggcaagaucuccgugcaguacaaccucagccacaccuacgcgguggacgccgccaaccacugcgggaccaucgccaacggcguccugcagaccuucaugcggauggcguggggcggguccuacaucgcccuggacagcggcaagggguccugggacugcaucaugacgagcuaccaguaccucaucauccagaacaccaccugggaggaccacugccaguucucccgccccagccccaucggcuaccuggggcugcucagccagcggacccgcgacaucuacaucucccggcgccggcgcggcacguucaccuggacccugagcgacuccgagggcaacgagacccccgggggcuacugccugacgcgguggaugcucaucgaggccgagcugaagugcuucgggaacaccgccguggccaagugcaacgagaagcacgacgaggaguucugcgacaugcugcgccucuucgacuucugcaagcaggcgauccggcgccugaaggccccggcccagaugagcauccagcugaucaacaaggccgugaacgcccucaucaacgaccagcugaucaugaagaaccaccuccgggacaucaugggcauccccuacugcaacuacuccaaguacugcuaccugaaccacaccgucaccgggcgcacgagccugccccggugcugccugguguccaacggcagcuaccucaacgagacccacuucuccgacgacaucgagcagcaggcggacaacaugaucaccgagcugcugcagaaggaguacaucgaccgccagggcaagaccccgcucgggcugguggaccuguucgucuucagcacguccuucuaccugaucagcaucuuccuccaccuggugaagauccccacccaccggcacaucaucggcaagcccugccccaagccgcaccgccugaaccacauggggaucugcuccugcggccucuacaagcaccccggggugcccgucaaguggaagcggugaggacuagucccuguucccagagcccacuuuuuuuucuuuuuuugaaauaaaauagccugucuuucagaucuaaaaaaaaaaaaaaaaaaaaaaaaaaaaaaaaaaaaaaaaaaaaaaaaaaaaaaaaaaaaaaaaaaaaaaaaaaaaaaaaaaaaaaaaaaaaaaaaaaaa

SEQ ID NO: 27193 - RNA, 1740 nt, Artificial Sequence
  mRNA product Design a-2 (A100) comprising derived and/or modified sequence from LASV(LASV254-NIG-2011;Clade II)__AIT17674__GPCmut4 (opt1)
aggagaguccgcucagccagguugcagaagcggcuuagcguguguccuaaucuucucucugcguguagguaggccugugccgcaaacaagcuuaccaugggccagaucaucaccuucuuccaggaggugccccacgucaucgaggaggugaugaacaucgugcugaucgcccucagccugcuggccauccucaaggggaucuacaacgucgcgaccugcggccuguucgggcugguguccuuccuccugcugugcggccgcagcugcuccacgaccuacaaggggguguacgagcuccagacccuggagcuggacaugaccaaccucaacaugugcaugccgcugagcugcacgaagaacaacucccaccacuacaucauggucggcaacgagaccggccuggagcucacccugaccaacacgagcaucaucaaccacaaguucugcaaccuguccgacgcccacaagaagaaccucuacaaccacgcccugaugagcaucaucuccaccuuccaccugagcauccccaacuucaaccaguacgaggccauguccugcgacuucaacgggggcaagaucagcgugcaguacaaccucucccacagcuacgccguggacgcggccaaccacugcgggaccaucgccaacggcguccugcagaccuucaugcggauggccuggggcggguccuacaucgcgcuggacagcggcaaggggaacugggacugcaucaugacguccuaccaguaccucaucauccagaacaccaccugggaggaccacugccaguucagccgccccucccccaucggcuaccuggggcugcucagccagcggacccgcgacaucuacaucagccggcgccggcgcggcacguucaccuggacccuguccgacagcgagggcaacgagacccccgggggcuacugccugacgcgguggaugcucaucgaggccgagcugaagugcuucgggaacaccgccguggccaagugcaacgagaagcacgacgaggaguucugcgacaugcugcgccucuucgacuucugcaagcaggccauccggcgccugaagaccccggcgcaggccaacauccagcugaucaacaaggccgugaacgcccucaucaacgaccagcugaucaugaagaaccaccuccgggacaucaugggcauccccuacugcaacuacuccaaguacugcuaccugaaccacaccgucacggggaagaccagccugccccgcugcugccugguguccaacggcagcuaccucaacgagacccacuucuccgacgacaucgagcagcaggccgacaacaugaucaccgagcugcugcagaaggaguacauggaccggcagggcaagacgccgcucgggcugguggaccuguucgucuucagcaccuccuucuaccugaucagcaucuuccuccaccuggugaagauccccacccaccgccacgugaucggcaagcccugccccaagccgcaccggcugaaccacauggggaucugcuccugcggccucuacaagcaccccgggguccccgugaaguggaagcgcugaggacuagucccuguucccagagcccacuuuuuuuucuuuuuuugaaauaaaauagccugucuuucagaucuaaaaaaaaaaaaaaaaaaaaaaaaaaaaaaaaaaaaaaaaaaaaaaaaaaaaaaaaaaaaaaaaaaaaaaaaaaaaaaaaaaaaaaaaaaaaaaaaaaaa

SEQ ID NO: 27194 - RNA, 1740 nt, Artificial Sequence
  mRNA product Design a-2 (A100) comprising derived and/or modified sequence from LASV(Nig08-A19;Clade III)__ADU56618__GPCmut4 (opt1)
aggagaguccgcucagccagguugcagaagcggcuuagcguguguccuaaucuucucucugcguguagguaggccugugccgcaaacaagcuuaccaugggccagaucgugaccuucuuccaggaggucccccacgugaucgaggaggugaugaacaucguccugaucgcccucagcauccuggccauccugaaggggcucuacaacaucgcgaccugcggccugaucgggcuggugacguuccuccugcuguccggccgcagcugcuccaugaccuacaaggggguguacgagcuccagacccuggagcugaacaugaacacccucaacaugugcaugccgcugagcugcacgaagaacaacucccaccacuacaucauggucggcaacgagaccggccuggagcucacccugaccaacacgagccugcuccaccacaaguucugcaaccuguccgacgcccacaagaagaaccuguacgaccacacccucaugagcaucaucuccaccuuccaccugagcauccccaacuucaaccaguacgaggccauguccugcgacuucaacgggggcaagaucaccgugcaguacaaccugagccacuccuacgccaucgacgccgcgaaccacugcgggacgguggccaacggcguccuccagaccuucaugcggauggccuggggcgggagcuacaucgcccuggacuccggccgcgggaagugggacugcaucaugaccagcuaccaguaccugaucauccagaacaccacgugggaggaccacugccaguucucccggcccagccccaucggcuaccucgggcugcugucccagcgcacccgggacaucuacaucagccgccggcgccggggcaccuucaccuggacgcucagcgacuccgagggcaacgagacccccgggggcuacugccugacccgcuggaugcugaucgaggcggagcucaagugcuucgggaacaccgccguggccaagugcaacgagaagcacgacgaggaguucugcgacaugcugcggcuguucgacuucugcaagcaggccauccgccggcucaaggccccggcgcagaugagcauccagcugaucaacaaggccgugaacgcccugaucaacgaccagcucaucaugaagaaccaccuccgcgacaucaugggcauccccuacugcaacuacuccaaguacugcuaccugaaccacacgagcaccgggcggaccucccugccccgcugcugccuggucagcaacggcuccuaccugaacgagacccacuucagcgacgacaucgagcagcaggccgacaacaugaucacggagaugcuccagaaggaguaccuggaccggcagggcaagaccccgcuggggcugguggaccucuucguguucuccaccagcuucuaccugaucuccaucuuccugcaccucgucaagauccccacccaccgccacaucgugggcaagcccugccccaagccgcaccggcugaaccacauggggaucugcagcugcggccuguacaagcagcccggggugcccguccgcuggaagcggugaggacuagucccuguucccagagcccacuuuuuuuucuuuuuuugaaauaaaauagccugucuuucagaucuaaaaaaaaaaaaaaaaaaaaaaaaaaaaaaaaaaaaaaaaaaaaaaaaaaaaaaaaaaaaaaaaaaaaaaaaaaaaaaaaaaaaaaaaaaaaaaaaaaaa

SEQ ID NO: 27195 - RNA, 1743 nt, Artificial Sequence
  mRNA product Design a-2 (A100) comprising derived and/or modified sequence from LASV(G1180-SLE-2010;Clade IV)__AIT17168__GPCmut4 (opt1)
aggagaguccgcucagccagguugcagaagcggcuuagcguguguccuaaucuucucucugcguguagguaggccugugccgcaaacaagcuuaccaugggccagaucgugaccuucuuccaggaggucccccacgugaucgaggaggugaugaacaucguccugaucgcccucagcauccuggccgugcugaaggggcucuacaacuucgcgaccugcggccugguggggcugcucacguuccugcugcucugcggccgcuccugcaccgccagccgguacaagggggucuacgagcugcagacccuggagcucaacauggagacccugaacaugugcaugccgcuguccugcacgaagaacaacagccaccacuacaucauggugggcaacgagaccggccucgagcugacccugaccaacacguccaucaucaaccacaaguucugcaaccucagcgacgcccacaagaagaaccuguacgaccacgcccugauguccaucaucagcaccuuccaccucuccauccccaacuucaaccaguacgaggccaugagcugcgacuucaacgggggcaagaucuccgugcaguacaaccugagccacuccuacgcgggggacgccgccaaccacugcggcaccgucgccaacggggugcugcagaccuucaugcgcauggcguggggcggcagcuacaucgcccucgacuccgggcacggcagcugggacugcaucaugacguccuaccaguaccugaucauccagaacaccaccugggaggaccacugccaguucagccggcccucccccaucggguaccugggccuccugagccagcgcacccgggacaucuacaucagccgccggcgccggggcacguucaccuggacccuguccgacagcgaggggaaggacaccccgggcggguacugccucacgcgcuggaugcugaucgaggccgagcugaagugcuucggcaacaccgccguggccaagugcaacgagaagcacgacgaggaguucugcgacaugcuccggcuguucgacuucugcaagcaggcgauccagcgccugaaggcccccgcccagauguccauccagcucaucaacaaggccgucaacgcccugaucaacgaccagcugaucaugaagaaccaccuccgggacaucauggggauccccuacugcaacuacagcaaguacugcuaccugaaccacaccaccacgggcaagaccucccugcccaagugcugccucgugagcaacggcuccuaccugaacgagacccacuucagcgacgacaucgagcagcaggcggacaacaugaucaccgagaugcugcagaaggaguacauggagcgccaggggaagacgccgcucggccugguggaccuguucgucuucuccaccagcuucuaccugaucuccaucuuccuccaccuggugaagauccccacccaccggcacaucgugggcaagagcugccccaagccccaccgccugaaccacauggggaucugcuccugcgggcucuacaagcagccgggcguccccgugaaguggaagcggugaggacuagucccuguucccagagcccacuuuuuuuucuuuuuuugaaauaaaauagccugucuuucagaucuaaaaaaaaaaaaaaaaaaaaaaaaaaaaaaaaaaaaaaaaaaaaaaaaaaaaaaaaaaaaaaaaaaaaaaaaaaaaaaaaaaaaaaaaaaaaaaaaaaaa

SEQ ID NO: 27196 - RNA, 1743 nt, Artificial Sequence
  mRNA product Design a-2 (A100) comprising derived and/or modified sequence from LASV(G1442-SLE-2011;Clade IV)__AIT17180__GPCmut4 (opt1)
aggagaguccgcucagccagguugcagaagcggcuuagcguguguccuaaucuucucucugcguguagguaggccugugccgcaaacaagcuuaccaugggccagaucgugaccuucuuccaggaggucccccacgugaucgaggaggugaugaacaucguccugaucgcccucagcauccuggccgugcugaaggggcucuacaacguggcgaccugcggccugaucgggcuggucacguuccuccugcugugcggccgcuccugcaccaccacccucuacaaggggguguacgagcugcagacgcuggagcucaacauggagacccugaacaugugcaugccgcugagcugcaccaagaacaacucccaccacuacauccgggugggcaacgagaccggccucgagcugacgcugaccaacaccagcaucaucaaccacaaguucugcaaccucuccgacgcccacaagaagaaccuguacgaccacgcccugaugagcaucaucuccaccuuccaccucagcauccccaacuucaaccaguacgaggccauguccugcgacuucaacgggggcaagaucagcguccaguacaaccugucccacagcuacgccggggacgcggccaaccacugcggcacgguggccaacggggugcugcagaccuucaugcgcauggccuggggcggcuccuacaucgcgcucgacagcgggcggggcaacugggacugcaucaugaccuccuaccaguaccugaucauccagaacaccacgugggacgaccacugccaguucagccgccccucccccaucggguaccugggccuccugagccagcggacccgcgacgucuacaucucccggcgccggcgcggcaccuucaccuggacgcugagcgacagcgaggggaaggacaccccgggcggguacugccucacccgguggaugcugaucgaggccgagcugaagugcuucggcaacaccgccguggccaagugcaacgagaagcacgacgaggaguucugcgacaugcuccgccuguucgacuucugcaagcaggccauccagcggcugaaggcgcccgcccagauguccauccagcucaucaacaaggccgugaacgcccugaucaacgaccagcugaucaugaagaaccaccuccgcgacaucauggggauccccuacugcaacuacagcaaguacugcuaccugaacaacacggccaccggcaagaccucccugcccaagugcugccucaucagcaacggcuccuaccugaacgagacccacuucagcgacgacaucgagcaggaggcggacaacaugaucacggagaugcugcagaaggaguacauggagcggcaggggaagaccccgcucggccuggucgaccuguucguguucuccaccagcuucuaccugaucuccaucuuccuccaccuggugaagauccccacccaccgccacaucgucggcaagagcugccccaagccccaccggcugaaccacauggggaucugcuccugcgggcucuacaagcagccgggcgugcccgugcgcuggaagcggugaggacuagucccuguucccagagcccacuuuuuuuucuuuuuuugaaauaaaauagccugucuuucagaucuaaaaaaaaaaaaaaaaaaaaaaaaaaaaaaaaaaaaaaaaaaaaaaaaaaaaaaaaaaaaaaaaaaaaaaaaaaaaaaaaaaaaaaaaaaaaaaaaaaaa

SEQ ID NO: 27197 - RNA, 1743 nt, Artificial Sequence
  mRNA product Design a-2 (A100) comprising derived and/or modified sequence from LASV(G3010-SLE-2013;Clade IV)__AIT17344__GPCmut4 (opt1)
aggagaguccgcucagccagguugcagaagcggcuuagcguguguccuaaucuucucucugcguguagguaggccugugccgcaaacaagcuuaccaugggccagaucgugaccuucuuccaggaggucccccacgugaucgaggaggugaugaacaucguccugaucgcccucagcauccuggccgugcugaaggggcucuacaacuucgcgaccugcggccugguggggcuggucacguuccuccugcugugcggccgcuccugcaccaccagccucuacaaggggguguacgagcugcagacccuggagcucaacauggagacgcugaacaugugcaugccgcuguccugcaccaagaacaacagccaccacuacaucauggugggcaacgagaccggccucgagcugacccugacgaacaccuccaucaucaaccacaaguucugcaaccucagcgacgcccacaagaagaaccuguacaaccacgcccugauguccaucaucagcaccuuccaccucuccauccccaacuucaaccaguacgaggccaugagcugcgacuucaacgggggcaagaucuccguccaguacaaccugagccacuccuacgccggggacgcggccagccacugcggcaccguggccaacggggugcugcagacguucaugcggauggccuggggcggcuccuacaucgcgcucgacagcggguacggcaagugggacugcaucaugaccuccuaccaguaccugaucauccagaacaccaccugggaggaccacugccaguucagccgccccucccccaucggguaccugggccuccugagccagcggacgcgcgacaucuacaucagccggcgccggcgcggcaccuucaccuggacccuguccgacagcgaggggaaggacacgccgggcggguacugccucacccgguggaugcugaucgaggccgagcugaagugcuucggcaacaccgccgucgccaagugcaacgagaagcacgacgaggaguucugcgacaugcuccgccuguucgacuucugcaagcaggccauccagcggcugaagacccccgcgcagauguccauccagcucaucaacaaggccgugaacgcccugaucaacgaccagcugaucaugaagaaccaccuccgcgacaucauggggauccccuacugcaacuacagcaaguacugcuaccugaaccacacgaccaccggcaagaccucccugcccaagugcugccucgugagcaacggcuccuaccugaacgagacgcacuucagcgacgacaucgagcagcaggccgacaacaugaucaccgagaugcugcagaaggaguacauggagcggcaggggaagaccccgcucggccuggucgaccuguucguguucuccaccagcuucuaccugaucuccaucuuccuccaccuggugaagauccccacgcaccgccacaucgucggcaagagcugccccaagccccaccggcugaaccacauggggaucugcuccugcgggcucuacaagcagccgggcgugcccgugcgcuggaagcggugaggacuagucccuguucccagagcccacuuuuuuuucuuuuuuugaaauaaaauagccugucuuucagaucuaaaaaaaaaaaaaaaaaaaaaaaaaaaaaaaaaaaaaaaaaaaaaaaaaaaaaaaaaaaaaaaaaaaaaaaaaaaaaaaaaaaaaaaaaaaaaaaaaaaa

SEQ ID NO: 27198 - RNA, 1743 nt, Artificial Sequence
  mRNA product Design a-2 (A100) comprising derived and/or modified sequence from LASV(G502-SLE-2009;Clade IV)__AIT17126__GPCmut4 (opt1)
aggagaguccgcucagccagguugcagaagcggcuuagcguguguccuaaucuucucucugcguguagguaggccugugccgcaaacaagcuuaccaugggccagaucgugaccuucuuccaggaggucccccacgugaucgaggaggugaugaacaucguccugaucgcccucagcauccuggccgugcugaaggggcucuacaacuucgcgaccugcggccugguggggcugcucacguuccugcugcucugcggccgcuccugcaccaccgggcuguacaagggcgucuacgagcugcagacccucgagcugaacauggagacgcugaacaugugcaugccgcucagcugcaccaagaacaacucccaccacuacaucauggugggcaacgagaccgggcuggagcugacccucacgaacaccagcaucaucaaccacaaguucugcaaccuguccgacgcccacaagaagaaccuguacgaccacgcccucaugagcaucaucuccaccuuccaccugagcauccccaacuucaaccaguacgaggccauguccugcgacuucaacggcgggaagaucagcgugcaguacaaccugucccacagcuacgccggcgacgcggccgaccacugcgggaccgucgccaacggcgugcuccagacguucaugcggauggccuggggcggguccuacaucgcgcuggacagcggccgcgggcggugggacugcaucaugaccuccuaccaguaccugaucauccagaacaccaccugggaggaccacugccaguucagccgccccucccccaucggcuaccucggccugcugagccagcggacgcgcgacaucuacaucucccggcgccggcgcgggaccuucaccuggacccucagcgacagcgagggcaaggacacgcccgggggcuacugccugacccgguggaugcugaucgaggccgagcucaagugcuucgggaacaccgccguggccaagugcaacgagaagcacgacgaggaguucugcgacaugcugcgccuguucgacuucugcaagcaggccauccagcggcucaaggcgccggcccagauguccauccagcugaucaacaaggccgucaacgcccugaucaacgaccagcucgugaugaagaaccaccuccgcgacaucaugggcauccccuacugcaacuacagccgguacugcuaccugaaccacaccacgaccggccgcaccucccugcccaagugcugccuggugagcaacggguccuaccugaacgagacccacuucagcgacgacaucgagcagcaggccgacaacaugaucacggagaugcuccagaaggaguacauggagcggcagggcaagaccccgcuggggcuggucgaccuguucguguucuccaccagcuucuaccucaucuccaucuuccugcaccuggugaagauccccacccaccgccacaucgucggcaagagcugccccaagccccaccggcucaaccacauggggaucugcuccugcggccuguacaagcagccgggcgugcccgugaaguggaagcgcugaggacuagucccuguucccagagcccacuuuuuuuucuuuuuuugaaauaaaauagccugucuuucagaucuaaaaaaaaaaaaaaaaaaaaaaaaaaaaaaaaaaaaaaaaaaaaaaaaaaaaaaaaaaaaaaaaaaaaaaaaaaaaaaaaaaaaaaaaaaaaaaaaaaaa

SEQ ID NO: 27199 - RNA, 1743 nt, Artificial Sequence
  mRNA product Design a-2 (A100) comprising derived and/or modified sequence from LASV(G733-SLE-2010;Clade IV)__AIT17154__GPCmut4 (opt1)
aggagaguccgcucagccagguugcagaagcggcuuagcguguguccuaaucuucucucugcguguagguaggccugugccgcaaacaagcuuaccaugggccagaucgugaccuucuuccaggaggucccccacgugaucgaggaggugaugaacaucguccugaucgcccucagcauccuggccgugcugaaggggcucuacaacuucgcgaccugcggcaucguggggcuggucuccuuccugcuccugugcggccgcagcugcacgaccucccuguacaaggggguguacgagcuccagacccuggagcugaacauggagacccucaacaugugcaugccgcugagcugcacgaagaacaacucccaccacuacaucauggugggcaacgagaccggccuggagcucacccugaccaacacgagcaucaucaaccacaaguucugcaaccuguccgacgcccacaagaagaaccucuacgaccacgcccugaugagcaucaucuccaccuuccaccugagcauccccaacuucaaccaguacgaggccauguccugcgacuucaacgggggcaagaucagcguccaguacaaccucucccacagcuacgccggggacgcggccaaccacugcggcaccaucgccaacggggugcugcagaccuucaugcggauggccuggggcggcuccuacaucgcgcuggacagcgggcgcgaccggugggacugcaucaugacguccuaccaguaccucaucauccagaacaccaccugggaggaccacugccaguucagccgccccucccccaucggcuaccuggggcugcucagccagcggacccgcgacaucuacaucagccggcgccggcgcggcacguucaccuggacccuguccgacagcgagggcaaggacacccccgggggcuacugccugacgcgguggaugcucaucgaggccgagcugaagugcuucgggaacaccgccguggccaagugcaacgagaagcacgacgaggaguucugcgacaugcugcgccucuucgacuucugcaagcaggccauccagcggcugaaggcgccggcccagauguccauccagcugaucaacaaggccgucaacgcccucaucaacgaccagcugaucaugaagaaccaccuccgcgacaucaugggcauccccuacugcaacuacagcaaguacugcuaccugaaccacaccaccacggggaagaccucccugcccaagugcugccuggugagcaacggcuccuaccucaacgagacccacuucagcgacgacaucgagcagcaggccgacaacaugaucaccgagaugcugcagaaggaguacauggagcggcagggcaagacgccgcuggggcucguggaccuguucgucuucuccaccagcuucuaccugaucuccaucuuccugcaccucgugaagauccccacccaccgccacguggucggcaagagcugccccaagccccaccggcugaaccacauggggaucugcuccugcggccuguacgggcagccgggcgugcccgugaaguggaagcgcugaggacuagucccuguucccagagcccacuuuuuuuucuuuuuuugaaauaaaauagccugucuuucagaucuaaaaaaaaaaaaaaaaaaaaaaaaaaaaaaaaaaaaaaaaaaaaaaaaaaaaaaaaaaaaaaaaaaaaaaaaaaaaaaaaaaaaaaaaaaaaaaaaaaaa

SEQ ID NO: 27200 - RNA, 1743 nt, Artificial Sequence
  mRNA product Design a-2 (A100) comprising derived and/or modified sequence from MOPV/LASV reassortant(IGS-1;Clade IV)__AFY05576__GPCmut4 (opt1)
aggagaguccgcucagccagguugcagaagcggcuuagcguguguccuaaucuucucucugcguguagguaggccugugccgcaaacaagcuuaccaugggccagaucgugaccuucuuccaggaggucccccacgugaucgaggaggugaugaacaucguccugaucgcccucagcgugcuggccgugcugaaggggcucuacaacuucgcgaccugcggccuggucgggcuggugacguuccuccugcugugcggccgcuccugcaccaccagccucuacaaggggguguacgagcugcagacccuggagcucaacauggagacgcugaacaugugcaugccgcuguccugcaccaagaacaacagccaccacuacaucauggucggcaacgagaccggccucgagcugacccugacgaacaccuccaucaucaaccacaaguucugcaaccucagcgacgcccacaagaagaaccuguacgaccacgcccugauguccaucaucagcaccuuccaccucuccauccccaacuucaaccaguacgaggccaugagcugcgacuucaacgggggcaagaucuccgugcaguacaaccugagccacuccuacgccggggacgcggccaaccacugcggcaccguggccaacgggguccugcagacguucaugcggauggccuggggcggcagcuacaucgcgcucgacuccgggcgcggcaacugggacugcaucaugaccagcuaccaguaccugaucauccagaacaccaccugggaggaccacugccaguucucccggcccagccccaucggguaccugggccuccugucccagcgcacgcgggacaucuacaucagccgccggcgccggggcaccuucaccuggacccugagcgacuccgagggggaggacacgccgggcggguacugccucacccgcuggaugcugaucgaggccgagcugaagugcuucggcaacaccgccguggccaagugcaacgagaagcacgacgaggaguucugcgacaugcuccggcuguucgacuucugcaagcaggccauccagcgccugaaggcgcccgcccagaugagcauccagcucaucaacaaggccgugaacgcccugaucaacgaccagcugaucaugaagaaccaccuccgggacaucauggggauccccuacugcaacuacuccaaguacugcuaccugaaccacaccacgaccggccgcaccagccugcccaagugcugccucgucuccaacggcagcuaccugaacgagacccacuucuccgacgacaucgagcagcaggccgacaacaugaucacggagaugcugcagaaggaguacauggagcggcaggggaagaccccgcucggccugguggaccuguucguguucagcaccuccuucuaccugaucagcaucuuccuccaccuggucaagauccccacccaccgccacaucguggggaaguccugccccaagccccaccggcugaaccacaugggcaucugcagcugcgggcucuacaagcagccgggcgugcccgucaaguggaagcgcugaggacuagucccuguucccagagcccacuuuuuuuucuuuuuuugaaauaaaauagccugucuuucagaucuaaaaaaaaaaaaaaaaaaaaaaaaaaaaaaaaaaaaaaaaaaaaaaaaaaaaaaaaaaaaaaaaaaaaaaaaaaaaaaaaaaaaaaaaaaaaaaaaaaaa

SEQ ID NO: 27201 - RNA, 1743 nt, Artificial Sequence
  mRNA product Design a-2 (A100) comprising derived and/or modified sequence from LASV(LM765-SLE-2012;Clade IV)__AIT17814__GPCmut4 (opt1)
aggagaguccgcucagccagguugcagaagcggcuuagcguguguccuaaucuucucucugcguguagguaggccugugccgcaaacaagcuuaccaugggccagaucgugaccuucuuccaggaggucccccacgugaucgaggaggugaugaacaucguccugaucgcccucagcauccuggccgugcugaaggggcucuacaacuucgcgaccugcggccugguggggcuggucacguuccuccugcugugcggccgcuccugcaccaccagccucuacaaggggguguacgagcugcagacccuggagcucaacauggagacgcugaacaugugcaugccgcuguccugcaccaagaacaacagccaccacuacaucauggugggcaacgagaccggccucgagcugacccugacgaacaccuccaucaucgaccacaaguucugcaaccucagcgacgcccaccggaagaaccuguacgaccacgcccugauguccaucaucagcaccuuccaccucuccauccccaacuucaaccaguacgaggccaugagcugcgacuucaacgggggcaagaucuccguccaguacaaccugagccacuccuacgccaaggacgcggccgaccacugcgggaccguggccaacggcgugcugcagacguucaugcgcauggccuggggcgggagcuacaucgcgcucgacuccggccgggggcgcugggacugcaucaugaccagcuaccaguaccugaucauccagaacaccaccugggaggaccacugccaguucucccggcccagccccaucggcuaccuggggcuccugucccagcgcacgcgggacaucuacaucagccgccggcgccggggcaccuucaccuggacccugagcgacuccgagggcaaggacacgcccgggggcuacugccucacccgcuggaugcugaucgaggccgagcugaagugcuucgggaacaccgccgucgccaagugcaacgagaagcacgacgaggaguucugcgacaugcuccggcuguucgacuucugcaagcaggccauccagcgccugaaggcgccggcccagaugagcauccagcucaucaacaaggccgugaacgcccugaucaacgaccagcugaucaugaagaaccaccuccgggacaucaugggcauccccuacugcaacuacuccaaguacugcuaccugaaccacaccacgaccgggaagaccagccugcccaagugcugccucguguccaacggcagcuaccugaacgagacccacuucuccgacgacaucgagcagcaggccgacaacaugaucacggagaugcugcagaaggaguacauggagcgccagggcaagaccccgcucgggcuggucgaccuguucguguucagcaccuccuucuaccugaucagcaucuuccuccaccuggugaagauccccacccaccggcacaucgucggcaagcccugccccaagccgcaccgccugaaccacauggggaucugcuccugcggccucuacaagcagcccggggugcccgugaaguggaagcggugaggacuagucccuguucccagagcccacuuuuuuuucuuuuuuugaaauaaaauagccugucuuucagaucuaaaaaaaaaaaaaaaaaaaaaaaaaaaaaaaaaaaaaaaaaaaaaaaaaaaaaaaaaaaaaaaaaaaaaaaaaaaaaaaaaaaaaaaaaaaaaaaaaaaa

SEQ ID NO: 27202 - RNA, 1743 nt, Artificial Sequence
  mRNA product Design a-2 (A100) comprising derived and/or modified sequence from LASV(LM776-SLE-2012;Clade IV)__AIT17824__GPCmut4 (opt1)
aggagaguccgcucagccagguugcagaagcggcuuagcguguguccuaaucuucucucugcguguagguaggccugugccgcaaacaagcuuaccaugggccagaucgugaccuucuuccaggaggucccccacgugaucgaggaggugaugaacaucguccugaucgcccucagcauccuggccgugcugaaggggcucuacaacuucgcgaccugcggccugguggggcuggucacguuccuccugcugugcggccgcuccugcaccaccagcguguacaaggggguguacgagcuccagacccuggagcugaacauggagacgcucaacaugugcaugccgcuguccugcaccaagaacaacagccaccacuacaucauggucggcaacgagaccggccuggagcucacccugacgaacaccuccaucaucaaccacaaguucugcaaccugagcgacgcccacaagaagaaccucuacgaccacgcccugauguccaucaucagcaccuuccaccuguccauccccaacuucaaccaguacgaggccaugagcugcgacuucaacgggggcaagaucuccgugcaguacaaccucagccacuccuacgccggggacgcggccaaccacugcggcaccguggccaacgggguccugcagacguucaugcggauggccuggggcggcagcuacaucgcgcuggacuccgggcacggcaagugggacugcaucaugaccagcuaccaguaccucaucauccagaacaccaccugggaggaccacugccaguucucccgccccagccccaucggguaccugggccugcucucccagcggacgcgcgacaucuacaucagccggcgccggcgcggcaccuucaccuggacccugagcgacuccgaggggaaggacacgccgggcggguacugccugacccgguggaugcucaucgaggccgagcugaagugcuucggcaacaccgccguggccaagugcaacgagaagcacgacgaggaguucugcgacaugcugcgccucuucgacuucugcaagcaggccauccagcggcugaaggcgcccgcccagaugagcauccagcugaucaacaaggccgugaacgcccucaucaacgaccagcugaucaugaagaaccaccuccgcgacaucauggggauccccuacugcaacuacuccaaguacugcuaccugaaccacaccacgaccggcaagaccagccugcccaagugcugccuggucuccaacggcagcuaccucaacgagacccacuucuccgacgacaucgagcagcaggccgacaacaugaucacggagaugcugcagaaggaguacauggagcggcaggggaagaccccgcugggccucguggaccuguucguguucagcaccuccuucuaccugaucagcaucuuccugcaccucgucaagauccccacccaccgccacaucguggggaaguccugccccaagccccaccggcugaaccacaugggcaucugcagcugcgggcuguacaagcagccgggcgugcccguccgcuggaagcggugaggacuagucccuguucccagagcccacuuuuuuuucuuuuuuugaaauaaaauagccugucuuucagaucuaaaaaaaaaaaaaaaaaaaaaaaaaaaaaaaaaaaaaaaaaaaaaaaaaaaaaaaaaaaaaaaaaaaaaaaaaaaaaaaaaaaaaaaaaaaaaaaaaaaa

SEQ ID NO: 27203 - RNA, 1743 nt, Artificial Sequence
  mRNA product Design a-2 (A100) comprising derived and/or modified sequence from LASV(Mad39;Clade IV)__ANH09722__GPCmut4 (opt1)
aggagaguccgcucagccagguugcagaagcggcuuagcguguguccuaaucuucucucugcguguagguaggccugugccgcaaacaagcuuaccaugggccagaucgugaccuucuuccaggaggucccccacgugaucgaggaggugaugaacaucguccugaucgcccucagcauccuggccgugcugaaggggcucuacaacguggcgaccugcggccugaucgggcuggucacguuccuccugcugugcggccgcuccugcaccaccacccucuacaaggggguguacgagcugcaggcccuggagcucaacauggagacgcugaacaugugcaugccgcugagcugcaccaagaacaacucccaccacuacauccgggugggcaacgagaccggccucgagcugacccugacgaacaccagccucaucaaccacaaguucugcaaccuguccgacgcccacaagaagaaccuguacgaccacgcccucaugagcaucaucuccaccuuccaccugagcauccccaacuucaaccaguacgaggccauguccugcgacuucaacgacgggaagaucagcguccaguacaaccugucccacaccuacgcgggcgacacggccaaccacugcgggaccguggccaacggcgugcuccagaccuucaugcgcauggccuggggcgggagcuacaucgcgcuggacuccggccgcgggggcugggacugcaucaugaccagcuaccaguaccugaucauccagaacacgaccugggaggaccacugccaguucucccggcccagccccaucggguaccucggccugcugucccagcggacccgcgacaucuacaucagccggcgccggcgcggcaccuucacguggacccucuccgacagcgaggggaaggacaccccgggcggguacugccugacccgguggaugcugaucgaggccgagcucaagugcuucggcaacacggccgucgccaagugcaacgagaagcacgacgaggaguucugcgacaugcugcgccuguucgacuucugcaagcaggccauccagcggcucaaggcgcccgcccagaugagcauccagcugaucaacaaggccgugaacgcccugaucaacgaccagcucaucaugaagaaccaccuccgcgacaucauggggauccccuacugcaacuacuccaaguacugcuaccugaaccacaccgugaccggcaagaccagccugcccaagugcugccuggucuccaacggcagcuaccugaacgagacgcacuucuccgacgacaucgagcagcaggccgacaacaugaucaccgagaugcuccagaaggaguacauggagcggcaggggaagaccccgcugggccugguggaccuguucguguucagcaccuccuucuaccucaucagcaucuuccugcaccuggucaagauccccacgcaccgccacgugguggggaagcccugccccaagccgcaccggcucaaccacaugggcaucugcuccugcggguucuacaagcagcccggcguccccgugcgcuggaagcggugaggacuagucccuguucccagagcccacuuuuuuuucuuuuuuugaaauaaaauagccugucuuucagaucuaaaaaaaaaaaaaaaaaaaaaaaaaaaaaaaaaaaaaaaaaaaaaaaaaaaaaaaaaaaaaaaaaaaaaaaaaaaaaaaaaaaaaaaaaaaaaaaaaaaa

SEQ ID NO: 27204 - RNA, 1743 nt, Artificial Sequence
  mRNA product Design a-2 (A100) comprising derived and/or modified sequence from LASV(Z0947-SLE-2011;Clade IV)__AIT17840__GPCmut4 (opt1)
aggagaguccgcucagccagguugcagaagcggcuuagcguguguccuaaucuucucucugcguguagguaggccugugccgcaaacaagcuuaccaugggccagaucgugaccuucuuccaggaggucccccacgugaucgaggaggugaugaacaucguccugaucgcccucagcauccuggccgugcugaaggggcucuacaacuucgcgaccugcggccugguggggcuggucacguuccuccugcugugcggccgcuccugcaccaucagccucuacaaggggguguacgagcugcagacccuggagcucaacauggagacccugaacaugugcaugccgcuguccugcacgaagaacaacagccaccacuacaucauggugggcaacgagaccggccucgagcugacccugaccaacacguccaucaucaaccacaaguucugcaaccucagcgacgcccacaagaagaaccuguacgaccacgcccugauguccaucaucagcaccuuccaccucuccauccccaacuucaaccaguacgaggccaugagcugcgacuucaacgggggcaagaucuccguccaguacaaccugagccacuccuacgccggggacgcggccaaccacugcggcaccguggccaacggggugcugcagaccuucaugcggauggccuggggcggcagcuacaucgcgcucgacuccgggcgcgaccggugggacugcaucaugacgagcuaccaguaccugaucauccagaacaccaccugggaggaccacugccaguucucccgccccagccccaucggcuaccuggggcuccugucccagcggacccgcgacaucuacaucagccggcgccggcgcggcacguucaccuggacccugagcgacuccgagggcaaggacacccccgggggcuacugccucacgcgguggaugcugaucgaggccgagcugaagugcuucgggaacaccgccgucgccaagugcaacgagaagcacgacgaggaguucugcgacaugcuccgccuguucgacuucugcaagcaggccauccagcggcugaaggcgccggcccagaugagcauccagcucaucaacaaggccgugaacgcccugaucaacgaccagcugaucaugaagaaccaccuccgcgacaucaugggcauccccuacugcaacuacuccaaguacugcuaccugaaccacaccaccacggggaagaccagccugcccaagugcugccucguguccaacggcagcuaccugaacgagacccacuucuccgacgacaucgagcagcaggccgacaacaugaucaccgagaugcugcagaaggaguacauggagcggcagggcaagacgccgcucgggcuggucgaccuguucguguucagcaccuccuucuaccugaucagcaucuuccuccaccuggugaagauccccacccaccgccacaucgucggcaagcccugccccaagccgcaccggcugaaccacauggggaucugcuccugcggccucuacaagcagcccggggugcccgugaaguggaagcgcugaggacuagucccuguucccagagcccacuuuuuuuucuuuuuuugaaauaaaauagccugucuuucagaucuaaaaaaaaaaaaaaaaaaaaaaaaaaaaaaaaaaaaaaaaaaaaaaaaaaaaaaaaaaaaaaaaaaaaaaaaaaaaaaaaaaaaaaaaaaaaaaaaaaaa

SEQ ID NO: 27205 - RNA, 1743 nt, Artificial Sequence
  mRNA product Design a-2 (A100) comprising derived and/or modified sequence from LASV(Josiah;Clade IV)__NP_694870__GPCmut4 (opt4)
aggagaguccgcucagccagguugcagaagcggcuuagcguguguccuaaucuucucucugcguguagguaggccugugccgcaaacaagcuuaccaugggccagaucgugaccuucuuccaggaggugccccacgugaucgaggaggugaugaacaucgugcugaucgcccugagcgugcuggccgugcugaagggccuguacaacuucgccaccugcggccuggugggccuggugaccuuccugcugcugugcggcagaagcugcaccaccagccuguacaagggcguguacgagcugcagacccuggagcugaacauggagacccugaacaugugcaugccccugagcugcaccaagaacaacagccaccacuacaucauggugggcaacgagaccggccuggagcugacccugaccaacaccagcaucaucaaccacaaguucugcaaccugagcgacgcccacaagaagaaccuguacgaccacgcccugaugagcaucaucagcaccuuccaccugagcauccccaacuucaaccaguacgaggccaugagcugcgacuucaacggcggcaagaucagcgugcaguacaaccugagccacagcuacgccggcgacgccgccaaccacugcggcaccguggccaacggcgugcugcagaccuucaugagaauggccuggggcggcagcuacaucgcccuggacagcggcagaggcaacugggacugcaucaugaccagcuaccaguaccugaucauccagaacaccaccugggaggaccacugccaguucagcagacccagccccaucggcuaccugggccugcugagccagagaaccagagacaucuacaucagcagaagaagaagaggcaccuucaccuggacccugagcgacagcgagggcaaggacacccccggcggcuacugccugaccagauggaugcugaucgaggccgagcugaagugcuucggcaacaccgccguggccaagugcaacgagaagcacgacgaggaguucugcgacaugcugagacuguucgacuucugcaagcaggccauccagagacugaaggcccccgcccagaugagcauccagcugaucaacaaggccgugaacgcccugaucaacgaccagcugaucaugaagaaccaccugagagacaucaugggcauccccuacugcaacuacagcaaguacugcuaccugaaccacaccaccaccggcagaaccagccugcccaagugcugccuggugagcaacggcagcuaccugaacgagacccacuucagcgacgacaucgagcagcaggccgacaacaugaucaccgagaugcugcagaaggaguacauggagagacagggcaagaccccccugggccugguggaccuguucguguucagcaccagcuucuaccugaucagcaucuuccugcaccuggugaagauccccacccacagacacaucgugggcaagagcugccccaagccccacagacugaaccacaugggcaucugcagcugcggccuguacaagcagcccggcgugcccgugaaguggaagagaugaggacuagucccuguucccagagcccacuuuuuuuucuuuuuuugaaauaaaauagccugucuuucagaucuaaaaaaaaaaaaaaaaaaaaaaaaaaaaaaaaaaaaaaaaaaaaaaaaaaaaaaaaaaaaaaaaaaaaaaaaaaaaaaaaaaaaaaaaaaaaaaaaaaaa

SEQ ID NO: 27206 - RNA, 1740 nt, Artificial Sequence
  mRNA product Design a-2 (A100) comprising derived and/or modified sequence from LASV(LP;Clade I)__AAF86701__GPCmut4 (opt4)
aggagaguccgcucagccagguugcagaagcggcuuagcguguguccuaaucuucucucugcguguagguaggccugugccgcaaacaagcuuaccaugggccagaucaucaccuucuuccaggaggugccccacgugaucgaggaggugaugaacaucgugcugaucgcccugagccugcuggccauccugaagggccuguacaacaucgccaccugcggcaucaucggccugguggccuuccuguuccugugcggcaagagcugcagccugacccugaagggcggcuacgagcugcagacccuggagcugaacauggagacccugaacaugugcaugccccugagcugcaccaagaacagcagccaccacuacaucagagugggcaacgagaccggccuggagcugacccugaccaacaccagcaucaucaaccacaaguucugcaaccugagcgacgcccacaagaagaaccuguacgaccacgcccugaugagcaucaucagcaccuuccaccugagcauccccaacuucaaccaguacgaggccaugagcugcgacuucaacggcggcaagaucagcgugcaguacaaccugagccacagcuacgccggcgacgccgccgagcacugcggcaccguggccaacggcgugcugcagaccuucaugagaauggccuggggcggcagauacaucgcccuggacagcggcaagggcaacugggacugcaucaugaccagcuaccaguaccugaucauccagaacaccaccugggaggaccacugccaguucagcagacccagccccaucggcuaccugggccugcugagccagagaaccagagacaucuacaucagcagaagaagaagaggcaccuucaccuggacccugagcgacagcgagggcaacgagacccccggcggcuacugccugaccagauggaugcugaucgaggccgagcugaagugcuucggcaacaccgccguggccaagugcaacgagaagcacgacgaggaguucugcgacaugcugagacuguucgacuucugcaagcaggccaucagaagacugaaggcccccgcccagaugagcauccagcugaucaacaaggccgugaacgcccugaucaacgaccagcugaucaugaagaaccaccugagagacaucaugggcauccccuacugcaacuacagcaaguacugcuaccugaaccacaccagcagcggcagaaccagccugcccaagugcugccugaucagcaacggcagcuaccugaacgagacccaguucagcgacgacaucgagcagcaggccgacaacaugaucaccgagaugcugcagaaggaguacaucgagagacagggcaagaccccccugggccugguggacaucuucaucuucagcaccagcuucuaccugaucagcaucuuccugcaccugaucaagauccccacccacagacacaucgugggcaagcccugccccaagccccacagacugaaccacaugggcgugugcagcugcggccuguacaagcaccccggcgugcccaccaaguggaagagaugaggacuagucccuguucccagagcccacuuuuuuuucuuuuuuugaaauaaaauagccugucuuucagaucuaaaaaaaaaaaaaaaaaaaaaaaaaaaaaaaaaaaaaaaaaaaaaaaaaaaaaaaaaaaaaaaaaaaaaaaaaaaaaaaaaaaaaaaaaaaaaaaaaaaa

SEQ ID NO: 27207 - RNA, 1740 nt, Artificial Sequence
  mRNA product Design a-2 (A100) comprising derived and/or modified sequence from LASV(803213;Clade II)__AAF86703__GPCmut4 (opt4)
aggagaguccgcucagccagguugcagaagcggcuuagcguguguccuaaucuucucucugcguguagguaggccugugccgcaaacaagcuuaccaugggccagaucaucaccuucuuccaggaggugccccacgugaucgaggaggugaugaacaucgugcugaucgcccugagccugcuggccauccugaagggcaucuacaacguggccaccugcggccuguucggccugaucagcuuccugcugcugugcggcagaagcugcagcgugaccuacaagggcguguacgagcugcagacccuggagcugaacauggccaaccugaacaugugcaugccccugagcugcaccaagaacaacagccaccacuacaucauggugggcaacgagaccggccuggagcugacccugaccaacaccagcaucaucaaccacaaguucugcaaccugagcgacgcccacaagaagaaccuguacgaccacgcccugaugagcaucaucagcaccuuccaccugagcauccccaacuucaaccaguacgaggccaugagcugcgacuucaacggcggcaagaucagcgugcaguacaaccugagccacagcuucgccguggacgccgccaaccacugcggcaccaucgccaacggcgugcugcagaccuucaugagaauggccuggggcggcagcuacaucgcccuggacagcggcaagggcaacugggacugcaucaugaccagcuaccaguaccugaucauccagaacaccaccugggaggaccacugccaguucagcagacccagccccaucggcuaccugggccugcugagccagagaaccagagacaucuacaucagcagaagaagaagaggcaccuucaccuggacccugagcgacagcgagggcaacgaggcccccggcggcuacugccugaccagauggaugcugaucgaggccgagcugaagugcuucggcaacaccgccguggccaagugcaacgagaagcacgacgaggaguucugcgacaugcugagacuguucgacuucugcaagcaggccaucaagagacugaagacccccgcccagaugagcauccagcugaucaacaaggccgugaacgcccugaucaacgaccagcugaucaugaagaaccaccugagagacaucaugggcauccccuacugcaacuacagcagauacugcuaccugaaccacaccgugaccggcaagaccagccugcccagaugcugccuggugagcaacggcagcuaccugaacgagacccacuucagcgacgacaucgagcagcaggccgacaacaugaucaccgagaugcugcagaaggaguacauggacagacagggcaagaccccccugggccugguggaccuguucguguucagcaccagcuucuaccugaucagcaucuuccugcaccuggugaagauccccacccacagacacaucgugggcaagcccugccccaagccccacagacugaaccacaugggcaucugcagcugcggccuguacaagcaccccggcgugcccgugaaguggaagagaugaggacuagucccuguucccagagcccacuuuuuuuucuuuuuuugaaauaaaauagccugucuuucagaucuaaaaaaaaaaaaaaaaaaaaaaaaaaaaaaaaaaaaaaaaaaaaaaaaaaaaaaaaaaaaaaaaaaaaaaaaaaaaaaaaaaaaaaaaaaaaaaaaaaaa

SEQ ID NO: 27208 - RNA, 1740 nt, Artificial Sequence
  mRNA product Design a-2 (A100) comprising derived and/or modified sequence from LASV(GA391;Clade III)__CAA36645__GPCmut4 (opt4)
aggagaguccgcucagccagguugcagaagcggcuuagcguguguccuaaucuucucucugcguguagguaggccugugccgcaaacaagcuuaccaugggccagaucgugaccuucuuccaggaggugccccacgugaucgaggaggugaugaacaucgugcugaucgcccugagcauccuggccauccugaagggccuguacaacguggccaccugcggccugaucggccuggugaccuuccugcugcugagcggcagaagcugcagccugaucuacaagggcaccuacgagcugcagacccuggagcugaacauggagacccugaacaugugcaugccccugagcugcaccaagaacaacagccaccacuacaucagagugggcaacgagaccggccuggagcugacccugaccaacaccagcauccugaaccacaaguucugcaaccugagcgacgcccacaagagaaaccuguacgaccacagccugaugagcaucaucagcaccuuccaccugagcauccccaacuucaaccaguacgaggccaugagcugcgacuucaacggcggcaagaucaccgugcaguacaaccugagccacagcuucgccguggacgccgccggccacugcggcacccuggccaacggcgugcugcagaccuucaugagaauggccuggggcggcagcuacaucgcccuggacagcggcagaggcaacugggacugcaucaugaccagcuaccaguaccugaucauccagaacaccaccugggacgaccacugccaguucagcagacccagccccaucggcuaccugggccugcugagccagagaaccagagacaucuacaucagcagaagaagaagaggcaccuucaccuggacccugagcgacagcgagggcaacgagacccccggcggcuacugccugaccagauggaugcugaucgaggccgagcugaagugcuucggcaacaccgccguggccaagugcaacgagaagcacgacgaggaguucugcgacaugcugagacuguucgacuucugcaagcaggccaucagaagacugaagacccccgcccagaugagcauccagcugaucaacaaggccgugaacgcccugaucaacgaccagcugaucaugaagaaccaccugagagacaucaugggcauccccuacugcaacuacagcagauacugcuaccugaaccacaccagcaccggcaagaccagccugcccagaugcugccugaucagcaacggcagcuaccugaacgagaccaaguucagcgacgacaucgagcagcaggccgacaacaugaucaccgagaugcugcagaaggaguacaucgacagacagggcaagaccccccugggccugguggaccuguucguguucagcaccagcuucuaccugaucagcaucuuccugcaccuggugaagauccccacccacagacacaucgugggcaagcccugccccaagccccacagacugaaccacaugggcaucugcagcugcggccuguacaagcagcccggcgugcccgugagauggaagagaugaggacuagucccuguucccagagcccacuuuuuuuucuuuuuuugaaauaaaauagccugucuuucagaucuaaaaaaaaaaaaaaaaaaaaaaaaaaaaaaaaaaaaaaaaaaaaaaaaaaaaaaaaaaaaaaaaaaaaaaaaaaaaaaaaaaaaaaaaaaaaaaaaaaaa

SEQ ID NO: 27209 - RNA, 1743 nt, Artificial Sequence
  mRNA product Design a-2 (A100) comprising derived and/or modified sequence from LASV(AV;Clade V)__CCA30314__GPCmut4 (opt4)
aggagaguccgcucagccagguugcagaagcggcuuagcguguguccuaaucuucucucugcguguagguaggccugugccgcaaacaagcuuaccaugggccagaucgugaccuucuuccaggaggugccccacgugaucgaggaggugaugaacaucgugcugaucgcccugagcauccuggccgugcugaagggccuguacaacaucgccaccugcggccugaucggccugaucaccuuccugcugcugugcggcagaagcugcagcagcaaccuguacaagggcguguacgagcugcagagccuggaccugaacauggagacccugaacaugugcaugccccugagcugcaccaagaacaacagccaccacuacaucagagugggcaacgacaccggccuggagcugacccugaccaacaccagcauccugaaccacaaguucugcaaccugagcgacgcccacaagaaggaccuguacgaccacgcccugaugagcaucaucagcaccuuccaccugagcauccccaacuucaaccaguacgaggccaugagcugcgacuucaacggcggcaagaucagcgugcaguacaaccugagccacagcuacgccaucgacgccgccaaccacugcggcaccguggccaacggcauccugcagaccuucaugagaauggccuggggcggcagcuacaucgcccuggacagcggcagaggcaacugggacugcaucaugaccagcuaccaguaccugaucauccagaacaccaccugggagaaccacugccaguucagcagacccagccccaucggcuaccugggccugcugagccagagaaccagagacaucuacaucagcagaagaagaagaggcaccuucaccuggacccugagcgacagcgagggcaacgccacccccggcggcuacugccugaccagauggaugcugaucgaggccgagcugaagugcuucggcaacaccgccguggccaagugcaacgagaagcacgacgaggaguucugcgacaugcugagacuguucgacuucugcaagcaggccaucagcagacugaagagccccgcccagaugagcauccagcugaucaacaaggccgugaacgcccugaucaacgaccagcugaucaugaagaaccaccugagagacaucaugggcauccccuacugcaacuacagcaaguacugcuaccugaaccacaccaucaccggcaagaccagccugcccaagugcugccuggugagcaacggcagcuaccugaacgagacccacuucagcgacgacaucgagcagcaggccgacaacaugaucaccgagaugcugcagaaggaguacauggagagacagggcaagaccccccugggccugguggaccuguucguguucagcaccagcuucuaccugaucagcaucuuccugagacuggugaagauccccacccacagacacaucgugggcaagcccugccccaagccccacagacugaaccacaugggcaucugcagcugcggccuguacaagcagcccggcgugcccgugagauggaagagaugaggacuagucccuguucccagagcccacuuuuuuuucuuuuuuugaaauaaaauagccugucuuucagaucuaaaaaaaaaaaaaaaaaaaaaaaaaaaaaaaaaaaaaaaaaaaaaaaaaaaaaaaaaaaaaaaaaaaaaaaaaaaaaaaaaaaaaaaaaaaaaaaaaaaa

SEQ ID NO: 27210 - RNA, 1740 nt, Artificial Sequence
  mRNA product Design a-2 (A100) comprising derived and/or modified sequence from LASV(Togo/2016/7082;Clade VI)__AMR44577__GPCmut4 (opt4)
aggagaguccgcucagccagguugcagaagcggcuuagcguguguccuaaucuucucucugcguguagguaggccugugccgcaaacaagcuuaccaugggccagaucaucaccuucuuccaggaggugccccacgugaucgaggaggugaugaacaucgugcugaucgcccugagccugcuggccauccugaagggcguguacaacguggccaccugcggcaucaucggccuggugaccuuccuguuccugugcggcagaagcugcagccugaucuacaagggcagcuacgagcugcagacccuggagcugaacauggagacccugaacaugugcaugccccugagcugcaccaagaacagcagccaccacuacaucagagugggcaacgagaccggccuggagcugacccugaccaacaccagcaucaucaaccacaaguucugcaaccugagcgacgcccacaagagaaaccuguacgaccacgcccugaugagcauccugagcaccuuccaccugagcauccccaacuucaaccaguacgaggccaugagcugcgacuucaacggcggcaagaucagcgugcaguacaaccugagccacgccuacgccguggacgccgccgagcacugcggcaccguggccaacggcgugcugcagaccuucaugagaauggccuggggcggcagcuacaucgcccuggacagcggcagaggcaacugggacugcaucaugaccagcuaccaguaccugaucauccagaacaccaccugggaggaccacugccaguucagcagacccagccccaucggcuaccugggccugcugagccagagaaccagagacaucuacaucagcagaagaagaagaggcaccuucaccuggacccugagcgacagcgagggcaacgagacccccggcggcuacugccugaccagauggaugcugaucgaggccgagcugaagugcuucggcaacaccgccguggccaagugcaacgagaagcacgacgaggaguucugcgacaugcugagacuguucgacuucugcaagcaggccauccagagacugaagagccccgcccagaugagcauccagcugaucaacaaggccgugaacgcccugaucaacgaccagcugaucaugaagaaccaccugagagacaugaugggcauccccuacugcaacuacagcaaguacugcuaccugaaccacaccagcagcggcagaaccagccugcccaagugcugccuggugagcaacggcagcuaccugaacgagacccacuucagcgacgacaucgagcagcaggccgacaacaugaucaccgagaugcugcagaaggaguacaucgacagacagggcaagaccccccugggccugguggaccuguucguguucagcaccagcuucuaccugaucagcaucuuccugcaccugaucaagauccccacccacagacacaucgugggcaagcccugccccaagccccacagacugaaccacaugggcaucugcagcugcggccuguacaagcagcccggcgugcccaccagauggaagagaugaggacuagucccuguucccagagcccacuuuuuuuucuuuuuuugaaauaaaauagccugucuuucagaucuaaaaaaaaaaaaaaaaaaaaaaaaaaaaaaaaaaaaaaaaaaaaaaaaaaaaaaaaaaaaaaaaaaaaaaaaaaaaaaaaaaaaaaaaaaaaaaaaaaaa

SEQ ID NO: 27211 - RNA, 1740 nt, Artificial Sequence
  mRNA product Design a-2 (A100) comprising derived and/or modified sequence from LASV(KAK-428;Clade n.d. (VII))__ANH09740__GPCmut4 (opt4)
aggagaguccgcucagccagguugcagaagcggcuuagcguguguccuaaucuucucucugcguguagguaggccugugccgcaaacaagcuuaccaugggccagaucgugaccuucuuccaggaggugccccacgugaucgaggaggugaugaacaucgugcugaucgcccugagccugcuggccauccugaagggccuguacaacuucgccaccugcggcgugaucggccugaucaccuuccugcugcugugcggcagaagcugcagcgccaccuacaagggccaguacgagcugcagacccuggagcugaacauggagagccugaacaugugcaugccccugagcugcaccaagaacaacagccaccacuacaucagagccggcaacaacaccggccuggagcugacccugaccaacaccagcaucaucagccacaaguucugcaaccugagcgacgcccacaagaagaaccuguacgaccacacccugaugagcaucaucaccaccuuccaccugagcauccccaacuucaaccaguacgaggccaugagcugcgacuucaacggcggcaagaucagcauccaguacaaccugagccacagcuacgccggcgacgccgcccagcacugcggcaccguggccaacggcgugcugcagaccuucaugagaauggccuggggcggcagcuaccuggcccuggacagcggcagaagaggcugggacugcaucaucagcagcuaccaguaccugaucauccagaacaccaccugggacgaccacugccaguucagcagacccagccccaucggcuaccugggcuucgugagccagaagaccagagacaucuacaucagcagaagaagaagaggcaccuucaccuggacccugagcgacagcgagggccacgacaugcccggcggcuacugccugaccagauggaugcugaucgaggccgaccugaagugcuucggcaacaccgccguggccaagugcaacgagaagcacgacgaggaguucugcgacauguggagacuguucgacuucugcaagcaggccauccagagacugaaggcccccgcccagaugaacauccagcugaucaacaaggccgugaacgcccugaucaacgaccagcugaugaugaagaaccaccugagagacaucaugggcauccccuacugcaacuacagcaaguucugcuaccugaacaacaccaccaccggcagaaccagccugcccagaugcugccugaucagcaacggcagcuaccugaacgagacccacuucagcgacgacaucgagcagcaggccgacaacaugaucaccgagaugcugcagaaggaguacauggacagacagggcaagaccccccugggccugguggaccuguucguguucagcaccagcuucuaccugaucaccaucuuccugcaccuggugaagauccccacccacagacacaucgugggcaagcccugccccaagccccacagacugaaccacaugggcaucugcagcugcggccuguacaagcagcccggcgugcccgugagauggaagagaugaggacuagucccuguucccagagcccacuuuuuuuucuuuuuuugaaauaaaauagccugucuuucagaucuaaaaaaaaaaaaaaaaaaaaaaaaaaaaaaaaaaaaaaaaaaaaaaaaaaaaaaaaaaaaaaaaaaaaaaaaaaaaaaaaaaaaaaaaaaaaaaaaaaaa

SEQ ID NO: 27212 - RNA, 1740 nt, Artificial Sequence; identical to SEQ ID NO: 27206
  mRNA product Design a-2 (A100) comprising derived and/or modified sequence from LASV(Pinneo-NIG-1969;Clade I)__AIT17836__GPCmut4 (opt4)

SEQ ID NO: 27213 - RNA, 1740 nt, Artificial Sequence
  mRNA product Design a-2 (A100) comprising derived and/or modified sequence from LASV(ISTH0009-NIG-2011;Clade II)__AIT17404__GPCmut4 (opt4)
aggagaguccgcucagccagguugcagaagcggcuuagcguguguccuaaucuucucucugcguguagguaggccugugccgcaaacaagcuuaccaugggccagaucaucaccuucuuccaggaggugccccacgugaucgaggaggugaugaacaucgugcugaucgcccugagccugcuggccauccugaagggcaucuacaacguggccaccugcggccuguucggccuggugagcuuccugcugcugugcggcagaagcugcagcaccaccuacaagggcguguacgagcugcagacccuggagcuggacauggccagccugaacaugugcaugccccugagcugcaccaagaacaacagccaccacuacaucauggugggcaacgagaccggccuggagcugacccugaccaacaccagcaucaucaaccacaaguucugcaaccugagcgacgcccacaagaagaaccuguacgaccacgcccugaugagcaucaucagcaccuuccaccugagcauccccaacuucaaccaguacgaggccaugagcugcgacuucaacggcggcaagaucagcgugcaguacaaccugagccacgccuacgccguggacgccgccaaccacugcggcaccaucgccaacggcgugcugcagaccuucaugagaauggccuggggcggcagcuacaucgcccuggacagcggcaagggcagcugggacugcaucaugaccagcuaccaguaccugaucauccagaacaccaccugggaggaccacugccaguucagcagacccagccccaucggcuaccugggccugcugagccagagaaccagagacaucuacaucagcagaagaagaagaggcaccuucaccuggacccugagcgacagcgagggcaacgagacccccggcggcuacugccugaccagauggaugcugaucgaggccgagcugaagugcuucggcaacaccgccguggccaagugcaacgagaagcacgacgaggaguucugcgacaugcugagacuguucgacuucugcaagcaggccaucagaagacugaagacccccgcccagaugagcauccagcugaucaacaaggccgugaacgcccugaucaacgaccagcugaucaugaagaaccaccugagagacaucaugggcauccccuacugcaacuacagcaaguacugcuaccugaaccacaccgugaccggcaagaccagccugcccagaugcugccuggugagcaacggcagcuaccugaacgagacccacuucagcgacgacaucgagcagcaggccgacaacaugaucaccgagcugcugcagaaggaguacauggacagacagggcaagaccccccugggccugguggaccuguucguguucagcaccagcuucuaccugaucagcaucuuccugcaccugaucaagauccccacccacagacacaucaccggcaagcccugccccaagccccacagacugaaccacaugggcaucugcagcugcggccuguacaagcaccccggcgugcccgugaaguggaagagaugaggacuagucccuguucccagagcccacuuuuuuuucuuuuuuugaaauaaaauagccugucuuucagaucuaaaaaaaaaaaaaaaaaaaaaaaaaaaaaaaaaaaaaaaaaaaaaaaaaaaaaaaaaaaaaaaaaaaaaaaaaaaaaaaaaaaaaaaaaaaaaaaaaaaa

SEQ ID NO: 27214 - RNA, 1740 nt, Artificial Sequence
  mRNA product Design a-2 (A100) comprising derived and/or modified sequence from LASV(ISTH2010-NIG-2012;Clade II)__AIT17482__GPCmut4 (opt4)
aggagaguccgcucagccagguugcagaagcggcuuagcguguguccuaaucuucucucugcguguagguaggccugugccgcaaacaagcuuaccaugggccagaucaucaccuucuuccaggaggugccccacgugaucgaggaggugaugaacaucgugcugaucgcccugagccugcuggccauccugaagggcaucuacaacguggccaccugcggccuguucggccuggugagcuuccugcugcugugcggcagaagcugcagcaccaccuacaagggcguguacgagcugcagacccuggagcuggacauggccagccugaacaugugcaugccccugagcugcaccaagaacaacagccaccacuacaucauggugggcaacgagaccggccuggagcugacccugaccaacaccagcaucaucaaccacaaguucugcaaccugagcgacgcccacaagaagaaccuguacgaccacgcccugaugagcaucaucagcaccuuccaccugagcauccccaacuucaaccaguacgaggccaugagcugcgacuucaacggcggcaagaucagcgugcaguacaaccugagccacgccuacgccguggacgccgccaaccacugcggcaccaucgccaacggcgugcugcagaccuucaugagaauggccuggggcggcagcuacaucgcccuggacagcggcaagggcagcugggacugcaucaugaccagcuaccaguaccugaucauccagaacaucaccugggaggaccacugccaguucagcagacccagccccaucggcuaccugggccugcugagccagagaaccagagacaucuacaucagcagaagaagaagaggcaccuucaccuggacccugagcgacagcgagggcaacgagacccccggcggcuacugccugaccagauggaugcugaucgaggccgagcugaagugcuucggcaacaccgccguggccaagugcaacgagaagcacgacgaggaguucugcgacaugcugagacuguucgacuucugcaagcaggccaucagaagacugaagacccccgcccagaugagcauccagcugaucaacaaggccgugaacgcccugaucaacgaccagcugaucaugaagaaccaccugagagacaucaugggcauccccuacugcaacuacagcaaguacugcuaccugaaccacaccgugaccggcaagaccagccugcccagaugcugccuggugagcaacggcagcuaccugaacgagacccacuucagcgacgacaucgagcagcaggccgacaacaugaucaccgagcugcugcagaaggaguacaucgacagacagggcaagaccccccugggccugguggaccuguucguguucagcaccagcuucuaccugaucagcaucuuccugcaccuggugaagauccccacccacagacacguggugggcaagcccugccccaagccccacagacugaaccacaugggcaucugcagcugcggccuguacaagcaccccggcgugcccgugaaguggaagagaugaggacuagucccuguucccagagcccacuuuuuuuucuuuuuuugaaauaaaauagccugucuuucagaucuaaaaaaaaaaaaaaaaaaaaaaaaaaaaaaaaaaaaaaaaaaaaaaaaaaaaaaaaaaaaaaaaaaaaaaaaaaaaaaaaaaaaaaaaaaaaaaaaaaaa

SEQ ID NO: 27215 - RNA, 1740 nt, Artificial Sequence
  mRNA product Design a-2 (A100) comprising derived and/or modified sequence from LASV(Lassa virus/H.sapiens-wt/NGA/2015/ISTH_0543;Clade II)__AVO03639__GPCmut4 (opt4)
aggagaguccgcucagccagguugcagaagcggcuuagcguguguccuaaucuucucucugcguguagguaggccugugccgcaaacaagcuuaccaugggccagaucaucaccuucuuccaggaggugccccacgugaucgaggaggugaugaacaucgugcugaucgcccugagccugcuggccauccugaagggcaucuacaacguggccaccugcggccuguucggccuggugagcuuccugcugcugugcggcagaagcugcagcaccaccuacaagggcguguacgagcugcagacccuggagcuggacauggccaaccugaacaugugcaugccccugagcugcaccaagaacaacagccaccacuacaucauggugggcaacgagaccggccuggagcugacccugaccaacaccagcaucaucaaccacaaguucugcaaccugagcgacgcccacaagaagaaccuguacgaccacgcccugaugagcaucaucagcaccuuccaccugagcauccccaacuucaaccaguacgaggccaugagcugcgacuucaacggcggcaagaucagcgugcaguacaaccugagccacaccuacgccguggacgccgccaaccacugcggcaccaucgccaacggcgugcugcagaccuucaugagaauggccuggggcggcagcuacaucgcccuggacagcggcaagggcagcugggacugcaucaugaccagcuaccaguaccuggugauccagaacaccaccugggaggaccacugccaguucagcagacccagccccaucggcuaccugggccugcugagccagagaaccagagacaucuacaucagcagaagaagaagaggcaccuucaccuggacccugagcgacagcgagggcaacgagacccccggcggcuacugccugaccagauggaugcugaucgaggccgagcugaagugcuucggcaacaccgccguggccaagugcaacgagaagcacgacgaggaguucugcgacaugcugagacuguucgacuucugcaagcaggccaucagaagacugaagacccccgcccagaugagcauccagcugaucaacaaggccgugaacgcccugaucaacgaccagcugaucaugaagaaccaccugagagacaucaugggcauccccuacugcaacuacagcaaguacugcuaccugaaccacaccgugaccggcaagaccagccugcccagaugcugccuggugagcaacggcagcuaccugaacgagacccacuucagcgacgacaucgagcagcaggccgacaacaugaucaccgagcugcugcagaaggaguacaucgacagacagggcaagaccccccugggccugguggaccuguucguguucagcaccagcuucuaccugaucagcaucuuccugcaccuggugaagauccccacccacagacacaucaccggcaagcccugccccaagccccacagacugaaccacaugggcaucugcagcugcggccuguacaagcaccccggcgugcccgugaaguggaagagaugaggacuagucccuguucccagagcccacuuuuuuuucuuuuuuugaaauaaaauagccugucuuucagaucuaaaaaaaaaaaaaaaaaaaaaaaaaaaaaaaaaaaaaaaaaaaaaaaaaaaaaaaaaaaaaaaaaaaaaaaaaaaaaaaaaaaaaaaaaaaaaaaaaaaa

SEQ ID NO: 27216 - RNA, 1740 nt, Artificial Sequence
  mRNA product Design a-2 (A100) comprising derived and/or modified sequence from LASV(Lassa virus/H.sapiens-wt/NGA/2016/ISTH_0009;Clade II)__AVO03571__GPCmut4 (opt4)
aggagaguccgcucagccagguugcagaagcggcuuagcguguguccuaaucuucucucugcguguagguaggccugugccgcaaacaagcuuaccaugggccagaucaucaccuucuuccaggaggugccccacgugaucgaggaggugaugaacaucgugcugaucgcccugagccugcuggccauccugaagggcaucuacaacguggccaccugcggccugcugggccuggugagcuuccugcugcugugcggcagaagcugcagcaccaccuacaagggcguguacgagcugcagacccuggagcuggacauggccagccugaacaugugcaugccccugagcugcaccaagaacaacagccaccacuacaucauggugggcaacgagaccggccuggagcugacccugaccaacaccagcaucaucaaccacaaguucugcaaccugagcgacgcccacaagaagaaccuguacgaccacgcccugaugagcaucaucagcaccuuccaccugagcauccccaacuucaaccaguacgaggccaugagcugcgacuucaacggcggcagaaucagcgugcaguacaaccugagccacagcuacgccguggacgccgccaaccacugcggcaccaucgccaacggcgugcugcagaccuucaugagaauggccuggggcggcagcuacaucgcccuggacagcggcaagggcagcugggacugcaucaugaccagcuaccaguaccugaucauccagaacaccaccugggaggaccacugccaguucagcagacccagccccaucggcuaccugggccugcugagccagagaaccagagacaucuacaucagcagaagaagaagaggcaccuucaccuggacccugagcgacagcgagggcaacgagacccccggcggcuacugccugaccagauggaugcugaucgaggccgagcugaagugcuucggcaacaccgccguggccaagugcaacgagaagcacgacgaggaguucugcgacaugcugagacuguucgacuucugcaagcaggccaucagaagacugaagacccccgcccagaugagcauccagcugaucaacaaggccgugaacgcccugaucaacgaccagcugaucaugaagaaccaccugagagacaucaugggcauccccuacugcaacuacagcaaguacugcuaccugaaccacaccgugaccggcaagaccagccugcccagaugcugccuggugagcaacggcagcuaccugaacgagacccacuucagcgacgacaucgagcagcaggccgacaacaugaucaccgagcugcugcagaaggaguacaucgacagacagggcaagaccccccugggccugguggaccuguucguguucagcaccagcuucuaccugaucagcaucuuccugcaccuggugaagauccccacccacagacacaucaccggcaagcccugccccaagccccacagacugaaccacaugggcaucugcagcugcggccuguacaaccaccccggcgugcccgugaaguggaagagaugaggacuagucccuguucccagagcccacuuuuuuuucuuuuuuugaaauaaaauagccugucuuucagaucuaaaaaaaaaaaaaaaaaaaaaaaaaaaaaaaaaaaaaaaaaaaaaaaaaaaaaaaaaaaaaaaaaaaaaaaaaaaaaaaaaaaaaaaaaaaaaaaaaaaa

SEQ ID NO: 27217 - RNA, 1740 nt, Artificial Sequence
  mRNA product Design a-2 (A100) comprising derived and/or modified sequence from LASV(Lassa virus/H.sapiens-wt/NGA/2016/ISTH_0017;Clade II)__AVO03567__GPCmut4 (opt4)
aggagaguccgcucagccagguugcagaagcggcuuagcguguguccuaaucuucucucugcguguagguaggccugugccgcaaacaagcuuaccaugggccagaucaucaccuucuuccaggaggugccccacgugaucgaggaggugaugaacaucgugcugaucgcccugagccugcuggccauccugaagggcaucuacaacguggccaccugcggccuguucggccuggugagcuuccugcugcugugcggcagaagcugcagcaccaccuacaagggcguguacgagcugcagacccuggagcuggacauggccagccugaacaugugcaugccccugagcugcaccaagaacaacagccaccacuacaucauggugggcaacgagaccggccuggagcugacccugaccaacaccagcaucaucaaccacaaguucugcaaccugagcgacgcccacaagaagaaccuguacgaccacgcccugaugagcaucaucagcaccuuccaccugagcauccccaacuucaaccaguacgaggccaugagcugcgacuucaacggcggcaagaucagcgugcaguacaaccugagccacaccuacgccaucgacgccgccaaccacugcggcaccaucgccaacggcgugcugcagaccuucaugagaauggccuggggcggcagcuacaucgcccuggacagcggcaagggcagcugggacugcaucaugaccagcuaccaguaccugaucauccagaacaccaccugggaggaccacugccaguucagcagacccagccccaucggcuaccugggccugcugagccagagaaccagagacaucuacaucagcagaagaagaagaggcaccuucaccuggacccugagcgacagcgagggcaacgagacccccggcggcuacugccugaccagauggaugcugaucgaggccgagcugaagugcuucggcaacaccgccguggccaagugcaacgagaagcacgacgaggaguucugcgacaugcugagacuguucgacuucugcaagcaggccaucagaagacugaagacccccgcccagaugagcauccagcugaucaacaaggccgugaacgcccugaucaacgaccagcugaucaugaagaaccaccugagagacaucaugggcauccccuacugcaacuacagcaaguacugcuaccugaaccacaccgugaccggcaagaccagccugcccagaugcugccuggugagcaacggcagcuaccugaacgagacccacuucagcgacgacaucgagcagcaggccgacaacaugaucaccgagcugcugcagaaggaguacauggacagacagggcaagaccccccugggccugguggaccuguucguguucagcaccagcuucuaccugaucagcaucuuccugcaccuggugagaauccccacccacagacacgugaucggcaagcccugccccaagccccacagacugaaccacaugggcaucugcagcugcggccuguacaagcaccccggcgugcccgugaaguggaagagaugaggacuagucccuguucccagagcccacuuuuuuuucuuuuuuugaaauaaaauagccugucuuucagaucuaaaaaaaaaaaaaaaaaaaaaaaaaaaaaaaaaaaaaaaaaaaaaaaaaaaaaaaaaaaaaaaaaaaaaaaaaaaaaaaaaaaaaaaaaaaaaaaaaaaa

SEQ ID NO: 27218 - RNA, 1740 nt, Artificial Sequence
  mRNA product Design a-2 (A100) comprising derived and/or modified sequence from LASV(Lassa virus/H.sapiens-wt/NGA/2018/ISTH_0959;Clade II)__AVV65099__GPCmut4 (opt4)
aggagaguccgcucagccagguugcagaagcggcuuagcguguguccuaaucuucucucugcguguagguaggccugugccgcaaacaagcuuaccaugggccagaucaucaccuucuuccaggaggugccccacgugaucgaggaggugaugaacaucgugcugaucgcccugagccugcuggccauccugaagggcaucuacaacguggugaccugcggccuguucggccuggugagcuuccugcugcugugcggcagaagcugcagcaccaccuacaagggcguguacgagcugcagacccuggagcuggacauggccagccugaacaugugcaugccccugagcugcaccaagaacaacagccaccacuacaucauggugggcaacgagaccggccuggagcugacccugaccaacaccagcaucaucaaccacaaguucugcaaccugagcgacgcccacaagaagaaccuguacgaccacgcccugaugagcaucaucagcaccuuccaccugagcauccccaacuucaaccaguacgaggccaugagcugcgacuucaacggcggcaagaucagcgugcaguacaaccugagccacgccuacgccaucgacgccgccaaccacugcggcaccaucgccaacggcgugcugcagaccuucaugagaauggccuggggcggcagcuacaucgcccuggacagcggcaagggcagcugggacugcaucaugaccagcuaccaguaccugaucauccagaacaccaccugggaggaccacugccaguucagcagacccagccccaucggcuaccugggccugcugagccagagaaccagagacaucuacaucagcagaagaagaagaggcaccuucaccuggacccugagcgacagcgagggcaacgagacccccggcggcuacugccugaccagauggaugcugaucgaggccgagcugaagugcuucggcaacaccgccguggccaagugcaacgagaagcacgacgaggaguucugcgacaugcugagacuguucgacuucugcaagcaggccaucagaagacugaagacccccgcccagaugagcauccagcugaucaacaaggccgugaacgcccugaucaacgaccagcugaucaugaagaaccaccugagagacaucaugggcauccccuacugcaacuacagcaaguacugcuaccugaaccacaccgugaccggcaagaccagccugcccagaugcugccuggugagcaacggcagcuaccugaacgagacccacuucagcgacgacaucgagcagcaggccgacaacaugaucaccgagcugcugcagaaggaguacaucgacagacagggcaagaccccccugggccugguggaccuguucguguucagcaccagcuucuaccugaucagcaucuuccugcaccuggugaagauccccacccacagacacgugaucggcaagcccugccccaagccccacagacugaaccacaugggcaucugcagcugcggccuguacaagcaccccggcgugcccgugaaguggaagagaugaggacuagucccuguucccagagcccacuuuuuuuucuuuuuuugaaauaaaauagccugucuuucagaucuaaaaaaaaaaaaaaaaaaaaaaaaaaaaaaaaaaaaaaaaaaaaaaaaaaaaaaaaaaaaaaaaaaaaaaaaaaaaaaaaaaaaaaaaaaaaaaaaaaaa

SEQ ID NO: 27219 - RNA, 1740 nt, Artificial Sequence
  mRNA product Design a-2 (A100) comprising derived and/or modified sequence from LASV(LASV003-NIG-2008;Clade II)__AIT17580__GPCmut4 (opt4)
aggagaguccgcucagccagguugcagaagcggcuuagcguguguccuaaucuucucucugcguguagguaggccugugccgcaaacaagcuuaccaugggccagaucaucaccuucuuccaggaggugccccacgugaucgaggaggugaugaacaucgugcugaucgcccugagccugcuggccauccugaagggcaucuacaacguggccaccugcggccuguucggccuggugagcuuccugcugcugugcggcagaagcugcagcaccaccuacaagggcguguacgagcugcagacccuggagcuggacauggccagccugaacaugugcaugccccugagcugcaccaagaacaacagccaccacuacaucauggugggcaacgagaccggccuggagcugacccugaccaacaccagcaucaucaaccacaaguucugcaaccugagcgacgcccacaagaagaaccuguacgaccacgcccugaugagcaucaucagcaccuuccaccugagcauccccaacuucaaccaguacgaggccaugagcugcgacuucaacggcggcaagaucagcgugcaguacaaccugagccacaccuacgccguggacgccgccaaccacugcggcaccaucgccaacggcgugcugcagaccuucaugagaauggccuggggcggcagcuacaucgcccuggacagcggcaagggcagcugggacugcaucaugaccagcuaccaguaccugaucauccagaacaccaccugggaggaccacugccaguucagcagacccagccccaucggcuaccugggccugcugagccagagaaccagagacaucuacaucagcagaagaagaagaggcaccuucaccuggacccugagcgacagcgagagcaacgagacccccggcggcuacugccugaccagauggaugcugaucgaggccgagcugaagugcuucggcaacaccgccguggccaagugcaacgagaagcacgacgaggaguucugcgacaugcugagacuguucgacuucugcaagcaggccaucagaagacugaaggcccccgcccagaugagcauccagcugaucaacaaggccgugaacgcccugaucaacgaccagcugaucaugaagaaccaccugagagacaucaugggcauccccuacugcaacuacagcaaguacugcuaccugaaccacaccgugaccggcagaaccagccugcccagaugcugccuggugagcaacggcagcuaccugaacgagacccacuucagcgacgacaucgagcagcaggccgacaacaugaucaccgagcugcugcagaaggaguacauggacagacagggcaagaccccccugggccugguggaccuguucguguucagcaccagcuucuaccugaucagcaucuuccugcaccuggugaagauccccacccacagacacgugaucggcaagcccugccccaagccccacagacugaaccacaugggcaucugcagcugcggccuguacaagcaccccggcgugcccgugaaguggaagagaugaggacuagucccuguucccagagcccacuuuuuuuucuuuuuuugaaauaaaauagccugucuuucagaucuaaaaaaaaaaaaaaaaaaaaaaaaaaaaaaaaaaaaaaaaaaaaaaaaaaaaaaaaaaaaaaaaaaaaaaaaaaaaaaaaaaaaaaaaaaaaaaaaaaaa

SEQ ID NO: 27220 - RNA, 1740 nt, Artificial Sequence
  mRNA product Design a-2 (A100) comprising derived and/or modified sequence from LASV(LASV035-NIG-2009;Clade II)__AIT17588__GPCmut4 (opt4)
aggagaguccgcucagccagguugcagaagcggcuuagcguguguccuaaucuucucucugcguguagguaggccugugccgcaaacaagcuuaccaugggccagaucaucaccuucuuccaggaggugccccacgugaucgaggaggugaugaacaucgugcugaucgcccugagccugcuggccauccugaagggcaucuacaacguggccaccugcggccuguucggccuggugagcuuccugcugcugugcggcagaagcugcagcaccaccuacaagggcguguacgagcugcagacccuggagcuggacauggccagccugaacaugugcaugccccugagcugcaccaagaacaacagccaccacuacaucauggugggcaacgagaccggccuggagcugacccugaccaacaccagcaucaucaaccacaaguucugcaaccugagcgacgcccacaagaagaaccuguacgaccacgcccugaugagcaucaucagcaccuuccaccugagcauccccaacuucaaccaguacgaggccaugagcugcgacuucaacggcggcaagaucagcgugcaguacaaccugagccacgccuacgccguggacgccgccaaccacugcggcaccaucgccaacggcgugcugcagaccuucaugagaauggccuggggcggcagcuacaucgcccuggacagcggcaagggcagcugggacugcaucaugaccagcuaccaguaccugaucauccagaacaccaccugggaggaccacugccaguucagcagacccagccccaucggcuaccugggccugcugagccagagaaccagagacaucuacaucagcagaagaagaagaggcaccuucaccuggacccugagcgacagcgagggcaacgagacccccggcggcuacugccugaccagauggaugcugaucgaggccgagcugaagugcuucggcaacaccgccguggccaagugcaacgagaagcacgacgaggaguucugcgacaugcugagacuguucgacuucugcaagcaggccaucagaagacugaaggcccccgcccagaugagcauccagcugaucaacaaggccgugaacgcccugaucaacgaccagcugaucaugaagaaccaccugagagacaucaugggcauccccuacugcaacuacagcaaguacugcuaccugaaccacaccgugaccggcaagaccagccugcccagaugcugccuggugagcaacggcagcuaccugaacgagacccacuucagcgacgacaucgagcagcaggccgacaacaugaucaccgagcugcugcagaaggaguacaucgacagacagggcaagaccccccugggccugguggaccuguucguguucagcaccagcuucuaccugaucagcaucuuccugcaccuggugaagauccccacccacagacacgugaucggcaagcccugccccaagccccacagacugaaccacaugggcaucugcagcugcggccuguacaagcaccccggcgugcccgugaaguggaagagaugaggacuagucccuguucccagagcccacuuuuuuuucuuuuuuugaaauaaaauagccugucuuucagaucuaaaaaaaaaaaaaaaaaaaaaaaaaaaaaaaaaaaaaaaaaaaaaaaaaaaaaaaaaaaaaaaaaaaaaaaaaaaaaaaaaaaaaaaaaaaaaaaaaaaa

SEQ ID NO: 27221 - RNA, 1740 nt, Artificial Sequence
  mRNA product Design a-2 (A100) comprising derived and/or modified sequence from LASV(LASV1000-NIG-2009;Clade II)__AIT17782__GPCmut4 (opt4)
aggagaguccgcucagccagguugcagaagcggcuuagcguguguccuaaucuucucucugcguguagguaggccugugccgcaaacaagcuuaccaugggccagaucaucaccuucuuccaggaggugccccacgugaucgaggaggugaugaacaucgugcugaucgcccugagccugcuggccauccugaagggcaucuacaacguggccaccugcggccuguucggccuggugagcuuccugcugcugugcggcagaagcugcagcaccaccuacaagggcguguacgagcugcagacccuggagcuggacauggccagccugaacaugugcaugccccugagcugcaccaagaacaacagccaccacuacaucauggugggcaacgagaccggccuggagcugacccugaccaacaccagcaucaucaaccacaaguucugcaaccugagcgacgcccacaagaagaaccuguacgaccacgcccugaugagcaucaucagcaccuuccaccugagcauccccaacuucaaccaguacgaggccaugagcugcgacuucaacggcggcaagaucagcgugcaguacaaccugagccacaccuacgccguggacgccgccaaccacugcggcaccaucgccaacggcgugcugcagaccuucaugagaauggccuggggcggcagcuacaucgcccuggacagcggcaagggcagcugggacugcaucaugaccagcuaccaguaccugaucauccagaacaccaccugggaggaccacugccaguucagcagacccagccccaucggcuaccugggccugcugagccagagaaccagagacaucuacaucagcagaagaagaagaggcaccuucaccuggacccugagcgacagcgagggcaacgagacccccggcggcuacugccugaccagauggaugcugaucgaggccgagcugaagugcuucggcaacaccgccguggccaagugcaacgagaagcacgacgaggaguucugcgacaugcugagacuguucgacuucugcaagcaggccaucaagagacugaagacccccgcccagaugagcauccagcugaucaacaaggccgugaacgcccugaucaacgaccagcugaucaugaagaaccaccugagagacaucaugggcauccccuacugcaacuacagcaaguacugcuaccugaaccacaccgugaccggcaagaccagccugcccagaugcugccuggugagcaacggcagcuaccugaacgagacccacuucagcgacgacaucgagcagcaggccgacaacaugaucaccgagcugcugcagaaggaguacaucgacagacagggcaagaccccccugggccugguggaccuguucguguucagcaccagcuucuaccugaucagcaucuuccugcaccuggugaagauccccacccacagacacguggugggcaagcccugccccaagccccacagacugaaccacaugggcaucugcagcugcggccuguacaagcaccccggcgugcccgugaaguggaagagaugaggacuagucccuguucccagagcccacuuuuuuuucuuuuuuugaaauaaaauagccugucuuucagaucuaaaaaaaaaaaaaaaaaaaaaaaaaaaaaaaaaaaaaaaaaaaaaaaaaaaaaaaaaaaaaaaaaaaaaaaaaaaaaaaaaaaaaaaaaaaaaaaaaaaa

SEQ ID NO: 27222 - RNA, 1740 nt, Artificial Sequence
  mRNA product Design a-2 (A100) comprising derived and/or modified sequence from LASV(LASV221-NIG-2010;Clade II)__AIT17624__GPCmut4 (opt4)
aggagaguccgcucagccagguugcagaagcggcuuagcguguguccuaaucuucucucugcguguagguaggccugugccgcaaacaagcuuaccaugggccagaucaucaccuucuuccaggaggugccccacgugaucgaggaggugaugaacaucgugcugaucgcccugagccugcuggccauccugaagggcaucuacaacguggccaccugcggccuguucggccuggugagcuuccugcugcugugcggcagaagcugcagcaccaccuacaagggcguguacgagcugcagacccuggagcuggacauggccagccugaacaugugcaugccccugagcugcaccaagaacaacagccaccacuacaucauggugggcaacgagaccggccuggagcugacccugaccaacaccagcaucaucaaccacaaguucugcaaccugagcgacgcccacaagaagaaccuguacgaccacgcccugaugagcaucaucagcaccuuccaccugagcauccccaacuucaaccaguacgaggccaugagcugcgacuucaacggcggcaagaucagcgugcaguacaaccugagccacaccuacgccaucgacgccgccaaccacugcggcaccaucgccaacggcgugcugcagaccuucaugagaauggccuggggcggcagcuacaucgcccuggacagcggcaagggcagcugggacugcaucaugaccagcuaccaguaccugaucauccagaacaccaccugggaggaccacugccaguucagcagacccagccccaucggcuaccugggccugcugagccagagaaccagagacaucuacaucagcagaagaagaagaggcaccuucaccuggacccugagcgacagcgagggcaacgagacccccggcggcuacugccugaccagauggaugcugaucgaggccgagcugaagugcuucggcaacaccgccguggccaagugcaacgagaagcacgacgaggaguucugcgacaugcugagacuguucgacuucugcaagcaggccaucagaagacugaagacccccgcccagaugagcauccagcugaucaacaaggccgugaacgcccugaucaacgaccagcugaucaugaagaaccaccugagagacaucaugggcauccccuacugcaacuacagcaaguacugcuaccugaaccacaccgugaccggcaagaccagccugcccagaugcugccuggugagcaacggcagcuaccugaacgagacccacuucagcgacgacaucgagcagcaggccgacaacaugaucaccgagaugcugcagaaggaguacauggacagacagggcaagaccccccugggccugguggaccuguucguguucagcaccagcuucuaccugaucagcaucuuccugcaccuggugaagauccccacccacagacacgugaucggcaagcccugccccaagccccacagacugaaccacaugggcaucugcagcugcggccuguacaagcaccccggcgugcccgugaaguggaagagaugaggacuagucccuguucccagagcccacuuuuuuuucuuuuuuugaaauaaaauagccugucuuucagaucuaaaaaaaaaaaaaaaaaaaaaaaaaaaaaaaaaaaaaaaaaaaaaaaaaaaaaaaaaaaaaaaaaaaaaaaaaaaaaaaaaaaaaaaaaaaaaaaaaaaa

SEQ ID NO: 27223 - RNA, 1740 nt, Artificial Sequence
  mRNA product Design a-2 (A100) comprising derived and/or modified sequence from LASV(LASV237-NIG-2010;Clade II)__AIT17638__GPCmut4 (opt4)
aggagaguccgcucagccagguugcagaagcggcuuagcguguguccuaaucuucucucugcguguagguaggccugugccgcaaacaagcuuaccaugggccagaucaucaccuucuuccaggaggugccccacgugaucgaggaggugaugaacaucgugcugaucgcccugagccugcuggccauccugaagggcaucuacaacguggccaccugcggccuguucggccuggugagcuuccugcugcugugcggcagaagcugcagcaccaccuacaagggcguguacgagcugcagacccuggagcuggacauggccagccugaacaugugcaugccccugagcugcaccaagaacaacagccaccacuacaucauggugggcaacgagaccggccuggagcugacccugaccaacaccagcaucaucaaccacaaguucugcaaccugagcgacgcccacaagaaggaccuguacgaccacgcccugaugagcaucaucagcaccuuccaccugagcauccccaacuucaaccaguacgaggccaugagcugcgacuucaacggcggcaagaucagcgugcaguacaaccugagccacaccuacgccguggacgccgccaaccacugcggcaccaucgccaacggcgugcugcagaccuucaugagaauggccuggggcggcagcuacaucgcccuggacagcggcaagggcagcugggacugcaucaugaccagcuaccaguaccugaucauccagaacaccaccugggaggaccacugccaguucagcagacccagccccaucggcuaccugggccugcugagccagagaaccagagacaucuacaucagcagaagaagaagaggcaccuucaccuggacccugagcgacagcgagggcaacgagacccccggcggcuacugccugaccagauggaugcugaucgaggccgagcugaagugcuucggcaacaccgccguggccaagugcaacgagaagcacgacgaggaguucugcgacaugcugagacuguucgacuucugcaagcaggccaucagaagacugaagacccccgcccagaugagcauccagcugaucaacaaggccgugaacgcccugaucaacgaccagcugaucaugaagaaccaccugagagacaucaugggcauccccuacugcaacuacagcaaguacugcuaccugaaccacaccgugaccggcaagaccagccugcccagaugcugccuggugagcaacggcagcuaccugaacgagacccacuucagcgacgacaucgagcagcaggccgacaacaugaucaccgagcugcugcagaaggaguacauggacagacagggcaagaccccccugggccugguggaccuguucguguucagcaccagcuucuaccugaucagcaucuuccugcaccugaucaagauccccacccacagacacaucaccggcaagcccugccccaagccccacagacugaaccacaugggcaucugcagcugcggccuguacaagcaccccggcgugcccgugaaguggaagagaugaggacuagucccuguucccagagcccacuuuuuuuucuuuuuuugaaauaaaauagccugucuuucagaucuaaaaaaaaaaaaaaaaaaaaaaaaaaaaaaaaaaaaaaaaaaaaaaaaaaaaaaaaaaaaaaaaaaaaaaaaaaaaaaaaaaaaaaaaaaaaaaaaaaaa

SEQ ID NO: 27224 - RNA, 1740 nt, Artificial Sequence
  mRNA product Design a-2 (A100) comprising derived and/or modified sequence from LASV(LASV253-NIG-2011;Clade II)__AIT17670__GPCmut4 (opt4)
aggagaguccgcucagccagguugcagaagcggcuuagcguguguccuaaucuucucucugcguguagguaggccugugccgcaaacaagcuuaccaugggccagaucaucaccuucuuccaggaggugccccacgugaucgaggaggugaugaacaucgugcugaucgcccugagccugcuggccauccugaagggcaucuacaacguggccaccugcggccuguucggccuggugagcuuccugcugcugugcggcagaagcugcagcaccaccuacaagggcguguacgagcugcagacccuggagcuggacauggccagccugaacaugugcaugccccugagcugcaccaagaacaacagccaccacuacaucauggugggcaacgagaccggccuggagcugacccugaccaacaccagcaucaucaaccacaaguucugcaaccugagcgacgcccacaagaagaaccuguacgaccacgcccugaugagcaucaucagcaccuuccaccugagcauccccaacuucaaccaguacgaggccaugagcugcgacuucaacggcggcaagaucagcgugcaguacaaccugagccacaccuacgccguggacgccgccaaccacugcggcaccaucgccaacggcgugcugcagaccuucaugagaauggccuggggcggcagcuacaucgcccuggacagcggcaagggcagcugggacugcaucaugaccagcuaccaguaccugaucauccagaacaccaccugggaggaccacugccaguucagcagacccagccccaucggcuaccugggccugcugagccagagaaccagagacaucuacaucagcagaagaagaagaggcaccuucaccuggacccugagcgacagcgagggcaacgagacccccggcggcuacugccugaccagauggaugcugaucgaggccgagcugaagugcuucggcaacaccgccguggccaagugcaacgagaagcacgacgaggaguucugcgacaugcugagacuguucgacuucugcaagcaggccaucagaagacugaaggcccccgcccagaugagcauccagcugaucaacaaggccgugaacgcccugaucaacgaccagcugaucaugaagaaccaccugagagacaucaugggcauccccuacugcaacuacagcaaguacugcuaccugaaccacaccgugaccggcagaaccagccugcccagaugcugccuggugagcaacggcagcuaccugaacgagacccacuucagcgacgacaucgagcagcaggccgacaacaugaucaccgagcugcugcagaaggaguacaucgacagacagggcaagaccccccugggccugguggaccuguucguguucagcaccagcuucuaccugaucagcaucuuccugcaccuggugaagauccccacccacagacacaucaucggcaagcccugccccaagccccacagacugaaccacaugggcaucugcagcugcggccuguacaagcaccccggcgugcccgugaaguggaagagaugaggacuagucccuguucccagagcccacuuuuuuuucuuuuuuugaaauaaaauagccugucuuucagaucuaaaaaaaaaaaaaaaaaaaaaaaaaaaaaaaaaaaaaaaaaaaaaaaaaaaaaaaaaaaaaaaaaaaaaaaaaaaaaaaaaaaaaaaaaaaaaaaaaaaa

SEQ ID NO: 27225 - RNA, 1740 nt, Artificial Sequence
  mRNA product Design a-2 (A100) comprising derived and/or modified sequence from LASV(LASV254-NIG-2011;Clade II)__AIT17674__GPCmut4 (opt4)
aggagaguccgcucagccagguugcagaagcggcuuagcguguguccuaaucuucucucugcguguagguaggccugugccgcaaacaagcuuaccaugggccagaucaucaccuucuuccaggaggugccccacgugaucgaggaggugaugaacaucgugcugaucgcccugagccugcuggccauccugaagggcaucuacaacguggccaccugcggccuguucggccuggugagcuuccugcugcugugcggcagaagcugcagcaccaccuacaagggcguguacgagcugcagacccuggagcuggacaugaccaaccugaacaugugcaugccccugagcugcaccaagaacaacagccaccacuacaucauggugggcaacgagaccggccuggagcugacccugaccaacaccagcaucaucaaccacaaguucugcaaccugagcgacgcccacaagaagaaccuguacaaccacgcccugaugagcaucaucagcaccuuccaccugagcauccccaacuucaaccaguacgaggccaugagcugcgacuucaacggcggcaagaucagcgugcaguacaaccugagccacagcuacgccguggacgccgccaaccacugcggcaccaucgccaacggcgugcugcagaccuucaugagaauggccuggggcggcagcuacaucgcccuggacagcggcaagggcaacugggacugcaucaugaccagcuaccaguaccugaucauccagaacaccaccugggaggaccacugccaguucagcagacccagccccaucggcuaccugggccugcugagccagagaaccagagacaucuacaucagcagaagaagaagaggcaccuucaccuggacccugagcgacagcgagggcaacgagacccccggcggcuacugccugaccagauggaugcugaucgaggccgagcugaagugcuucggcaacaccgccguggccaagugcaacgagaagcacgacgaggaguucugcgacaugcugagacuguucgacuucugcaagcaggccaucagaagacugaagacccccgcccaggccaacauccagcugaucaacaaggccgugaacgcccugaucaacgaccagcugaucaugaagaaccaccugagagacaucaugggcauccccuacugcaacuacagcaaguacugcuaccugaaccacaccgugaccggcaagaccagccugcccagaugcugccuggugagcaacggcagcuaccugaacgagacccacuucagcgacgacaucgagcagcaggccgacaacaugaucaccgagcugcugcagaaggaguacauggacagacagggcaagaccccccugggccugguggaccuguucguguucagcaccagcuucuaccugaucagcaucuuccugcaccuggugaagauccccacccacagacacgugaucggcaagcccugccccaagccccacagacugaaccacaugggcaucugcagcugcggccuguacaagcaccccggcgugcccgugaaguggaagagaugaggacuagucccuguucccagagcccacuuuuuuuucuuuuuuugaaauaaaauagccugucuuucagaucuaaaaaaaaaaaaaaaaaaaaaaaaaaaaaaaaaaaaaaaaaaaaaaaaaaaaaaaaaaaaaaaaaaaaaaaaaaaaaaaaaaaaaaaaaaaaaaaaaaaa

SEQ ID NO: 27226 - RNA, 1740 nt, Artificial Sequence
  mRNA product Design a-2 (A100) comprising derived and/or modified sequence from LASV(Nig08-A19;Clade III)__ADU56618__GPCmut4 (opt4)
aggagaguccgcucagccagguugcagaagcggcuuagcguguguccuaaucuucucucugcguguagguaggccugugccgcaaacaagcuuaccaugggccagaucgugaccuucuuccaggaggugccccacgugaucgaggaggugaugaacaucgugcugaucgcccugagcauccuggccauccugaagggccuguacaacaucgccaccugcggccugaucggccuggugaccuuccugcugcugagcggcagaagcugcagcaugaccuacaagggcguguacgagcugcagacccuggagcugaacaugaacacccugaacaugugcaugccccugagcugcaccaagaacaacagccaccacuacaucauggugggcaacgagaccggccuggagcugacccugaccaacaccagccugcugcaccacaaguucugcaaccugagcgacgcccacaagaagaaccuguacgaccacacccugaugagcaucaucagcaccuuccaccugagcauccccaacuucaaccaguacgaggccaugagcugcgacuucaacggcggcaagaucaccgugcaguacaaccugagccacagcuacgccaucgacgccgccaaccacugcggcaccguggccaacggcgugcugcagaccuucaugagaauggccuggggcggcagcuacaucgcccuggacagcggcagaggcaagugggacugcaucaugaccagcuaccaguaccugaucauccagaacaccaccugggaggaccacugccaguucagcagacccagccccaucggcuaccugggccugcugagccagagaaccagagacaucuacaucagcagaagaagaagaggcaccuucaccuggacccugagcgacagcgagggcaacgagacccccggcggcuacugccugaccagauggaugcugaucgaggccgagcugaagugcuucggcaacaccgccguggccaagugcaacgagaagcacgacgaggaguucugcgacaugcugagacuguucgacuucugcaagcaggccaucagaagacugaaggcccccgcccagaugagcauccagcugaucaacaaggccgugaacgcccugaucaacgaccagcugaucaugaagaaccaccugagagacaucaugggcauccccuacugcaacuacagcaaguacugcuaccugaaccacaccagcaccggcagaaccagccugcccagaugcugccuggugagcaacggcagcuaccugaacgagacccacuucagcgacgacaucgagcagcaggccgacaacaugaucaccgagaugcugcagaaggaguaccuggacagacagggcaagaccccccugggccugguggaccuguucguguucagcaccagcuucuaccugaucagcaucuuccugcaccuggugaagauccccacccacagacacaucgugggcaagcccugccccaagccccacagacugaaccacaugggcaucugcagcugcggccuguacaagcagcccggcgugcccgugagauggaagagaugaggacuagucccuguucccagagcccacuuuuuuuucuuuuuuugaaauaaaauagccugucuuucagaucuaaaaaaaaaaaaaaaaaaaaaaaaaaaaaaaaaaaaaaaaaaaaaaaaaaaaaaaaaaaaaaaaaaaaaaaaaaaaaaaaaaaaaaaaaaaaaaaaaaaa

SEQ ID NO: 27227 - RNA, 1743 nt, Artificial Sequence
  mRNA product Design a-2 (A100) comprising derived and/or modified sequence from LASV(G1180-SLE-2010;Clade IV)__AIT17168__GPCmut4 (opt4)
aggagaguccgcucagccagguugcagaagcggcuuagcguguguccuaaucuucucucugcguguagguaggccugugccgcaaacaagcuuaccaugggccagaucgugaccuucuuccaggaggugccccacgugaucgaggaggugaugaacaucgugcugaucgcccugagcauccuggccgugcugaagggccuguacaacuucgccaccugcggccuggugggccugcugaccuuccugcugcugugcggcagaagcugcaccgccagcagauacaagggcguguacgagcugcagacccuggagcugaacauggagacccugaacaugugcaugccccugagcugcaccaagaacaacagccaccacuacaucauggugggcaacgagaccggccuggagcugacccugaccaacaccagcaucaucaaccacaaguucugcaaccugagcgacgcccacaagaagaaccuguacgaccacgcccugaugagcaucaucagcaccuuccaccugagcauccccaacuucaaccaguacgaggccaugagcugcgacuucaacggcggcaagaucagcgugcaguacaaccugagccacagcuacgccggcgacgccgccaaccacugcggcaccguggccaacggcgugcugcagaccuucaugagaauggccuggggcggcagcuacaucgcccuggacagcggccacggcagcugggacugcaucaugaccagcuaccaguaccugaucauccagaacaccaccugggaggaccacugccaguucagcagacccagccccaucggcuaccugggccugcugagccagagaaccagagacaucuacaucagcagaagaagaagaggcaccuucaccuggacccugagcgacagcgagggcaaggacacccccggcggcuacugccugaccagauggaugcugaucgaggccgagcugaagugcuucggcaacaccgccguggccaagugcaacgagaagcacgacgaggaguucugcgacaugcugagacuguucgacuucugcaagcaggccauccagagacugaaggcccccgcccagaugagcauccagcugaucaacaaggccgugaacgcccugaucaacgaccagcugaucaugaagaaccaccugagagacaucaugggcauccccuacugcaacuacagcaaguacugcuaccugaaccacaccaccaccggcaagaccagccugcccaagugcugccuggugagcaacggcagcuaccugaacgagacccacuucagcgacgacaucgagcagcaggccgacaacaugaucaccgagaugcugcagaaggaguacauggagagacagggcaagaccccccugggccugguggaccuguucguguucagcaccagcuucuaccugaucagcaucuuccugcaccuggugaagauccccacccacagacacaucgugggcaagagcugccccaagccccacagacugaaccacaugggcaucugcagcugcggccuguacaagcagcccggcgugcccgugaaguggaagagaugaggacuagucccuguucccagagcccacuuuuuuuucuuuuuuugaaauaaaauagccugucuuucagaucuaaaaaaaaaaaaaaaaaaaaaaaaaaaaaaaaaaaaaaaaaaaaaaaaaaaaaaaaaaaaaaaaaaaaaaaaaaaaaaaaaaaaaaaaaaaaaaaaaaaa

SEQ ID NO: 27228 - RNA, 1743 nt, Artificial Sequence
  mRNA product Design a-2 (A100) comprising derived and/or modified sequence from LASV(G1442-SLE-2011;Clade IV)__AIT17180__GPCmut4 (opt4)
aggagaguccgcucagccagguugcagaagcggcuuagcguguguccuaaucuucucucugcguguagguaggccugugccgcaaacaagcuuaccaugggccagaucgugaccuucuuccaggaggugccccacgugaucgaggaggugaugaacaucgugcugaucgcccugagcauccuggccgugcugaagggccuguacaacguggccaccugcggccugaucggccuggugaccuuccugcugcugugcggcagaagcugcaccaccacccuguacaagggcguguacgagcugcagacccuggagcugaacauggagacccugaacaugugcaugccccugagcugcaccaagaacaacagccaccacuacaucagagugggcaacgagaccggccuggagcugacccugaccaacaccagcaucaucaaccacaaguucugcaaccugagcgacgcccacaagaagaaccuguacgaccacgcccugaugagcaucaucagcaccuuccaccugagcauccccaacuucaaccaguacgaggccaugagcugcgacuucaacggcggcaagaucagcgugcaguacaaccugagccacagcuacgccggcgacgccgccaaccacugcggcaccguggccaacggcgugcugcagaccuucaugagaauggccuggggcggcagcuacaucgcccuggacagcggcagaggcaacugggacugcaucaugaccagcuaccaguaccugaucauccagaacaccaccugggacgaccacugccaguucagcagacccagccccaucggcuaccugggccugcugagccagagaaccagagacguguacaucagcagaagaagaagaggcaccuucaccuggacccugagcgacagcgagggcaaggacacccccggcggcuacugccugaccagauggaugcugaucgaggccgagcugaagugcuucggcaacaccgccguggccaagugcaacgagaagcacgacgaggaguucugcgacaugcugagacuguucgacuucugcaagcaggccauccagagacugaaggcccccgcccagaugagcauccagcugaucaacaaggccgugaacgcccugaucaacgaccagcugaucaugaagaaccaccugagagacaucaugggcauccccuacugcaacuacagcaaguacugcuaccugaacaacaccgccaccggcaagaccagccugcccaagugcugccugaucagcaacggcagcuaccugaacgagacccacuucagcgacgacaucgagcaggaggccgacaacaugaucaccgagaugcugcagaaggaguacauggagagacagggcaagaccccccugggccugguggaccuguucguguucagcaccagcuucuaccugaucagcaucuuccugcaccuggugaagauccccacccacagacacaucgugggcaagagcugccccaagccccacagacugaaccacaugggcaucugcagcugcggccuguacaagcagcccggcgugcccgugagauggaagagaugaggacuagucccuguucccagagcccacuuuuuuuucuuuuuuugaaauaaaauagccugucuuucagaucuaaaaaaaaaaaaaaaaaaaaaaaaaaaaaaaaaaaaaaaaaaaaaaaaaaaaaaaaaaaaaaaaaaaaaaaaaaaaaaaaaaaaaaaaaaaaaaaaaaaa

SEQ ID NO: 27229 - RNA, 1743 nt, Artificial Sequence
  mRNA product Design a-2 (A100) comprising derived and/or modified sequence from LASV(G3010-SLE-2013;Clade IV)__AIT17344__GPCmut4 (opt4)
aggagaguccgcucagccagguugcagaagcggcuuagcguguguccuaaucuucucucugcguguagguaggccugugccgcaaacaagcuuaccaugggccagaucgugaccuucuuccaggaggugccccacgugaucgaggaggugaugaacaucgugcugaucgcccugagcauccuggccgugcugaagggccuguacaacuucgccaccugcggccuggugggccuggugaccuuccugcugcugugcggcagaagcugcaccaccagccuguacaagggcguguacgagcugcagacccuggagcugaacauggagacccugaacaugugcaugccccugagcugcaccaagaacaacagccaccacuacaucauggugggcaacgagaccggccuggagcugacccugaccaacaccagcaucaucaaccacaaguucugcaaccugagcgacgcccacaagaagaaccuguacaaccacgcccugaugagcaucaucagcaccuuccaccugagcauccccaacuucaaccaguacgaggccaugagcugcgacuucaacggcggcaagaucagcgugcaguacaaccugagccacagcuacgccggcgacgccgccagccacugcggcaccguggccaacggcgugcugcagaccuucaugagaauggccuggggcggcagcuacaucgcccuggacagcggcuacggcaagugggacugcaucaugaccagcuaccaguaccugaucauccagaacaccaccugggaggaccacugccaguucagcagacccagccccaucggcuaccugggccugcugagccagagaaccagagacaucuacaucagcagaagaagaagaggcaccuucaccuggacccugagcgacagcgagggcaaggacacccccggcggcuacugccugaccagauggaugcugaucgaggccgagcugaagugcuucggcaacaccgccguggccaagugcaacgagaagcacgacgaggaguucugcgacaugcugagacuguucgacuucugcaagcaggccauccagagacugaagacccccgcccagaugagcauccagcugaucaacaaggccgugaacgcccugaucaacgaccagcugaucaugaagaaccaccugagagacaucaugggcauccccuacugcaacuacagcaaguacugcuaccugaaccacaccaccaccggcaagaccagccugcccaagugcugccuggugagcaacggcagcuaccugaacgagacccacuucagcgacgacaucgagcagcaggccgacaacaugaucaccgagaugcugcagaaggaguacauggagagacagggcaagaccccccugggccugguggaccuguucguguucagcaccagcuucuaccugaucagcaucuuccugcaccuggugaagauccccacccacagacacaucgugggcaagagcugccccaagccccacagacugaaccacaugggcaucugcagcugcggccuguacaagcagcccggcgugcccgugagauggaagagaugaggacuagucccuguucccagagcccacuuuuuuuucuuuuuuugaaauaaaauagccugucuuucagaucuaaaaaaaaaaaaaaaaaaaaaaaaaaaaaaaaaaaaaaaaaaaaaaaaaaaaaaaaaaaaaaaaaaaaaaaaaaaaaaaaaaaaaaaaaaaaaaaaaaaa

SEQ ID NO: 27230 - RNA, 1743 nt, Artificial Sequence
  mRNA product Design a-2 (A100) comprising derived and/or modified sequence from LASV(G502-SLE-2009;Clade IV)__AIT17126__GPCmut4 (opt4)
aggagaguccgcucagccagguugcagaagcggcuuagcguguguccuaaucuucucucugcguguagguaggccugugccgcaaacaagcuuaccaugggccagaucgugaccuucuuccaggaggugccccacgugaucgaggaggugaugaacaucgugcugaucgcccugagcauccuggccgugcugaagggccuguacaacuucgccaccugcggccuggugggccugcugaccuuccugcugcugugcggcagaagcugcaccaccggccuguacaagggcguguacgagcugcagacccuggagcugaacauggagacccugaacaugugcaugccccugagcugcaccaagaacaacagccaccacuacaucauggugggcaacgagaccggccuggagcugacccugaccaacaccagcaucaucaaccacaaguucugcaaccugagcgacgcccacaagaagaaccuguacgaccacgcccugaugagcaucaucagcaccuuccaccugagcauccccaacuucaaccaguacgaggccaugagcugcgacuucaacggcggcaagaucagcgugcaguacaaccugagccacagcuacgccggcgacgccgccgaccacugcggcaccguggccaacggcgugcugcagaccuucaugagaauggccuggggcggcagcuacaucgcccuggacagcggcagaggcagaugggacugcaucaugaccagcuaccaguaccugaucauccagaacaccaccugggaggaccacugccaguucagcagacccagccccaucggcuaccugggccugcugagccagagaaccagagacaucuacaucagcagaagaagaagaggcaccuucaccuggacccugagcgacagcgagggcaaggacacccccggcggcuacugccugaccagauggaugcugaucgaggccgagcugaagugcuucggcaacaccgccguggccaagugcaacgagaagcacgacgaggaguucugcgacaugcugagacuguucgacuucugcaagcaggccauccagagacugaaggcccccgcccagaugagcauccagcugaucaacaaggccgugaacgcccugaucaacgaccagcuggugaugaagaaccaccugagagacaucaugggcauccccuacugcaacuacagcagauacugcuaccugaaccacaccaccaccggcagaaccagccugcccaagugcugccuggugagcaacggcagcuaccugaacgagacccacuucagcgacgacaucgagcagcaggccgacaacaugaucaccgagaugcugcagaaggaguacauggagagacagggcaagaccccccugggccugguggaccuguucguguucagcaccagcuucuaccugaucagcaucuuccugcaccuggugaagauccccacccacagacacaucgugggcaagagcugccccaagccccacagacugaaccacaugggcaucugcagcugcggccuguacaagcagcccggcgugcccgugaaguggaagagaugaggacuagucccuguucccagagcccacuuuuuuuucuuuuuuugaaauaaaauagccugucuuucagaucuaaaaaaaaaaaaaaaaaaaaaaaaaaaaaaaaaaaaaaaaaaaaaaaaaaaaaaaaaaaaaaaaaaaaaaaaaaaaaaaaaaaaaaaaaaaaaaaaaaaa

SEQ ID NO: 27231 - RNA, 1743 nt, Artificial Sequence
  mRNA product Design a-2 (A100) comprising derived and/or modified sequence from LASV(G733-SLE-2010;Clade IV)__AIT17154__GPCmut4 (opt4)
aggagaguccgcucagccagguugcagaagcggcuuagcguguguccuaaucuucucucugcguguagguaggccugugccgcaaacaagcuuaccaugggccagaucgugaccuucuuccaggaggugccccacgugaucgaggaggugaugaacaucgugcugaucgcccugagcauccuggccgugcugaagggccuguacaacuucgccaccugcggcaucgugggccuggugagcuuccugcugcugugcggcagaagcugcaccaccagccuguacaagggcguguacgagcugcagacccuggagcugaacauggagacccugaacaugugcaugccccugagcugcaccaagaacaacagccaccacuacaucauggugggcaacgagaccggccuggagcugacccugaccaacaccagcaucaucaaccacaaguucugcaaccugagcgacgcccacaagaagaaccuguacgaccacgcccugaugagcaucaucagcaccuuccaccugagcauccccaacuucaaccaguacgaggccaugagcugcgacuucaacggcggcaagaucagcgugcaguacaaccugagccacagcuacgccggcgacgccgccaaccacugcggcaccaucgccaacggcgugcugcagaccuucaugagaauggccuggggcggcagcuacaucgcccuggacagcggcagagacagaugggacugcaucaugaccagcuaccaguaccugaucauccagaacaccaccugggaggaccacugccaguucagcagacccagccccaucggcuaccugggccugcugagccagagaaccagagacaucuacaucagcagaagaagaagaggcaccuucaccuggacccugagcgacagcgagggcaaggacacccccggcggcuacugccugaccagauggaugcugaucgaggccgagcugaagugcuucggcaacaccgccguggccaagugcaacgagaagcacgacgaggaguucugcgacaugcugagacuguucgacuucugcaagcaggccauccagagacugaaggcccccgcccagaugagcauccagcugaucaacaaggccgugaacgcccugaucaacgaccagcugaucaugaagaaccaccugagagacaucaugggcauccccuacugcaacuacagcaaguacugcuaccugaaccacaccaccaccggcaagaccagccugcccaagugcugccuggugagcaacggcagcuaccugaacgagacccacuucagcgacgacaucgagcagcaggccgacaacaugaucaccgagaugcugcagaaggaguacauggagagacagggcaagaccccccugggccugguggaccuguucguguucagcaccagcuucuaccugaucagcaucuuccugcaccuggugaagauccccacccacagacacguggugggcaagagcugccccaagccccacagacugaaccacaugggcaucugcagcugcggccuguacggccagcccggcgugcccgugaaguggaagagaugaggacuagucccuguucccagagcccacuuuuuuuucuuuuuuugaaauaaaauagccugucuuucagaucuaaaaaaaaaaaaaaaaaaaaaaaaaaaaaaaaaaaaaaaaaaaaaaaaaaaaaaaaaaaaaaaaaaaaaaaaaaaaaaaaaaaaaaaaaaaaaaaaaaaa

SEQ ID NO: 27232 - RNA, 1743 nt, Artificial Sequence
  mRNA product Design a-2 (A100) comprising derived and/or modified sequence from MOPV/LASV reassortant(IGS-1;Clade IV)__AFY05576__GPCmut4 (opt4)
aggagaguccgcucagccagguugcagaagcggcuuagcguguguccuaaucuucucucugcguguagguaggccugugccgcaaacaagcuuaccaugggccagaucgugaccuucuuccaggaggugccccacgugaucgaggaggugaugaacaucgugcugaucgcccugagcgugcuggccgugcugaagggccuguacaacuucgccaccugcggccuggugggccuggugaccuuccugcugcugugcggcagaagcugcaccaccagccuguacaagggcguguacgagcugcagacccuggagcugaacauggagacccugaacaugugcaugccccugagcugcaccaagaacaacagccaccacuacaucauggugggcaacgagaccggccuggagcugacccugaccaacaccagcaucaucaaccacaaguucugcaaccugagcgacgcccacaagaagaaccuguacgaccacgcccugaugagcaucaucagcaccuuccaccugagcauccccaacuucaaccaguacgaggccaugagcugcgacuucaacggcggcaagaucagcgugcaguacaaccugagccacagcuacgccggcgacgccgccaaccacugcggcaccguggccaacggcgugcugcagaccuucaugagaauggccuggggcggcagcuacaucgcccuggacagcggcagaggcaacugggacugcaucaugaccagcuaccaguaccugaucauccagaacaccaccugggaggaccacugccaguucagcagacccagccccaucggcuaccugggccugcugagccagagaaccagagacaucuacaucagcagaagaagaagaggcaccuucaccuggacccugagcgacagcgagggcgaggacacccccggcggcuacugccugaccagauggaugcugaucgaggccgagcugaagugcuucggcaacaccgccguggccaagugcaacgagaagcacgacgaggaguucugcgacaugcugagacuguucgacuucugcaagcaggccauccagagacugaaggcccccgcccagaugagcauccagcugaucaacaaggccgugaacgcccugaucaacgaccagcugaucaugaagaaccaccugagagacaucaugggcauccccuacugcaacuacagcaaguacugcuaccugaaccacaccaccaccggcagaaccagccugcccaagugcugccuggugagcaacggcagcuaccugaacgagacccacuucagcgacgacaucgagcagcaggccgacaacaugaucaccgagaugcugcagaaggaguacauggagagacagggcaagaccccccugggccugguggaccuguucguguucagcaccagcuucuaccugaucagcaucuuccugcaccuggugaagauccccacccacagacacaucgugggcaagagcugccccaagccccacagacugaaccacaugggcaucugcagcugcggccuguacaagcagcccggcgugcccgugaaguggaagagaugaggacuagucccuguucccagagcccacuuuuuuuucuuuuuuugaaauaaaauagccugucuuucagaucuaaaaaaaaaaaaaaaaaaaaaaaaaaaaaaaaaaaaaaaaaaaaaaaaaaaaaaaaaaaaaaaaaaaaaaaaaaaaaaaaaaaaaaaaaaaaaaaaaaaa

SEQ ID NO: 27233 - RNA, 1743 nt, Artificial Sequence
  mRNA product Design a-2 (A100) comprising derived and/or modified sequence from LASV(LM765-SLE-2012;Clade IV)__AIT17814__GPCmut4 (opt4)
aggagaguccgcucagccagguugcagaagcggcuuagcguguguccuaaucuucucucugcguguagguaggccugugccgcaaacaagcuuaccaugggccagaucgugaccuucuuccaggaggugccccacgugaucgaggaggugaugaacaucgugcugaucgcccugagcauccuggccgugcugaagggccuguacaacuucgccaccugcggccuggugggccuggugaccuuccugcugcugugcggcagaagcugcaccaccagccuguacaagggcguguacgagcugcagacccuggagcugaacauggagacccugaacaugugcaugccccugagcugcaccaagaacaacagccaccacuacaucauggugggcaacgagaccggccuggagcugacccugaccaacaccagcaucaucgaccacaaguucugcaaccugagcgacgcccacagaaagaaccuguacgaccacgcccugaugagcaucaucagcaccuuccaccugagcauccccaacuucaaccaguacgaggccaugagcugcgacuucaacggcggcaagaucagcgugcaguacaaccugagccacagcuacgccaaggacgccgccgaccacugcggcaccguggccaacggcgugcugcagaccuucaugagaauggccuggggcggcagcuacaucgcccuggacagcggcagaggcagaugggacugcaucaugaccagcuaccaguaccugaucauccagaacaccaccugggaggaccacugccaguucagcagacccagccccaucggcuaccugggccugcugagccagagaaccagagacaucuacaucagcagaagaagaagaggcaccuucaccuggacccugagcgacagcgagggcaaggacacccccggcggcuacugccugaccagauggaugcugaucgaggccgagcugaagugcuucggcaacaccgccguggccaagugcaacgagaagcacgacgaggaguucugcgacaugcugagacuguucgacuucugcaagcaggccauccagagacugaaggcccccgcccagaugagcauccagcugaucaacaaggccgugaacgcccugaucaacgaccagcugaucaugaagaaccaccugagagacaucaugggcauccccuacugcaacuacagcaaguacugcuaccugaaccacaccaccaccggcaagaccagccugcccaagugcugccuggugagcaacggcagcuaccugaacgagacccacuucagcgacgacaucgagcagcaggccgacaacaugaucaccgagaugcugcagaaggaguacauggagagacagggcaagaccccccugggccugguggaccuguucguguucagcaccagcuucuaccugaucagcaucuuccugcaccuggugaagauccccacccacagacacaucgugggcaagcccugccccaagccccacagacugaaccacaugggcaucugcagcugcggccuguacaagcagcccggcgugcccgugaaguggaagagaugaggacuagucccuguucccagagcccacuuuuuuuucuuuuuuugaaauaaaauagccugucuuucagaucuaaaaaaaaaaaaaaaaaaaaaaaaaaaaaaaaaaaaaaaaaaaaaaaaaaaaaaaaaaaaaaaaaaaaaaaaaaaaaaaaaaaaaaaaaaaaaaaaaaaa

SEQ ID NO: 27234 - RNA, 1743 nt, Artificial Sequence
  mRNA product Design a-2 (A100) comprising derived and/or modified sequence from LASV(LM776-SLE-2012;Clade IV)__AIT17824__GPCmut4 (opt4)
aggagaguccgcucagccagguugcagaagcggcuuagcguguguccuaaucuucucucugcguguagguaggccugugccgcaaacaagcuuaccaugggccagaucgugaccuucuuccaggaggugccccacgugaucgaggaggugaugaacaucgugcugaucgcccugagcauccuggccgugcugaagggccuguacaacuucgccaccugcggccuggugggccuggugaccuuccugcugcugugcggcagaagcugcaccaccagcguguacaagggcguguacgagcugcagacccuggagcugaacauggagacccugaacaugugcaugccccugagcugcaccaagaacaacagccaccacuacaucauggugggcaacgagaccggccuggagcugacccugaccaacaccagcaucaucaaccacaaguucugcaaccugagcgacgcccacaagaagaaccuguacgaccacgcccugaugagcaucaucagcaccuuccaccugagcauccccaacuucaaccaguacgaggccaugagcugcgacuucaacggcggcaagaucagcgugcaguacaaccugagccacagcuacgccggcgacgccgccaaccacugcggcaccguggccaacggcgugcugcagaccuucaugagaauggccuggggcggcagcuacaucgcccuggacagcggccacggcaagugggacugcaucaugaccagcuaccaguaccugaucauccagaacaccaccugggaggaccacugccaguucagcagacccagccccaucggcuaccugggccugcugagccagagaaccagagacaucuacaucagcagaagaagaagaggcaccuucaccuggacccugagcgacagcgagggcaaggacacccccggcggcuacugccugaccagauggaugcugaucgaggccgagcugaagugcuucggcaacaccgccguggccaagugcaacgagaagcacgacgaggaguucugcgacaugcugagacuguucgacuucugcaagcaggccauccagagacugaaggcccccgcccagaugagcauccagcugaucaacaaggccgugaacgcccugaucaacgaccagcugaucaugaagaaccaccugagagacaucaugggcauccccuacugcaacuacagcaaguacugcuaccugaaccacaccaccaccggcaagaccagccugcccaagugcugccuggugagcaacggcagcuaccugaacgagacccacuucagcgacgacaucgagcagcaggccgacaacaugaucaccgagaugcugcagaaggaguacauggagagacagggcaagaccccccugggccugguggaccuguucguguucagcaccagcuucuaccugaucagcaucuuccugcaccuggugaagauccccacccacagacacaucgugggcaagagcugccccaagccccacagacugaaccacaugggcaucugcagcugcggccuguacaagcagcccggcgugcccgugagauggaagagaugaggacuagucccuguucccagagcccacuuuuuuuucuuuuuuugaaauaaaauagccugucuuucagaucuaaaaaaaaaaaaaaaaaaaaaaaaaaaaaaaaaaaaaaaaaaaaaaaaaaaaaaaaaaaaaaaaaaaaaaaaaaaaaaaaaaaaaaaaaaaaaaaaaaaa

SEQ ID NO: 27235 - RNA, 1743 nt, Artificial Sequence
  mRNA product Design a-2 (A100) comprising derived and/or modified sequence from LASV(Mad39;Clade IV)__ANH09722__GPCmut4 (opt4)
aggagaguccgcucagccagguugcagaagcggcuuagcguguguccuaaucuucucucugcguguagguaggccugugccgcaaacaagcuuaccaugggccagaucgugaccuucuuccaggaggugccccacgugaucgaggaggugaugaacaucgugcugaucgcccugagcauccuggccgugcugaagggccuguacaacguggccaccugcggccugaucggccuggugaccuuccugcugcugugcggcagaagcugcaccaccacccuguacaagggcguguacgagcugcaggcccuggagcugaacauggagacccugaacaugugcaugccccugagcugcaccaagaacaacagccaccacuacaucagagugggcaacgagaccggccuggagcugacccugaccaacaccagccugaucaaccacaaguucugcaaccugagcgacgcccacaagaagaaccuguacgaccacgcccugaugagcaucaucagcaccuuccaccugagcauccccaacuucaaccaguacgaggccaugagcugcgacuucaacgacggcaagaucagcgugcaguacaaccugagccacaccuacgccggcgacaccgccaaccacugcggcaccguggccaacggcgugcugcagaccuucaugagaauggccuggggcggcagcuacaucgcccuggacagcggcagaggcggcugggacugcaucaugaccagcuaccaguaccugaucauccagaacaccaccugggaggaccacugccaguucagcagacccagccccaucggcuaccugggccugcugagccagagaaccagagacaucuacaucagcagaagaagaagaggcaccuucaccuggacccugagcgacagcgagggcaaggacacccccggcggcuacugccugaccagauggaugcugaucgaggccgagcugaagugcuucggcaacaccgccguggccaagugcaacgagaagcacgacgaggaguucugcgacaugcugagacuguucgacuucugcaagcaggccauccagagacugaaggcccccgcccagaugagcauccagcugaucaacaaggccgugaacgcccugaucaacgaccagcugaucaugaagaaccaccugagagacaucaugggcauccccuacugcaacuacagcaaguacugcuaccugaaccacaccgugaccggcaagaccagccugcccaagugcugccuggugagcaacggcagcuaccugaacgagacccacuucagcgacgacaucgagcagcaggccgacaacaugaucaccgagaugcugcagaaggaguacauggagagacagggcaagaccccccugggccugguggaccuguucguguucagcaccagcuucuaccugaucagcaucuuccugcaccuggugaagauccccacccacagacacguggugggcaagcccugccccaagccccacagacugaaccacaugggcaucugcagcugcggcuucuacaagcagcccggcgugcccgugagauggaagagaugaggacuagucccuguucccagagcccacuuuuuuuucuuuuuuugaaauaaaauagccugucuuucagaucuaaaaaaaaaaaaaaaaaaaaaaaaaaaaaaaaaaaaaaaaaaaaaaaaaaaaaaaaaaaaaaaaaaaaaaaaaaaaaaaaaaaaaaaaaaaaaaaaaaaa

SEQ ID NO: 27236 - RNA, 1743 nt, Artificial Sequence
  mRNA product Design a-2 (A100) comprising derived and/or modified sequence from LASV(Z0947-SLE-2011;Clade IV)__AIT17840__GPCmut4 (opt4)
aggagaguccgcucagccagguugcagaagcggcuuagcguguguccuaaucuucucucugcguguagguaggccugugccgcaaacaagcuuaccaugggccagaucgugaccuucuuccaggaggugccccacgugaucgaggaggugaugaacaucgugcugaucgcccugagcauccuggccgugcugaagggccuguacaacuucgccaccugcggccuggugggccuggugaccuuccugcugcugugcggcagaagcugcaccaucagccuguacaagggcguguacgagcugcagacccuggagcugaacauggagacccugaacaugugcaugccccugagcugcaccaagaacaacagccaccacuacaucauggugggcaacgagaccggccuggagcugacccugaccaacaccagcaucaucaaccacaaguucugcaaccugagcgacgcccacaagaagaaccuguacgaccacgcccugaugagcaucaucagcaccuuccaccugagcauccccaacuucaaccaguacgaggccaugagcugcgacuucaacggcggcaagaucagcgugcaguacaaccugagccacagcuacgccggcgacgccgccaaccacugcggcaccguggccaacggcgugcugcagaccuucaugagaauggccuggggcggcagcuacaucgcccuggacagcggcagagacagaugggacugcaucaugaccagcuaccaguaccugaucauccagaacaccaccugggaggaccacugccaguucagcagacccagccccaucggcuaccugggccugcugagccagagaaccagagacaucuacaucagcagaagaagaagaggcaccuucaccuggacccugagcgacagcgagggcaaggacacccccggcggcuacugccugaccagauggaugcugaucgaggccgagcugaagugcuucggcaacaccgccguggccaagugcaacgagaagcacgacgaggaguucugcgacaugcugagacuguucgacuucugcaagcaggccauccagagacugaaggcccccgcccagaugagcauccagcugaucaacaaggccgugaacgcccugaucaacgaccagcugaucaugaagaaccaccugagagacaucaugggcauccccuacugcaacuacagcaaguacugcuaccugaaccacaccaccaccggcaagaccagccugcccaagugcugccuggugagcaacggcagcuaccugaacgagacccacuucagcgacgacaucgagcagcaggccgacaacaugaucaccgagaugcugcagaaggaguacauggagagacagggcaagaccccccugggccugguggaccuguucguguucagcaccagcuucuaccugaucagcaucuuccugcaccuggugaagauccccacccacagacacaucgugggcaagcccugccccaagccccacagacugaaccacaugggcaucugcagcugcggccuguacaagcagcccggcgugcccgugaaguggaagagaugaggacuagucccuguucccagagcccacuuuuuuuucuuuuuuugaaauaaaauagccugucuuucagaucuaaaaaaaaaaaaaaaaaaaaaaaaaaaaaaaaaaaaaaaaaaaaaaaaaaaaaaaaaaaaaaaaaaaaaaaaaaaaaaaaaaaaaaaaaaaaaaaaaaaa

SEQ ID NO: 27237 - RNA, 1743 nt, Artificial Sequence
  mRNA product Design a-2 (A100) comprising derived and/or modified sequence from LASV(Josiah;Clade IV)__NP_694870__GPCmut4 (opt5)
aggagaguccgcucagccagguugcagaagcggcuuagcguguguccuaaucuucucucugcguguagguaggccugugccgcaaacaagcuuaccaugggccagaucgugaccuucuuucaagaggucccccacguuauugaagaggugaugaacaucgugcugauugcccucagcguccuggcugugcuuaaggggcuguacaauuucgccacaugcggacucguuggccuggugacguuucuucugcucugugggagauccugcaccacaucucuguauaaaggagucuacgaacugcagacccucgagcugaacauggaaacacuuaauauguguaugccucugagcugcaccaagaacaauucccaucacuauaucauggugggcaacgagacagggcucgagcugacccuuacgaauaccucuauuaucaaccauaaauucuguaaucugagcgacgcgcacaagaaaaaccucuacgaucaugcucugauguccaucauuucuacauuucaccugagcaucccgaauuucaaccaguaugaagccauguccugcgacuuuaauggaggcaagauuagcguucaguacaaccucucucacuccuaugccggcgaugcugccaaucauugugggaccguggcuaacggaguccugcaaacauucaugcggauggccuggggcgggagcuacaucgcgcuugacucuggacgcggcaacugggauugcauuaugaccuccuaccaguaucugaucauucagaauacgacaugggaggaccacugucaguuuagcagacccucuccuaucggguaccucggacugcuuucccaacggacccgcgauaucuauauuagcagacggcgcagaggcacauucaccuggacccuguccgacucugaaggcaaggauacacccgggggauacugccucacgcgguggaugcugaucgaggccgagcugaaauguuuuggcaacaccgcuguggccaagugcaaugaaaaacaugacgaggaguucugcgauaugcuccgccuguuugacuucuguaagcaggcuauucagagacuuaaagccccugcgcagaugagcauccaacugauuaacaaggccgugaaugcucucaucaacgaucagcugaucaugaagaaucaccuucgggacauuauggggauccccuauugcaacuacuccaaauauuguuaccugaaucacacaaccacaggacgcaccagccucccuaagugcugucuggucucuaacggcuccuaccugaaugaaacgcauuucagcgacgauauugaacagcaagccgacaacaugaucacagagaugcuccagaaagaguauauggaaagacaggggaagaccccgcugggacuuguugaucuguuuguguucucuaccagcuuuuaccucauuuccaucuuccugcaccuggugaaaauccccacacaucggcacauugucggcaagucuugcccuaaaccccaucgccuuaaucacaugggcaucuguagcugcgggcucuauaagcagccuggagugcccguuaaguggaaaagaugaggacuagucccuguucccagagcccacuuuuuuuucuuuuuuugaaauaaaauagccugucuuucagaucuaaaaaaaaaaaaaaaaaaaaaaaaaaaaaaaaaaaaaaaaaaaaaaaaaaaaaaaaaaaaaaaaaaaaaaaaaaaaaaaaaaaaaaaaaaaaaaaaaaaa

SEQ ID NO: 27238 - RNA, 1740 nt, Artificial Sequence
  mRNA product Design a-2 (A100) comprising derived and/or modified sequence from LASV(LP;Clade I)__AAF86701__GPCmut4 (opt5)
aggagaguccgcucagccagguugcagaagcggcuuagcguguguccuaaucuucucucugcguguagguaggccugugccgcaaacaagcuuaccaugggccagaucauuaccuucuuucaagaggugccccacgucaucgaagagguuaugaacauugugcugaucgcccucagccugcuugcuauucugaaggggcucuacaauaucgccacaugcggaaucauuggccugguggcguuccuuuuucugugugggaaauccugcucucucacgcugaagggaggcuaugaacugcagacccucgagcugaacauggaaacacuuaauauguguaugccucugagcugcaccaaaaacuccucucaucacuacaucagagucgggaaugagacaggacucgagcugacccuuacaaacaccagcauuaucaaucauaaguucuguaaccuguccgacgcucacaaaaagaaucucuaugaucaugcccugaugucuauuaucagcacguuucaccuguccauuccgaacuucaaucaguacgaagccaugagcugcgacuuuaacggcggcaagaucucugugcaguauaaucucucccacagcuacgcuggggaugccgcugagcauuguggaaccguugccaacggcgugcugcaaacauucaugcggauggcguggggagggcgcuauaucgcccuugacucuggcaaagggaauugggauugcauuaugaccuccuaccaguaccugaucauucagaacacaaccugggaagaccacugucaguuuagcagacccucuccuaucggauaucucggccugcuuucccaacggacgcgcgauauuuacaucagcagacggcgcagaggcacauucaccuggacacuguccgacucugaggggaacgagacccccggaggcuauugccucacccgguggaugcugaucgaagcugagcugaaguguuuugggaauacagccgucgcuaaaugcaacgaaaagcaugaugaggaguucugcgacaugcuccgccuguuugauuucuguaaacaggccauuagacggcuuaaggcgccugcccagaugagcauccagcugauuaauaaggcugugaacgcccucaucaaugaccaacugauuaugaaaaaccaccuucgcgauaucaugggaauccccuacugcaauuauuccaaguacuguuaucugaaccacacgagcucuggcagaaccucccucccuaaaugcugucugauuagcaaugggucuuaccugaacgaaacacaguucagcgacgacaucgagcagcaagcugauaauaugauuaccgaaaugcuccagaaggaguacaucgaacggcagggaaaaacaccgcugggccuuguugacauuuuuaucuucuccaccucuuuuuaucugauuagcaucuuccuccaucugaucaagauucccacgcaccgccauaucgugggcaaaccuugccccaagccucacagacugaaccauaugggggucuguuccugcggacuuuacaagcaccccggcgugccgacaaaauggaagcggugaggacuagucccuguucccagagcccacuuuuuuuucuuuuuuugaaauaaaauagccugucuuucagaucuaaaaaaaaaaaaaaaaaaaaaaaaaaaaaaaaaaaaaaaaaaaaaaaaaaaaaaaaaaaaaaaaaaaaaaaaaaaaaaaaaaaaaaaaaaaaaaaaaaaa

SEQ ID NO: 27239 - RNA, 1740 nt, Artificial Sequence
  mRNA product Design a-2 (A100) comprising derived and/or modified sequence from LASV(803213;Clade II)__AAF86703__GPCmut4 (opt5)
aggagaguccgcucagccagguugcagaagcggcuuagcguguguccuaaucuucucucugcguguagguaggccugugccgcaaacaagcuuaccaugggccagaucauuaccuucuuucaagaggugccccacgucaucgaagagguuaugaacauugugcugaucgcccucagccugcuugcuauucugaaggggaucuacaauguggccacaugcggacucuucggccugaucuccuuucuucugcucugugggagaucuugcagcgucacguauaaaggaguguacgaacugcagacccuggagcucaacauggcgaaucugaacauguguaugccucuuuccugcacaaagaauaacucucaucacuauauuaugguuggcaaugaaaccgggcuggagcucacacugaccaacacaagcaucauuaaucauaaauucuguaaccuuuccgacgcucacaagaaaaaucuguacgaucaugcccucaugucuaucauuagcaccuuucaccuguccaucccgaacuucaaucaguaugaggccaugagcugcgacuuuaacggaggcaagauuucugugcaguacaaucugucccacagcuucgcugucgaugccgcuaaccauuguggcacgaucgccaacggggugcuccaaaccuuuaugcggauggcguggggaggcucuuauaucgcccuggacuccgggaagggaaauugggauugcauuaugacaagcuaccaguaccuuaucauucagaacaccacaugggaagaccacugucaguucucucgccccuccccuaucggcuaucuggggcuccugagccaaagaacccgggauauuuacaucucccgcagacggcgcggaacguuuacauggacccuuucugacagcgagggcaaugaagcucccggcggguauugccugacaagauggaugcucaucgaggccgagcugaaauguuucggaaacaccgcuguugccaagugcaaugaaaaacaugaugaggaauuuugcgacaugcugcgccucuucgauuucuguaagcaggcgauuaaacggcugaagaccccugcccagauguccauccagcuuauuaacaaggcugugaaugcccugaucaacgaccaacucauuaugaaaaaucaccugagagauaucaugggcauccccuacugcaacuauagccgguacuguuaucuuaaucacacagucacggggaagaccucucugccucgcugcugucucguguccaacggaagcuaccugaaugagacacauuuuucugacgacauugaacagcaggcugauaacaugaucaccgagaugcugcaaaaagaguacauggacagacagggcaagacaccgcucgggcugguggaucuuuucgucuuuagcaccuccuucuaucugauuucuaucuuucuccaccugguuaaaauucccacgcaucggcacaucgugggaaagccuugccccaaaccucaucgccugaaucacaugggcauuuguagcugcggccuuuacaagcaccccggggugccggucaaguggaaaagaugaggacuagucccuguucccagagcccacuuuuuuuucuuuuuuugaaauaaaauagccugucuuucagaucuaaaaaaaaaaaaaaaaaaaaaaaaaaaaaaaaaaaaaaaaaaaaaaaaaaaaaaaaaaaaaaaaaaaaaaaaaaaaaaaaaaaaaaaaaaaaaaaaaaaa

SEQ ID NO: 27240 - RNA, 1740 nt, Artificial Sequence
  mRNA product Design a-2 (A100) comprising derived and/or modified sequence from LASV(GA391;Clade III)__CAA36645__GPCmut4 (opt5)
aggagaguccgcucagccagguugcagaagcggcuuagcguguguccuaaucuucucucugcguguagguaggccugugccgcaaacaagcuuaccaugggccagaucgugaccuucuuucaagaggucccccacguuauugaagaggugaugaacaucgugcugauugcccucagcauccuggcuauucuuaaggggcuguacaaugucgccacaugcggacucaucggccuggugacguuccuucugcucuccgggagaucuuguagccugaucuauaaaggaaccuacgaacugcagacacucgagcugaacauggaaacccuuaauaugugcaugccucuguccuguacaaagaacaauucucaucacuauauucggguuggcaacgagaccgggcucgagcugacacuuaccaauacgagcauccugaaccauaaauuuugcaaucucuccgacgcgcacaagcgcaaccuguacgaucauucucugaugagcauuaucuccaccuuccaccucagcauuccgaauuuuaaccaguaugaagcuaugucuugugacuucaauggaggcaaaaucacagugcaguacaaccugucccacagcuuugccgucgaugccgcuggccauugcgggacccuugccaauggagugcugcaaacauucaugagaauggcuuggggcgggucuuauauugcccucgacuccggacggggcaacugggauuguaucaugaccagcuaccaguaccugaucauucagaacacgacaugggacgaucacugccaguuuucucgccccuccccuaucggguaucuuggacugcucagccaaagaacccgggacauuuacaucucccgcagacggcgcggcacauucaccuggacccugucugauagcgagggcaaugaaacacccgggggauauugucugacgagauggaugcucauugaggcggagcugaagugcuuuggcaacaccgccguugcuaaguguaaugaaaaacaugacgaggaguucugcgauaugcuucggcuguuugacuucugcaagcaggccauccgcagacucaaaaccccugcucagauguccauccagcugauuaacaaggccgugaaugcgcuuaucaacgaucaacugauuaugaaaaaucaccuccgggacaucauggggauucccuacuguaacuauagccgcuacugcuaucugaaucacacaucuacaggaaagaccucccugccuagauguugccucaucagcaacggcucuuaccugaaugaaacgaaguucagcgacgauaucgaacagcaggccgacaacaugauuacagagaugcuucaaaaagaguacaucgaucggcaggggaagaccccgcugggacucgucgaccuguuuguguucuccaccucuuuuuaucugauuagcaucuuccuucaucucgugaaaauucccacacacagacauaucgucggcaagccuugucccaaaccucaccgccugaaucauaugggcauuugcuccugugggcuguacaagcagcccggaguuccggugcgguggaaaagaugaggacuagucccuguucccagagcccacuuuuuuuucuuuuuuugaaauaaaauagccugucuuucagaucuaaaaaaaaaaaaaaaaaaaaaaaaaaaaaaaaaaaaaaaaaaaaaaaaaaaaaaaaaaaaaaaaaaaaaaaaaaaaaaaaaaaaaaaaaaaaaaaaaaaa

SEQ ID NO: 27241 - RNA, 1743 nt, Artificial Sequence
  mRNA product Design a-2 (A100) comprising derived and/or modified sequence from LASV(AV;Clade V)__CCA30314__GPCmut4 (opt5)
aggagaguccgcucagccagguugcagaagcggcuuagcguguguccuaaucuucucucugcguguagguaggccugugccgcaaacaagcuuaccaugggccagaucgugaccuucuuucaagaggucccccacguuauugaagaggugaugaacaucgugcugauugcccucagcauccuggcuguccuuaaggggcuguacaauauugccacaugcggacucaucggccugaucacguuccuucugcucugugggagauccugcucuagcaaccuguauaaaggaguguacgaacugcagucccucgaccugaauauggagacccuuaacauguguaugccucugucuugcacaaagaauaacagccaucacuauauucggguuggcaaugauaccgggcucgaacugacacuuaccaacacauccauccugaaucauaaauuuuguaaccucucugacgcgcacaagaaagaucuguacgaccaugcucugaugagcauuaucuccaccuuccaccucagcauuccgaauuuuaaccaguaugaggccaugucuugcgauuucaauggaggcaagaucuccgugcaguacaaccugagccacucuuaugccauugacgcugccaaucauuguggcacggucgcuaacgggauccuucaaaccuuuaugcgcauggccuggggaggcuccuacaucgcgcuggauagcgggagaggaaacugggacugcauuaugacaucuuaccaguaucucaucauucagaauaccacaugggagaaccacugucaguucucccggcccagcccuaucggcuaccuggggcuucugucccaacgcaccagagauauuuauaucucucggcgcagacggggaacguuuacauggacccucagcgacuccgaaggcaaugccacacccggcggguacugccugacccgcuggaugcugaucgaggcugaacucaaguguuucggaaacaccgccguggcuaaaugcaaugagaagcaugaugaggaauuuugcgacaugcugagacuuuucgauuuuuguaaacaggccauuagccggcugaagucuccugcgcagauguccauccagcucauuaacaaagccguuaaugcucugaucaacgaccaacuuauuaugaagaaucaucugcgcgacaucaugggcauccccuauugcaacuacagcaaguauuguuaccucaaucacacaauuacggggaaaaccucucugccuaagugcugucuggugagcaacggauccuaccucaaugagacacacuucucugaugacaucgaacagcaggccgauaacaugauuaccgagaugcugcaaaaagaauauauggagagacagggcaagacaccgcuugggcuggucgaccucuucguguuuagcaccuccuucuaccugaucagcauuuuucugcggcuugugaaaauccccacgcaccgccauauugucggaaagccuugccccaaaccucacagacucaaucauaugggcaucuguucuugcggccuguauaagcagcccgggguuccggugcgguggaagagaugaggacuagucccuguucccagagcccacuuuuuuuucuuuuuuugaaauaaaauagccugucuuucagaucuaaaaaaaaaaaaaaaaaaaaaaaaaaaaaaaaaaaaaaaaaaaaaaaaaaaaaaaaaaaaaaaaaaaaaaaaaaaaaaaaaaaaaaaaaaaaaaaaaaaa

SEQ ID NO: 27242 - RNA, 1740 nt, Artificial Sequence
  mRNA product Design a-2 (A100) comprising derived and/or modified sequence from LASV(Togo/2016/7082;Clade VI)__AMR44577__GPCmut4 (opt5)
aggagaguccgcucagccagguugcagaagcggcuuagcguguguccuaaucuucucucugcguguagguaggccugugccgcaaacaagcuuaccaugggccagaucauuaccuucuuucaagaggugccccacgucaucgaagagguuaugaacauugugcugaucgcccucagccugcuugcuauucugaaggggguguacaaugucgccacaugcggaaucaucggccucgugacguuccuguuucuuugugggagauccugcucucugauuuauaaaggaagcuacgaacuccagacccuggagcugaacauggaaacacucaauauguguaugccucuguccugcaccaagaacucuagccaucacuauauccggguuggcaaugagacagggcuugagcugacccucacaaacaccuccauuaucaaucauaaauucuguaaccugucugacgcgcacaagcgcaaucuuuacgaucaugcucugaugagcauucucuccacguuucaccugagcaucccgaacuucaaucaguaugaagccaugucuugcgacuuuaacggaggcaaaauuuccgugcaguacaaucugagccacgccuaugcugucgaugccgcugagcauuguggcaccguggccaacgggguucuccaaacauucaugagaauggcguggggaggcucuuacaucgcccuggacuccgggcggggaaauugggauugcaucaugaccagcuaccaguaucuuauuauccagaacacaaccugggaagaccacugucaguuuucucgccccuccccuauuggcuaccuggggcuccugagccaaagaacgcgggauaucuauauuucccgcagacggcgcggaacauucaccuggacacuuucugacagcgagggcaacgagacccccggcggguacugccugaccagauggaugcucaucgaagcugagcugaaguguuuuggaaauacagccguggcuaagugcaacgaaaaacaugaugaggaguucugcgacaugcugcggcucuuugauuucuguaagcaggccauccagcgccugaaauccccugcgcagaugagcauucaacuuaucaauaaggccgucaacgcucugauuaaugaccagcucaucaugaaaaaccaccugagagauaugaugggcauucccuauugcaauuacucuaaguauuguuaccuuaaccacacguccagcgggcggaccucucugccuaagugcugucucgugagcaauggauccuaccugaacgaaacacauuucucugacgacaucgagcagcaagccgauaauaugaucaccgaaaugcugcagaaagaguauauugaccgccagggcaagacaccgcucgggcugguggaucuuuuugucuucagcaccuccuuuuaccugaucagcauuuuccuccaccugaucaaaauucccacgcauagacacaucguuggaaagccuugccccaaaccucaucggcugaaccacaugggcauuuguucuugcggccuuuauaagcagcccggggugccgacaagauggaaacgcugaggacuagucccuguucccagagcccacuuuuuuuucuuuuuuugaaauaaaauagccugucuuucagaucuaaaaaaaaaaaaaaaaaaaaaaaaaaaaaaaaaaaaaaaaaaaaaaaaaaaaaaaaaaaaaaaaaaaaaaaaaaaaaaaaaaaaaaaaaaaaaaaaaaaa

SEQ ID NO: 27243 - RNA, 1740 nt, Artificial Sequence
  mRNA product Design a-2 (A100) comprising derived and/or modified sequence from LASV(KAK-428;Clade n.d. (VII))__ANH09740__GPCmut4 (opt5)
aggagaguccgcucagccagguugcagaagcggcuuagcguguguccuaaucuucucucugcguguagguaggccugugccgcaaacaagcuuaccaugggccagaucgugaccuucuuucaagaggucccccacguuauugaagaggugaugaacaucgugcugauugcccucagccugcuugcuauccugaaggggcucuacaauuucgccacaugcggagucauuggccugaucacguuucuucugcucugugggagauccugcucugcgaccuauaaaggacaguacgaacugcagacacuggagcucaacauggaaagccugaauauguguaugccucuuuccugcaccaagaacaauucucaucacuauauccgggcuggcaacaauacagggcuggagcucacccugacaaacaccagcauuaucucccauaaauucuguaaucuuucugacgcccacaagaaaaaccuguacgaucauacgcucaugagcauuaucaccacauuucaccuguccauuccgaauuucaaccaguaugaggccaugagcugcgacuuuaauggaggcaagaucucuauucaauacaaccugucccacagcuaugcuggcgaugccgcucagcauugugggaccguggccaauggaguucuccagacauucaugcgcauggcguggggcgggucuuaccuggcccuugacuccggaagacggggcugggauugcaucaucagcucuuaccaguaucugauuauccaaaacaccacgugggacgaucacugucaguuuucccgccccagcccuauuggguaccucggauucgugucccagaagacaagagacaucuauauuucucggcgcagacggggcaccuuuacauggacccugagcgauuccgaaggccaugacaugcccgggggauacugccuuacccgcuggaugcugaucgaggcugaucucaaauguuucggcaacacagccgucgcuaagugcaaugaaaaacacgacgaggaguuuugcgauauguggagacuguucgacuucuguaagcaggccauccaacggcugaaagcgccugcccagaugaacauucagcucaucaauaaggcugugaacgcccugauuaaugaccaacuuaugaugaagaaccaucugcgcgauaucauggggauucccuauugcaauuacagcaaauuuuguuaucucaacaauacgaccacaggaagaaccucucugccucggugcugucuuaucuccaacggcagcuaccugaaugaaacacacuucucugacgauaucgagcagcaggcugacaacaugauuaccgaaaugcuccagaaggaguacauggaucgccaagggaaaacgccgcugggacugguugaccucuuuguguucagcacauccuuuuaucugaucaccauuuuccuucaccuggucaagauccccacccauagacacauugugggcaaaccuugccccaagccucaucggcucaaucacaugggcaucuguucuugcgggcuguacaaacagcccggagugccggucagauggaagcgcugaggacuagucccuguucccagagcccacuuuuuuuucuuuuuuugaaauaaaauagccugucuuucagaucuaaaaaaaaaaaaaaaaaaaaaaaaaaaaaaaaaaaaaaaaaaaaaaaaaaaaaaaaaaaaaaaaaaaaaaaaaaaaaaaaaaaaaaaaaaaaaaaaaaaa

SEQ ID NO: 27244 - RNA, 1740 nt, Artificial Sequence; identical to SEQ ID NO: 27238
  mRNA product Design a-2 (A100) comprising derived and/or modified sequence from LASV(Pinneo-NIG-1969;Clade I)__AIT17836__GPCmut4 (opt5)

SEQ ID NO: 27245 - RNA, 1740 nt, Artificial Sequence
  mRNA product Design a-2 (A100) comprising derived and/or modified sequence from LASV(ISTH0009-NIG-2011;Clade II)__AIT17404__GPCmut4 (opt5)
aggagaguccgcucagccagguugcagaagcggcuuagcguguguccuaaucuucucucugcguguagguaggccugugccgcaaacaagcuuaccaugggccagaucauuaccuucuuucaagaggugccccacgucaucgaagagguuaugaacauugugcugaucgcccucagccugcuugcuauucugaaggggaucuacaauguggccacaugcggacucuucggccuggucuccuuucuucugcucugugggagaucuugcagcacgaccuauaaaggaguguacgaacugcagacacuggagcucgacauggcgucccugaacauguguaugccucuuucuugcaccaagaauaacagccaucacuauaucaugguuggcaaugaaacagggcuggagcucacccugacaaacaccuccauuaucaaucauaaauucuguaaccuuucugaugcucacaagaaaaaucuguacgaccaugcccucaugagcauuaucuccacguuucaccugagcauuccgaacuucaaucaguaugaggccaugucuugcgauuuuaacggaggcaagaucuccgugcaguacaaucugagccacgcuuaugccgucgacgcugccaaccauuguggcaccauugcgaauggggugcuccaaacauucaugcggauggccuggggaggcucuuacaucgcucuggauuccgggaagggaagcugggacugcaucaugaccucuuaccaguaucuuauuauccagaacacaaccugggaagaucacugucaguuuucccgccccagcccuauuggcuaccuggggcuccugucccaaagaacgcgggacaucuauauuucucgcagacggcgcggaacauucaccuggacacuuagcgauuccgagggcaacgaaacccccggcggguacugccugaccagauggaugcucaucgaggccgagcugaaauguuuuggaaauacagcuguugccaagugcaacgaaaaacaugacgaggaguucugcgauaugcugcggcucuuugacuucuguaagcaggcgauccgcagacugaaaacgccugcccagaugagcauucagcuuaucaauaaggcugugaacgcccugauuaaugaucaacucaucaugaagaaccaucugcgggacauuaugggcauccccuauugcaauuacucuaaauauuguuaccuuaaccacaccgucacagggaagaccucccugccucgcugcugucucgugagcaauggaucuuaccugaacgaaacacacuucagcgacgauaucgaacagcaggcugacaauaugauuaccgagcugcuccaaaaagaguauauggauagacagggcaagacgccgcuggggcuuguggaccuguuugucuucuccacaucuuuuuaccucaucagcauuuuccugcaccugaucaaaauucccacccaucggcacaucaccggaaagccuugccccaaaccucaucgccuuaaccacaugggcauuuguuccugcggccucuauaagcaccccgggguuccggugaaguggaaaagaugaggacuagucccuguucccagagcccacuuuuuuuucuuuuuuugaaauaaaauagccugucuuucagaucuaaaaaaaaaaaaaaaaaaaaaaaaaaaaaaaaaaaaaaaaaaaaaaaaaaaaaaaaaaaaaaaaaaaaaaaaaaaaaaaaaaaaaaaaaaaaaaaaaaaa

SEQ ID NO: 27246 - RNA, 1740 nt, Artificial Sequence
  mRNA product Design a-2 (A100) comprising derived and/or modified sequence from LASV(ISTH2010-NIG-2012;Clade II)__AIT17482__GPCmut4 (opt5)
aggagaguccgcucagccagguugcagaagcggcuuagcguguguccuaaucuucucucugcguguagguaggccugugccgcaaacaagcuuaccaugggccagaucauuaccuucuuucaagaggugccccacgucaucgaagagguuaugaacauugugcugaucgcccucagccugcuugcuauucugaaggggaucuacaauguggccacaugcggacucuucggccuggucuccuuucuucugcucugugggagaucuugcagcacgaccuauaaaggaguguacgaacugcagacacuggagcucgacauggcgucccugaacauguguaugccucuuucuugcaccaagaauaacagccaucacuauaucaugguuggcaaugaaacagggcuggagcucacccugacaaacaccuccauuaucaaucauaaauucuguaaccuuucugaugcucacaagaaaaaucuguacgaccaugcccucaugagcauuaucuccacguuucaccugagcauuccgaacuucaaucaguaugaggccaugucuugcgauuuuaacggaggcaagaucuccgugcaguacaaucugagccacgcuuaugccgucgacgcugccaaccauuguggcaccauugcgaauggggugcuccaaacauucaugcggauggccuggggaggcucuuacaucgcucuggauuccgggaagggaagcugggacugcaucaugaccucuuaccaguaucuuauuauccagaacauuacaugggaagaucacugucaguuuucccgccccagcccuaucggcuaccuggggcuccugucccaaagaacccgggacauuuauaucucucgcagacggcgcggaacguucacauggacccuuagcgauuccgagggcaacgaaacacccggcggguacugccugaccagauggaugcucaucgaggccgagcugaaauguuuuggaaauaccgcuguugccaagugcaacgaaaaacaugacgaggaguucugcgauaugcugcggcucuuugacuucuguaagcaggcgauucgcagacugaaaacgccugcccagaugagcauccagcuuauuaauaaggcugugaacgcccugaucaaugaucaacucauuaugaagaaccaucugcgggacaucaugggcauccccuauugcaauuacucuaaauauuguuaccuuaaccacacagucaccgggaagacaucccugccucgcugcugucucgugagcaauggaucuuaccugaacgaaacccacuucagcgacgauauugaacagcaggcugacaauaugaucacagagcugcuccaaaaagaguauauugauagacagggcaagaccccgcuggggcuuguggaccuguuugucuucuccacgucuuuuuaccucaucagcauuuuccugcaccugguuaaaauccccacacaucggcacguggugggaaagccuugccccaaaccucaucgccuuaaccacaugggcauuuguuccugcggccucuauaagcaccccggggucccggugaaguggaaaagaugaggacuagucccuguucccagagcccacuuuuuuuucuuuuuuugaaauaaaauagccugucuuucagaucuaaaaaaaaaaaaaaaaaaaaaaaaaaaaaaaaaaaaaaaaaaaaaaaaaaaaaaaaaaaaaaaaaaaaaaaaaaaaaaaaaaaaaaaaaaaaaaaaaaaa

SEQ ID NO: 27247 - RNA, 1740 nt, Artificial Sequence
  mRNA product Design a-2 (A100) comprising derived and/or modified sequence from LASV(Lassa virus/H.sapiens-wt/NGA/2015/ISTH_0543;Clade II)__AVO03639__GPCmut4 (opt5)
aggagaguccgcucagccagguugcagaagcggcuuagcguguguccuaaucuucucucugcguguagguaggccugugccgcaaacaagcuuaccaugggccagaucauuaccuucuuucaagaggugccccacgucaucgaagagguuaugaacauugugcugaucgcccucagccugcuugcuauucugaaggggaucuacaauguggccacaugcggacucuucggccuggucuccuuucuucugcucugugggagaucuugcagcacgaccuauaaaggaguguacgaacugcagacacuggagcucgacauggcgaaccugaauauguguaugccucuuuccugcaccaagaacaauucucaucacuauaucaugguuggcaacgaaacagggcuggagcucacccugacaaauaccagcauuaucaaccauaaauucuguaaucuuuccgaugcucacaagaaaaaccuguacgaccaugcccucaugucuauuaucagcacguuucaccuguccauuccgaauuucaaccaguaugaggccaugagcugcgauuuuaauggaggcaagaucucugugcaguacaaccugucccacaccuaugcugucgacgccgcuaaucauuguggcacaauugccaacggggugcuccaaaccuucaugcggauggcguggggaggcagcuacaucgcccuggauucugggaagggauccugggacugcaucaugacaagcuaccaguaucuuguuauucagaacaccacgugggaagaucacugucaguuuucucgccccuccccuaucggcuaccuggggcuccugagccaaagaacacgggacauuuauaucucccgcagacggcgcggaaccuucacauggacccuuucugauagcgagggcaaugaaacccccggcggguacugccugacaagauggaugcucauugaggcugagcugaaauguuuuggaaacacggccguggcuaagugcaaugaaaaacaugacgaggaguucugcgauaugcugcggcucuuugacuucuguaagcaggccauccgcagacugaaaaccccugcgcagauguccauccagcuuauuaacaaggccgucaaugcucugaucaacgaucaacucauuaugaagaaucaucugcgggacaucaugggcauucccuauugcaacuacagcaaauauuguuaccuuaaucacacagugaccgggaagacaucucugccucgcugcugucucguguccaacggaagcuaccugaaugaaacccacuucucugacgauaucgaacagcaggccgacaacaugaucacggagcugcuccaaaaagaguauauugauagacagggcaagacaccgcuggggcuugucgaccuguuuguuuucagcaccuccuuuuaccucaucucuauuuuccugcaccuggugaaaauccccacccaucggcacauuacaggaaagccuugccccaaaccucaucgccuuaaucacaugggcaucuguagcugcggccucuauaagcaccccggggugccggucaaguggaaaagaugaggacuagucccuguucccagagcccacuuuuuuuucuuuuuuugaaauaaaauagccugucuuucagaucuaaaaaaaaaaaaaaaaaaaaaaaaaaaaaaaaaaaaaaaaaaaaaaaaaaaaaaaaaaaaaaaaaaaaaaaaaaaaaaaaaaaaaaaaaaaaaaaaaaaa

SEQ ID NO: 27248 - RNA, 1740 nt, Artificial Sequence
  mRNA product Design a-2 (A100) comprising derived and/or modified sequence from LASV(Lassa virus/H.sapiens-wt/NGA/2016/ISTH_0009;Clade II)__AVO03571__GPCmut4 (opt5)
aggagaguccgcucagccagguugcagaagcggcuuagcguguguccuaaucuucucucugcguguagguaggccugugccgcaaacaagcuuaccaugggccagaucauuaccuucuuucaagaggugccccacgucaucgaagagguuaugaacauugugcugaucgcccucagccugcuugcuauucugaaggggaucuacaauguggccacaugcggacuccugggccuugucuccuuccugcuccugugugggagaucuugcagcacgaccuauaaaggaguguacgaacugcagacacucgagcuggacauggcgucccuuaacauguguaugccucugucuugcaccaagaauaacagccaucacuauaucaugguuggcaaugaaacagggcucgagcugacccuuacaaacaccuccauuaucaaucauaaauuuuguaaccugucugaugcucacaagaaaaaucucuacgaccaugcccugaugagcauuaucuccacguuccaccugagcauuccgaacuuuaaucaguaugaggccaugucuugcgauuucaacggaggccggaucuccgugcaguacaaucucagccacucuuaugcugucgacgccgcuaaccauuguggcaccauugccaauggggugcugcaaacauuuaugcgcauggcguggggaggcuccuacaucgcccuugauagcgggaagggaucuugggacugcaucaugaccuccuaccaguaucugauuauccagaacacaaccugggaagaucacugucaguucagcagacccuccccuauuggcuaccucgggcugcuuucucaacggacgcgcgacaucuauauuagcagacggcgcagaggaacauuuaccuggacacuguccgauagcgagggcaacgaaacccccggcggguacugccucacccgguggaugcugaucgaggcugagcugaaguguuucggaaauacagccguugcuaaaugcaacgaaaagcaugacgaggaauuuugcgauaugcuccgccuguucgacuuuuguaaacaggccaucagacggcuuaagacgccugcgcagaugucuauucagcugaucaauaaagccgugaacgcucucauuaaugaucaacugaucaugaagaaccaccuucgcgacauuaugggcauccccuauugcaauuacuccaaguauuguuaccugaaccacaccgucacagggaaaaccagccucccuagaugcugucuggugucuaauggaagcuaccugaacgagacacauuucuccgacgauaucgaacagcaggccgacaauaugauuaccgagcuccugcaaaaggaguauaucgaucggcagggcaaaacgccgcuugggcugguggaccucuucgucuuuucuaccagcuucuaccugauuuccaucuuucugcaccuuguuaagauucccacacaucgccacaucaccggaaaaccuugccccaagccucauagacucaaccacaugggcauuuguagcugcggccuguauaaucaccccggggugccggugaaauggaagcggugaggacuagucccuguucccagagcccacuuuuuuuucuuuuuuugaaauaaaauagccugucuuucagaucuaaaaaaaaaaaaaaaaaaaaaaaaaaaaaaaaaaaaaaaaaaaaaaaaaaaaaaaaaaaaaaaaaaaaaaaaaaaaaaaaaaaaaaaaaaaaaaaaaaaa

SEQ ID NO: 27249 - RNA, 1740 nt, Artificial Sequence
  mRNA product Design a-2 (A100) comprising derived and/or modified sequence from LASV(Lassa virus/H.sapiens-wt/NGA/2016/ISTH_0017;Clade II)__AVO03567__GPCmut4 (opt5)
aggagaguccgcucagccagguugcagaagcggcuuagcguguguccuaaucuucucucugcguguagguaggccugugccgcaaacaagcuuaccaugggccagaucauuaccuucuuucaagaggugccccacgucaucgaagagguuaugaacauugugcugaucgcccucagccugcuugcuauucugaaggggaucuacaauguggccacaugcggacucuucggccuggucuccuuucuucugcucugugggagaucuugcagcacgaccuauaaaggaguguacgaacugcagacacuggagcucgacauggcgucccugaacauguguaugccucuuucuugcaccaagaauaacagccaucacuauaucaugguuggcaaugaaacagggcuggagcucacccugacaaacaccuccauuaucaaucauaaauucuguaaccuuucugaugcucacaagaaaaaucuguacgaccaugcccucaugagcauuaucuccacguuucaccugagcauuccgaacuucaaucaguaugaggccaugucuugcgauuuuaacggaggcaagaucuccgugcaguacaaucugagccacaccuaugcuauugacgccgcuaaccauuguggcacaaucgccaaugggguccuccaaaccuucaugcggauggcguggggaggcucuuacaucgcccuggauuccgggaagggaagcugggacugcauuaugacaucuuaccaguaucuuaucauucagaacaccacgugggaagaucacugucaguuuucccgccccagcccuaucggcuaccuggggcuccugucccaaagaacacgggacauuuauaucucucgcagacggcgcggaaccuucacauggacccuuagcgauuccgagggcaacgaaacccccggcggguacugccugacaagauggaugcucaucgaggcugagcugaaauguuuuggaaauacggccguggcuaagugcaacgaaaaacaugacgaggaguucugcgauaugcugcggcucuuugacuucuguaagcaggccauucgcagacugaaaaccccugcgcagaugagcauccagcuuauuaauaaggccguuaacgcucugaucaaugaucaacucauuaugaagaaccaucugcgggacaucaugggcauccccuauugcaauuacucuaaauauuguuaccuuaaccacacagugaccgggaagacaucccugccucgcugcugucucgucagcaauggaucuuaccugaacgaaacccacuucagcgacgauauugaacagcaggccgacaauaugaucacggagcugcuccaaaaagaguauauggauagacagggcaagacaccgcuggggcuuguggaccuguuuguguucuccaccucuuuuuaccucauuagcaucuuccugcaccugguccggauucccacccaucgccacguuaucggaaaaccuugccccaagccucauagacuuaaccacaugggcauuuguuccugcggccucuauaaacaccccggggugccggugaaguggaagcggugaggacuagucccuguucccagagcccacuuuuuuuucuuuuuuugaaauaaaauagccugucuuucagaucuaaaaaaaaaaaaaaaaaaaaaaaaaaaaaaaaaaaaaaaaaaaaaaaaaaaaaaaaaaaaaaaaaaaaaaaaaaaaaaaaaaaaaaaaaaaaaaaaaaaa

SEQ ID NO: 27250 - RNA, 1740 nt, Artificial Sequence
  mRNA product Design a-2 (A100) comprising derived and/or modified sequence from LASV(Lassa virus/H.sapiens-wt/NGA/2018/ISTH_0959;Clade II)__AVV65099__GPCmut4 (opt5)
aggagaguccgcucagccagguugcagaagcggcuuagcguguguccuaaucuucucucugcguguagguaggccugugccgcaaacaagcuuaccaugggccagaucauuaccuucuuucaagaggugccccacgucaucgaagagguuaugaacauugugcugaucgcccucagccugcuugcuauucugaaggggaucuacaauguggucacaugcggacucuucggccugguguccuuucuucugcucugugggagaucuugcagcacgaccuauaaaggaguuuacgaacugcagacacuggagcucgacauggccucccugaacauguguaugccucuuucuugcaccaagaauaacagccaucacuauaucauggugggcaaugaaacagggcuggagcucacccugacaaacaccuccauuaucaaucauaaauucuguaaccuuucugaugcgcacaagaaaaaucuguacgaccaugcucucaugagcauuaucuccacguuucaccugagcauuccgaacuucaaucaguaugaggccaugucuugcgauuuuaacggaggcaagaucuccguccaguacaaucugagccacgccuaugcuauugacgccgcuaaccauuguggcaccaucgccaauggggugcuccaaacauucaugcggauggcguggggaggcucuuacaucgcccuggauuccgggaagggaagcugggacugcauuaugaccucuuaccaguaucuuaucauucagaacacaaccugggaagaucacugucaguuuucccgccccagcccuaucggcuaccuggggcuccugucccaaagaacgcgggacauuuauaucucucgcagacggcgcggaacauucaccuggacacuuagcgauuccgagggcaacgaaacccccggcggguacugccugaccagauggaugcucaucgaggcugagcugaaauguuuuggaaauacagccguugcuaagugcaacgaaaaacaugacgaggaguucugcgauaugcugcggcucuuugacuucuguaagcaggccauucgcagacugaaaacgccugcgcagaugagcauccagcuuauuaauaaggccgugaacgcucugaucaaugaucaacucauuaugaagaaccaucugcgggacaucaugggcauccccuauugcaauuacucuaaauauuguuaccuuaaccacaccgucacagggaagaccucccugccucgcugcugucucgugagcaauggaucuuaccugaacgaaacacacuucagcgacgauauugaacagcaggccgacaauaugaucaccgagcugcuccaaaaagaguauauugauagacagggcaagacgccgcuggggcuuguggaccuguuugucuucuccacaucuuuuuaccucaucagcauuuuccugcaccugguuaaaauccccacccaucggcacgugauuggaaagccuugccccaaaccucaucgccuuaaccacaugggcaucuguuccugcggccucuauaagcaccccggggugccggucaaguggaaaagaugaggacuagucccuguucccagagcccacuuuuuuuucuuuuuuugaaauaaaauagccugucuuucagaucuaaaaaaaaaaaaaaaaaaaaaaaaaaaaaaaaaaaaaaaaaaaaaaaaaaaaaaaaaaaaaaaaaaaaaaaaaaaaaaaaaaaaaaaaaaaaaaaaaaaa

SEQ ID NO: 27251 - RNA, 1740 nt, Artificial Sequence
  mRNA product Design a-2 (A100) comprising derived and/or modified sequence from LASV(LASV003-NIG-2008;Clade II)__AIT17580__GPCmut4 (opt5)
aggagaguccgcucagccagguugcagaagcggcuuagcguguguccuaaucuucucucugcguguagguaggccugugccgcaaacaagcuuaccaugggccagaucauuaccuucuuucaagaggugccccacgucaucgaagagguuaugaacauugugcugaucgcccucagccugcuugcuauucugaaggggaucuacaauguggccacaugcggacucuucggccuggucuccuuucuucugcucugugggagaucuugcagcacgaccuauaaaggaguguacgaacugcagacacuggagcucgacauggcgucccugaacauguguaugccucuuucuugcaccaagaauaacagccaucacuauaucaugguuggcaaugaaacagggcuggagcucacccugacaaacaccuccauuaucaaucauaaauucuguaaccuuucugaugcucacaagaaaaaucuguacgaccaugcccucaugagcauuaucuccacguuucaccugagcauuccgaacuucaaucaguaugaggccaugucuugcgauuuuaacggaggcaagaucuccgugcaguacaaucugagccacaccuaugcugucgacgccgcuaaccauuguggcacaauugccaauggggugcuccaaaccuucaugcggauggcguggggaggcucuuacaucgcccuggauuccgggaagggaagcugggacugcaucaugacaucuuaccaguaucuuauuauccagaacaccacgugggaagaucacugucaguuuucccgccccagcccuauuggcuaccuggggcuccugucccaaagaacacgggacaucuauauuucucgcagacggcgcggaaccuucacauggacccuuagcgauuccgagagcaacgaaacccccggcggcuacugccugacaagauggaugcucaucgaggcugagcugaaauguuuugggaauacggccguugcuaagugcaacgaaaaacaugacgaggaguucugcgauaugcugcggcucuuugacuucuguaagcaggccauccgcagacugaaagcgccugcccagaugucuauucagcuuaucaauaaggcugugaacgcccugauuaaugaucaacucaucaugaagaaccaucugcgggacauuaugggaauccccuauugcaauuacuccaaauauuguuaccuuaaccacaccgucacaggccgcaccagccugccuagaugcugucucgugucuaaugggagcuaccugaacgaaacacacuucuccgacgauaucgaacagcaggcugacaauaugauuaccgagcugcuccaaaaggaguauauggaucggcagggaaaaacgccgcugggccuuguggaccuguuugucuucucuaccagcuuuuaccucaucuccauuuuccugcaccugguuaagauccccacacaucgccacgugauugggaaaccuugccccaagccucauagacuuaaccacaugggaaucuguagcugcggccucuauaaacaccccggcgugccggucaaguggaagcggugaggacuagucccuguucccagagcccacuuuuuuuucuuuuuuugaaauaaaauagccugucuuucagaucuaaaaaaaaaaaaaaaaaaaaaaaaaaaaaaaaaaaaaaaaaaaaaaaaaaaaaaaaaaaaaaaaaaaaaaaaaaaaaaaaaaaaaaaaaaaaaaaaaaaa

SEQ ID NO: 27252 - RNA, 1740 nt, Artificial Sequence
  mRNA product Design a-2 (A100) comprising derived and/or modified sequence from LASV(LASV035-NIG-2009;Clade II)__AIT17588__GPCmut4 (opt5)
aggagaguccgcucagccagguugcagaagcggcuuagcguguguccuaaucuucucucugcguguagguaggccugugccgcaaacaagcuuaccaugggccagaucauuaccuucuuucaagaggugccccacgucaucgaagagguuaugaacauugugcugaucgcccucagccugcuugcuauucugaaggggaucuacaauguggccacaugcggacucuucggccuggucuccuuucuucugcucugugggagaucuugcagcacgaccuauaaaggaguguacgaacugcagacacuggagcucgacauggcgucccugaacauguguaugccucuuucuugcaccaagaauaacagccaucacuauaucaugguuggcaaugaaacagggcuggagcucacccugacaaacaccuccauuaucaaucauaaauucuguaaccuuucugaugcucacaagaaaaaucuguacgaccaugcccucaugagcauuaucuccacguuucaccugagcauuccgaacuucaaucaguaugaggccaugucuugcgauuuuaacggaggcaagaucuccgugcaguacaaucugagccacgcuuaugccgucgacgcugccaaccauuguggcaccauugcgaauggggugcuccaaacauucaugcggauggccuggggaggcucuuacaucgcucuggauuccgggaagggaagcugggacugcaucaugaccucuuaccaguaucuuauuauccagaacacaaccugggaagaucacugucaguuuucccgccccagcccuauuggcuaccuggggcuccugucccaaagaacgcgggacaucuauauuucucgcagacggcgcggaacauucaccuggacacuuagcgauuccgagggcaacgaaacccccggcggguacugccugaccagauggaugcucaucgaggccgagcugaaauguuuuggaaauacagcuguugccaagugcaacgaaaaacaugacgaggaguucugcgauaugcugcggcucuuugacuucuguaagcaggcgauccgcagacugaaagccccugcucagaugagcauucagcuuaucaauaaggccgugaacgcucugauuaaugaucaacucaucaugaagaaccaucugcgggacauuaugggcauccccuauugcaauuacucuaaauauuguuaccuuaaccacacggucaccgggaagacaucccugccucgcugcugucucgugagcaauggaucuuaccugaacgaaacccacuucagcgacgauaucgaacagcaggccgacaauaugauuacagagcugcuccaaaaagaguauaucgauagacagggcaagaccccgcuggggcuuguggaccuguuugucuucuccacgucuuuuuaccucauuagcaucuuccugcaccugguuaaaauucccacacaucggcacgugaucggaaagccuugccccaaaccucaucgccuuaaccacaugggcauuuguuccugcggccucuauaagcaccccggggugccggucaaguggaaaagaugaggacuagucccuguucccagagcccacuuuuuuuucuuuuuuugaaauaaaauagccugucuuucagaucuaaaaaaaaaaaaaaaaaaaaaaaaaaaaaaaaaaaaaaaaaaaaaaaaaaaaaaaaaaaaaaaaaaaaaaaaaaaaaaaaaaaaaaaaaaaaaaaaaaaa

SEQ ID NO: 27253 - RNA, 1740 nt, Artificial Sequence
  mRNA product Design a-2 (A100) comprising derived and/or modified sequence from LASV(LASV1000-NIG-2009;Clade II)__AIT17782__GPCmut4 (opt5)
aggagaguccgcucagccagguugcagaagcggcuuagcguguguccuaaucuucucucugcguguagguaggccugugccgcaaacaagcuuaccaugggccagaucauuaccuucuuucaagaggugccccacgucaucgaagagguuaugaacauugugcugaucgcccucagccugcuugcuauucugaaggggaucuacaauguggccacaugcggacucuucggccuggucuccuuucuucugcucugugggagaucuugcagcacgaccuauaaaggaguguacgaacugcagacacuggagcucgacauggcgucccugaacauguguaugccucuuucuugcaccaagaauaacagccaucacuauaucaugguuggcaaugaaacagggcuggagcucacccugacaaacaccuccauuaucaaucauaaauucuguaaccuuucugaugcucacaagaaaaaucuguacgaccaugcccucaugagcauuaucuccacguuucaccugagcauuccgaacuucaaucaguaugaggccaugucuugcgauuuuaacggaggcaagaucuccgugcaguacaaucugagccacaccuaugcugucgacgccgcuaaccauuguggcacaauugccaauggggugcuccaaaccuucaugcggauggcguggggaggcucuuacaucgcccuggauuccgggaagggaagcugggacugcaucaugacaucuuaccaguaucuuauuauccagaacaccacgugggaagaucacugucaguuuucccgccccagcccuauuggcuaccuggggcuccugucccaaagaacacgggacaucuauauuucucgcagacggcgcggaaccuucacauggacccuuagcgauuccgagggcaacgaaacccccggcggguacugccugacaagauggaugcucaucgaggcugagcugaaauguuuuggaaauacggccguugcuaagugcaacgaaaaacaugacgaggaguucugcgauaugcugcggcucuuugacuucuguaagcaggccaucaaacgccugaagaccccugcgcagaugagcauucagcuuaucaauaaggccgugaacgcucugauuaaugaucaacucaucaugaaaaaccaccugagagacauuaugggcauccccuauugcaauuacucuaaguauuguuaccuuaaccacacagucaccgggaaaacaucccugccucggugcugucucgugagcaauggaucuuaccugaacgaaacccauuucagcgacgauaucgaacagcaggccgacaauaugauuacggagcugcuccaaaaggaguauaucgaucgccagggcaaaacaccgcuggggcuuguggaccuguuugucuucuccaccucuuuuuaccucauuagcaucuuccugcaccugguuaagauucccacccauagacacguggugggaaaaccuugccccaagccucaucggcuuaaccacaugggcaucuguuccugcggccucuauaagcaccccggggucccggugaaauggaagcgcugaggacuagucccuguucccagagcccacuuuuuuuucuuuuuuugaaauaaaauagccugucuuucagaucuaaaaaaaaaaaaaaaaaaaaaaaaaaaaaaaaaaaaaaaaaaaaaaaaaaaaaaaaaaaaaaaaaaaaaaaaaaaaaaaaaaaaaaaaaaaaaaaaaaaa

SEQ ID NO: 27254 - RNA, 1740 nt, Artificial Sequence
  mRNA product Design a-2 (A100) comprising derived and/or modified sequence from LASV(LASV221-NIG-2010;Clade II)__AIT17624__GPCmut4 (opt5)
aggagaguccgcucagccagguugcagaagcggcuuagcguguguccuaaucuucucucugcguguagguaggccugugccgcaaacaagcuuaccaugggccagaucauuaccuucuuucaagaggugccccacgucaucgaagagguuaugaacauugugcugaucgcccucagccugcuugcuauucugaaggggaucuacaauguggccacaugcggacucuucggccuggucuccuuucuucugcucugugggagaucuugcagcacgaccuauaaaggaguguacgaacugcagacacuggagcucgacauggcgucccugaacauguguaugccucuuucuugcaccaagaauaacagccaucacuauaucaugguuggcaaugaaacagggcuggagcucacccugacaaacaccuccauuaucaaucauaaauucuguaaccuuucugaugcucacaagaaaaaucuguacgaccaugcccucaugagcauuaucuccacguuucaccugagcauuccgaacuucaaucaguaugaggccaugucuugcgauuuuaacggaggcaagaucuccgugcaguacaaucugagccacaccuaugcuauugacgccgcuaaccauuguggcacaaucgccaaugggguccuccaaaccuucaugcggauggcguggggaggcucuuacaucgcccuggauuccgggaagggaagcugggacugcauuaugacaucuuaccaguaucuuaucauucagaacaccacgugggaagaucacugucaguuuucccgccccagcccuaucggcuaccuggggcuccugucccaaagaacacgggacauuuauaucucucgcagacggcgcggaaccuucacauggacccuuagcgauuccgagggcaacgaaacccccggcggguacugccugacaagauggaugcucaucgaggcugagcugaaauguuuuggaaauacggccguggcuaagugcaacgaaaaacaugacgaggaguucugcgauaugcugcggcucuuugacuucuguaagcaggccauucgcagacugaaaaccccugcgcagaugagcauccagcuuauuaauaaggccguuaacgcucugaucaaugaucaacucauuaugaagaaccaucugcgggacaucaugggcauccccuauugcaauuacucuaaauauuguuaccuuaaccacacagugaccgggaagacaucccugccucgcugcugucucgucagcaauggaucuuaccugaacgaaacccacuucagcgacgauauugaacagcaggccgacaauaugaucacggagaugcugcaaaaagaguauauggauagacagggcaagacaccgcucgggcugguggaccuuuuuguguucuccaccucuuuuuaccugauuagcaucuuccuccaccuggucaaaauucccacccaucggcacguuaucggaaagccuugccccaaaccucaucgccugaaccacaugggcauuuguuccugcggccuuuauaagcaccccggggugccggugaaguggaaaagaugaggacuagucccuguucccagagcccacuuuuuuuucuuuuuuugaaauaaaauagccugucuuucagaucuaaaaaaaaaaaaaaaaaaaaaaaaaaaaaaaaaaaaaaaaaaaaaaaaaaaaaaaaaaaaaaaaaaaaaaaaaaaaaaaaaaaaaaaaaaaaaaaaaaaa

SEQ ID NO: 27255 - RNA, 1740 nt, Artificial Sequence
  mRNA product Design a-2 (A100) comprising derived and/or modified sequence from LASV(LASV237-NIG-2010;Clade II)__AIT17638__GPCmut4 (opt5)
aggagaguccgcucagccagguugcagaagcggcuuagcguguguccuaaucuucucucugcguguagguaggccugugccgcaaacaagcuuaccaugggccagaucauuaccuucuuucaagaggugccccacgucaucgaagagguuaugaacauugugcugaucgcccucagccugcuugcuauucugaaggggaucuacaauguggccacaugcggacucuucggccuggucuccuuucuucugcucugugggagaucuugcagcacgaccuauaaaggaguguacgaacugcagacacuggagcucgacauggcgucccugaacauguguaugccucuuucuugcaccaagaauaacagccaucacuauaucaugguuggcaaugaaacagggcuggagcucacccugacaaacaccuccauuaucaaucauaaauucuguaaccuuucugaugcucacaagaaagaccuguacgaucaugcccucaugagcauuaucuccacguuucaccugagcauuccgaauuucaaccaguaugaggccaugucuugcgacuuuaauggaggcaagaucuccgugcaguacaaccugagccacaccuaugcugucgaugccgcuaaucauuguggcacaauugccaacggggugcuccaaaccuucaugcggauggcguggggaggcucuuacaucgcccuggacuccgggaagggaagcugggauugcaucaugacaucuuaccaguaucuuauuauccagaauaccacgugggaagaccacugucaguuuucccgccccagcccuauuggcuaccuggggcuccugucccaaagaacacgggauaucuauauuucucgcagacggcgcggaaccuucacauggacccuuagcgacuccgagggcaacgaaacccccggcggguacugccugacaagauggaugcucaucgaggcugagcugaaauguuuuggaaacacggccguugcuaagugcaaugaaaaacaugaugaggaguucugcgacaugcugcggcucuuugauuucuguaagcaggccauccgcagacugaaaaccccugcgcagaugagcauucagcuuaucaacaaggccgugaaugcucugauuaacgaccaacucaucaugaagaaucaucugcgggacauuaugggcauccccuauugcaacuacucuaaauauuguuaccuuaaucacacagucaccgggaagacaucccugccucgcugcugucucgugagcaacggaucuuaccugaaugaaacccacuucagcgaugacaucgaacagcaggccgauaacaugauuacggagcugcuccaaaaagaguauauggacagacagggcaagacaccgcuggggcuuguggaucuguuugucuucuccaccucuuuuuaccucaucagcauuuuccugcaccugaucaaaauucccacccaucggcacaucacaggaaagccuugccccaaaccucaucgccuuaaucacaugggcauuuguuccugcggccucuauaagcaccccgggguuccggugaaguggaaaagaugaggacuagucccuguucccagagcccacuuuuuuuucuuuuuuugaaauaaaauagccugucuuucagaucuaaaaaaaaaaaaaaaaaaaaaaaaaaaaaaaaaaaaaaaaaaaaaaaaaaaaaaaaaaaaaaaaaaaaaaaaaaaaaaaaaaaaaaaaaaaaaaaaaaaa

SEQ ID NO: 27256 - RNA, 1740 nt, Artificial Sequence
  mRNA product Design a-2 (A100) comprising derived and/or modified sequence from LASV(LASV253-NIG-2011;Clade II)__AIT17670__GPCmut4 (opt5)
aggagaguccgcucagccagguugcagaagcggcuuagcguguguccuaaucuucucucugcguguagguaggccugugccgcaaacaagcuuaccaugggccagaucauuaccuucuuucaagaggugccccacgucaucgaagagguuaugaacauugugcugaucgcccucagccugcuugcuauucugaaggggaucuacaauguggccacaugcggacucuucggccuggucuccuuucuucugcucugugggagaucuugcagcacgaccuauaaaggaguguacgaacugcagacacuggagcucgacauggcgucccugaacauguguaugccucuuucuugcaccaagaauaacagccaucacuauaucaugguuggcaaugaaacagggcuggagcucacccugacaaacaccuccauuaucaaucauaaauucuguaaccuuucugaugcucacaagaaaaaucuguacgaccaugcccucaugagcauuaucuccacguuucaccugagcauuccgaacuucaaucaguaugaggccaugucuugcgauuuuaacggaggcaagaucuccgugcaguacaaucugagccacaccuaugcugucgacgccgcuaaccauuguggcacaauugccaauggggugcuccaaaccuucaugcggauggcguggggaggcucuuacaucgcccuggauuccgggaagggaagcugggacugcaucaugacaucuuaccaguaucuuauuauccagaacaccacgugggaagaucacugucaguuuucccgccccagcccuauuggcuaccuggggcuccugucccaaagaacacgggacaucuauauuucucgcagacggcgcggaaccuucacauggacccuuagcgauuccgagggcaacgaaacccccggcggguacugccugacaagauggaugcucaucgaggcugagcugaaauguuuuggaaauacggccguugcuaagugcaacgaaaaacaugacgaggaguucugcgauaugcugcggcucuuugacuucuguaagcaggccauccgcagacugaaagcgccugcccagaugagcauucagcuuaucaauaaggcugugaacgcccugauuaaugaucaacucaucaugaagaaccaucugcgggacauuaugggcauccccuauugcaauuacucuaaauauuguuaccuuaaccacaccgucacagggcgcaccucccugccuagaugcugucucgugagcaauggaucuuaccugaacgaaacacacuucagcgacgauaucgaacagcaggcugacaauaugauuaccgagcugcuccaaaaggaguauaucgaucggcagggcaaaacgccgcuggggcuuguggaccuguuugucuucuccacaucuuuuuaccucauuagcaucuuccugcaccugguuaagauucccacccaucgccacaucauuggaaaaccuugccccaagccucauagacuuaaccacaugggcaucuguuccugcggccucuauaaacaccccggggugccggugaaguggaagcggugaggacuagucccuguucccagagcccacuuuuuuuucuuuuuuugaaauaaaauagccugucuuucagaucuaaaaaaaaaaaaaaaaaaaaaaaaaaaaaaaaaaaaaaaaaaaaaaaaaaaaaaaaaaaaaaaaaaaaaaaaaaaaaaaaaaaaaaaaaaaaaaaaaaaa

SEQ ID NO: 27257 - RNA, 1740 nt, Artificial Sequence
  mRNA product Design a-2 (A100) comprising derived and/or modified sequence from LASV(LASV254-NIG-2011;Clade II)__AIT17674__GPCmut4 (opt5)
aggagaguccgcucagccagguugcagaagcggcuuagcguguguccuaaucuucucucugcguguagguaggccugugccgcaaacaagcuuaccaugggccagaucauuaccuucuuucaagaggugccccacgucaucgaagagguuaugaacauugugcugaucgcccucagccugcuugcuauucugaaggggaucuacaauguggccacaugcggacucuucggccuggucuccuuucuucugcucugugggagaucuugcagcacgaccuauaaaggaguguacgaacugcagacacuggagcucgacaugaccaaccugaauauguguaugccucuuuccugcacaaagaacaauucucaucacuauaucaugguuggcaacgaaaccgggcuggagcucacacugaccaauacgagcauuaucaaccauaaauucuguaaucuuuccgaugcgcacaagaaaaaccuguacaaucaugcucucaugucuauuaucagcaccuuucaccuguccauuccgaacuucaaucaguaugaggccaugagcugcgacuuuaacggaggcaagaucucugugcaguacaaucugucccacagcuaugccgucgaugcugccaaccauuguggcacaauugcuaacggggugcuccaaaccuucaugcggauggccuggggaggcucuuacaucgcgcuggacuccgggaagggaaauugggauugcaucaugacaagcuaccaguaucuuauuauccagaacaccacgugggaagaccacugucaguuuucucgccccuccccuauuggcuaccuggggcuccugagccaaagaacacgggauaucuauauuucccgcagacggcgcggaaccuucacauggacccuuucugacagcgagggcaaugaaacccccggcggguacugccugacaagauggaugcucaucgaggccgagcugaaauguuuuggaaacacggcuguugccaagugcaaugaaaaacaugaugaggaguucugcgacaugcugcggcucuuugauuucuguaagcaggcuauccgcagacugaaaaccccugcccaggcgaacauucagcuuaucaauaaggccgugaacgcucugauuaaugaccaacucaucaugaagaaccaucugcgggauauuaugggcauccccuauugcaauuacuccaaauauuguuaccuuaaccacacagucaccgggaagacaagccugccucgcugcugucucgugucuaauggauccuaccugaacgaaacccacuucagcgacgacaucgaacagcaggccgauaauaugauuacggagcugcuccaaaaagaguauauggacagacagggcaagacaccgcuggggcuuguggaucuguuugucuucucuaccagcuuuuaccucaucuccauuuuccugcaccugguuaaaauccccacccaucggcacgugauuggaaagccuugccccaaaccucaucgccuuaaccacaugggcaucuguucuugcggccucuauaagcaccccggggugccggucaaguggaaaagaugaggacuagucccuguucccagagcccacuuuuuuuucuuuuuuugaaauaaaauagccugucuuucagaucuaaaaaaaaaaaaaaaaaaaaaaaaaaaaaaaaaaaaaaaaaaaaaaaaaaaaaaaaaaaaaaaaaaaaaaaaaaaaaaaaaaaaaaaaaaaaaaaaaaaa

SEQ ID NO: 27258 - RNA, 1740 nt, Artificial Sequence
  mRNA product Design a-2 (A100) comprising derived and/or modified sequence from LASV(Nig08-A19;Clade III)__ADU56618__GPCmut4 (opt5)
aggagaguccgcucagccagguugcagaagcggcuuagcguguguccuaaucuucucucugcguguagguaggccugugccgcaaacaagcuuaccaugggccagaucgugaccuucuuucaagaggucccccacguuauugaagaggugaugaacaucgugcugauugcccucagcauccuggcuauucuuaaggggcuguacaauaucgccacaugcggacucaucggccuggucacguuccuucugcucuccgggagaucuuguagcaugaccuauaaaggaguguacgaacugcagacacuggagcucaacaugaauacccugaacaugugcaugccucuuuccuguacaaagaauaacucucaucacuauauuaugguuggcaaugaaaccgggcuggagcucacacugaccaacacgagccuucugcaucacaaauuuugcaaucucuccgacgcgcauaagaaaaaccuguacgaucacacccugaugucuaucauuagcacauuccaccucuccaucccgaauuuuaaccaguaugaggcuaugagcugugacuucaauggaggcaagauuaccgugcaguacaaccugucucauuccuaugccaucgaugccgcuaaucacugcggcacagucgccaacggggugcuucaaaccuuuaugcggauggcuuggggaggcagcuacauugcccuggacucugggcgcggaaagugggauuguaucaugacguccuaccaguaucucaucauucagaacacaaccugggaagaccauugccaguucagcagacccucuccuaucggcuaccuggggcuucugucccaacggacacgcgauauuuauaucagcagacggcgcagaggaaccuuuaccuggacacucuccgacucugagggcaaugaaacgcccggcggguacugucugacccgguggaugcugauugaggcggagcucaaaugcuucggaaacacagccguugcuaaguguaaugaaaaacacgaugaggaauuuugcgacaugcugcgccuuuucgauuuuugcaagcaggccaucagacggcugaaagcuccugcccagaugagcauccagcucauuaacaaggcggugaaugcccugaucaacgaccaacuuauuaugaagaaucaucugcgcgauaucaugggcauucccuauuguaacuacuccaaauauugcuaccucaaucacaccagcacagggagaaccucucugccucgguguugccuggucuccaacggaagcuaccucaaugagacgcacuucucugacgacaucgaacagcaggcugauaacaugaucacagagaugcugcaaaaggaguaucuugaccgccagggcaaaaccccgcuggggcucguggaucuguucguguuuagcaccuccuucuaccugauuucuaucuuucuucaucucgucaagauucccacacacagacauaucguuggaaaaccuugucccaagccucaccggcugaaucacaugggcauuugcagcuguggccuguauaaacagcccggggugccggugagauggaagcgcugaggacuagucccuguucccagagcccacuuuuuuuucuuuuuuugaaauaaaauagccugucuuucagaucuaaaaaaaaaaaaaaaaaaaaaaaaaaaaaaaaaaaaaaaaaaaaaaaaaaaaaaaaaaaaaaaaaaaaaaaaaaaaaaaaaaaaaaaaaaaaaaaaaaaa

SEQ ID NO: 27259 - RNA, 1743 nt, Artificial Sequence
  mRNA product Design a-2 (A100) comprising derived and/or modified sequence from LASV(G1180-SLE-2010;Clade IV)__AIT17168__GPCmut4 (opt5)
aggagaguccgcucagccagguugcagaagcggcuuagcguguguccuaaucuucucucugcguguagguaggccugugccgcaaacaagcuuaccaugggccagaucgugaccuucuuucaagaggucccccacguuauugaagaggugaugaacaucgugcugauugcccucagcauccuggcuguccuuaaggggcuguacaauuucgccacaugcggacucgugggccugcuuacguuucugcuccugugugggagauccugcaccgcgucucgguauaaaggaguuuacgaacugcagacacucgagcugaacauggaaacccuuaauauguguaugccucugagcugcacaaagaacaauucccaucacuauauuauggugggcaacgagaccgggcucgagcugacacuuaccaauacgucuaucaucaaccauaaauucuguaaucugagcgacgcucacaagaaaaaccucuacgaucaugcccugauguccauuaucucuaccuuucaccugagcauuccgaauuucaaccaguaugaagccauguccugcgacuuuaauggaggcaagaucagcguccaguacaaccucucucacuccuaugcuggcgaugccgcuaaucauugugggacaguggccaacggaguucugcaaaccuucaugcgcauggcguggggcgggagcuacauugcccuugacucuggacacggcuccugggauugcaucaugacaagcuaccaguaucugauuauccagaacaccacgugggaggaccauugucaguuuucuagacccuccccuaucggguaccucggacugcuuagccaacggacacgcgauauuuauaucuccagacggcgcagaggcaccuucacauggacccugucugacagcgaaggcaaggauacccccgggggauacugccucacacgguggaugcugauugaggcugagcugaaauguuuuggcaauacggccguggcuaagugcaacgaaaaacacgacgaggaguucugcgauaugcuccgccuguuugacuucuguaagcaggccauccagagacuuaaagcgccugcccagauguccauucaacugaucaauaaggcugucaacgcccucaucaaugaucagcugauuaugaagaaccaccuucgggacaucauggggauucccuauugcaauuacagcaaauauuguuaccugaaccauaccacaaccggaaagacaucucucccuaaaugcugucugguguccaauggcagcuaccugaacgaaacccacuucucugacgauaucgaacagcaagcugacaauaugauuacggagaugcuccagaaggaguauauggaacgccaggggaaaacaccgcugggacuuguggaucuguuugucuucagcaccuccuuuuaccucaucucuaucuuccugcaucugguuaagauucccacccacagacauaucgugggcaaaagcugcccuaagccccaccggcuuaaccacaugggcauuuguuccugcgggcucuauaagcagccuggagugcccgucaaauggaagcgcugaggacuagucccuguucccagagcccacuuuuuuuucuuuuuuugaaauaaaauagccugucuuucagaucuaaaaaaaaaaaaaaaaaaaaaaaaaaaaaaaaaaaaaaaaaaaaaaaaaaaaaaaaaaaaaaaaaaaaaaaaaaaaaaaaaaaaaaaaaaaaaaaaaaaa

SEQ ID NO: 27260 - RNA, 1743 nt, Artificial Sequence
  mRNA product Design a-2 (A100) comprising derived and/or modified sequence from LASV(G1442-SLE-2011;Clade IV)__AIT17180__GPCmut4 (opt5)
aggagaguccgcucagccagguugcagaagcggcuuagcguguguccuaaucuucucucugcguguagguaggccugugccgcaaacaagcuuaccaugggccagaucgugaccuucuuucaagaggucccccacguuauugaagaggugaugaacaucgugcugauugcccucagcauccuggcuguccuuaaggggcuguacaauguggccacaugcggacucauuggccugguuacguuccuucugcucugugggagauccugcaccacaacccuguauaaaggaguguacgaacugcagacacucgagcugaacauggaaacccuuaauauguguaugccucugucuugcacaaagaacaauagccaucacuauauccgggucggcaacgagaccgggcucgagcugacgcuuaccaauacauccaucauuaaccauaaauuuuguaaucugucugacgcgcacaagaaaaaccucuacgaucaugcucugaugagcaucauuuccaccuuccaccugucuaucccgaauuuuaaccaguaugaagccaugagcugcgacuucaauggaggcaagauuuccgugcaguacaaccucagccacucuuaugccggcgaugcugccaaucauugugggacaguugcuaacggagugcugcaaaccuuuaugcgcauggccuggggcggguccuacaucgcgcuugacagcggaagaggcaacugggauugcauuaugacgucuuaccaguaucugaucauccagaauacaaccugggacgaucacugucaguucucccggcccagcccuauuggguaccucggacugcuuucucaacgcacaagagacgucuauaucucccggcgcagacggggcaccuuuaccuggacacugagcgauuccgagggcaaggacacgcccgggggauacugccucacccgcuggaugcugauugaagccgagcugaaauguuucggcaacacagcuguggccaagugcaaugagaaacaugaugaagaguuuugcgacaugcucagacuguucgauuuuuguaagcaggcuauccagcggcuuaaagccccugcgcagaugucuauucaacugaucaacaaggccgugaaugcucucaucaacgaccagcugauuaugaagaaucaccuucgcgacaucauggggauucccuauugcaacuacagcaaauauuguuaccugaauaacaccgccacaggaaagaccucccucccuaaaugcugucugaucagcaauggcucuuaccugaacgaaacgcacuucuccgaugacauugagcaggaagcugauaauaugaucacagagaugcuccaaaaggaguauauggaaagacaggggaaaaccccgcugggacuugucgaccuguucguuuuuagcaccucuuucuaccucaucagcauuuuucugcaucuggugaagauccccacacaccggcauauugugggcaaauccugcccuaagccccaccgccuuaaccauaugggcaucuguucuugcgggcucuauaagcagccuggaguccccgugagauggaaacggugaggacuagucccuguucccagagcccacuuuuuuuucuuuuuuugaaauaaaauagccugucuuucagaucuaaaaaaaaaaaaaaaaaaaaaaaaaaaaaaaaaaaaaaaaaaaaaaaaaaaaaaaaaaaaaaaaaaaaaaaaaaaaaaaaaaaaaaaaaaaaaaaaaaaa

SEQ ID NO: 27261 - RNA, 1743 nt, Artificial Sequence
  mRNA product Design a-2 (A100) comprising derived and/or modified sequence from LASV(G3010-SLE-2013;Clade IV)__AIT17344__GPCmut4 (opt5)
aggagaguccgcucagccagguugcagaagcggcuuagcguguguccuaaucuucucucugcguguagguaggccugugccgcaaacaagcuuaccaugggccagaucgugaccuucuuucaagaggucccccacguuauugaagaggugaugaacaucgugcugauugcccucagcauccuggcuguccuuaaggggcuguacaauuucgccacaugcggacucgugggccugguuacguuucuucugcucugugggagauccugcaccacaucucuguauaaaggaguguacgaacugcagacccucgagcugaacauggaaacacuuaauauguguaugccucugagcugcaccaagaacaauucccaucacuauauuauggucggcaacgagacagggcucgagcugacccuuacgaauaccucuaucaucaaccauaaauucuguaaucugagcgacgcgcacaagaaaaaccucuacaaucaugcucugauguccauuaucucuacauuucaccugagcauuccgaacuucaaucaguaugaagccauguccugcgauuuuaacggaggcaagaucagcgugcaguacaaucucucucacuccuaugccggcgacgcugccagccauugugggaccguugcuaacggagugcugcaaacauucaugcggauggccuggggcgggucuuacauugcgcuugauuccggauacggcaagugggacugcaucaugaccagcuaucaguaccugauuauccagaacacgacaugggaggaucacugucaguuuucucgccccuccccuaucggguaucucggacugcuuagccaaagaacccgggacauuuacaucucccgcagacggcgcggcacauucaccuggacccugucugauagcgaaggcaaagacacacccgggggauauugccucacgagauggaugcugauugaggccgagcugaaguguuuuggcaauaccgcugucgccaaaugcaacgaaaagcaugaugaggaguucugcgacaugcuccggcuguuugauuucuguaaacaggcuauccagcgccuuaagaccccugcccagauguccauucaacugaucaauaaggcggugaacgcccucaucaaugaccagcugauuaugaaaaaccaccuuagagauaucauggggauucccuacugcaauuauagcaaguacuguuaccugaaccacacaacaaccggaaaaacgucucucccuaagugcugucugguguccaauggcagcuaucugaacgaaacacauuucucugacgacaucgaacagcaagcugauaauaugauuaccgagaugcuccagaaagaguacauggaacggcaggggaagaccccgcugggacuugucgaccuguuuguuuucagcacauccuuuuaucucaucucuaucuuccugcaccuggugaaaauucccacccaucgccacaucgugggcaagagcugcccuaagccccauagacuuaaccacaugggcauuuguuccugcgggcucuacaaacagccuggaguccccgugcgguggaagcgcugaggacuagucccuguucccagagcccacuuuuuuuucuuuuuuugaaauaaaauagccugucuuucagaucuaaaaaaaaaaaaaaaaaaaaaaaaaaaaaaaaaaaaaaaaaaaaaaaaaaaaaaaaaaaaaaaaaaaaaaaaaaaaaaaaaaaaaaaaaaaaaaaaaaaa

SEQ ID NO: 27262 - RNA, 1743 nt, Artificial Sequence
  mRNA product Design a-2 (A100) comprising derived and/or modified sequence from LASV(G502-SLE-2009;Clade IV)__AIT17126__GPCmut4 (opt5)
aggagaguccgcucagccagguugcagaagcggcuuagcguguguccuaaucuucucucugcguguagguaggccugugccgcaaacaagcuuaccaugggccagaucgugaccuucuuucaagaggucccccacguuauugaagaggugaugaacaucgugcugauugcccucagcauccuggcuguccuuaaggggcuguacaauuucgccacaugcggacucgugggccugcuuacguuucugcuccugugugggagauccugcaccacaggacuguauaaaggcguuuacgaacuccagacccuggagcuuaacauggaaacacugaauauguguaugccucucucuugcaccaagaacaauagccaucacuauauuaugguggggaacgagacaggacuggagcuuacccugacgaauaccuccaucaucaaccauaaauucuguaaucucucugacgcgcacaagaaaaaccuguacgaucaugcucugaugagcauuaucuccacauuucaccucucuauuccgaauuucaaccaguaugaagccaugagcugcgacuuuaauggcggcaagaucuccguccaguacaaccugagccacucuuaugccggggaugcugccgaccauuguggaaccguggcuaauggcguucuucaaacauucaugcggauggccuggggaggguccuacauugcgcuggauagcggccgcgggagaugggacugcaucaugaccucuuaccaguaucucauuauccagaacacgacaugggaggaucacugucaguuuucccggcccagcccuaucggauaccugggccuucugucucaacgcaccagagacauuuauaucucccggcgcagacggggcacauucaccuggacccucagcgauuccgaagggaaggacacacccggaggcuacugccugacgcgcuggaugcugauugaggccgagcucaaauguuuugggaacaccgcuguggccaagugcaaugaaaaacaugaugaggaguucugcgacaugcugagacuuuuugauuucuguaagcaggcuauccagcggcugaaagccccugcgcagaugucuauucaacucaucaacaaggccgucaaugcucugaucaacgaccagcuugugaugaagaaucaucugcgcgacauuaugggaauccccuauugcaacuacagcagauauuguuaccucaaucacacaaccacaggccggaccucccugccuaaaugcugucuggugagcaacgggucuuaccucaaugaaacgcacuucuccgaugacauugaacagcaagccgauaacaugaucacagagaugcugcagaaggaguauauggaacgccagggaaaaaccccgcuuggccuggucgaccucuuuguuuucagcaccucuuuuuaccugauuagcaucuuccugcaccuugugaagauccccacacauagacacauugugggcaaauccugcccuaagccccaucggcucaaucacauggggaucuguucuugcggacuguauaaacagccuggcguccccgugaaguggaagagaugaggacuagucccuguucccagagcccacuuuuuuuucuuuuuuugaaauaaaauagccugucuuucagaucuaaaaaaaaaaaaaaaaaaaaaaaaaaaaaaaaaaaaaaaaaaaaaaaaaaaaaaaaaaaaaaaaaaaaaaaaaaaaaaaaaaaaaaaaaaaaaaaaaaaa

SEQ ID NO: 27263 - RNA, 1743 nt, Artificial Sequence
  mRNA product Design a-2 (A100) comprising derived and/or modified sequence from LASV(G733-SLE-2010;Clade IV)__AIT17154__GPCmut4 (opt5)
aggagaguccgcucagccagguugcagaagcggcuuagcguguguccuaaucuucucucugcguguagguaggccugugccgcaaacaagcuuaccaugggccagaucgugaccuucuuucaagaggucccccacguuauugaagaggugaugaacaucgugcugauugcccucagcauccuggcuguccuuaaggggcuguacaauuucgccacaugcggaauugugggccucguuuccuuucugcuucugugugggagaucuugcacgaccagccucuauaaaggaguguacgaacugcagacacuggagcucaacauggaaacccugaauauguguaugccucuuuccugcacaaagaacaauucucaucacuauaucauggucggcaacgagaccgggcuggagcucacacugaccaauacgagcaucauuaaccauaaauucuguaaucuuuccgacgcgcacaagaaaaaccuguacgaucaugcucucaugucuaucauuagcaccuuucaccuguccaucccgaauuucaaccaguaugaagccaugagcugcgacuuuaauggaggcaagauuucugugcaguacaaccugucccacagcuaugccggcgaugcugccaaucauugugggacaaucgcuaacggaguucuccaaaccuucaugcggauggccuggggcgggucuuacauugcgcuggacuccggacgcgauagaugggacugcaucaugacaagcuaccaguaucuuaucauucagaacaccacgugggaggaucacugucaguuuucucggcccuccccuaucggcuaccuggggcuccugagccaacgcacaagagacauuuauaucucccggcgcagacggggaaccuucacauggacccuuucugauagcgaaggcaaggacacccccggcggguacugccugacacgcuggaugcucauugaggccgagcugaaauguuuuggaaauacggcuguggccaagugcaacgaaaaacaugaugaggaguucugcgacaugcugagacucuuugauuucuguaagcaggcuauccagcggcugaaagccccugcgcagauguccauccaacuuauuaauaaggccgucaacgcucugaucaaugaccagcucauuaugaagaaccaucugcgcgacaucaugggcauucccuauugcaauuacagcaaauauuguuaccuuaaccacaccacaaccgggaagacaucucugccuaaaugcugucucguguccaauggaagcuaccugaacgaaacccacuucucugaugacaucgaacagcaagccgauaauaugaucacggagaugcugcagaaggaguauauggaaagacagggcaaaacaccgcucgggcugguggaccuuuuugucuucagcaccuccuuuuaccugauuucuaucuuccuccaccugguuaagauucccacccaucggcacguggugggaaaaagcugcccuaagccccaucgccugaaccacaugggcaucuguuccugcggccuuuaugggcagccuggaguccccgugaaguggaaaagaugaggacuagucccuguucccagagcccacuuuuuuuucuuuuuuugaaauaaaauagccugucuuucagaucuaaaaaaaaaaaaaaaaaaaaaaaaaaaaaaaaaaaaaaaaaaaaaaaaaaaaaaaaaaaaaaaaaaaaaaaaaaaaaaaaaaaaaaaaaaaaaaaaaaaa

SEQ ID NO: 27264 - RNA, 1743 nt, Artificial Sequence
  mRNA product Design a-2 (A100) comprising derived and/or modified sequence from MOPV/LASV reassortant(IGS-1;Clade IV)__AFY05576__GPCmut4 (opt5)
aggagaguccgcucagccagguugcagaagcggcuuagcguguguccuaaucuucucucugcguguagguaggccugugccgcaaacaagcuuaccaugggccagaucgugaccuucuuucaagaggucccccacguuauugaagaggugaugaacaucgugcugauugcccucagcguccuggcugugcuuaaggggcuguacaauuucgccacaugcggacucguuggccuggugacguuucuucugcucugugggagauccugcaccacaucucuguauaaaggagucuacgaacugcagacccucgagcugaacauggaaacacuuaauauguguaugccucugagcugcaccaagaacaauucccaucacuauaucauggugggcaacgagacagggcucgagcugacccuuacgaauaccucuauuaucaaccauaaauucuguaaucugagcgacgcgcacaagaaaaaccucuacgaucaugcucugauguccaucauuucuacauuucaccugagcaucccgaauuucaaccaguaugaagccauguccugcgacuuuaauggaggcaagauuagcguucaguacaaccucucucacuccuaugccggcgaugcugccaaucauugugggaccguggcuaacggaguccugcaaacauucaugcggauggccuggggcgggagcuacaucgcgcuugacucuggacgcggcaacugggauugcauuaugaccuccuaccaguaucugaucauucagaauacgacaugggaggaccacugucaguuuagcagacccucuccuaucggguaccucggacugcuuucccaacggacccgcgauaucuauauuagcagacggcgcagaggcacauucaccuggacccuguccgacucugaaggcgaggauacacccgggggauacugccucacgcgguggaugcugaucgaggccgaacugaaguguuuuggcaacaccgcuguggccaaaugcaaugagaagcaugacgaagaguucugcgauaugcuccgccuguuugacuucuguaaacaggcuauucagagacuuaaggccccugcgcagaugagcauccaacugauuaacaaagccgugaaugcucucaucaacgaucagcugaucaugaagaaucaccuucgggacauuauggggauccccuauugcaacuacuccaaguauuguuaccugaaucacacaaccacaggacgcaccagccucccuaaaugcugucuggucucuaacggcuccuaccugaaugaaacgcauuucagcgacgauauugagcagcaagccgacaacaugaucacagagaugcuccagaaggaauauauggagagacaggggaaaaccccgcugggacuuguugaucuguuuguguucucuaccagcuuuuaccucauuuccaucuuccugcaccuggugaagauccccacacaucggcacauugucggcaaaucuugcccuaagccccaucgccuuaaucacaugggcaucuguagcugcgggcucuauaaacagccuggagugcccguuaaguggaagagaugaggacuagucccuguucccagagcccacuuuuuuuucuuuuuuugaaauaaaauagccugucuuucagaucuaaaaaaaaaaaaaaaaaaaaaaaaaaaaaaaaaaaaaaaaaaaaaaaaaaaaaaaaaaaaaaaaaaaaaaaaaaaaaaaaaaaaaaaaaaaaaaaaaaaa

SEQ ID NO: 27265 - RNA, 1743 nt, Artificial Sequence
  mRNA product Design a-2 (A100) comprising derived and/or modified sequence from LASV(LM765-SLE-2012;Clade IV)__AIT17814__GPCmut4 (opt5)
aggagaguccgcucagccagguugcagaagcggcuuagcguguguccuaaucuucucucugcguguagguaggccugugccgcaaacaagcuuaccaugggccagaucgugaccuucuuucaagaggucccccacguuauugaagaggugaugaacaucgugcugauugcccucagcauccuggcuguccuuaaggggcuguacaauuucgccacaugcggacucgugggccugguuacguuucuucugcucugugggagauccugcaccacaucucuguauaaaggaguguacgaacugcagacccucgagcugaacauggaaacacuuaauauguguaugccucugagcugcaccaagaacaauucccaucacuauauuauggucggcaacgagacagggcucgagcugacccuuacgaauaccucuaucaucgaccauaaauucuguaaccugagcgaugcgcaccggaagaaucucuacgaccaugcucugauguccauuaucucuacauuucaccugagcauuccgaacuucaaucaguaugaagccauguccugcgauuuuaacggaggcaaaaucagcgugcaguacaaucucucucacuccuaugccaaggacgcugccgaucauuguggcaccguugcuaacggggugcugcaaacauucaugcgcauggccuggggaggcagcuacauugcgcuugacucugggagaggacggugggauugcaucaugaccuccuaccaguaucugauuauccagaauacgacaugggaggaccacugucaguuuagccgccccucuccuaucggcuaccucgggcugcuuucccaaagaacccgggauauuuauaucagccgcagacggcgcggaacauucaccuggacccuguccgacucugaaggcaaggauacacccggcggguacugccucacgagauggaugcugauugaggccgagcugaaauguuuuggaaacaccgcugucgccaagugcaacgaaaaacaugacgaggaguucugcgauaugcuccggcuguuugacuucuguaagcaggcuauccagcgccuuaaagccccugcgcagaugagcauucaacugaucaauaaggccgugaacgcucucaucaaugaccagcugauuaugaagaaccaccuuagagauaucaugggcauucccuauugcaauuacuccaaauauuguuaccugaaccacacaaccacagggaagaccagccucccuaaaugcugucuggugucuaauggauccuaccugaacgaaacgcauuucagcgacgauaucgaacagcaagccgacaauaugauuacagagaugcuccagaaggaguauauggaacggcagggcaaaaccccgcuggggcuugucgaucuguuuguuuucucuaccagcuuuuaccucaucuccaucuuccugcaccuggugaagauucccacacaucgccacaucgugggaaaaccuugccccaagccucauagacuuaaccacaugggcauuuguucuugcggccucuauaagcagcccggggucccggugaaauggaagcggugaggacuagucccuguucccagagcccacuuuuuuuucuuuuuuugaaauaaaauagccugucuuucagaucuaaaaaaaaaaaaaaaaaaaaaaaaaaaaaaaaaaaaaaaaaaaaaaaaaaaaaaaaaaaaaaaaaaaaaaaaaaaaaaaaaaaaaaaaaaaaaaaaaaaa

SEQ ID NO: 27266 - RNA, 1743 nt, Artificial Sequence
  mRNA product Design a-2 (A100) comprising derived and/or modified sequence from LASV(LM776-SLE-2012;Clade IV)__AIT17824__GPCmut4 (opt5)
aggagaguccgcucagccagguugcagaagcggcuuagcguguguccuaaucuucucucugcguguagguaggccugugccgcaaacaagcuuaccaugggccagaucgugaccuucuuucaagaggucccccacguuauugaagaggugaugaacaucgugcugauugcccucagcauccuggcuguccuuaaggggcuguacaauuucgccacaugcggacucgugggccugguuacguuucuucugcucugugggagauccugcaccacaucuguguauaaaggagucuacgaacugcagacccuggagcucaacauggaaacacugaauauguguaugccucuuagcugcaccaagaacaauucccaucacuauauuauggugggcaacgagacagggcuggagcucacccugacgaauaccucuaucaucaaccauaaauucuguaaucuuagcgacgcgcacaagaaaaaccuguacgaucaugcucucauguccauuaucucuacauuucaccugagcauuccgaauuucaaccaguaugaagccauguccugcgacuuuaauggaggcaagaucagcguucaguacaaccugucucacuccuaugccggcgaugcugccaaucauugugggaccguggcuaacggaguccuccaaacauucaugcggauggccuggggcgggagcuacauugcgcuggacucuggacacggcaagugggauugcaucaugaccuccuaccaguaucuuauuauccagaacacgacaugggaggaccauugucaguuuagccgccccucuccuaucggguaccugggacuccugucccaaagaacccgggauauuuauaucagccgcagacggcgcggcacauucaccuggacccuuuccgacucugaaggcaaagauacacccgggggauacugccugacgagauggaugcucauugaggccgagcugaaguguuuuggcaauaccgcuguggccaaaugcaacgaaaagcacgacgaggaguucugcgauaugcugcggcucuuugacuucuguaaacaggcuauccagcgccugaaggccccugcgcagaugagcauucaacuuaucaauaaggccgugaacgcucugaucaaugaucagcucauuaugaaaaaccaccugagagacaucauggggauucccuauugcaauuacuccaaguauuguuaccuuaaccauacaaccacaggaaaaaccagccugccuaagugcugucucgucucuaauggcuccuaccugaacgaaacgcacuucagcgacgauaucgaacagcaagccgacaauaugauuacagagaugcugcagaaagaguauauggaacggcaggggaagaccccgcucggacugguugaucuuuuuguguucucuaccagcuuuuaccugaucuccaucuuccuccaucuggugaaaauucccacacaccgccauaucgucggcaagucuugcccuaagccccacagacugaaccacaugggcauuuguagcugcgggcuuuauaaacagccuggagugcccguucgguggaagcgcugaggacuagucccuguucccagagcccacuuuuuuuucuuuuuuugaaauaaaauagccugucuuucagaucuaaaaaaaaaaaaaaaaaaaaaaaaaaaaaaaaaaaaaaaaaaaaaaaaaaaaaaaaaaaaaaaaaaaaaaaaaaaaaaaaaaaaaaaaaaaaaaaaaaaa

SEQ ID NO: 27267 - RNA, 1743 nt, Artificial Sequence
  mRNA product Design a-2 (A100) comprising derived and/or modified sequence from LASV(Mad39;Clade IV)__ANH09722__GPCmut4 (opt5)
aggagaguccgcucagccagguugcagaagcggcuuagcguguguccuaaucuucucucugcguguagguaggccugugccgcaaacaagcuuaccaugggccagaucgugaccuucuuucaagaggucccccacguuauugaagaggugaugaacaucgugcugauugcccucagcauccuggcuguccuuaaggggcuguacaauguggccacaugcggacucauuggccugguuacguuccuucugcucugugggagauccugcaccacaacccuguauaaaggaguguacgaacugcaggcgcucgagcugaacauggaaacacuuaauauguguaugccucugucuugcaccaagaacaauagccaucacuauauccgggucggcaacgagacagggcucgagcugacccuuacgaauaccucccugaucaaccauaaauuuuguaaucucucugacgcucacaagaaaaaccuguacgaucaugcccugaugagcauuaucuccacauuccaccucucuauuccgaauuuuaaccaguaugaagccaugagcugcgacuucaaugauggaaagaucuccgugcaguacaaccugagccacaccuaugcuggcgacacagccaaucauuguggcaccguugcuaacggggugcuucaaacguuuaugcgcauggccuggggaggcucuuacauugcgcuggauuccgggagaggaggcugggacugcaucaugacaagcuaccaguaucucauuauccagaacaccacaugggaggaucacugucaguucucucggcccuccccuaucggguaccugggacuucugagccaacgcaccagagacauuuauaucucucggcgcagacggggcaccuuuacauggacgcucuccgauagcgaaggcaaggacacccccgggggauacugccugacacgcuggaugcugauugaggccgagcucaaauguuucggcaauaccgcugucgccaagugcaacgaaaaacaugaugaggaauuuugcgacaugcugagacuuuucgauuuuuguaagcaggcuauccagcggcugaaagccccugcgcagauguccauucaacucaucaauaaggccgugaacgcucugaucaaugaccagcuuauuaugaagaaccaucugcgcgacaucauggggauucccuauugcaauuacucuaaauauuguuaccucaaccacacagugaccggaaagacgagccugccuaaaugcugucuggucuccaauggcagcuaccucaacgagacacacuucucugaugacaucgaacagcaagccgauaauaugauuaccgagaugcugcagaaggaguauauggaaagacaggggaaaaccccgcuuggacugguugaccucuucguguuuuccaccagcuucuaccugaucucuaucuuucugcaccuugugaagauucccacacaucggcacgucgugggcaaaccuugccccaagccucaucgccucaaccacaugggcaucuguagcugcggguucuauaagcagcccggaguuccggugagauggaaacggugaggacuagucccuguucccagagcccacuuuuuuuucuuuuuuugaaauaaaauagccugucuuucagaucuaaaaaaaaaaaaaaaaaaaaaaaaaaaaaaaaaaaaaaaaaaaaaaaaaaaaaaaaaaaaaaaaaaaaaaaaaaaaaaaaaaaaaaaaaaaaaaaaaaaa

SEQ ID NO: 27268 - RNA, 1743 nt, Artificial Sequence
  mRNA product Design a-2 (A100) comprising derived and/or modified sequence from LASV(Z0947-SLE-2011;Clade IV)__AIT17840__GPCmut4 (opt5)
aggagaguccgcucagccagguugcagaagcggcuuagcguguguccuaaucuucucucugcguguagguaggccugugccgcaaacaagcuuaccaugggccagaucgugaccuucuuucaagaggucccccacguuauugaagaggugaugaacaucgugcugauugcccucagcauccuggcuguccuuaaggggcuguacaauuucgccacaugcggacucgugggccugguuacguuucuucugcucugugggagauccugcaccauuucucuguauaaaggaguguacgaacugcagacacucgagcugaacauggaaacccuuaauauguguaugccucugagcugcacaaagaacaauucccaucacuauaucauggucggcaacgagaccgggcucgagcugacacuuaccaauacgucuaucauuaaccauaaauucuguaaucugagcgacgcgcacaagaaaaaccucuacgaucaugcucugauguccaucauuucuaccuuucaccugagcaucccgaauuucaaccaguaugaagccauguccugcgacuuuaauggaggcaagauuagcgugcaguacaaccucucucacuccuaugccggcgaugcugccaaucauugugggacaguugcuaacggagugcugcaaaccuucaugcggauggccuggggcgggagcuacaucgcgcuugacucuggacgcgauagaugggacugcauuaugacauccuaccaguaucugaucauccagaacaccacgugggaggaucacugucaguuuagccggcccucuccuauuggcuaccucgggcugcuuucccaacgcacaagagacaucuauauuagccggcgcagacggggaaccuucacauggacccuguccgauucugaaggcaaggacacccccggcggguacugccucacacgcuggaugcugaucgaggccgagcugaaauguuuuggaaauacggcugucgccaagugcaacgaaaaacaugaugaggaguucugcgacaugcucagacuguuugauuucuguaagcaggcuauucagcggcuuaaagccccugcgcagaugagcauccaacugaucaauaaggccgugaacgcucucauuaaugaccagcugaucaugaagaaccaccuucgcgacauuaugggcauccccuauugcaauuacuccaaauauuguuaccugaaccacaccacaaccgggaagacaagccucccuaaaugcugucuggugucuaauggauccuaccugaacgaaacccauuucagcgaugacauugaacagcaagccgauaauaugaucacggagaugcuccagaaggaguauauggaaagacagggcaaaacaccgcuggggcuugucgaccuguuuguuuucucuaccagcuuuuaccucaucuccauuuuccugcaccuggugaagauccccacccaucggcacauugugggaaaaccuugccccaagccucaucgccuuaaccacaugggcaucuguucuugcggccucuauaagcagcccggggucccggugaaauggaagagaugaggacuagucccuguucccagagcccacuuuuuuuucuuuuuuugaaauaaaauagccugucuuucagaucuaaaaaaaaaaaaaaaaaaaaaaaaaaaaaaaaaaaaaaaaaaaaaaaaaaaaaaaaaaaaaaaaaaaaaaaaaaaaaaaaaaaaaaaaaaaaaaaaaaaa

SEQ ID NO: 27269 - RNA, 1781 nt, Artificial Sequence
  mRNA product Design b-4 (hSL-A64-N5) comprising derived and/or modified sequence from LASV(Josiah;Clade IV)__NP_694870__GPCmut4 (opt1)
aggagagucccgcagucggcguccagcggcucugcuuguucgugugugugucguugcaggccuuauucaagcuuaccaugggccagaucgugaccuucuuccaggaggucccccacgugaucgaggaggugaugaacaucguccugaucgcccucagcgugcuggccgugcugaaggggcucuacaacuucgcgaccugcggccuggucgggcuggugacguuccuccugcugugcggccgcuccugcaccaccagccucuacaaggggguguacgagcugcagacccuggagcucaacauggagacgcugaacaugugcaugccgcuguccugcaccaagaacaacagccaccacuacaucauggucggcaacgagaccggccucgagcugacgcugaccaacaccuccaucaucaaccacaaguucugcaaccucagcgacgcccacaagaagaaccuguacgaccacgcccugauguccaucaucagcaccuuccaccucuccauccccaacuucaaccaguacgaggccaugagcugcgacuucaacgggggcaagaucuccgugcaguacaaccugagccacuccuacgccggggacgcggccaaccacugcggcacgguggccaacgggguccugcagaccuucaugcggauggccuggggcggcagcuacaucgcgcucgacuccgggcgcggcaacugggacugcaucaugaccagcuaccaguaccugaucauccagaacaccacgugggaggaccacugccaguucucccggcccagccccaucggguaccugggccuccugucccagcgcacccgggacaucuacaucagccgccggcgccggggcaccuucaccuggacgcugagcgacuccgaggggaaggacaccccgggcggguacugccugacccgcuggaugcucaucgaggccgagcugaagugcuucggcaacaccgccguggccaagugcaacgagaagcacgacgaggaguucugcgacaugcugcggcuguucgacuucugcaagcaggccauccagcgccugaaggcgcccgcccagaugagcauccagcugaucaacaaggccgugaacgcccucaucaacgaccagcugaucaugaagaaccaccuccgggacaucauggggauccccuacugcaacuacuccaaguacugcuaccucaaccacacgaccaccggccgcaccagccugcccaagugcugccuggucuccaacggcagcuaccucaacgagacgcacuucuccgacgacaucgagcagcaggccgacaacaugaucaccgagaugcugcagaaggaguacauggagcggcaggggaagacgccccugggccucguggaccuguucguguucagcaccuccuucuaccugaucagcaucuuccugcaccucgucaagaucccgacccaccgccacaucguggggaaguccugccccaagccccaccggcugaaccacaugggcaucugcagcugcgggcuguacaagcagcccggcgugccggucaaguggaagcgcugaggacuaguaauaaggaaacuguaugaaugucugugggcaggaagugaagagauccuucuguaaagguuuuuggaauuaugucugcugaauaauaaacuuuuuugaaauaauaaaucugguagaaaaaugagaucucaaaggcucuuuucagagccaccaaaaaaaaaaaaaaaaaaaaaaaaaaaaaaaaaaaaaaaaaaaaaaaaaaaaaaaaaaaaaaaaagaauu

SEQ ID NO: 27270 - RNA, 1778 nt, Artificial Sequence
  mRNA product Design b-4 (hSL-A64-N5) comprising derived and/or modified sequence from LASV(LP;Clade I)__AAF86701__GPCmut4 (opt1)
aggagagucccgcagucggcguccagcggcucugcuuguucgugugugugucguugcaggccuuauucaagcuuaccaugggccagaucaucaccuucuuccaggaggugccccacgucaucgaggaggugaugaacaucgugcugaucgcccucagccugcuggccauccucaaggggcuguacaacaucgcgaccugcggcaucaucgggcuggucgccuuccucuuccugugcggcaaguccugcagccugacgcucaagggcggguacgagcugcagacccuggagcucaacauggagacccugaacaugugcaugccgcuguccugcacgaagaacagcucccaccacuacauccgcgugggcaacgagaccgggcucgagcugacccugaccaacacgagcaucaucaaccacaaguucugcaaccucuccgacgcccacaagaagaaccuguacgaccacgcccugaugagcaucaucuccaccuuccaccucagcauccccaacuucaaccaguacgaggccauguccugcgacuucaacggcgggaagaucagcgugcaguacaaccugucccacagcuacgcgggcgacgccgccgagcacugcgggaccgucgccaacggcgugcugcagaccuucaugcggauggcguggggcgggcgcuacaucgcccucgacuccggcaaggggaacugggacugcaucaugacgagcuaccaguaccugaucauccagaacaccaccugggaggaccacugccaguucucccggcccagccccaucggcuaccugggccuccugucccagcgcacccgggacaucuacaucagccgccggcgccgggggacguucaccuggacccugagcgacuccgagggcaacgagacccccgggggcuacugccugacgcgcuggaugcucaucgaggccgagcugaagugcuucgggaacaccgccguggccaagugcaacgagaagcacgacgaggaguucugcgacaugcugcggcuguucgacuucugcaagcaggcgauccgccggcugaaggcccccgcccagaugagcauccagcugaucaacaaggccgucaacgcccucaucaacgaccagcugaucaugaagaaccaccuccgcgacaucaugggcauccccuacugcaacuacuccaaguacugcuaccucaaccacaccagcuccggccggaccagccugcccaagugcugccugaucuccaacgggagcuaccucaacgagacgcaguucuccgacgacaucgagcagcaggcggacaacaugaucaccgagaugcugcagaaggaguacaucgagcgccagggcaagaccccgcuggggcucguggacaucuucaucuucagcaccuccuucuaccugaucagcaucuuccugcaccugaucaagaucccgacgcaccggcacaucgugggcaagcccugccccaagccccaccgccucaaccacaugggggucugcuccugcggccuguacaagcacccgggcgugcccaccaaguggaagcggugaggacuaguaauaaggaaacuguaugaaugucugugggcaggaagugaagagauccuucuguaaagguuuuuggaauuaugucugcugaauaauaaacuuuuuugaaauaauaaaucugguagaaaaaugagaucucaaaggcucuuuucagagccaccaaaaaaaaaaaaaaaaaaaaaaaaaaaaaaaaaaaaaaaaaaaaaaaaaaaaaaaaaaaaaaaaagaauu

SEQ ID NO: 27271 - RNA, 1778 nt, Artificial Sequence
  mRNA product Design b-4 (hSL-A64-N5) comprising derived and/or modified sequence from LASV(803213;Clade II)__AAF86703__GPCmut4 (opt1)
aggagagucccgcagucggcguccagcggcucugcuuguucgugugugugucguugcaggccuuauucaagcuuaccaugggccagaucaucaccuucuuccaggaggugccccacgucaucgaggaggugaugaacaucgugcugaucgcccucagccugcuggccauccucaaggggaucuacaacgucgcgaccugcggccuguucgggcugaucuccuuccuccugcugugcggccgcagcugcuccgugacguacaaggggguguacgagcuccagacccuggagcugaacauggccaaccucaacaugugcaugccgcugagcugcaccaagaacaacucccaccacuacaucauggucggcaacgagacgggccuggagcucacccugaccaacaccagcaucaucaaccacaaguucugcaaccuguccgacgcccacaagaagaaccucuacgaccacgcccugaugagcaucaucuccacguuccaccugagcauccccaacuucaaccaguacgaggccauguccugcgacuucaacgggggcaagaucagcgugcaguacaaccucucccacagcuucgcgguggacgccgccaaccacugcgggaccaucgccaacggcguccugcagaccuucaugcggauggcguggggcggguccuacaucgcccuggacagcggcaaggggaacugggacugcaucaugaccuccuaccaguaccucaucauccagaacacgaccugggaggaccacugccaguucagccgccccucccccaucggcuaccuggggcugcucagccagcggacccgcgacaucuacaucagccggcgccgccggggcaccuucacguggacccucuccgacagcgagggcaacgaggcccccgggggcuacugccugacccgguggaugcugaucgaggccgagcucaagugcuucgggaacaccgccguggcgaagugcaacgagaagcacgacgaggaguucugcgacaugcugcgccuguucgacuucugcaagcaggccaucaagcggcucaagacgcccgcccagauguccauccagcugaucaacaaggccgugaacgcccugaucaacgaccagcucaucaugaagaaccaccuccgcgacaucaugggcauccccuacugcaacuacagccgguacugcuaccugaaccacaccgucaccgggaagaccucccugccccgcugcugccuggugagcaacggcuccuaccugaacgagacgcacuucagcgacgacaucgagcagcaggcggacaacaugaucaccgagaugcuccagaaggaguacauggaccggcagggcaagaccccgcuggggcugguggaccucuucgucuucuccaccagcuucuaccugaucuccaucuuccugcaccuggugaagaucccgacgcaccgccacaucgugggcaagcccugccccaagccccaccggcucaaccacauggggaucugcagcugcggccuguacaagcacccggggguccccgugaaguggaagcgcugaggacuaguaauaaggaaacuguaugaaugucugugggcaggaagugaagagauccuucuguaaagguuuuuggaauuaugucugcugaauaauaaacuuuuuugaaauaauaaaucugguagaaaaaugagaucucaaaggcucuuuucagagccaccaaaaaaaaaaaaaaaaaaaaaaaaaaaaaaaaaaaaaaaaaaaaaaaaaaaaaaaaaaaaaaaaagaauu

SEQ ID NO: 27272 - RNA, 1778 nt, Artificial Sequence
  mRNA product Design b-4 (hSL-A64-N5) comprising derived and/or modified sequence from LASV(GA391;Clade III)__CAA36645__GPCmut4 (opt1)
aggagagucccgcagucggcguccagcggcucugcuuguucgugugugugucguugcaggccuuauucaagcuuaccaugggccagaucgugaccuucuuccaggaggucccccacgugaucgaggaggugaugaacaucguccugaucgcccucagcauccuggccauccugaaggggcucuacaacguggcgaccugcggccugaucgggcuggugacguuccuccugcuguccggccgcagcugcucccucaucuacaaggggaccuacgagcugcagacccuggagcucaacauggagacccugaacaugugcaugccgcugagcugcaccaagaacaacucccaccacuacauccgggucggcaacgagaccggccucgagcugacccugacgaacaccagcauccucaaccacaaguucugcaaccuguccgacgcccacaagcgcaaccuguacgaccacagccucauguccaucaucagcaccuuccaccuguccauccccaacuucaaccaguacgaggccaugagcugcgacuucaacgggggcaagaucaccgugcaguacaaccugucccacagcuucgccguggacgccgcggggcacugcggcacgcucgccaacgggguccugcagaccuucaugcggauggccuggggcggcuccuacaucgcccuggacagcgggcgcggcaacugggacugcaucaugaccuccuaccaguaccucaucauccagaacaccacgugggacgaccacugccaguucagccggcccucccccaucggguaccugggccugcucagccagcgcacccgggacaucuacaucagccgccggcgccggggcaccuucaccuggacgcucuccgacagcgaggggaacgagaccccgggcggguacugccugacccgcuggaugcugaucgaggcggagcucaagugcuucggcaacaccgccguggccaagugcaacgagaagcacgacgaggaguucugcgacaugcugcggcuguucgacuucugcaagcaggccauccgccggcucaagacgcccgcccagauguccauccagcugaucaacaaggcggugaacgcccugaucaacgaccagcucaucaugaagaaccaccuccgcgacaucauggggauccccuacugcaacuacagccgguacugcuaccugaaccacaccuccaccggcaagaccagccugccccgcugcugccugaucuccaacggcagcuaccugaacgagacgaaguucuccgacgacaucgagcagcaggccgacaacaugaucaccgagaugcuccagaaggaguacaucgaccggcaggggaagacgccccugggccuggucgaccuguucguguucagcaccuccuucuaccucaucagcaucuuccugcaccuggugaagaucccgacccaccgccacaucgucgggaagcccugccccaagccccaccggcucaaccacaugggcaucugcuccugcgggcuguacaagcagccgggcgugcccgugcgcuggaagcggugaggacuaguaauaaggaaacuguaugaaugucugugggcaggaagugaagagauccuucuguaaagguuuuuggaauuaugucugcugaauaauaaacuuuuuugaaauaauaaaucugguagaaaaaugagaucucaaaggcucuuuucagagccaccaaaaaaaaaaaaaaaaaaaaaaaaaaaaaaaaaaaaaaaaaaaaaaaaaaaaaaaaaaaaaaaaagaauu

SEQ ID NO: 27273 - RNA, 1781 nt, Artificial Sequence
  mRNA product Design b-4 (hSL-A64-N5) comprising derived and/or modified sequence from LASV(AV;Clade V)__CCA30314__GPCmut4 (opt1)
aggagagucccgcagucggcguccagcggcucugcuuguucgugugugugucguugcaggccuuauucaagcuuaccaugggccagaucgugaccuucuuccaggaggucccccacgugaucgaggaggugaugaacaucguccugaucgcccucagcauccuggccgugcugaaggggcucuacaacaucgcgaccugcggccugaucgggcugaucacguuccuccugcugugcggccgcuccugcagcuccaaccucuacaaggggguguacgagcugcagagccuggaccucaacauggagacccugaacaugugcaugccgcuguccugcaccaagaacaacagccaccacuacauccgggucggcaacgacacgggccucgagcugacccugaccaacaccuccauccucaaccacaaguucugcaaccugagcgacgcccacaagaaggaccuguacgaccacgcccucauguccaucaucagcacguuccaccuguccauccccaacuucaaccaguacgaggccaugagcugcgacuucaacgggggcaagaucuccgugcaguacaaccugagccacuccuacgccaucgacgcggccaaccacugcgggaccguggccaacggcauccuccagaccuucaugcgcauggccuggggcgggagcuacaucgcgcuggacuccggccgggggaacugggacugcaucaugaccagcuaccaguaccugaucauccagaacacgaccugggagaaccacugccaguucucccgccccagccccaucggcuaccucgggcugcugagccagcggacccgcgacaucuacaucucccggcgccgccggggcaccuucacguggacccugagcgacuccgagggcaacgccacccccgggggcuacugccucacccgguggaugcugaucgaggccgagcugaagugcuucgggaacacggccgucgccaagugcaacgagaagcacgacgaggaguucugcgacaugcuccgccuguucgacuucugcaagcaggcgaucagccggcugaagucccccgcccagaugagcauccagcucaucaacaaggccgugaacgcccugaucaacgaccagcugaucaugaagaaccaccuccgcgacaucaugggcauccccuacugcaacuacuccaaguacugcuaccugaaccacaccaucaccgggaagaccagccugcccaagugcugccucguguccaacggcagcuaccugaacgagacgcacuucuccgacgacaucgagcagcaggccgacaacaugaucaccgagaugcugcagaaggaguacauggagcggcagggcaagaccccgcucgggcuggucgaccuguucguguucagcaccuccuucuaccugaucagcaucuuccuccgccuggugaagaucccgacgcaccggcacaucgucggcaagcccugccccaagccccaccgccugaaccacauggggaucugcuccugcggccucuacaagcagccgggggugcccgugcgguggaagcgcugaggacuaguaauaaggaaacuguaugaaugucugugggcaggaagugaagagauccuucuguaaagguuuuuggaauuaugucugcugaauaauaaacuuuuuugaaauaauaaaucugguagaaaaaugagaucucaaaggcucuuuucagagccaccaaaaaaaaaaaaaaaaaaaaaaaaaaaaaaaaaaaaaaaaaaaaaaaaaaaaaaaaaaaaaaaaagaauu

SEQ ID NO: 27274 - RNA, 1778 nt, Artificial Sequence
  mRNA product Design b-4 (hSL-A64-N5) comprising derived and/or modified sequence from LASV(Togo/2016/7082;Clade VI)__AMR44577__GPCmut4 (opt1)
aggagagucccgcagucggcguccagcggcucugcuuguucgugugugugucguugcaggccuuauucaagcuuaccaugggccagaucaucaccuucuuccaggaggugccccacgucaucgaggaggugaugaacaucgugcugaucgcccucagccugcuggccauccucaagggggucuacaacguggcgaccugcggcaucaucgggcuggugacguuccuguuccucugcggccgcuccugcagccugaucuacaagggguccuacgagcugcagacccucgagcugaacauggagacccugaacaugugcaugccgcucagcugcacgaagaacuccagccaccacuacauccgggucggcaacgagaccggccuggagcugacccucaccaacacguccaucaucaaccacaaguucugcaaccugagcgacgcccacaagcgcaaccuguacgaccacgcccucauguccauccugagcaccuuccaccuguccauccccaacuucaaccaguacgaggccaugagcugcgacuucaacgggggcaagaucuccgugcaguacaaccucagccacgccuacgcgguggacgccgccgagcacugcgggaccgucgccaacggcgugcugcagaccuucaugcggauggcguggggcggguccuacaucgcccuggacagcggccgcgggaacugggacugcaucaugacguccuaccaguaccucaucauccagaacaccaccugggaggaccacugccaguucagccggcccucccccaucggcuaccuggggcugcucagccagcgcacccgggacaucuacaucagccgccggcgccggggcacguucaccuggacccucuccgacagcgagggcaacgagacccccgggggcuacugccugacgcgcuggaugcugaucgaggccgagcucaagugcuucgggaacaccgccguggccaagugcaacgagaagcacgacgaggaguucugcgacaugcugcggcuguucgacuucugcaagcaggcgauccagcgccucaagucccccgcccagaugagcauccagcugaucaacaaggccgucaacgcccugaucaacgaccagcucaucaugaagaaccaccuccgggacaugaugggcauccccuacugcaacuacuccaaguacugcuaccugaaccacaccagcuccgggcgcaccagccugcccaagugcugccugguguccaacggcagcuaccugaacgagacgcacuucuccgacgacaucgagcagcaggccgacaacaugaucaccgagaugcuccagaaggaguacaucgaccggcagggcaagaccccgcuggggcugguggaccucuucgucuucagcaccuccuucuaccugaucagcaucuuccugcaccugaucaagaucccgacgcaccgccacaucgugggcaagcccugccccaagccccaccggcucaaccacauggggaucugcuccugcggccuguacaagcagccgggggugcccacccgcuggaagcggugaggacuaguaauaaggaaacuguaugaaugucugugggcaggaagugaagagauccuucuguaaagguuuuuggaauuaugucugcugaauaauaaacuuuuuugaaauaauaaaucugguagaaaaaugagaucucaaaggcucuuuucagagccaccaaaaaaaaaaaaaaaaaaaaaaaaaaaaaaaaaaaaaaaaaaaaaaaaaaaaaaaaaaaaaaaaagaauu

SEQ ID NO: 27275 - RNA, 1778 nt, Artificial Sequence
  mRNA product Design b-4 (hSL-A64-N5) comprising derived and/or modified sequence from LASV(KAK-428;Clade n.d. (VII))__ANH09740__GPCmut4 (opt1)
aggagagucccgcagucggcguccagcggcucugcuuguucgugugugugucguugcaggccuuauucaagcuuaccaugggccagaucgugaccuucuuccaggaggucccccacgugaucgaggaggugaugaacaucguccugaucgcccucagccugcuggccauccucaaggggcuguacaacuucgcgaccugcggcgugaucgggcugaucacguuccuccugcugugcggccgcuccugcagcgccaccuacaaggggcaguacgagcuccagacccuggagcugaacauggagucccucaacaugugcaugccgcugagcugcacgaagaacaacucccaccacuacauccgggccggcaacaacaccggccuggagcucacccugaccaacacgagcaucaucucccacaaguucugcaaccugagcgacgcccacaagaagaaccucuacgaccacacccugauguccaucaucaccaccuuccaccugagcauccccaacuucaaccaguacgaggccauguccugcgacuucaacgggggcaagaucagcauccaguacaaccucucccacagcuacgcgggggacgccgcccagcacugcggcacgguggccaacgggguccugcagaccuucaugcgcauggcguggggcggcuccuaccuggcccucgacagcgggcggcgcggcugggacugcaucaucuccagcuaccaguaccugaucauccagaacaccaccugggacgaccacugccaguucucccggcccagccccaucggguaccugggcuucgugagccagaagacgcgcgacaucuacaucucccggcgccgccggggcaccuucaccuggacccugagcgacuccgaggggcacgacaugccgggcggguacugccucacgcgguggaugcugaucgaggccgaccugaagugcuucggcaacaccgccguggccaagugcaacgagaagcacgacgaggaguucugcgacauguggcgccucuucgacuucugcaagcaggcgauccagcggcugaaggcccccgcccagaugaacauccagcugaucaacaaggccgucaacgcccucaucaacgaccagcugaugaugaagaaccaccuccgcgacaucauggggauccccuacugcaacuacagcaaguucugcuaccugaacaacaccaccacgggccggaccucccugccccgcugcugccugaucagcaacggcuccuaccucaacgagacccacuucagcgacgacaucgagcagcaggcggacaacaugaucaccgagaugcugcagaaggaguacauggaccggcaggggaagacgccccugggccucguggaccuguucguguucuccaccagcuucuaccugaucaccaucuuccuccaccuggucaagaucccgacccaccgccacaucguggggaagcccugccccaagccccaccggcugaaccacaugggcaucugcuccugcgggcuguacaagcagccgggcgugcccguccgcuggaagcggugaggacuaguaauaaggaaacuguaugaaugucugugggcaggaagugaagagauccuucuguaaagguuuuuggaauuaugucugcugaauaauaaacuuuuuugaaauaauaaaucugguagaaaaaugagaucucaaaggcucuuuucagagccaccaaaaaaaaaaaaaaaaaaaaaaaaaaaaaaaaaaaaaaaaaaaaaaaaaaaaaaaaaaaaaaaaagaauu

SEQ ID NO: 27276 - RNA, 1778 nt, Artificial Sequence; identical to SEQ ID NO: 27270
  mRNA product Design b-4 (hSL-A64-N5) comprising derived and/or modified sequence from LASV(Pinneo-NIG-1969;Clade I)__AIT17836__GPCmut4 (opt1)

SEQ ID NO: 27277 - RNA, 1778 nt, Artificial Sequence
  mRNA product Design b-4 (hSL-A64-N5) comprising derived and/or modified sequence from LASV(ISTH0009-NIG-2011;Clade II)__AIT17404__GPCmut4 (opt1)
aggagagucccgcagucggcguccagcggcucugcuuguucgugugugugucguugcaggccuuauucaagcuuaccaugggccagaucaucaccuucuuccaggaggugccccacgucaucgaggaggugaugaacaucgugcugaucgcccucagccugcuggccauccucaaggggaucuacaacgucgcgaccugcggccuguucgggcugguguccuuccuccugcugugcggccgcagcugcuccacgaccuacaaggggguguacgagcuccagacccuggagcuggacauggccagccucaacaugugcaugccgcuguccugcacgaagaacaacagccaccacuacaucauggucggcaacgagaccggccuggagcucacccugaccaacacguccaucaucaaccacaaguucugcaaccugagcgacgcccacaagaagaaccucuacgaccacgcccugauguccaucaucagcaccuuccaccuguccauccccaacuucaaccaguacgaggccaugagcugcgacuucaacgggggcaagaucuccgugcaguacaaccucagccacgcguacgccguggacgccgccaaccacugcgggaccaucgcgaacggcguccugcagaccuucaugcggauggccuggggcggguccuacaucgcccuggacagcggcaagggguccugggacugcaucaugacgagcuaccaguaccucaucauccagaacaccaccugggaggaccacugccaguucucccgccccagccccaucggcuaccuggggcugcucagccagcggacccgcgacaucuacaucucccggcgccgccggggcacguucaccuggacccucagcgacuccgagggcaacgagacccccgggggcuacugccugacgcgguggaugcugaucgaggccgagcucaagugcuucgggaacaccgccguggcgaagugcaacgagaagcacgacgaggaguucugcgacaugcugcgccuguucgacuucugcaagcaggccauccggcgccucaagacccccgcccagaugagcauccagcugaucaacaaggccgugaacgcccugaucaacgaccagcucaucaugaagaaccaccuccgggacaucaugggcaucccguacugcaacuacuccaaguacugcuaccugaaccacaccgucacggggaagaccagccugccccgcugcugccugguguccaacggcagcuaccugaacgagacccacuucuccgacgacaucgagcagcaggcggacaacaugaucaccgagcuccugcagaaggaguacauggaccggcagggcaagacgccccuggggcucguggaccuguucgucuucagcaccuccuucuaccugaucagcaucuuccugcaccucaucaagaucccgacccaccgccacaucaccggcaagcccugccccaagccccaccggcugaaccacauggggaucugcuccugcggccuguacaagcacccgggggugcccgugaaguggaagcgcugaggacuaguaauaaggaaacuguaugaaugucugugggcaggaagugaagagauccuucuguaaagguuuuuggaauuaugucugcugaauaauaaacuuuuuugaaauaauaaaucugguagaaaaaugagaucucaaaggcucuuuucagagccaccaaaaaaaaaaaaaaaaaaaaaaaaaaaaaaaaaaaaaaaaaaaaaaaaaaaaaaaaaaaaaaaaagaauu

SEQ ID NO: 27278 - RNA, 1778 nt, Artificial Sequence
  mRNA product Design b-4 (hSL-A64-N5) comprising derived and/or modified sequence from LASV(ISTH2010-NIG-2012;Clade II)__AIT17482__GPCmut4 (opt1)
aggagagucccgcagucggcguccagcggcucugcuuguucgugugugugucguugcaggccuuauucaagcuuaccaugggccagaucaucaccuucuuccaggaggugccccacgucaucgaggaggugaugaacaucgugcugaucgcccucagccugcuggccauccucaaggggaucuacaacgucgcgaccugcggccuguucgggcugguguccuuccuccugcugugcggccgcagcugcuccacgaccuacaaggggguguacgagcuccagacccuggagcuggacauggccagccucaacaugugcaugccgcuguccugcacgaagaacaacagccaccacuacaucauggucggcaacgagaccggccuggagcucacccugaccaacacguccaucaucaaccacaaguucugcaaccugagcgacgcccacaagaagaaccucuacgaccacgcccugauguccaucaucagcaccuuccaccuguccauccccaacuucaaccaguacgaggccaugagcugcgacuucaacgggggcaagaucuccgugcaguacaaccucagccacgcguacgccguggacgccgccaaccacugcgggaccaucgcgaacggcguccugcagaccuucaugcggauggccuggggcggguccuacaucgcccuggacagcggcaagggguccugggacugcaucaugacgagcuaccaguaccucaucauccagaacaucaccugggaggaccacugccaguucucccgccccagccccaucggcuaccuggggcugcucagccagcggacccgcgacaucuacaucucccggcgccgccggggcaccuucacguggacccucagcgacuccgagggcaacgagacccccgggggcuacugccugacccgguggaugcugaucgaggccgagcucaagugcuucgggaacacggccguggcgaagugcaacgagaagcacgacgaggaguucugcgacaugcugcgccuguucgacuucugcaagcaggccauccggcgccucaagacccccgcccagaugagcauccagcugaucaacaaggccgugaacgcccugaucaacgaccagcucaucaugaagaaccaccuccgggacaucaugggcauccccuacugcaacuacuccaaguacugcuaccugaaccacaccgucaccgggaagacgagccugccccgcugcugccugguguccaacggcagcuaccugaacgagacccacuucuccgacgacaucgagcagcaggcggacaacaugaucaccgagcuccugcagaaggaguacaucgaccggcagggcaagaccccgcuggggcucguggaccuguucgucuucagcacguccuucuaccugaucagcaucuuccugcaccucgugaagaucccgacccaccgccacguggucggcaagcccugccccaagccccaccggcugaaccacauggggaucugcuccugcggccuguacaagcacccgggggugcccgugaaguggaagcgcugaggacuaguaauaaggaaacuguaugaaugucugugggcaggaagugaagagauccuucuguaaagguuuuuggaauuaugucugcugaauaauaaacuuuuuugaaauaauaaaucugguagaaaaaugagaucucaaaggcucuuuucagagccaccaaaaaaaaaaaaaaaaaaaaaaaaaaaaaaaaaaaaaaaaaaaaaaaaaaaaaaaaaaaaaaaaagaauu

SEQ ID NO: 27279 - RNA, 1778 nt, Artificial Sequence
  mRNA product Design b-4 (hSL-A64-N5) comprising derived and/or modified sequence from LASV(Lassa virus/H.sapiens-wt/NGA/2015/ISTH_0543;Clade II)__AVO03639__GPCmut4 (opt1)
aggagagucccgcagucggcguccagcggcucugcuuguucgugugugugucguugcaggccuuauucaagcuuaccaugggccagaucaucaccuucuuccaggaggugccccacgucaucgaggaggugaugaacaucgugcugaucgcccucagccugcuggccauccucaaggggaucuacaacgucgcgaccugcggccuguucgggcugguguccuuccuccugcugugcggccgcagcugcuccacgaccuacaaggggguguacgagcuccagacccuggagcuggacauggccaaccucaacaugugcaugccgcugagcugcacgaagaacaacucccaccacuacaucauggucggcaacgagaccggccuggagcucacccugaccaacacgagcaucaucaaccacaaguucugcaaccuguccgacgcccacaagaagaaccucuacgaccacgcccugaugagcaucaucuccaccuuccaccugagcauccccaacuucaaccaguacgaggccauguccugcgacuucaacgggggcaagaucagcgugcaguacaaccucucccacaccuacgcgguggacgccgccaaccacugcgggaccaucgccaacggcguccugcagacguucaugcggauggcguggggcgggagcuacaucgcccuggacuccggcaaggggagcugggacugcaucaugaccuccuaccaguaccucgugauccagaacaccaccugggaggaccacugccaguucagccgccccucccccaucggcuaccuggggcugcucagccagcggacgcgcgacaucuacaucagccggcgccgccggggcaccuucaccuggacccucuccgacagcgagggcaacgagacgcccgggggcuacugccugacccgguggaugcugaucgaggccgagcucaagugcuucgggaacaccgccguggccaagugcaacgagaagcacgacgaggaguucugcgacaugcugcgccuguucgacuucugcaagcaggcgauccggcgccucaagacccccgcccagauguccauccagcugaucaacaaggccgucaacgcccugaucaacgaccagcucaucaugaagaaccaccuccgggacaucaugggcauccccuacugcaacuacagcaaguacugcuaccugaaccacacggugaccgggaagaccucccugccccgcugcugccuggugagcaacggcuccuaccugaacgagacccacuucagcgacgacaucgagcagcaggccgacaacaugaucacggagcuccugcagaaggaguacaucgaccggcagggcaagaccccgcuggggcucgucgaccuguucguguucuccaccagcuucuaccugaucuccaucuuccugcaccucgugaagaucccgacccaccgccacaucacgggcaagcccugccccaagccccaccggcugaaccacauggggaucugcagcugcggccuguacaagcacccggggguccccgugaaguggaagcgcugaggacuaguaauaaggaaacuguaugaaugucugugggcaggaagugaagagauccuucuguaaagguuuuuggaauuaugucugcugaauaauaaacuuuuuugaaauaauaaaucugguagaaaaaugagaucucaaaggcucuuuucagagccaccaaaaaaaaaaaaaaaaaaaaaaaaaaaaaaaaaaaaaaaaaaaaaaaaaaaaaaaaaaaaaaaaagaauu

SEQ ID NO: 27280 - RNA, 1778 nt, Artificial Sequence
  mRNA product Design b-4 (hSL-A64-N5) comprising derived and/or modified sequence from LASV(Lassa virus/H.sapiens-wt/NGA/2016/ISTH_0009;Clade II)__AVO03571__GPCmut4 (opt1)
aggagagucccgcagucggcguccagcggcucugcuuguucgugugugugucguugcaggccuuauucaagcuuaccaugggccagaucaucaccuucuuccaggaggugccccacgucaucgaggaggugaugaacaucgugcugaucgcccucagccugcuggccauccucaaggggaucuacaacgucgcgaccugcggccugcuggggcucguguccuuccugcugcucugcggccgcagcugcuccacgaccuacaaggggguguacgagcugcagacccuggagcucgacauggccagccugaacaugugcaugccgcuguccugcacgaagaacaacagccaccacuacaucauggucggcaacgagaccggccucgagcugacccugaccaacacguccaucaucaaccacaaguucugcaaccucagcgacgcccacaagaagaaccuguacgaccacgcccugauguccaucaucagcaccuuccaccucuccauccccaacuucaaccaguacgaggccaugagcugcgacuucaacgggggccggaucuccgugcaguacaaccugagccacuccuacgcgguggacgccgccaaccacugcgggaccaucgccaacggcguccugcagaccuucaugcgcauggcguggggcgggagcuacaucgcccucgacuccggcaaggggagcugggacugcaucaugacguccuaccaguaccugaucauccagaacaccaccugggaggaccacugccaguucagccggcccagccccaucggcuaccuggggcuccugucccagcgcacccgggacaucuacaucagccgccggcgccggggcacguucaccuggacccuguccgacagcgagggcaacgagacccccgggggcuacugccugacgcgcuggaugcucaucgaggccgagcugaagugcuucgggaacaccgccguggccaagugcaacgagaagcacgacgaggaguucugcgacaugcugcggcuguucgacuucugcaagcaggcgauccgccggcugaagacccccgcccagauguccauccagcugaucaacaaggccgugaacgcccucaucaacgaccagcugaucaugaagaaccaccuccgcgacaucaugggcaucccguacugcaacuacagcaaguacugcuaccucaaccacaccgucacggggaagaccucccugccccggugcugccuggugagcaacggcuccuaccucaacgagacccacuucagcgacgacaucgagcagcaggccgacaacaugaucaccgagcugcugcagaaggaguacaucgaccgccagggcaagacgccccucgggcugguggaccuguucgucuucuccaccagcuucuaccugaucuccaucuuccuccaccuggugaagaucccgacccaccggcacaucaccggcaagcccugccccaagccccaccgccugaaccacauggggaucugcagcugcggccucuacaaccacccgggggugcccgucaaguggaagcggugaggacuaguaauaaggaaacuguaugaaugucugugggcaggaagugaagagauccuucuguaaagguuuuuggaauuaugucugcugaauaauaaacuuuuuugaaauaauaaaucugguagaaaaaugagaucucaaaggcucuuuucagagccaccaaaaaaaaaaaaaaaaaaaaaaaaaaaaaaaaaaaaaaaaaaaaaaaaaaaaaaaaaaaaaaaaagaauu

SEQ ID NO: 27281 - RNA, 1778 nt, Artificial Sequence
  mRNA product Design b-4 (hSL-A64-N5) comprising derived and/or modified sequence from LASV(Lassa virus/H.sapiens-wt/NGA/2016/ISTH_0017;Clade II)__AVO03567__GPCmut4 (opt1)
aggagagucccgcagucggcguccagcggcucugcuuguucgugugugugucguugcaggccuuauucaagcuuaccaugggccagaucaucaccuucuuccaggaggugccccacgucaucgaggaggugaugaacaucgugcugaucgcccucagccugcuggccauccucaaggggaucuacaacgucgcgaccugcggccuguucgggcugguguccuuccuccugcugugcggccgcagcugcuccacgaccuacaaggggguguacgagcuccagacccuggagcuggacauggccagccucaacaugugcaugccgcuguccugcacgaagaacaacagccaccacuacaucauggucggcaacgagaccggccuggagcucacccugaccaacacguccaucaucaaccacaaguucugcaaccugagcgacgcccacaagaagaaccucuacgaccacgcccugauguccaucaucagcaccuuccaccuguccauccccaacuucaaccaguacgaggccaugagcugcgacuucaacgggggcaagaucuccgugcaguacaaccucagccacaccuacgcgaucgacgccgccaaccacugcgggaccaucgccaacggcgugcugcagacguucaugcggauggcguggggcggguccuacaucgcccuggacagcggcaagggguccugggacugcaucaugaccagcuaccaguaccucaucauccagaacaccaccugggaggaccacugccaguucucccgccccagccccaucggcuaccuggggcugcucagccagcggacgcgcgacaucuacaucucccggcgccgccggggcaccuucaccuggacccucagcgacuccgagggcaacgagacgcccgggggcuacugccugacccgguggaugcugaucgaggccgagcucaagugcuucgggaacaccgccgucgccaagugcaacgagaagcacgacgaggaguucugcgacaugcugcgccuguucgacuucugcaagcaggcgauccggcgccucaagacccccgcccagaugagcauccagcugaucaacaaggccgugaacgcccugaucaacgaccagcucaucaugaagaaccaccuccgggacaucaugggcauccccuacugcaacuacuccaaguacugcuaccugaaccacacggugaccgggaagaccagccugccccgcugcugccuggucuccaacggcagcuaccugaacgagacccacuucuccgacgacaucgagcagcaggccgacaacaugaucacggagcuccugcagaaggaguacauggaccggcagggcaagaccccgcuggggcucguggaccuguucguguucagcaccuccuucuaccugaucagcaucuuccugcaccucguccgcaucccgacccaccggcacgugaucggcaagcccugccccaagccccaccgccugaaccacauggggaucugcuccugcggccuguacaagcacccgggggugcccgucaaguggaagcggugaggacuaguaauaaggaaacuguaugaaugucugugggcaggaagugaagagauccuucuguaaagguuuuuggaauuaugucugcugaauaauaaacuuuuuugaaauaauaaaucugguagaaaaaugagaucucaaaggcucuuuucagagccaccaaaaaaaaaaaaaaaaaaaaaaaaaaaaaaaaaaaaaaaaaaaaaaaaaaaaaaaaaaaaaaaaagaauu

SEQ ID NO: 27282 - RNA, 1778 nt, Artificial Sequence
  mRNA product Design b-4 (hSL-A64-N5) comprising derived and/or modified sequence from LASV(Lassa virus/H.sapiens-wt/NGA/2018/ISTH_0959;Clade II)__AVV65099__GPCmut4 (opt1)
aggagagucccgcagucggcguccagcggcucugcuuguucgugugugugucguugcaggccuuauucaagcuuaccaugggccagaucaucaccuucuuccaggaggugccccacgucaucgaggaggugaugaacaucgugcugaucgcccucagccugcuggccauccucaaggggaucuacaacgucgugaccugcggccuguucgggcugguguccuuccuccugcugugcggccgcagcugcuccacgaccuacaagggggucuacgagcuccagacccuggagcuggacauggcgagccucaacaugugcaugccgcuguccugcacgaagaacaacagccaccacuacaucauggugggcaacgagaccggccuggagcucacccugaccaacacguccaucaucaaccacaaguucugcaaccugagcgacgcccacaagaagaaccucuacgaccacgcccugauguccaucaucagcaccuuccaccuguccauccccaacuucaaccaguacgaggccaugagcugcgacuucaacgggggcaagaucuccgugcaguacaaccucagccacgccuacgcgaucgacgccgccaaccacugcgggaccaucgccaacggcguccugcagaccuucaugcggauggcguggggcggguccuacaucgcccuggacagcggcaagggguccugggacugcaucaugacgagcuaccaguaccucaucauccagaacaccaccugggaggaccacugccaguucucccgccccagccccaucggcuaccuggggcugcucagccagcggacccgcgacaucuacaucucccggcgccgccggggcacguucaccuggacccucagcgacuccgagggcaacgagacccccgggggcuacugccugacgcgguggaugcugaucgaggccgagcucaagugcuucgggaacaccgccguggccaagugcaacgagaagcacgacgaggaguucugcgacaugcugcgccuguucgacuucugcaagcaggcgauccggcgccucaagacccccgcccagaugagcauccagcugaucaacaaggccgugaacgcccugaucaacgaccagcucaucaugaagaaccaccuccgggacaucaugggcaucccguacugcaacuacuccaaguacugcuaccugaaccacaccgucacggggaagaccagccugccccgcugcugccugguguccaacggcagcuaccugaacgagacccacuucuccgacgacaucgagcagcaggccgacaacaugaucaccgagcuccugcagaaggaguacaucgaccggcagggcaagacgccccuggggcucguggaccuguucgucuucagcaccuccuucuaccugaucagcaucuuccugcaccucgugaagaucccgacccaccgccacgugaucggcaagcccugccccaagccccaccggcugaaccacauggggaucugcuccugcggccuguacaagcacccggggguccccgugaaguggaagcgcugaggacuaguaauaaggaaacuguaugaaugucugugggcaggaagugaagagauccuucuguaaagguuuuuggaauuaugucugcugaauaauaaacuuuuuugaaauaauaaaucugguagaaaaaugagaucucaaaggcucuuuucagagccaccaaaaaaaaaaaaaaaaaaaaaaaaaaaaaaaaaaaaaaaaaaaaaaaaaaaaaaaaaaaaaaaaagaauu

SEQ ID NO: 27283 - RNA, 1778 nt, Artificial Sequence
  mRNA product Design b-4 (hSL-A64-N5) comprising derived and/or modified sequence from LASV(LASV003-NIG-2008;Clade II)__AIT17580__GPCmut4 (opt1)
aggagagucccgcagucggcguccagcggcucugcuuguucgugugugugucguugcaggccuuauucaagcuuaccaugggccagaucaucaccuucuuccaggaggugccccacgucaucgaggaggugaugaacaucgugcugaucgcccucagccugcuggccauccucaaggggaucuacaacgucgcgaccugcggccuguucgggcugguguccuuccuccugcugugcggccgcagcugcuccacgaccuacaaggggguguacgagcuccagacccuggagcuggacauggccagccucaacaugugcaugccgcuguccugcacgaagaacaacagccaccacuacaucauggucggcaacgagaccggccuggagcucacccugaccaacacguccaucaucaaccacaaguucugcaaccugagcgacgcccacaagaagaaccucuacgaccacgcccugauguccaucaucagcaccuuccaccuguccauccccaacuucaaccaguacgaggccaugagcugcgacuucaacgggggcaagaucuccgugcaguacaaccucagccacaccuacgcgguggacgccgccaaccacugcgggaccaucgccaacggcguccugcagacguucaugcggauggcguggggcggguccuacaucgcccuggacagcggcaagggguccugggacugcaucaugaccagcuaccaguaccucaucauccagaacaccaccugggaggaccacugccaguucucccgccccagccccaucggcuaccuggggcugcucagccagcggacgcgcgacaucuacaucucccggcgccgccggggcaccuucaccuggacccucagcgacuccgagagcaacgagacgccgggcggguacugccugacccgguggaugcugaucgaggccgagcucaagugcuucggcaacaccgccguggccaagugcaacgagaagcacgacgaggaguucugcgacaugcugcgccuguucgacuucugcaagcaggcgauccggcgccucaaggcccccgcccagauguccauccagcugaucaacaaggccgugaacgcccugaucaacgaccagcucaucaugaagaaccaccuccgggacaucauggggauccccuacugcaacuacagcaaguacugcuaccugaaccacaccgucacgggccgcaccucccugccccggugcugccuggugagcaacggguccuaccugaacgagacccacuucagcgacgacaucgagcagcaggcggacaacaugaucaccgagcuccugcagaaggaguacauggaccgccagggcaagacgccccugggccucguggaccuguucgucuucuccaccagcuucuaccugaucuccaucuuccugcaccucgugaagaucccgacccaccggcacgugaucgggaagcccugccccaagccccaccgccugaaccacaugggcaucugcagcugcgggcuguacaagcacccgggcguccccgugaaguggaagcggugaggacuaguaauaaggaaacuguaugaaugucugugggcaggaagugaagagauccuucuguaaagguuuuuggaauuaugucugcugaauaauaaacuuuuuugaaauaauaaaucugguagaaaaaugagaucucaaaggcucuuuucagagccaccaaaaaaaaaaaaaaaaaaaaaaaaaaaaaaaaaaaaaaaaaaaaaaaaaaaaaaaaaaaaaaaaagaauu

SEQ ID NO: 27284 - RNA, 1778 nt, Artificial Sequence
  mRNA product Design b-4 (hSL-A64-N5) comprising derived and/or modified sequence from LASV(LASV035-NIG-2009;Clade II)__AIT17588__GPCmut4 (opt1)
aggagagucccgcagucggcguccagcggcucugcuuguucgugugugugucguugcaggccuuauucaagcuuaccaugggccagaucaucaccuucuuccaggaggugccccacgucaucgaggaggugaugaacaucgugcugaucgcccucagccugcuggccauccucaaggggaucuacaacgucgcgaccugcggccuguucgggcugguguccuuccuccugcugugcggccgcagcugcuccacgaccuacaaggggguguacgagcuccagacccuggagcuggacauggccagccucaacaugugcaugccgcuguccugcacgaagaacaacagccaccacuacaucauggucggcaacgagaccggccuggagcucacccugaccaacacguccaucaucaaccacaaguucugcaaccugagcgacgcccacaagaagaaccucuacgaccacgcccugauguccaucaucagcaccuuccaccuguccauccccaacuucaaccaguacgaggccaugagcugcgacuucaacgggggcaagaucuccgugcaguacaaccucagccacgcguacgccguggacgccgccaaccacugcgggaccaucgcgaacggcguccugcagaccuucaugcggauggccuggggcggguccuacaucgcccuggacagcggcaagggguccugggacugcaucaugacgagcuaccaguaccucaucauccagaacaccaccugggaggaccacugccaguucucccgccccagccccaucggcuaccuggggcugcucagccagcggacccgcgacaucuacaucucccggcgccgccggggcacguucaccuggacccucagcgacuccgagggcaacgagacccccgggggcuacugccugacgcgguggaugcugaucgaggccgagcucaagugcuucgggaacaccgccguggcgaagugcaacgagaagcacgacgaggaguucugcgacaugcugcgccuguucgacuucugcaagcaggccauccggcgccucaaggcccccgcccagaugagcauccagcugaucaacaaggccgugaacgcgcugaucaacgaccagcucaucaugaagaaccaccuccgggacaucaugggcauccccuacugcaacuacuccaaguacugcuaccugaaccacaccgucaccgggaagacgagccugccccgcugcugccugguguccaacggcagcuaccugaacgagacccacuucuccgacgacaucgagcagcaggccgacaacaugaucaccgagcuccugcagaaggaguacaucgaccggcagggcaagaccccgcuggggcucguggaccuguucgucuucagcacguccuucuaccugaucagcaucuuccugcaccucgugaagaucccgacccaccgccacgugaucggcaagcccugccccaagccccaccggcugaaccacauggggaucugcuccugcggccuguacaagcacccggggguccccgugaaguggaagcgcugaggacuaguaauaaggaaacuguaugaaugucugugggcaggaagugaagagauccuucuguaaagguuuuuggaauuaugucugcugaauaauaaacuuuuuugaaauaauaaaucugguagaaaaaugagaucucaaaggcucuuuucagagccaccaaaaaaaaaaaaaaaaaaaaaaaaaaaaaaaaaaaaaaaaaaaaaaaaaaaaaaaaaaaaaaaaagaauu

SEQ ID NO: 27285 - RNA, 1778 nt, Artificial Sequence
  mRNA product Design b-4 (hSL-A64-N5) comprising derived and/or modified sequence from LASV(LASV1000-NIG-2009;Clade II)__AIT17782__GPCmut4 (opt1)
aggagagucccgcagucggcguccagcggcucugcuuguucgugugugugucguugcaggccuuauucaagcuuaccaugggccagaucaucaccuucuuccaggaggugccccacgucaucgaggaggugaugaacaucgugcugaucgcccucagccugcuggccauccucaaggggaucuacaacgucgcgaccugcggccuguucgggcugguguccuuccuccugcugugcggccgcagcugcuccacgaccuacaaggggguguacgagcuccagacccuggagcuggacauggccagccucaacaugugcaugccgcuguccugcacgaagaacaacagccaccacuacaucauggucggcaacgagaccggccuggagcucacccugaccaacacguccaucaucaaccacaaguucugcaaccugagcgacgcccacaagaagaaccucuacgaccacgcccugauguccaucaucagcaccuuccaccuguccauccccaacuucaaccaguacgaggccaugagcugcgacuucaacgggggcaagaucuccgugcaguacaaccucagccacaccuacgcgguggacgccgccaaccacugcgggaccaucgccaacggcguccugcagacguucaugcggauggcguggggcggguccuacaucgcccuggacagcggcaagggguccugggacugcaucaugaccagcuaccaguaccucaucauccagaacaccaccugggaggaccacugccaguucucccgccccagccccaucggcuaccuggggcugcucagccagcggacgcgcgacaucuacaucucccggcgccgccggggcaccuucaccuggacccucagcgacuccgagggcaacgagacgcccgggggcuacugccugacccgguggaugcugaucgaggccgagcucaagugcuucgggaacaccgccguggccaagugcaacgagaagcacgacgaggaguucugcgacaugcugcgccuguucgacuucugcaagcaggcgaucaagcggcucaagacccccgcccagaugagcauccagcugaucaacaaggccgugaacgcccugaucaacgaccagcucaucaugaagaaccaccuccgcgacaucaugggcauccccuacugcaacuacuccaaguacugcuaccugaaccacacggucaccgggaagaccagccugccccggugcugccugguguccaacggcagcuaccugaacgagacccacuucuccgacgacaucgagcagcaggccgacaacaugaucacggagcuccugcagaaggaguacaucgaccgccagggcaagaccccgcuggggcucguggaccuguucgucuucagcaccuccuucuaccugaucagcaucuuccugcaccucgugaagaucccgacccaccggcacguggucggcaagcccugccccaagccccaccgccugaaccacauggggaucugcuccugcggccuguacaagcacccgggggugcccgugaaguggaagcggugaggacuaguaauaaggaaacuguaugaaugucugugggcaggaagugaagagauccuucuguaaagguuuuuggaauuaugucugcugaauaauaaacuuuuuugaaauaauaaaucugguagaaaaaugagaucucaaaggcucuuuucagagccaccaaaaaaaaaaaaaaaaaaaaaaaaaaaaaaaaaaaaaaaaaaaaaaaaaaaaaaaaaaaaaaaaagaauu

SEQ ID NO: 27286 - RNA, 1778 nt, Artificial Sequence
  mRNA product Design b-4 (hSL-A64-N5) comprising derived and/or modified sequence from LASV(LASV221-NIG-2010;Clade II)__AIT17624__GPCmut4 (opt1)
aggagagucccgcagucggcguccagcggcucugcuuguucgugugugugucguugcaggccuuauucaagcuuaccaugggccagaucaucaccuucuuccaggaggugccccacgucaucgaggaggugaugaacaucgugcugaucgcccucagccugcuggccauccucaaggggaucuacaacgucgcgaccugcggccuguucgggcugguguccuuccuccugcugugcggccgcagcugcuccacgaccuacaaggggguguacgagcuccagacccuggagcuggacauggccagccucaacaugugcaugccgcuguccugcacgaagaacaacagccaccacuacaucauggucggcaacgagaccggccuggagcucacccugaccaacacguccaucaucaaccacaaguucugcaaccugagcgacgcccacaagaagaaccucuacgaccacgcccugauguccaucaucagcaccuuccaccuguccauccccaacuucaaccaguacgaggccaugagcugcgacuucaacgggggcaagaucuccgugcaguacaaccucagccacaccuacgcgaucgacgccgccaaccacugcgggaccaucgccaacggcgugcugcagacguucaugcggauggcguggggcggguccuacaucgcccuggacagcggcaagggguccugggacugcaucaugaccagcuaccaguaccucaucauccagaacaccaccugggaggaccacugccaguucucccgccccagccccaucggcuaccuggggcugcucagccagcggacgcgcgacaucuacaucucccggcgccgccggggcaccuucaccuggacccucagcgacuccgagggcaacgagacgcccgggggcuacugccugacccgguggaugcugaucgaggccgagcucaagugcuucgggaacaccgccgucgccaagugcaacgagaagcacgacgaggaguucugcgacaugcugcgccuguucgacuucugcaagcaggcgauccggcgccucaagacccccgcccagaugagcauccagcugaucaacaaggccgugaacgcccugaucaacgaccagcucaucaugaagaaccaccuccgggacaucaugggcauccccuacugcaacuacuccaaguacugcuaccugaaccacacggugaccgggaagaccagccugccccgcugcugccuggucuccaacggcagcuaccugaacgagacccacuucuccgacgacaucgagcagcaggccgacaacaugaucacggagaugcuccagaaggaguacauggaccggcagggcaagaccccgcuggggcugguggaccucuucguguucagcaccuccuucuaccugaucagcaucuuccugcaccuggucaagaucccgacccaccgccacgugaucggcaagcccugccccaagccccaccggcucaaccacauggggaucugcuccugcggccuguacaagcacccgggggugcccgucaaguggaagcgcugaggacuaguaauaaggaaacuguaugaaugucugugggcaggaagugaagagauccuucuguaaagguuuuuggaauuaugucugcugaauaauaaacuuuuuugaaauaauaaaucugguagaaaaaugagaucucaaaggcucuuuucagagccaccaaaaaaaaaaaaaaaaaaaaaaaaaaaaaaaaaaaaaaaaaaaaaaaaaaaaaaaaaaaaaaaaagaauu

SEQ ID NO: 27287 - RNA, 1778 nt, Artificial Sequence
  mRNA product Design b-4 (hSL-A64-N5) comprising derived and/or modified sequence from LASV(LASV237-NIG-2010;Clade II)__AIT17638__GPCmut4 (opt1)
aggagagucccgcagucggcguccagcggcucugcuuguucgugugugugucguugcaggccuuauucaagcuuaccaugggccagaucaucaccuucuuccaggaggugccccacgucaucgaggaggugaugaacaucgugcugaucgcccucagccugcuggccauccucaaggggaucuacaacgucgcgaccugcggccuguucgggcugguguccuuccuccugcugugcggccgcagcugcuccacgaccuacaaggggguguacgagcuccagacccuggagcuggacauggccagccucaacaugugcaugccgcuguccugcacgaagaacaacagccaccacuacaucauggucggcaacgagaccggccuggagcucacccugaccaacacguccaucaucaaccacaaguucugcaaccugagcgacgcccacaagaaggaccucuacgaccacgcccugauguccaucaucagcaccuuccaccuguccauccccaacuucaaccaguacgaggccaugagcugcgacuucaacgggggcaagaucuccgugcaguacaaccucagccacaccuacgcgguggacgccgccaaccacugcgggaccaucgccaacggcguccugcagacguucaugcggauggcguggggcggguccuacaucgcccuggacagcggcaagggguccugggacugcaucaugaccagcuaccaguaccucaucauccagaacaccaccugggaggaccacugccaguucucccgccccagccccaucggcuaccuggggcugcucagccagcggacgcgcgacaucuacaucucccggcgccgccggggcaccuucaccuggacccucagcgacuccgagggcaacgagacgcccgggggcuacugccugacccgguggaugcugaucgaggccgagcucaagugcuucgggaacaccgccguggccaagugcaacgagaagcacgacgaggaguucugcgacaugcugcgccuguucgacuucugcaagcaggcgauccggcgccucaagacccccgcccagaugagcauccagcugaucaacaaggccgugaacgcccugaucaacgaccagcucaucaugaagaaccaccuccgggacaucaugggcauccccuacugcaacuacuccaaguacugcuaccugaaccacacggucaccgggaagaccagccugccccgcugcugccugguguccaacggcagcuaccugaacgagacccacuucuccgacgacaucgagcagcaggccgacaacaugaucacggagcuccugcagaaggaguacauggaccggcagggcaagaccccgcuggggcucguggaccuguucgucuucagcaccuccuucuaccugaucagcaucuuccugcaccucaucaagaucccgacccaccgccacaucacgggcaagcccugccccaagccccaccggcugaaccacauggggaucugcuccugcggccuguacaagcacccgggggugcccgugaaguggaagcgcugaggacuaguaauaaggaaacuguaugaaugucugugggcaggaagugaagagauccuucuguaaagguuuuuggaauuaugucugcugaauaauaaacuuuuuugaaauaauaaaucugguagaaaaaugagaucucaaaggcucuuuucagagccaccaaaaaaaaaaaaaaaaaaaaaaaaaaaaaaaaaaaaaaaaaaaaaaaaaaaaaaaaaaaaaaaaagaauu

SEQ ID NO: 27288 - RNA, 1778 nt, Artificial Sequence
  mRNA product Design b-4 (hSL-A64-N5) comprising derived and/or modified sequence from LASV(LASV253-NIG-2011;Clade II)__AIT17670__GPCmut4 (opt1)
aggagagucccgcagucggcguccagcggcucugcuuguucgugugugugucguugcaggccuuauucaagcuuaccaugggccagaucaucaccuucuuccaggaggugccccacgucaucgaggaggugaugaacaucgugcugaucgcccucagccugcuggccauccucaaggggaucuacaacgucgcgaccugcggccuguucgggcugguguccuuccuccugcugugcggccgcagcugcuccacgaccuacaaggggguguacgagcuccagacccuggagcuggacauggccagccucaacaugugcaugccgcuguccugcacgaagaacaacagccaccacuacaucauggucggcaacgagaccggccuggagcucacccugaccaacacguccaucaucaaccacaaguucugcaaccugagcgacgcccacaagaagaaccucuacgaccacgcccugauguccaucaucagcaccuuccaccuguccauccccaacuucaaccaguacgaggccaugagcugcgacuucaacgggggcaagaucuccgugcaguacaaccucagccacaccuacgcgguggacgccgccaaccacugcgggaccaucgccaacggcguccugcagacguucaugcggauggcguggggcggguccuacaucgcccuggacagcggcaagggguccugggacugcaucaugaccagcuaccaguaccucaucauccagaacaccaccugggaggaccacugccaguucucccgccccagccccaucggcuaccuggggcugcucagccagcggacgcgcgacaucuacaucucccggcgccgccggggcaccuucaccuggacccucagcgacuccgagggcaacgagacgcccgggggcuacugccugacccgguggaugcugaucgaggccgagcucaagugcuucgggaacaccgccguggccaagugcaacgagaagcacgacgaggaguucugcgacaugcugcgccuguucgacuucugcaagcaggcgauccggcgccucaaggcccccgcccagaugagcauccagcugaucaacaaggccgugaacgcccugaucaacgaccagcucaucaugaagaaccaccuccgggacaucaugggcaucccguacugcaacuacuccaaguacugcuaccugaaccacaccgucacggggcgcaccagccugccccggugcugccugguguccaacggcagcuaccugaacgagacccacuucuccgacgacaucgagcagcaggcggacaacaugaucaccgagcuccugcagaaggaguacaucgaccgccagggcaagacgccccuggggcucguggaccuguucgucuucagcaccuccuucuaccugaucagcaucuuccugcaccucgugaagaucccgacccaccggcacaucaucggcaagcccugccccaagccccaccgccugaaccacauggggaucugcuccugcggccuguacaagcacccgggggugcccgucaaguggaagcggugaggacuaguaauaaggaaacuguaugaaugucugugggcaggaagugaagagauccuucuguaaagguuuuuggaauuaugucugcugaauaauaaacuuuuuugaaauaauaaaucugguagaaaaaugagaucucaaaggcucuuuucagagccaccaaaaaaaaaaaaaaaaaaaaaaaaaaaaaaaaaaaaaaaaaaaaaaaaaaaaaaaaaaaaaaaaagaauu

SEQ ID NO: 27289 - RNA, 1778 nt, Artificial Sequence
  mRNA product Design b-4 (hSL-A64-N5) comprising derived and/or modified sequence from LASV(LASV254-NIG-2011;Clade II)__AIT17674__GPCmut4 (opt1)
aggagagucccgcagucggcguccagcggcucugcuuguucgugugugugucguugcaggccuuauucaagcuuaccaugggccagaucaucaccuucuuccaggaggugccccacgucaucgaggaggugaugaacaucgugcugaucgcccucagccugcuggccauccucaaggggaucuacaacgucgcgaccugcggccuguucgggcugguguccuuccuccugcugugcggccgcagcugcuccacgaccuacaaggggguguacgagcuccagacccuggagcuggacaugaccaaccucaacaugugcaugccgcugagcugcaccaagaacaacucccaccacuacaucauggucggcaacgagaccggccuggagcucacccugacgaacaccagcaucaucaaccacaaguucugcaaccuguccgacgcccacaagaagaaccucuacaaccacgcccugaugagcaucaucuccaccuuccaccugagcauccccaacuucaaccaguacgaggccauguccugcgacuucaacgggggcaagaucagcgugcaguacaaccucucccacagcuacgccguggacgcggccaaccacugcgggaccaucgccaacggcguccugcagacguucaugcggauggccuggggcggguccuacaucgcgcuggacagcggcaaggggaacugggacugcaucaugaccuccuaccaguaccucaucauccagaacaccaccugggaggaccacugccaguucagccgccccucccccaucggcuaccuggggcugcucagccagcggacgcgcgacaucuacaucagccggcgccgccggggcaccuucaccuggacccucuccgacagcgagggcaacgagacgcccgggggcuacugccugacccgguggaugcugaucgaggccgagcucaagugcuucgggaacaccgccguggccaagugcaacgagaagcacgacgaggaguucugcgacaugcugcgccuguucgacuucugcaagcaggccauccggcgccucaagacccccgcgcaggccaacauccagcugaucaacaaggccgugaacgcccugaucaacgaccagcucaucaugaagaaccaccuccgggacaucaugggcauccccuacugcaacuacuccaaguacugcuaccugaaccacacggucaccgggaagaccagccugccccgcugcugccugguguccaacggcagcuaccugaacgagacccacuucuccgacgacaucgagcagcaggccgacaacaugaucacggagcuccugcagaaggaguacauggaccggcagggcaagaccccgcuggggcucguggaccuguucgucuucagcaccuccuucuaccugaucagcaucuuccugcaccucgugaagaucccgacccaccgccacgugaucggcaagcccugccccaagccccaccggcugaaccacauggggaucugcuccugcggccuguacaagcacccggggguccccgugaaguggaagcgcugaggacuaguaauaaggaaacuguaugaaugucugugggcaggaagugaagagauccuucuguaaagguuuuuggaauuaugucugcugaauaauaaacuuuuuugaaauaauaaaucugguagaaaaaugagaucucaaaggcucuuuucagagccaccaaaaaaaaaaaaaaaaaaaaaaaaaaaaaaaaaaaaaaaaaaaaaaaaaaaaaaaaaaaaaaaaagaauu

SEQ ID NO: 27290 - RNA, 1778 nt, Artificial Sequence
  mRNA product Design b-4 (hSL-A64-N5) comprising derived and/or modified sequence from LASV(Nig08-A19;Clade III)__ADU56618__GPCmut4 (opt1)
aggagagucccgcagucggcguccagcggcucugcuuguucgugugugugucguugcaggccuuauucaagcuuaccaugggccagaucgugaccuucuuccaggaggucccccacgugaucgaggaggugaugaacaucguccugaucgcccucagcauccuggccauccugaaggggcucuacaacaucgcgaccugcggccugaucgggcuggugacguuccuccugcuguccggccgcagcugcuccaugaccuacaaggggguguacgagcuccagacccuggagcugaacaugaacacccucaacaugugcaugccgcugagcugcaccaagaacaacucccaccacuacaucauggucggcaacgagaccggccuggagcucacccugacgaacaccagccugcuccaccacaaguucugcaaccuguccgacgcccacaagaagaaccuguacgaccacacccucaugagcaucaucuccaccuuccaccugagcauccccaacuucaaccaguacgaggccauguccugcgacuucaacgggggcaagaucacggugcaguacaaccugagccacuccuacgccaucgacgccgcgaaccacugcgggaccguggccaacggcguccuccagaccuucaugcggauggccuggggcgggagcuacaucgcccuggacuccggccgcgggaagugggacugcaucaugaccagcuaccaguaccugaucauccagaacacgaccugggaggaccacugccaguucucccggcccagccccaucggcuaccucgggcugcugucccagcgcacccgggacaucuacaucagccgccggcgccggggcaccuucacguggacccugagcgacuccgagggcaacgagacccccgggggcuacugccucacccgcuggaugcugaucgaggcggagcugaagugcuucgggaacacggccguggccaagugcaacgagaagcacgacgaggaguucugcgacaugcuccggcuguucgacuucugcaagcaggccauccgccggcugaaggcccccgcgcagaugagcauccagcucaucaacaaggccgugaacgcccugaucaacgaccagcugaucaugaagaaccaccuccgcgacaucaugggcauccccuacugcaacuacuccaaguacugcuaccugaaccacaccagcaccgggcggaccucccugccccgcugcugccucgucagcaacggcuccuaccugaacgagacgcacuucagcgacgacaucgagcagcaggccgacaacaugaucaccgagaugcugcagaaggaguaccucgaccggcagggcaagaccccgcuggggcugguggaccuguucguguucuccaccagcuucuaccucaucuccaucuuccugcaccuggucaagaucccgacgcaccgccacaucgugggcaagcccugccccaagccccaccggcucaaccacauggggaucugcagcugcggccuguacaagcagccgggggugcccguccgcuggaagcggugaggacuaguaauaaggaaacuguaugaaugucugugggcaggaagugaagagauccuucuguaaagguuuuuggaauuaugucugcugaauaauaaacuuuuuugaaauaauaaaucugguagaaaaaugagaucucaaaggcucuuuucagagccaccaaaaaaaaaaaaaaaaaaaaaaaaaaaaaaaaaaaaaaaaaaaaaaaaaaaaaaaaaaaaaaaaagaauu

SEQ ID NO: 27291 - RNA, 1781 nt, Artificial Sequence
  mRNA product Design b-4 (hSL-A64-N5) comprising derived and/or modified sequence from LASV(G1180-SLE-2010;Clade IV)__AIT17168__GPCmut4 (opt1)
aggagagucccgcagucggcguccagcggcucugcuuguucgugugugugucguugcaggccuuauucaagcuuaccaugggccagaucgugaccuucuuccaggaggucccccacgugaucgaggaggugaugaacaucguccugaucgcccucagcauccuggccgugcugaaggggcucuacaacuucgcgaccugcggccugguggggcugcucaccuuccugcugcucugcggccgcuccugcaccgccagccgguacaagggggucuacgagcugcagacccuggagcucaacauggagacccugaacaugugcaugccgcuguccugcaccaagaacaacagccaccacuacaucauggugggcaacgagaccggccucgagcugacccugacgaacaccuccaucaucaaccacaaguucugcaaccucagcgacgcccacaagaagaaccuguacgaccacgcccugauguccaucaucagcaccuuccaccucuccauccccaacuucaaccaguacgaggccaugagcugcgacuucaacgggggcaagaucuccgugcaguacaaccugagccacuccuacgcgggggacgccgccaaccacugcggcaccgucgccaacggggugcugcagacguucaugcgcauggcguggggcggcagcuacaucgcccucgacuccgggcacggcagcugggacugcaucaugaccuccuaccaguaccugaucauccagaacaccaccugggaggaccacugccaguucagccggcccucccccaucggguaccugggccuccugagccagcgcacgcgggacaucuacaucagccgccggcgccggggcaccuucaccuggacccuguccgacagcgaggggaaggacacgccgggcggguacugccugacccgcuggaugcucaucgaggccgagcugaagugcuucggcaacaccgccguggccaagugcaacgagaagcacgacgaggaguucugcgacaugcugcggcuguucgacuucugcaagcaggcgauccagcgccugaaggcccccgcccagauguccauccagcugaucaacaaggccgucaacgcccucaucaacgaccagcugaucaugaagaaccaccuccgggacaucauggggauccccuacugcaacuacagcaaguacugcuaccucaaccacaccacgaccggcaagaccucccugcccaagugcugccuggugagcaacggcuccuaccucaacgagacccacuucagcgacgacaucgagcagcaggcggacaacaugaucacggagaugcugcagaaggaguacauggagcgccaggggaagacgccccugggccucguggaccuguucgucuucuccaccagcuucuaccugaucuccaucuuccugcaccucgugaagaucccgacccaccggcacaucgugggcaagagcugccccaagccccaccgccugaaccacauggggaucugcuccugcgggcuguacaagcagcccggcgucccggugaaguggaagcggugaggacuaguaauaaggaaacuguaugaaugucugugggcaggaagugaagagauccuucuguaaagguuuuuggaauuaugucugcugaauaauaaacuuuuuugaaauaauaaaucugguagaaaaaugagaucucaaaggcucuuuucagagccaccaaaaaaaaaaaaaaaaaaaaaaaaaaaaaaaaaaaaaaaaaaaaaaaaaaaaaaaaaaaaaaaaagaauu

SEQ ID NO: 27292 - RNA, 1781 nt, Artificial Sequence
  mRNA product Design b-4 (hSL-A64-N5) comprising derived and/or modified sequence from LASV(G1442-SLE-2011;Clade IV)__AIT17180__GPCmut4 (opt1)
aggagagucccgcagucggcguccagcggcucugcuuguucgugugugugucguugcaggccuuauucaagcuuaccaugggccagaucgugaccuucuuccaggaggucccccacgugaucgaggaggugaugaacaucguccugaucgcccucagcauccuggccgugcugaaggggcucuacaacguggcgaccugcggccugaucgggcuggucacguuccuccugcugugcggccgcuccugcaccaccacccucuacaaggggguguacgagcugcagacgcuggagcucaacauggagacccugaacaugugcaugccgcugagcugcaccaagaacaacucccaccacuacauccgggugggcaacgagacgggccucgagcugacccugaccaacaccagcaucaucaaccacaaguucugcaaccucuccgacgcccacaagaagaaccuguacgaccacgcccugaugagcaucaucuccacguuccaccucagcauccccaacuucaaccaguacgaggccauguccugcgacuucaacgggggcaagaucagcguccaguacaaccugucccacagcuacgccggggacgcggccaaccacugcggcaccguggccaacggggugcugcagaccuucaugcgcauggccuggggcggcuccuacaucgcgcucgacagcgggcggggcaacugggacugcaucaugaccuccuaccaguaccugaucauccagaacacgaccugggacgaccacugccaguucagccgccccucccccaucggguaccugggccuccugagccagcggacccgcgacgucuacaucucccggcgccgccggggcaccuucacguggacccugagcgacagcgaggggaaggacaccccgggcggguacugccugacccgguggaugcucaucgaggccgagcugaagugcuucggcaacacggccguggccaagugcaacgagaagcacgacgaggaguucugcgacaugcugcgccucuucgacuucugcaagcaggccauccagcggcugaaggcgcccgcccagauguccauccagcugaucaacaaggccgugaacgcccucaucaacgaccagcugaucaugaagaaccaccuccgcgacaucauggggauccccuacugcaacuacagcaaguacugcuaccugaacaacaccgccaccggcaagaccucccugcccaagugcugccugaucagcaacggcuccuaccucaacgagacgcacuucagcgacgacaucgagcaggaggcggacaacaugaucaccgagaugcugcagaaggaguacauggagcggcaggggaagacgccccugggccucgucgaccuguucguguucuccaccagcuucuaccugaucuccaucuuccugcaccucgugaagaucccgacccaccgccacaucgucggcaagagcugccccaagccccaccggcugaaccacauggggaucugcuccugcgggcuguacaagcagcccggcgugccggugcgcuggaagcggugaggacuaguaauaaggaaacuguaugaaugucugugggcaggaagugaagagauccuucuguaaagguuuuuggaauuaugucugcugaauaauaaacuuuuuugaaauaauaaaucugguagaaaaaugagaucucaaaggcucuuuucagagccaccaaaaaaaaaaaaaaaaaaaaaaaaaaaaaaaaaaaaaaaaaaaaaaaaaaaaaaaaaaaaaaaaagaauu

SEQ ID NO: 27293 - RNA, 1781 nt, Artificial Sequence
  mRNA product Design b-4 (hSL-A64-N5) comprising derived and/or modified sequence from LASV(G3010-SLE-2013;Clade IV)__AIT17344__GPCmut4 (opt1)
aggagagucccgcagucggcguccagcggcucugcuuguucgugugugugucguugcaggccuuauucaagcuuaccaugggccagaucgugaccuucuuccaggaggucccccacgugaucgaggaggugaugaacaucguccugaucgcccucagcauccuggccgugcugaaggggcucuacaacuucgcgaccugcggccugguggggcuggucacguuccuccugcugugcggccgcuccugcaccaccagccucuacaaggggguguacgagcugcagacccuggagcucaacauggagacgcugaacaugugcaugccgcuguccugcaccaagaacaacagccaccacuacaucauggugggcaacgagaccggccucgagcugacgcugaccaacaccuccaucaucaaccacaaguucugcaaccucagcgacgcccacaagaagaaccuguacaaccacgcccugauguccaucaucagcaccuuccaccucuccauccccaacuucaaccaguacgaggccaugagcugcgacuucaacgggggcaagaucuccguccaguacaaccugagccacuccuacgccggggacgcggccagccacugcggcacgguggccaacggggugcugcagaccuucaugcggauggccuggggcggcuccuacaucgcgcucgacagcggguacggcaagugggacugcaucaugaccuccuaccaguaccugaucauccagaacaccacgugggaggaccacugccaguucagccgccccucccccaucggguaccugggccuccugagccagcggacccgcgacaucuacaucagccggcgccgccggggcaccuucaccuggacgcuguccgacagcgaggggaaggacaccccgggcggguacugccugacccgguggaugcucaucgaggccgagcugaagugcuucggcaacaccgccgucgccaagugcaacgagaagcacgacgaggaguucugcgacaugcugcgccucuucgacuucugcaagcaggccauccagcggcugaagacgcccgcgcagauguccauccagcugaucaacaaggccgugaacgcccucaucaacgaccagcugaucaugaagaaccaccuccgcgacaucauggggauccccuacugcaacuacagcaaguacugcuaccugaaccacaccaccaccggcaagacgucccugcccaagugcugccuggugagcaacggcuccuaccucaacgagacccacuucagcgacgacaucgagcagcaggccgacaacaugaucaccgagaugcugcagaaggaguacauggagcggcaggggaagacgccccugggccucgucgaccuguucguguucuccaccagcuucuaccugaucuccaucuuccugcaccucgugaagaucccgacccaccgccacaucgucggcaagagcugccccaagccccaccggcugaaccacauggggaucugcuccugcgggcuguacaagcagcccggcgugccggugcgcuggaagcggugaggacuaguaauaaggaaacuguaugaaugucugugggcaggaagugaagagauccuucuguaaagguuuuuggaauuaugucugcugaauaauaaacuuuuuugaaauaauaaaucugguagaaaaaugagaucucaaaggcucuuuucagagccaccaaaaaaaaaaaaaaaaaaaaaaaaaaaaaaaaaaaaaaaaaaaaaaaaaaaaaaaaaaaaaaaaagaauu

SEQ ID NO: 27294 - RNA, 1781 nt, Artificial Sequence
  mRNA product Design b-4 (hSL-A64-N5) comprising derived and/or modified sequence from LASV(G502-SLE-2009;Clade IV)__AIT17126__GPCmut4 (opt1)
aggagagucccgcagucggcguccagcggcucugcuuguucgugugugugucguugcaggccuuauucaagcuuaccaugggccagaucgugaccuucuuccaggaggucccccacgugaucgaggaggugaugaacaucguccugaucgcccucagcauccuggccgugcugaaggggcucuacaacuucgcgaccugcggccugguggggcugcucacguuccugcugcucugcggccgcuccugcaccaccgggcuguacaagggcgucuacgagcugcagacccucgagcugaacauggagacgcugaacaugugcaugccgcucagcugcaccaagaacaacucccaccacuacaucauggugggcaacgagaccgggcuggagcugacgcucaccaacaccagcaucaucaaccacaaguucugcaaccuguccgacgcccacaagaagaaccuguacgaccacgcccucaugagcaucaucuccaccuuccaccugagcauccccaacuucaaccaguacgaggccauguccugcgacuucaacggcgggaagaucagcgugcaguacaaccugucccacagcuacgccggcgacgcggccgaccacugcgggacggucgccaacggcgugcuccagaccuucaugcggauggccuggggcggguccuacaucgcgcuggacagcggccgcgggcggugggacugcaucaugaccuccuaccaguaccugaucauccagaacaccacgugggaggaccacugccaguucagccgccccucccccaucggcuaccucggccugcugagccagcggacccgcgacaucuacaucucccggcgccgccgggggaccuucaccuggacgcugagcgacagcgagggcaaggacacccccgggggcuacugccucacccgguggaugcugaucgaggccgagcugaagugcuucgggaacaccgccguggccaagugcaacgagaagcacgacgaggaguucugcgacaugcuccgccuguucgacuucugcaagcaggccauccagcggcugaaggcgcccgcccagauguccauccagcucaucaacaaggccgucaacgcccugaucaacgaccagcuggugaugaagaaccaccuccgcgacaucaugggcauccccuacugcaacuacagccgguacugcuaccugaaccacacgaccaccggccgcaccucccugcccaagugcugccucgugagcaacggguccuaccugaacgagacgcacuucagcgacgacaucgagcagcaggccgacaacaugaucaccgagaugcugcagaaggaguacauggagcggcagggcaagaccccgcucgggcuggucgaccuguucguguucuccaccagcuucuaccugaucuccaucuuccuccaccuggugaagaucccgacgcaccgccacaucgucggcaagagcugccccaagccccaccggcugaaccacauggggaucugcuccugcggccucuacaagcagcccggcgugccggugaaguggaagcgcugaggacuaguaauaaggaaacuguaugaaugucugugggcaggaagugaagagauccuucuguaaagguuuuuggaauuaugucugcugaauaauaaacuuuuuugaaauaauaaaucugguagaaaaaugagaucucaaaggcucuuuucagagccaccaaaaaaaaaaaaaaaaaaaaaaaaaaaaaaaaaaaaaaaaaaaaaaaaaaaaaaaaaaaaaaaaagaauu

SEQ ID NO: 27295 - RNA, 1781 nt, Artificial Sequence
  mRNA product Design b-4 (hSL-A64-N5) comprising derived and/or modified sequence from LASV(G733-SLE-2010;Clade IV)__AIT17154__GPCmut4 (opt1)
aggagagucccgcagucggcguccagcggcucugcuuguucgugugugugucguugcaggccuuauucaagcuuaccaugggccagaucgugaccuucuuccaggaggucccccacgugaucgaggaggugaugaacaucguccugaucgcccucagcauccuggccgugcugaaggggcucuacaacuucgcgaccugcggcaucguggggcuggucuccuuccugcuccugugcggccgcagcugcacgaccucccuguacaaggggguguacgagcuccagacccuggagcugaacauggagacccucaacaugugcaugccgcugagcugcaccaagaacaacucccaccacuacaucauggugggcaacgagaccggccuggagcucacccugacgaacaccagcaucaucaaccacaaguucugcaaccuguccgacgcccacaagaagaaccucuacgaccacgcccugaugagcaucaucuccaccuuccaccugagcauccccaacuucaaccaguacgaggccauguccugcgacuucaacgggggcaagaucagcguccaguacaaccucucccacagcuacgccggggacgcggccaaccacugcggcaccaucgccaacggggugcugcagacguucaugcggauggccuggggcggcuccuacaucgcgcuggacagcgggcgcgaccggugggacugcaucaugaccuccuaccaguaccucaucauccagaacaccaccugggaggaccacugccaguucagccgccccucccccaucggcuaccuggggcugcucagccagcggacgcgcgacaucuacaucagccggcgccgccggggcaccuucaccuggacccucuccgacagcgagggcaaggacacgcccgggggcuacugccugacccgguggaugcugaucgaggccgagcucaagugcuucgggaacaccgccguggccaagugcaacgagaagcacgacgaggaguucugcgacaugcugcgccuguucgacuucugcaagcaggccauccagcggcucaaggcgcccgcccagauguccauccagcugaucaacaaggccgucaacgcccugaucaacgaccagcucaucaugaagaaccaccuccgcgacaucaugggcauccccuacugcaacuacagcaaguacugcuaccugaaccacaccacgaccgggaagaccucccugcccaagugcugccuggugagcaacggcuccuaccugaacgagacccacuucagcgacgacaucgagcagcaggccgacaacaugaucacggagaugcuccagaaggaguacauggagcggcagggcaagaccccgcuggggcugguggaccucuucgucuucuccaccagcuucuaccugaucuccaucuuccugcaccuggugaagaucccgacccaccgccacguggucggcaagagcugccccaagccccaccggcucaaccacauggggaucugcuccugcggccuguacgggcagcccggcgugccggugaaguggaagcgcugaggacuaguaauaaggaaacuguaugaaugucugugggcaggaagugaagagauccuucuguaaagguuuuuggaauuaugucugcugaauaauaaacuuuuuugaaauaauaaaucugguagaaaaaugagaucucaaaggcucuuuucagagccaccaaaaaaaaaaaaaaaaaaaaaaaaaaaaaaaaaaaaaaaaaaaaaaaaaaaaaaaaaaaaaaaaagaauu

SEQ ID NO: 27296 - RNA, 1781 nt, Artificial Sequence
  mRNA product Design b-4 (hSL-A64-N5) comprising derived and/or modified sequence from MOPV/LASV reassortant(IGS-1;Clade IV)__AFY05576__GPCmut4 (opt1)
aggagagucccgcagucggcguccagcggcucugcuuguucgugugugugucguugcaggccuuauucaagcuuaccaugggccagaucgugaccuucuuccaggaggucccccacgugaucgaggaggugaugaacaucguccugaucgcccucagcgugcuggccgugcugaaggggcucuacaacuucgcgaccugcggccuggucgggcuggugacguuccuccugcugugcggccgcuccugcaccaccagccucuacaaggggguguacgagcugcagacccuggagcucaacauggagacgcugaacaugugcaugccgcuguccugcaccaagaacaacagccaccacuacaucauggucggcaacgagaccggccucgagcugacgcugaccaacaccuccaucaucaaccacaaguucugcaaccucagcgacgcccacaagaagaaccuguacgaccacgcccugauguccaucaucagcaccuuccaccucuccauccccaacuucaaccaguacgaggccaugagcugcgacuucaacgggggcaagaucuccgugcaguacaaccugagccacuccuacgccggggacgcggccaaccacugcggcacgguggccaacgggguccugcagaccuucaugcggauggccuggggcggcagcuacaucgcgcucgacuccgggcgcggcaacugggacugcaucaugaccagcuaccaguaccugaucauccagaacaccacgugggaggaccacugccaguucucccggcccagccccaucggguaccugggccuccugucccagcgcacccgggacaucuacaucagccgccggcgccggggcaccuucaccuggacgcugagcgacuccgagggggaggacaccccgggcggguacugccugacccgcuggaugcucaucgaggccgagcugaagugcuucggcaacaccgccguggccaagugcaacgagaagcacgacgaggaguucugcgacaugcugcggcuguucgacuucugcaagcaggccauccagcgccugaaggcgcccgcccagaugagcauccagcugaucaacaaggccgugaacgcccucaucaacgaccagcugaucaugaagaaccaccuccgggacaucauggggauccccuacugcaacuacuccaaguacugcuaccucaaccacacgaccaccggccgcaccagccugcccaagugcugccuggucuccaacggcagcuaccucaacgagacgcacuucuccgacgacaucgagcagcaggccgacaacaugaucaccgagaugcugcagaaggaguacauggagcggcaggggaagacgccccugggccucguggaccuguucguguucagcaccuccuucuaccugaucagcaucuuccugcaccucgucaagaucccgacccaccgccacaucguggggaaguccugccccaagccccaccggcugaaccacaugggcaucugcagcugcgggcuguacaagcagcccggcgugccggucaaguggaagcgcugaggacuaguaauaaggaaacuguaugaaugucugugggcaggaagugaagagauccuucuguaaagguuuuuggaauuaugucugcugaauaauaaacuuuuuugaaauaauaaaucugguagaaaaaugagaucucaaaggcucuuuucagagccaccaaaaaaaaaaaaaaaaaaaaaaaaaaaaaaaaaaaaaaaaaaaaaaaaaaaaaaaaaaaaaaaaagaauu

SEQ ID NO: 27297 - RNA, 1781 nt, Artificial Sequence
  mRNA product Design b-4 (hSL-A64-N5) comprising derived and/or modified sequence from LASV(LM765-SLE-2012;Clade IV)__AIT17814__GPCmut4 (opt1)
aggagagucccgcagucggcguccagcggcucugcuuguucgugugugugucguugcaggccuuauucaagcuuaccaugggccagaucgugaccuucuuccaggaggucccccacgugaucgaggaggugaugaacaucguccugaucgcccucagcauccuggccgugcugaaggggcucuacaacuucgcgaccugcggccugguggggcuggucacguuccuccugcugugcggccgcuccugcaccaccagccucuacaaggggguguacgagcugcagacccuggagcucaacauggagacgcugaacaugugcaugccgcuguccugcaccaagaacaacagccaccacuacaucauggugggcaacgagaccggccucgagcugacgcugaccaacaccuccaucaucgaccacaaguucugcaaccucagcgacgcccaccggaagaaccuguacgaccacgcccugauguccaucaucagcaccuuccaccucuccauccccaacuucaaccaguacgaggccaugagcugcgacuucaacgggggcaagaucuccguccaguacaaccugagccacuccuacgccaaggacgcggccgaccacugcgggacgguggccaacggcgugcugcagaccuucaugcgcauggccuggggcgggagcuacaucgcgcucgacuccggccgggggcgcugggacugcaucaugaccagcuaccaguaccugaucauccagaacaccacgugggaggaccacugccaguucucccggcccagccccaucggcuaccuggggcuccugucccagcgcacccgggacaucuacaucagccgccggcgccggggcaccuucaccuggacgcugagcgacuccgagggcaaggacacccccgggggcuacugccugacccgcuggaugcucaucgaggccgagcugaagugcuucgggaacaccgccgucgccaagugcaacgagaagcacgacgaggaguucugcgacaugcugcggcuguucgacuucugcaagcaggccauccagcgccugaaggcgcccgcccagaugagcauccagcugaucaacaaggccgugaacgcccucaucaacgaccagcugaucaugaagaaccaccuccgggacaucaugggcauccccuacugcaacuacuccaaguacugcuaccucaaccacacgaccaccgggaagaccagccugcccaagugcugccugguguccaacggcagcuaccucaacgagacgcacuucuccgacgacaucgagcagcaggccgacaacaugaucaccgagaugcugcagaaggaguacauggagcgccagggcaagaccccgcuggggcucgucgaccuguucguguucagcaccuccuucuaccugaucagcaucuuccugcaccucgugaagaucccgacgcaccggcacaucgucggcaagcccugccccaagccccaccgccugaaccacauggggaucugcuccugcggccuguacaagcagccgggggugcccgugaaguggaagcggugaggacuaguaauaaggaaacuguaugaaugucugugggcaggaagugaagagauccuucuguaaagguuuuuggaauuaugucugcugaauaauaaacuuuuuugaaauaauaaaucugguagaaaaaugagaucucaaaggcucuuuucagagccaccaaaaaaaaaaaaaaaaaaaaaaaaaaaaaaaaaaaaaaaaaaaaaaaaaaaaaaaaaaaaaaaaagaauu

SEQ ID NO: 27298 - RNA, 1781 nt, Artificial Sequence
  mRNA product Design b-4 (hSL-A64-N5) comprising derived and/or modified sequence from LASV(LM776-SLE-2012;Clade IV)__AIT17824__GPCmut4 (opt1)
aggagagucccgcagucggcguccagcggcucugcuuguucgugugugugucguugcaggccuuauucaagcuuaccaugggccagaucgugaccuucuuccaggaggucccccacgugaucgaggaggugaugaacaucguccugaucgcccucagcauccuggccgugcugaaggggcucuacaacuucgcgaccugcggccugguggggcuggucacguuccuccugcugugcggccgcuccugcaccaccagcguguacaaggggguguacgagcuccagacccuggagcugaacauggagacgcucaacaugugcaugccgcuguccugcaccaagaacaacagccaccacuacaucauggucggcaacgagaccggccuggagcucacgcugaccaacaccuccaucaucaaccacaaguucugcaaccugagcgacgcccacaagaagaaccucuacgaccacgcccugauguccaucaucagcaccuuccaccuguccauccccaacuucaaccaguacgaggccaugagcugcgacuucaacgggggcaagaucuccgugcaguacaaccucagccacuccuacgccggggacgcggccaaccacugcggcacgguggccaacgggguccugcagaccuucaugcggauggccuggggcggcagcuacaucgcgcuggacuccgggcacggcaagugggacugcaucaugaccagcuaccaguaccucaucauccagaacaccacgugggaggaccacugccaguucucccgccccagccccaucggguaccugggccugcucucccagcggacccgcgacaucuacaucagccggcgccgccggggcaccuucaccuggacgcucagcgacuccgaggggaaggacaccccgggcggguacugccugacccgguggaugcugaucgaggccgagcucaagugcuucggcaacaccgccguggccaagugcaacgagaagcacgacgaggaguucugcgacaugcugcgccuguucgacuucugcaagcaggccauccagcggcucaaggcgcccgcccagaugagcauccagcugaucaacaaggccgugaacgcccugaucaacgaccagcucaucaugaagaaccaccuccgcgacaucauggggauccccuacugcaacuacuccaaguacugcuaccugaaccacacgaccaccggcaagaccagccugcccaagugcugccuggucuccaacggcagcuaccugaacgagacgcacuucuccgacgacaucgagcagcaggccgacaacaugaucaccgagaugcuccagaaggaguacauggagcggcaggggaagacgccccugggccugguggaccucuucguguucagcaccuccuucuaccugaucagcaucuuccugcaccuggucaagaucccgacccaccgccacaucguggggaaguccugccccaagccccaccggcucaaccacaugggcaucugcagcugcgggcuguacaagcagcccggcgugccgguccgcuggaagcggugaggacuaguaauaaggaaacuguaugaaugucugugggcaggaagugaagagauccuucuguaaagguuuuuggaauuaugucugcugaauaauaaacuuuuuugaaauaauaaaucugguagaaaaaugagaucucaaaggcucuuuucagagccaccaaaaaaaaaaaaaaaaaaaaaaaaaaaaaaaaaaaaaaaaaaaaaaaaaaaaaaaaaaaaaaaaagaauu

SEQ ID NO: 27299 - RNA, 1781 nt, Artificial Sequence
  mRNA product Design b-4 (hSL-A64-N5) comprising derived and/or modified sequence from LASV(Mad39;Clade IV)__ANH09722__GPCmut4 (opt1)
aggagagucccgcagucggcguccagcggcucugcuuguucgugugugugucguugcaggccuuauucaagcuuaccaugggccagaucgugaccuucuuccaggaggucccccacgugaucgaggaggugaugaacaucguccugaucgcccucagcauccuggccgugcugaaggggcucuacaacguggcgaccugcggccugaucgggcuggucacguuccuccugcugugcggccgcuccugcaccaccacccucuacaaggggguguacgagcugcaggcccuggagcucaacauggagacgcugaacaugugcaugccgcugagcugcaccaagaacaacucccaccacuacauccgggugggcaacgagaccggccucgagcugacgcugaccaacaccagccucaucaaccacaaguucugcaaccuguccgacgcccacaagaagaaccuguacgaccacgcccucaugagcaucaucuccaccuuccaccugagcauccccaacuucaaccaguacgaggccauguccugcgacuucaacgacgggaagaucagcguccaguacaaccugucccacacguacgcgggcgacaccgccaaccacugcgggaccguggccaacggcgugcuccagaccuucaugcgcauggccuggggcgggagcuacaucgcgcuggacuccggccgcgggggcugggacugcaucaugacgagcuaccaguaccugaucauccagaacaccaccugggaggaccacugccaguucucccggcccagccccaucggguaccucggccugcugucccagcggacccgcgacaucuacaucagccggcgccgccggggcacguucaccuggacccuguccgacagcgaggggaaggacaccccgggcggguacugccucacgcgguggaugcugaucgaggccgagcugaagugcuucggcaacaccgccgucgccaagugcaacgagaagcacgacgaggaguucugcgacaugcuccgccuguucgacuucugcaagcaggccauccagcggcugaaggcgcccgcccagaugagcauccagcucaucaacaaggccgugaacgcccugaucaacgaccagcugaucaugaagaaccaccuccgcgacaucauggggauccccuacugcaacuacuccaaguacugcuaccugaaccacaccgugaccggcaagacgagccugcccaagugcugccucgucuccaacggcagcuaccugaacgagacccacuucuccgacgacaucgagcagcaggccgacaacaugaucaccgagaugcugcagaaggaguacauggagcggcaggggaagacgccccucggccugguggaccuguucguguucagcaccuccuucuaccugaucagcaucuuccuccaccuggucaagaucccgacccaccgccacgugguggggaagcccugccccaagccccaccggcugaaccacaugggcaucugcuccugcggguucuacaagcagccgggcguccccgugcgcuggaagcggugaggacuaguaauaaggaaacuguaugaaugucugugggcaggaagugaagagauccuucuguaaagguuuuuggaauuaugucugcugaauaauaaacuuuuuugaaauaauaaaucugguagaaaaaugagaucucaaaggcucuuuucagagccaccaaaaaaaaaaaaaaaaaaaaaaaaaaaaaaaaaaaaaaaaaaaaaaaaaaaaaaaaaaaaaaaaagaauu

SEQ ID NO: 27300 - RNA, 1781 nt, Artificial Sequence
  mRNA product Design b-4 (hSL-A64-N5) comprising derived and/or modified sequence from LASV(Z0947-SLE-2011;Clade IV)__AIT17840__GPCmut4 (opt1)
aggagagucccgcagucggcguccagcggcucugcuuguucgugugugugucguugcaggccuuauucaagcuuaccaugggccagaucgugaccuucuuccaggaggucccccacgugaucgaggaggugaugaacaucguccugaucgcccucagcauccuggccgugcugaaggggcucuacaacuucgcgaccugcggccugguggggcuggucacguuccuccugcugugcggccgcuccugcaccaucagccucuacaaggggguguacgagcugcagacccuggagcucaacauggagacccugaacaugugcaugccgcuguccugcaccaagaacaacagccaccacuacaucauggugggcaacgagaccggccucgagcugacccugacgaacaccuccaucaucaaccacaaguucugcaaccucagcgacgcccacaagaagaaccuguacgaccacgcccugauguccaucaucagcaccuuccaccucuccauccccaacuucaaccaguacgaggccaugagcugcgacuucaacgggggcaagaucuccguccaguacaaccugagccacuccuacgccggggacgcggccaaccacugcggcaccguggccaacggggugcugcagacguucaugcggauggccuggggcggcagcuacaucgcgcucgacuccgggcgcgaccggugggacugcaucaugaccagcuaccaguaccugaucauccagaacaccaccugggaggaccacugccaguucucccgccccagccccaucggcuaccuggggcuccugucccagcggacgcgcgacaucuacaucagccggcgccgccggggcaccuucaccuggacccugagcgacuccgagggcaaggacacgcccgggggcuacugccugacccgguggaugcucaucgaggccgagcugaagugcuucgggaacaccgccgucgccaagugcaacgagaagcacgacgaggaguucugcgacaugcugcgccucuucgacuucugcaagcaggccauccagcggcugaaggcgcccgcccagaugagcauccagcugaucaacaaggccgugaacgcccucaucaacgaccagcugaucaugaagaaccaccuccgcgacaucaugggcauccccuacugcaacuacuccaaguacugcuaccugaaccacaccacgaccgggaagaccagccugcccaagugcugccugguguccaacggcagcuaccucaacgagacccacuucuccgacgacaucgagcagcaggccgacaacaugaucacggagaugcugcagaaggaguacauggagcggcagggcaagaccccgcuggggcucgucgaccuguucguguucagcaccuccuucuaccugaucagcaucuuccugcaccucgugaagaucccgacccaccgccacaucgucggcaagcccugccccaagccccaccggcugaaccacauggggaucugcuccugcggccuguacaagcagccgggggugcccgugaaguggaagcgcugaggacuaguaauaaggaaacuguaugaaugucugugggcaggaagugaagagauccuucuguaaagguuuuuggaauuaugucugcugaauaauaaacuuuuuugaaauaauaaaucugguagaaaaaugagaucucaaaggcucuuuucagagccaccaaaaaaaaaaaaaaaaaaaaaaaaaaaaaaaaaaaaaaaaaaaaaaaaaaaaaaaaaaaaaaaaagaauu

SEQ ID NO: 27301 - RNA, 1781 nt, Artificial Sequence
  mRNA product Design b-4 (hSL-A64-N5) comprising derived and/or modified sequence from LASV(Josiah;Clade IV)__NP_694870__GPCmut4 (opt1)
aggagagucccgcagucggcguccagcggcucugcuuguucgugugugugucguugcaggccuuauucaagcuuaccaugggccagaucgugaccuucuuccaggaggucccccacgugaucgaggaggugaugaacaucguccugaucgcccucagcgugcuggccgugcugaaggggcucuacaacuucgcgaccugcggccuggucgggcuggugacguuccuccugcugugcggccgcuccugcaccaccagccucuacaaggggguguacgagcugcagacccuggagcucaacauggagacgcugaacaugugcaugccgcuguccugcaccaagaacaacagccaccacuacaucauggucggcaacgagaccggccucgagcugacccugacgaacaccuccaucaucaaccacaaguucugcaaccucagcgacgcccacaagaagaaccuguacgaccacgcccugauguccaucaucagcaccuuccaccucuccauccccaacuucaaccaguacgaggccaugagcugcgacuucaacgggggcaagaucuccgugcaguacaaccugagccacuccuacgccggggacgcggccaaccacugcggcaccguggccaacgggguccugcagacguucaugcggauggccuggggcggcagcuacaucgcgcucgacuccgggcgcggcaacugggacugcaucaugaccagcuaccaguaccugaucauccagaacaccaccugggaggaccacugccaguucucccggcccagccccaucggguaccugggccuccugucccagcgcacgcgggacaucuacaucagccgccggcgccggggcaccuucaccuggacccugagcgacuccgaggggaaggacacgccgggcggguacugccucacccgcuggaugcugaucgaggccgagcugaagugcuucggcaacaccgccguggccaagugcaacgagaagcacgacgaggaguucugcgacaugcuccggcuguucgacuucugcaagcaggccauccagcgccugaaggcgcccgcccagaugagcauccagcucaucaacaaggccgugaacgcccugaucaacgaccagcugaucaugaagaaccaccuccgggacaucauggggauccccuacugcaacuacuccaaguacugcuaccugaaccacaccacgaccggccgcaccagccugcccaagugcugccucgucuccaacggcagcuaccugaacgagacccacuucuccgacgacaucgagcagcaggccgacaacaugaucacggagaugcugcagaaggaguacauggagcggcaggggaagaccccgcucggccugguggaccuguucguguucagcaccuccuucuaccugaucagcaucuuccuccaccuggucaagauccccacccaccgccacaucguggggaaguccugccccaagccccaccggcugaaccacaugggcaucugcagcugcgggcucuacaagcagccgggcgugcccgucaaguggaagcgcugaggacuaguaauaaggaaacuguaugaaugucugugggcaggaagugaagagauccuucuguaaagguuuuuggaauuaugucugcugaauaauaaacuuuuuugaaauaauaaaucugguagaaaaaugagaucucaaaggcucuuuucagagccaccaaaaaaaaaaaaaaaaaaaaaaaaaaaaaaaaaaaaaaaaaaaaaaaaaaaaaaaaaaaaaaaaagaauu

SEQ ID NO: 27302 - RNA, 1778 nt, Artificial Sequence
  mRNA product Design b-4 (hSL-A64-N5) comprising derived and/or modified sequence from LASV(LP;Clade I)__AAF86701__GPCmut4 (opt1)
aggagagucccgcagucggcguccagcggcucugcuuguucgugugugugucguugcaggccuuauucaagcuuaccaugggccagaucaucaccuucuuccaggaggugccccacgucaucgaggaggugaugaacaucgugcugaucgcccucagccugcuggccauccucaaggggcuguacaacaucgcgaccugcggcaucaucgggcuggucgccuuccucuuccugugcggcaaguccugcagccugacgcucaagggcggguacgagcugcagacccuggagcucaacauggagacccugaacaugugcaugccgcuguccugcaccaagaacagcucccaccacuacauccgcgugggcaacgagacggggcucgagcugacccugaccaacaccagcaucaucaaccacaaguucugcaaccucuccgacgcccacaagaagaaccuguacgaccacgcccugaugagcaucaucuccacguuccaccucagcauccccaacuucaaccaguacgaggccauguccugcgacuucaacggcgggaagaucagcgugcaguacaaccugucccacagcuacgcgggcgacgccgccgagcacugcgggaccgucgccaacggcgugcugcagaccuucaugcggauggcguggggcgggcgcuacaucgcccucgacuccggcaaggggaacugggacugcaucaugaccagcuaccaguaccugaucauccagaacacgaccugggaggaccacugccaguucucccggcccagccccaucggcuaccugggccuccugucccagcgcacccgggacaucuacaucagccgccggcgccgggggaccuucacguggacccugagcgacuccgagggcaacgagacccccgggggcuacugccucacccgcuggaugcugaucgaggccgagcugaagugcuucgggaacacggccguggccaagugcaacgagaagcacgacgaggaguucugcgacaugcuccggcuguucgacuucugcaagcaggcgauccgccggcugaaggccccggcccagaugagcauccagcucaucaacaaggccgucaacgcccugaucaacgaccagcugaucaugaagaaccaccuccgcgacaucaugggcauccccuacugcaacuacuccaaguacugcuaccugaaccacaccagcuccggccggaccagccugcccaagugcugccucaucuccaacgggagcuaccugaacgagacccaguucuccgacgacaucgagcagcaggcggacaacaugaucacggagaugcugcagaaggaguacaucgagcgccagggcaagaccccgcucgggcugguggacaucuucaucuucagcaccuccuucuaccugaucagcaucuuccugcaccucaucaagauccccacccaccggcacaucgugggcaagcccugccccaagccgcaccgccugaaccacaugggggucugcuccugcggccuguacaagcaccccggcgugcccacgaaguggaagcggugaggacuaguaauaaggaaacuguaugaaugucugugggcaggaagugaagagauccuucuguaaagguuuuuggaauuaugucugcugaauaauaaacuuuuuugaaauaauaaaucugguagaaaaaugagaucucaaaggcucuuuucagagccaccaaaaaaaaaaaaaaaaaaaaaaaaaaaaaaaaaaaaaaaaaaaaaaaaaaaaaaaaaaaaaaaaagaauu

SEQ ID NO: 27303 - RNA, 1778 nt, Artificial Sequence
  mRNA product Design b-4 (hSL-A64-N5) comprising derived and/or modified sequence from LASV(803213;Clade II)__AAF86703__GPCmut4 (opt1)
aggagagucccgcagucggcguccagcggcucugcuuguucgugugugugucguugcaggccuuauucaagcuuaccaugggccagaucaucaccuucuuccaggaggugccccacgucaucgaggaggugaugaacaucgugcugaucgcccucagccugcuggccauccucaaggggaucuacaacgucgcgaccugcggccuguucgggcugaucuccuuccuccugcugugcggccgcagcugcuccgugacguacaaggggguguacgagcuccagacccuggagcugaacauggccaaccucaacaugugcaugccgcugagcugcaccaagaacaacucccaccacuacaucauggucggcaacgagaccggccuggagcucacgcugaccaacaccagcaucaucaaccacaaguucugcaaccuguccgacgcccacaagaagaaccucuacgaccacgcccugaugagcaucaucuccaccuuccaccugagcauccccaacuucaaccaguacgaggccauguccugcgacuucaacgggggcaagaucagcgugcaguacaaccucucccacagcuucgcgguggacgccgccaaccacugcgggacgaucgccaacggcguccugcagaccuucaugcggauggcguggggcggguccuacaucgcccuggacagcggcaaggggaacugggacugcaucaugaccuccuaccaguaccucaucauccagaacaccacgugggaggaccacugccaguucagccgccccucccccaucggcuaccuggggcugcucagccagcggacccgcgacaucuacaucagccggcgccggcgcggcaccuucaccuggacgcuguccgacagcgagggcaacgaggcccccgggggcuacugccugacccgguggaugcucaucgaggccgagcugaagugcuucgggaacaccgccguggcgaagugcaacgagaagcacgacgaggaguucugcgacaugcugcgccucuucgacuucugcaagcaggccaucaagcggcugaagaccccggcccagauguccauccagcugaucaacaaggccgugaacgcccucaucaacgaccagcugaucaugaagaaccaccuccgcgacaucaugggcauccccuacugcaacuacagccgguacugcuaccugaaccacacggucaccgggaagaccucccugccccgcugcugccuggugagcaacggcuccuaccucaacgagacccacuucagcgacgacaucgagcagcaggcggacaacaugaucacggagaugcugcagaaggaguacauggaccggcagggcaagaccccgcuggggcucguggaccuguucgucuucuccaccagcuucuaccugaucuccaucuuccugcaccucgugaagauccccacccaccgccacaucgugggcaagcccugccccaagccgcaccggcugaaccacauggggaucugcagcugcggccuguacaagcaccccgggguccccgugaaguggaagcgcugaggacuaguaauaaggaaacuguaugaaugucugugggcaggaagugaagagauccuucuguaaagguuuuuggaauuaugucugcugaauaauaaacuuuuuugaaauaauaaaucugguagaaaaaugagaucucaaaggcucuuuucagagccaccaaaaaaaaaaaaaaaaaaaaaaaaaaaaaaaaaaaaaaaaaaaaaaaaaaaaaaaaaaaaaaaaagaauu

SEQ ID NO: 27304 - RNA, 1778 nt, Artificial Sequence
  mRNA product Design b-4 (hSL-A64-N5) comprising derived and/or modified sequence from LASV(GA391;Clade III)__CAA36645__GPCmut4 (opt1)
aggagagucccgcagucggcguccagcggcucugcuuguucgugugugugucguugcaggccuuauucaagcuuaccaugggccagaucgugaccuucuuccaggaggucccccacgugaucgaggaggugaugaacaucguccugaucgcccucagcauccuggccauccugaaggggcucuacaacguggcgaccugcggccugaucgggcuggugacguuccuccugcuguccggccgcagcugcucccucaucuacaaggggaccuacgagcugcagacccuggagcucaacauggagacccugaacaugugcaugccgcugagcugcacgaagaacaacucccaccacuacauccgggucggcaacgagaccggccucgagcugacccugaccaacacgagcauccucaaccacaaguucugcaaccuguccgacgcccacaagcgcaaccuguacgaccacagccucauguccaucaucagcaccuuccaccuguccauccccaacuucaaccaguacgaggccaugagcugcgacuucaacgggggcaagaucaccgugcaguacaaccugucccacagcuucgccguggacgccgcggggcacugcggcacccucgccaacgggguccugcagacguucaugcggauggccuggggcggcuccuacaucgcccuggacagcgggcgcggcaacugggacugcaucaugaccuccuaccaguaccucaucauccagaacaccaccugggacgaccacugccaguucagccggcccucccccaucggguaccugggccugcucagccagcgcacgcgggacaucuacaucagccgccggcgccggggcaccuucaccuggacccuguccgacagcgaggggaacgagacgccgggcggguacugccugacccgcuggaugcucaucgaggcggagcugaagugcuucggcaacaccgccguggccaagugcaacgagaagcacgacgaggaguucugcgacaugcugcggcuguucgacuucugcaagcaggccauccgccggcugaagacccccgcccagauguccauccagcugaucaacaaggcggugaacgcccucaucaacgaccagcugaucaugaagaaccaccuccgcgacaucauggggauccccuacugcaacuacagccgguacugcuaccucaaccacacguccaccggcaagaccagccugccccgcugcugccugaucuccaacggcagcuaccucaacgagaccaaguucuccgacgacaucgagcagcaggccgacaacaugaucacggagaugcugcagaaggaguacaucgaccggcaggggaagaccccgcugggccuggucgaccucuucguguucagcaccuccuucuaccugaucagcaucuuccugcaccucgugaagauccccacccaccgccacaucgucgggaagcccugccccaagccgcaccggcugaaccacaugggcaucugcuccugcgggcuguacaagcagcccggcgugcccgugcgcuggaagcgcugaggacuaguaauaaggaaacuguaugaaugucugugggcaggaagugaagagauccuucuguaaagguuuuuggaauuaugucugcugaauaauaaacuuuuuugaaauaauaaaucugguagaaaaaugagaucucaaaggcucuuuucagagccaccaaaaaaaaaaaaaaaaaaaaaaaaaaaaaaaaaaaaaaaaaaaaaaaaaaaaaaaaaaaaaaaaagaauu

SEQ ID NO: 27305 - RNA, 1781 nt, Artificial Sequence
  mRNA product Design b-4 (hSL-A64-N5) comprising derived and/or modified sequence from LASV(AV;Clade V)__CCA30314__GPCmut4 (opt1)
aggagagucccgcagucggcguccagcggcucugcuuguucgugugugugucguugcaggccuuauucaagcuuaccaugggccagaucgugaccuucuuccaggaggucccccacgugaucgaggaggugaugaacaucguccugaucgcccucagcauccuggccgugcugaaggggcucuacaacaucgcgaccugcggccugaucgggcugaucacguuccuccugcugugcggccgcuccugcagcuccaaccucuacaaggggguguacgagcugcagagccuggaccucaacauggagacccugaacaugugcaugccgcuguccugcaccaagaacaacagccaccacuacauccgggucggcaacgacaccggccucgagcugacgcugaccaacaccuccauccucaaccacaaguucugcaaccugagcgacgcccacaagaaggaccuguacgaccacgcccucauguccaucaucagcaccuuccaccuguccauccccaacuucaaccaguacgaggccaugagcugcgacuucaacgggggcaagaucuccgugcaguacaaccugagccacuccuacgccaucgacgcggccaaccacugcgggacgguggccaacggcauccuccagaccuucaugcgcauggccuggggcgggagcuacaucgcgcuggacuccggccgggggaacugggacugcaucaugaccagcuaccaguaccugaucauccagaacaccacgugggagaaccacugccaguucucccgccccagccccaucggcuaccucgggcugcugagccagcggacccgcgacaucuacaucucccggcgccggcgcggcaccuucaccuggacgcucagcgacuccgagggcaacgccacccccgggggcuacugccugacccgguggaugcugaucgaggccgagcucaagugcuucgggaacaccgccgucgccaagugcaacgagaagcacgacgaggaguucugcgacaugcugcgccuguucgacuucugcaagcaggcgaucagccggcucaaguccccggcccagaugagcauccagcugaucaacaaggccgugaacgcccugaucaacgaccagcucaucaugaagaaccaccuccgcgacaucaugggcauccccuacugcaacuacuccaaguacugcuaccugaaccacacgaucaccgggaagaccagccugcccaagugcugccugguguccaacggcagcuaccugaacgagacccacuucuccgacgacaucgagcagcaggccgacaacaugaucacggagaugcuccagaaggaguacauggagcggcagggcaagaccccgcuggggcuggucgaccuguucguguucagcaccuccuucuaccucaucagcaucuuccugcgccuggugaagauccccacccaccggcacaucgucggcaagcccugccccaagccgcaccgccucaaccacauggggaucugcuccugcggccuguacaagcagcccggggugcccgugcgguggaagcgcugaggacuaguaauaaggaaacuguaugaaugucugugggcaggaagugaagagauccuucuguaaagguuuuuggaauuaugucugcugaauaauaaacuuuuuugaaauaauaaaucugguagaaaaaugagaucucaaaggcucuuuucagagccaccaaaaaaaaaaaaaaaaaaaaaaaaaaaaaaaaaaaaaaaaaaaaaaaaaaaaaaaaaaaaaaaaagaauu

SEQ ID NO: 27306 - RNA, 1778 nt, Artificial Sequence
  mRNA product Design b-4 (hSL-A64-N5) comprising derived and/or modified sequence from LASV(Togo/2016/7082;Clade VI)__AMR44577__GPCmut4 (opt1)
aggagagucccgcagucggcguccagcggcucugcuuguucgugugugugucguugcaggccuuauucaagcuuaccaugggccagaucaucaccuucuuccaggaggugccccacgucaucgaggaggugaugaacaucgugcugaucgcccucagccugcuggccauccucaagggggucuacaacguggcgaccugcggcaucaucgggcuggugacguuccuguuccucugcggccgcuccugcagccugaucuacaagggguccuacgagcugcagacccucgagcugaacauggagacccugaacaugugcaugccgcucagcugcaccaagaacuccagccaccacuacauccgggucggcaacgagacgggccuggagcugacccucaccaacaccuccaucaucaaccacaaguucugcaaccugagcgacgcccacaagcgcaaccuguacgaccacgcccucauguccauccugagcacguuccaccuguccauccccaacuucaaccaguacgaggccaugagcugcgacuucaacgggggcaagaucuccgugcaguacaaccucagccacgccuacgcgguggacgccgccgagcacugcgggaccgucgccaacggcgugcugcagaccuucaugcggauggcguggggcggguccuacaucgcccuggacagcggccgcgggaacugggacugcaucaugaccuccuaccaguaccucaucauccagaacacgaccugggaggaccacugccaguucagccggcccucccccaucggcuaccuggggcugcucagccagcgcacccgggacaucuacaucagccgccggcgccggggcaccuucacguggacccuguccgacagcgagggcaacgagacccccgggggcuacugccugacccgcuggaugcucaucgaggccgagcugaagugcuucgggaacacggccguggccaagugcaacgagaagcacgacgaggaguucugcgacaugcugcggcuguucgacuucugcaagcaggcgauccagcgccugaaguccccggcccagaugagcauccagcugaucaacaaggccgucaacgcccucaucaacgaccagcugaucaugaagaaccaccuccgggacaugaugggcauccccuacugcaacuacuccaaguacugcuaccucaaccacaccagcuccgggcgcaccagccugcccaagugcugccugguguccaacggcagcuaccucaacgagacccacuucuccgacgacaucgagcagcaggccgacaacaugaucacggagaugcugcagaaggaguacaucgaccggcagggcaagaccccgcuggggcucguggaccuguucgucuucagcaccuccuucuaccugaucagcaucuuccugcaccucaucaagauccccacccaccgccacaucgugggcaagcccugccccaagccgcaccggcugaaccacauggggaucugcuccugcggccuguacaagcagcccggggugcccacgcgcuggaagcggugaggacuaguaauaaggaaacuguaugaaugucugugggcaggaagugaagagauccuucuguaaagguuuuuggaauuaugucugcugaauaauaaacuuuuuugaaauaauaaaucugguagaaaaaugagaucucaaaggcucuuuucagagccaccaaaaaaaaaaaaaaaaaaaaaaaaaaaaaaaaaaaaaaaaaaaaaaaaaaaaaaaaaaaaaaaaagaauu

SEQ ID NO: 27307 - RNA, 1778 nt, Artificial Sequence
  mRNA product Design b-4 (hSL-A64-N5) comprising derived and/or modified sequence from LASV(KAK-428;Clade n.d. (VII))__ANH09740__GPCmut4 (opt1)
aggagagucccgcagucggcguccagcggcucugcuuguucgugugugugucguugcaggccuuauucaagcuuaccaugggccagaucgugaccuucuuccaggaggucccccacgugaucgaggaggugaugaacaucguccugaucgcccucagccugcuggccauccucaaggggcuguacaacuucgcgaccugcggcgugaucgggcugaucacguuccuccugcugugcggccgcuccugcagcgccaccuacaaggggcaguacgagcuccagacccuggagcugaacauggagucccucaacaugugcaugccgcugagcugcaccaagaacaacucccaccacuacauccgggccggcaacaacacgggccuggagcucacccugaccaacaccagcaucaucucccacaaguucugcaaccugagcgacgcccacaagaagaaccucuacgaccacacgcugauguccaucaucaccaccuuccaccugagcauccccaacuucaaccaguacgaggccauguccugcgacuucaacgggggcaagaucagcauccaguacaaccucucccacagcuacgcgggggacgccgcccagcacugcggcaccguggccaacgggguccugcagacguucaugcgcauggcguggggcggcuccuaccuggcccucgacagcgggcggcgcggcugggacugcaucaucuccagcuaccaguaccugaucauccagaacaccaccugggacgaccacugccaguucucccggcccagccccaucggguaccugggcuucgugagccagaagacccgcgacaucuacaucucccggcgccggcgcggcacguucaccuggacccucagcgacuccgaggggcacgacaugccgggcggguacugccugacccgguggaugcugaucgaggccgaccucaagugcuucggcaacacggccguggccaagugcaacgagaagcacgacgaggaguucugcgacauguggcgccuguucgacuucugcaagcaggcgauccagcggcugaaggcccccgcccagaugaacauccagcucaucaacaaggccgucaacgcccugaucaacgaccagcugaugaugaagaaccaccuccgcgacaucauggggauccccuacugcaacuacagcaaguucugcuaccugaacaacaccaccaccggccggacgucccugccccgcugcugccucaucagcaacggcuccuaccugaacgagacccacuucagcgacgacaucgagcagcaggcggacaacaugaucaccgagaugcugcagaaggaguacauggaccggcaggggaagaccccgcucggccugguggaccuguucguguucuccacgagcuucuaccucaucaccaucuuccugcaccuggucaagauccccacccaccgccacaucguggggaagcccugccccaagccgcaccggcugaaccacaugggcaucugcuccugcgggcucuacaagcagcccggcgugcccguccgcuggaagcggugaggacuaguaauaaggaaacuguaugaaugucugugggcaggaagugaagagauccuucuguaaagguuuuuggaauuaugucugcugaauaauaaacuuuuuugaaauaauaaaucugguagaaaaaugagaucucaaaggcucuuuucagagccaccaaaaaaaaaaaaaaaaaaaaaaaaaaaaaaaaaaaaaaaaaaaaaaaaaaaaaaaaaaaaaaaaagaauu

SEQ ID NO: 27308 - RNA, 1778 nt, Artificial Sequence; identical to SEQ ID NO: 27302
  mRNA product Design b-4 (hSL-A64-N5) comprising derived and/or modified sequence from LASV(Pinneo-NIG-1969;Clade I)__AIT17836__GPCmut4 (opt1)

SEQ ID NO: 27309 - RNA, 1778 nt, Artificial Sequence
  mRNA product Design b-4 (hSL-A64-N5) comprising derived and/or modified sequence from LASV(ISTH0009-NIG-2011;Clade II)__AIT17404__GPCmut4 (opt1)
aggagagucccgcagucggcguccagcggcucugcuuguucgugugugugucguugcaggccuuauucaagcuuaccaugggccagaucaucaccuucuuccaggaggugccccacgucaucgaggaggugaugaacaucgugcugaucgcccucagccugcuggccauccucaaggggaucuacaacgucgcgaccugcggccuguucgggcugguguccuuccuccugcugugcggccgcagcugcuccacgaccuacaaggggguguacgagcuccagacccuggagcuggacauggccagccucaacaugugcaugccgcuguccugcaccaagaacaacagccaccacuacaucauggucggcaacgagacgggccuggagcucacccugaccaacaccuccaucaucaaccacaaguucugcaaccugagcgacgcccacaagaagaaccucuacgaccacgcccugauguccaucaucagcacguuccaccuguccauccccaacuucaaccaguacgaggccaugagcugcgacuucaacgggggcaagaucuccgugcaguacaaccucagccacgcguacgccguggacgccgccaaccacugcgggaccaucgcgaacggcguccugcagaccuucaugcggauggccuggggcggguccuacaucgcccuggacagcggcaagggguccugggacugcaucaugaccagcuaccaguaccucaucauccagaacacgaccugggaggaccacugccaguucucccgccccagccccaucggcuaccuggggcugcucagccagcggacccgcgacaucuacaucucccggcgccggcgcggcaccuucacguggacccugagcgacuccgagggcaacgagacccccgggggcuacugccugacccgguggaugcucaucgaggccgagcugaagugcuucgggaacacggccguggcgaagugcaacgagaagcacgacgaggaguucugcgacaugcugcgccucuucgacuucugcaagcaggccauccggcgccugaagaccccggcccagaugagcauccagcugaucaacaaggccgugaacgcccucaucaacgaccagcugaucaugaagaaccaccuccgggacaucaugggcauccccuacugcaacuacuccaaguacugcuaccugaaccacaccgucaccgggaagacgagccugccccgcugcugccugguguccaacggcagcuaccucaacgagacccacuucuccgacgacaucgagcagcaggcggacaacaugaucaccgagcugcugcagaaggaguacauggaccggcagggcaagaccccgcucgggcugguggaccuguucgucuucagcacguccuucuaccugaucagcaucuuccuccaccugaucaagauccccacccaccgccacaucaccggcaagcccugccccaagccgcaccggcugaaccacauggggaucugcuccugcggccucuacaagcaccccggggugcccgugaaguggaagcgcugaggacuaguaauaaggaaacuguaugaaugucugugggcaggaagugaagagauccuucuguaaagguuuuuggaauuaugucugcugaauaauaaacuuuuuugaaauaauaaaucugguagaaaaaugagaucucaaaggcucuuuucagagccaccaaaaaaaaaaaaaaaaaaaaaaaaaaaaaaaaaaaaaaaaaaaaaaaaaaaaaaaaaaaaaaaaagaauu

SEQ ID NO: 27310 - RNA, 1778 nt, Artificial Sequence
  mRNA product Design b-4 (hSL-A64-N5) comprising derived and/or modified sequence from LASV(ISTH2010-NIG-2012;Clade II)__AIT17482__GPCmut4 (opt1)
aggagagucccgcagucggcguccagcggcucugcuuguucgugugugugucguugcaggccuuauucaagcuuaccaugggccagaucaucaccuucuuccaggaggugccccacgucaucgaggaggugaugaacaucgugcugaucgcccucagccugcuggccauccucaaggggaucuacaacgucgcgaccugcggccuguucgggcugguguccuuccuccugcugugcggccgcagcugcuccacgaccuacaaggggguguacgagcuccagacccuggagcuggacauggccagccucaacaugugcaugccgcuguccugcaccaagaacaacagccaccacuacaucauggucggcaacgagacgggccuggagcucacccugaccaacaccuccaucaucaaccacaaguucugcaaccugagcgacgcccacaagaagaaccucuacgaccacgcccugauguccaucaucagcacguuccaccuguccauccccaacuucaaccaguacgaggccaugagcugcgacuucaacgggggcaagaucuccgugcaguacaaccucagccacgcguacgccguggacgccgccaaccacugcgggaccaucgcgaacggcguccugcagaccuucaugcggauggccuggggcggguccuacaucgcccuggacagcggcaagggguccugggacugcaucaugaccagcuaccaguaccucaucauccagaacaucacgugggaggaccacugccaguucucccgccccagccccaucggcuaccuggggcugcucagccagcggacccgcgacaucuacaucucccggcgccggcgcggcaccuucaccuggacgcugagcgacuccgagggcaacgagacccccgggggcuacugccugacccgguggaugcucaucgaggccgagcugaagugcuucgggaacaccgccguggcgaagugcaacgagaagcacgacgaggaguucugcgacaugcugcgccucuucgacuucugcaagcaggccauccggcgccugaagacgccggcccagaugagcauccagcugaucaacaaggccgugaacgcccucaucaacgaccagcugaucaugaagaaccaccuccgggacaucaugggcauccccuacugcaacuacuccaaguacugcuaccugaaccacaccgucaccgggaagaccagccugccccgcugcugccugguguccaacggcagcuaccucaacgagacgcacuucuccgacgacaucgagcagcaggcggacaacaugaucaccgagcugcugcagaaggaguacaucgaccggcagggcaagaccccgcucgggcugguggaccuguucgucuucagcaccuccuucuaccugaucagcaucuuccuccaccuggugaagauccccacgcaccgccacguggucggcaagcccugccccaagccgcaccggcugaaccacauggggaucugcuccugcggccucuacaagcaccccggggugcccgugaaguggaagcgcugaggacuaguaauaaggaaacuguaugaaugucugugggcaggaagugaagagauccuucuguaaagguuuuuggaauuaugucugcugaauaauaaacuuuuuugaaauaauaaaucugguagaaaaaugagaucucaaaggcucuuuucagagccaccaaaaaaaaaaaaaaaaaaaaaaaaaaaaaaaaaaaaaaaaaaaaaaaaaaaaaaaaaaaaaaaaagaauu

SEQ ID NO: 27311 - RNA, 1778 nt, Artificial Sequence
  mRNA product Design b-4 (hSL-A64-N5) comprising derived and/or modified sequence from LASV(Lassa virus/H.sapiens-wt/NGA/2015/ISTH_0543;Clade II)__AVO03639__GPCmut4 (opt1)
aggagagucccgcagucggcguccagcggcucugcuuguucgugugugugucguugcaggccuuauucaagcuuaccaugggccagaucaucaccuucuuccaggaggugccccacgucaucgaggaggugaugaacaucgugcugaucgcccucagccugcuggccauccucaaggggaucuacaacgucgcgaccugcggccuguucgggcugguguccuuccuccugcugugcggccgcagcugcuccacgaccuacaaggggguguacgagcuccagacccuggagcuggacauggccaaccucaacaugugcaugccgcugagcugcaccaagaacaacucccaccacuacaucauggucggcaacgagacgggccuggagcucacccugaccaacaccagcaucaucaaccacaaguucugcaaccuguccgacgcccacaagaagaaccucuacgaccacgcccugaugagcaucaucuccacguuccaccugagcauccccaacuucaaccaguacgaggccauguccugcgacuucaacgggggcaagaucagcgugcaguacaaccucucccacaccuacgcgguggacgccgccaaccacugcgggaccaucgccaacggcguccugcagaccuucaugcggauggcguggggcgggagcuacaucgcccuggacuccggcaaggggagcugggacugcaucaugacguccuaccaguaccucgugauccagaacaccaccugggaggaccacugccaguucagccgccccucccccaucggcuaccuggggcugcucagccagcggacccgcgacaucuacaucagccggcgccggcgcggcacguucaccuggacccuguccgacagcgagggcaacgagacccccgggggcuacugccugacgcgguggaugcucaucgaggccgagcugaagugcuucgggaacaccgccguggccaagugcaacgagaagcacgacgaggaguucugcgacaugcugcgccucuucgacuucugcaagcaggcgauccggcgccugaagaccccggcccagauguccauccagcugaucaacaaggccgucaacgcccucaucaacgaccagcugaucaugaagaaccaccuccgggacaucaugggcauccccuacugcaacuacagcaaguacugcuaccugaaccacaccgugacggggaagaccucccugccccgcugcugccuggugagcaacggcuccuaccucaacgagacccacuucagcgacgacaucgagcagcaggccgacaacaugaucaccgagcugcugcagaaggaguacaucgaccggcagggcaagacgccgcucgggcuggucgaccuguucguguucuccaccagcuucuaccugaucuccaucuuccuccaccuggugaagauccccacccaccgccacaucaccggcaagcccugccccaagccgcaccggcugaaccacauggggaucugcagcugcggccucuacaagcaccccgggguccccgugaaguggaagcgcugaggacuaguaauaaggaaacuguaugaaugucugugggcaggaagugaagagauccuucuguaaagguuuuuggaauuaugucugcugaauaauaaacuuuuuugaaauaauaaaucugguagaaaaaugagaucucaaaggcucuuuucagagccaccaaaaaaaaaaaaaaaaaaaaaaaaaaaaaaaaaaaaaaaaaaaaaaaaaaaaaaaaaaaaaaaaagaauu

SEQ ID NO: 27312 - RNA, 1778 nt, Artificial Sequence
  mRNA product Design b-4 (hSL-A64-N5) comprising derived and/or modified sequence from LASV(Lassa virus/H.sapiens-wt/NGA/2016/ISTH_0009;Clade II)__AVO03571__GPCmut4 (opt1)
aggagagucccgcagucggcguccagcggcucugcuuguucgugugugugucguugcaggccuuauucaagcuuaccaugggccagaucaucaccuucuuccaggaggugccccacgucaucgaggaggugaugaacaucgugcugaucgcccucagccugcuggccauccucaaggggaucuacaacgucgcgaccugcggccugcuggggcucguguccuuccugcugcucugcggccgcagcugcuccacgaccuacaaggggguguacgagcugcagacccuggagcucgacauggccagccugaacaugugcaugccgcuguccugcaccaagaacaacagccaccacuacaucauggucggcaacgagacgggccucgagcugacccugaccaacaccuccaucaucaaccacaaguucugcaaccucagcgacgcccacaagaagaaccuguacgaccacgcccugauguccaucaucagcacguuccaccucuccauccccaacuucaaccaguacgaggccaugagcugcgacuucaacgggggccggaucuccgugcaguacaaccugagccacuccuacgcgguggacgccgccaaccacugcgggaccaucgccaacggcguccugcagaccuucaugcgcauggcguggggcgggagcuacaucgcccucgacuccggcaaggggagcugggacugcaucaugaccuccuaccaguaccugaucauccagaacacgaccugggaggaccacugccaguucagccggcccagccccaucggcuaccuggggcuccugucccagcgcacccgggacaucuacaucagccgccggcgccggggcaccuucacguggacccuguccgacagcgagggcaacgagacccccgggggcuacugccucacccgcuggaugcugaucgaggccgagcugaagugcuucgggaacacggccguggccaagugcaacgagaagcacgacgaggaguucugcgacaugcuccggcuguucgacuucugcaagcaggcgauccgccggcugaagaccccggcccagauguccauccagcucaucaacaaggccgugaacgcccugaucaacgaccagcugaucaugaagaaccaccuccgcgacaucaugggcauccccuacugcaacuacagcaaguacugcuaccugaaccacaccgucaccgggaagacgucccugccccggugcugccucgugagcaacggcuccuaccugaacgagacccacuucagcgacgacaucgagcagcaggccgacaacaugaucaccgagcugcuccagaaggaguacaucgaccgccagggcaagaccccgcuggggcugguggaccuguucgucuucuccacgagcuucuaccucaucuccaucuuccugcaccuggugaagauccccacccaccggcacaucaccggcaagcccugccccaagccgcaccgccucaaccacauggggaucugcagcugcggccuguacaaccaccccggggugcccgucaaguggaagcggugaggacuaguaauaaggaaacuguaugaaugucugugggcaggaagugaagagauccuucuguaaagguuuuuggaauuaugucugcugaauaauaaacuuuuuugaaauaauaaaucugguagaaaaaugagaucucaaaggcucuuuucagagccaccaaaaaaaaaaaaaaaaaaaaaaaaaaaaaaaaaaaaaaaaaaaaaaaaaaaaaaaaaaaaaaaaagaauu

SEQ ID NO: 27313 - RNA, 1778 nt, Artificial Sequence
  mRNA product Design b-4 (hSL-A64-N5) comprising derived and/or modified sequence from LASV(Lassa virus/H.sapiens-wt/NGA/2016/ISTH_0017;Clade II)__AVO03567__GPCmut4 (opt1)
aggagagucccgcagucggcguccagcggcucugcuuguucgugugugugucguugcaggccuuauucaagcuuaccaugggccagaucaucaccuucuuccaggaggugccccacgucaucgaggaggugaugaacaucgugcugaucgcccucagccugcuggccauccucaaggggaucuacaacgucgcgaccugcggccuguucgggcugguguccuuccuccugcugugcggccgcagcugcuccacgaccuacaaggggguguacgagcuccagacccuggagcuggacauggccagccucaacaugugcaugccgcuguccugcaccaagaacaacagccaccacuacaucauggucggcaacgagacgggccuggagcucacccugaccaacaccuccaucaucaaccacaaguucugcaaccugagcgacgcccacaagaagaaccucuacgaccacgcccugauguccaucaucagcacguuccaccuguccauccccaacuucaaccaguacgaggccaugagcugcgacuucaacgggggcaagaucuccgugcaguacaaccucagccacaccuacgcgaucgacgccgccaaccacugcgggaccaucgccaacggcgugcugcagaccuucaugcggauggcguggggcggguccuacaucgcccuggacagcggcaagggguccugggacugcaucaugacgagcuaccaguaccucaucauccagaacaccaccugggaggaccacugccaguucucccgccccagccccaucggcuaccuggggcugcucagccagcggacccgcgacaucuacaucucccggcgccggcgcggcacguucaccuggacccugagcgacuccgagggcaacgagacccccgggggcuacugccugacgcgguggaugcucaucgaggccgagcugaagugcuucgggaacaccgccgucgccaagugcaacgagaagcacgacgaggaguucugcgacaugcugcgccucuucgacuucugcaagcaggcgauccggcgccugaagaccccggcccagaugagcauccagcugaucaacaaggccgugaacgcccucaucaacgaccagcugaucaugaagaaccaccuccgggacaucaugggcauccccuacugcaacuacuccaaguacugcuaccugaaccacaccgugacggggaagaccagccugccccgcugcugccuggucuccaacggcagcuaccucaacgagacccacuucuccgacgacaucgagcagcaggccgacaacaugaucaccgagcugcugcagaaggaguacauggaccggcagggcaagacgccgcucgggcugguggaccuguucguguucagcaccuccuucuaccugaucagcaucuuccuccaccugguccgcauccccacccaccggcacgugaucggcaagcccugccccaagccgcaccgccugaaccacauggggaucugcuccugcggccucuacaagcaccccggggugcccgucaaguggaagcggugaggacuaguaauaaggaaacuguaugaaugucugugggcaggaagugaagagauccuucuguaaagguuuuuggaauuaugucugcugaauaauaaacuuuuuugaaauaauaaaucugguagaaaaaugagaucucaaaggcucuuuucagagccaccaaaaaaaaaaaaaaaaaaaaaaaaaaaaaaaaaaaaaaaaaaaaaaaaaaaaaaaaaaaaaaaaagaauu

SEQ ID NO: 27314 - RNA, 1778 nt, Artificial Sequence
  mRNA product Design b-4 (hSL-A64-N5) comprising derived and/or modified sequence from LASV(Lassa virus/H.sapiens-wt/NGA/2018/ISTH_0959;Clade II)__AVV65099__GPCmut4 (opt1)
aggagagucccgcagucggcguccagcggcucugcuuguucgugugugugucguugcaggccuuauucaagcuuaccaugggccagaucaucaccuucuuccaggaggugccccacgucaucgaggaggugaugaacaucgugcugaucgcccucagccugcuggccauccucaaggggaucuacaacgucgugaccugcggccuguucgggcugguguccuuccuccugcugugcggccgcagcugcuccacgaccuacaagggggucuacgagcuccagacccuggagcuggacauggcgagccucaacaugugcaugccgcuguccugcaccaagaacaacagccaccacuacaucauggugggcaacgagacgggccuggagcucacccugaccaacaccuccaucaucaaccacaaguucugcaaccugagcgacgcccacaagaagaaccucuacgaccacgcccugauguccaucaucagcacguuccaccuguccauccccaacuucaaccaguacgaggccaugagcugcgacuucaacgggggcaagaucuccgugcaguacaaccucagccacgccuacgcgaucgacgccgccaaccacugcgggaccaucgccaacggcguccugcagaccuucaugcggauggcguggggcggguccuacaucgcccuggacagcggcaagggguccugggacugcaucaugaccagcuaccaguaccucaucauccagaacacgaccugggaggaccacugccaguucucccgccccagccccaucggcuaccuggggcugcucagccagcggacccgcgacaucuacaucucccggcgccggcgcggcaccuucacguggacccugagcgacuccgagggcaacgagacccccgggggcuacugccugacccgguggaugcucaucgaggccgagcugaagugcuucgggaacacggccguggccaagugcaacgagaagcacgacgaggaguucugcgacaugcugcgccucuucgacuucugcaagcaggcgauccggcgccugaagaccccggcccagaugagcauccagcugaucaacaaggccgugaacgcccucaucaacgaccagcugaucaugaagaaccaccuccgggacaucaugggcauccccuacugcaacuacuccaaguacugcuaccugaaccacaccgucaccgggaagacgagccugccccgcugcugccugguguccaacggcagcuaccucaacgagacccacuucuccgacgacaucgagcagcaggccgacaacaugaucaccgagcugcugcagaaggaguacaucgaccggcagggcaagaccccgcucgggcugguggaccuguucgucuucagcacguccuucuaccugaucagcaucuuccuccaccuggugaagauccccacccaccgccacgugaucggcaagcccugccccaagccgcaccggcugaaccacauggggaucugcuccugcggccucuacaagcaccccgggguccccgugaaguggaagcgcugaggacuaguaauaaggaaacuguaugaaugucugugggcaggaagugaagagauccuucuguaaagguuuuuggaauuaugucugcugaauaauaaacuuuuuugaaauaauaaaucugguagaaaaaugagaucucaaaggcucuuuucagagccaccaaaaaaaaaaaaaaaaaaaaaaaaaaaaaaaaaaaaaaaaaaaaaaaaaaaaaaaaaaaaaaaaagaauu

SEQ ID NO: 27315 - RNA, 1778 nt, Artificial Sequence
  mRNA product Design b-4 (hSL-A64-N5) comprising derived and/or modified sequence from LASV(LASV003-NIG-2008;Clade II)__AIT17580__GPCmut4 (opt1)
aggagagucccgcagucggcguccagcggcucugcuuguucgugugugugucguugcaggccuuauucaagcuuaccaugggccagaucaucaccuucuuccaggaggugccccacgucaucgaggaggugaugaacaucgugcugaucgcccucagccugcuggccauccucaaggggaucuacaacgucgcgaccugcggccuguucgggcugguguccuuccuccugcugugcggccgcagcugcuccacgaccuacaaggggguguacgagcuccagacccuggagcuggacauggccagccucaacaugugcaugccgcuguccugcaccaagaacaacagccaccacuacaucauggucggcaacgagacgggccuggagcucacccugaccaacaccuccaucaucaaccacaaguucugcaaccugagcgacgcccacaagaagaaccucuacgaccacgcccugauguccaucaucagcacguuccaccuguccauccccaacuucaaccaguacgaggccaugagcugcgacuucaacgggggcaagaucuccgugcaguacaaccucagccacaccuacgcgguggacgccgccaaccacugcgggaccaucgccaacggcguccugcagaccuucaugcggauggcguggggcggguccuacaucgcccuggacagcggcaagggguccugggacugcaucaugacgagcuaccaguaccucaucauccagaacaccaccugggaggaccacugccaguucucccgccccagccccaucggcuaccuggggcugcucagccagcggacccgcgacaucuacaucucccggcgccggcgcggcacguucaccuggacccugagcgacuccgagagcaacgagaccccgggcggguacugccugacgcgguggaugcucaucgaggccgagcugaagugcuucggcaacaccgccguggccaagugcaacgagaagcacgacgaggaguucugcgacaugcugcgccucuucgacuucugcaagcaggcgauccggcgccugaaggcccccgcccagauguccauccagcugaucaacaaggccgugaacgcccucaucaacgaccagcugaucaugaagaaccaccuccgggacaucauggggauccccuacugcaacuacagcaaguacugcuaccugaaccacaccgucaccggccgcacgucccugccccggugcugccuggugagcaacggguccuaccucaacgagacccacuucagcgacgacaucgagcagcaggcggacaacaugaucaccgagcugcugcagaaggaguacauggaccgccagggcaagaccccgcucggccugguggaccuguucgucuucuccacgagcuucuaccugaucuccaucuuccuccaccuggugaagauccccacccaccggcacgugaucgggaagcccugccccaagccgcaccgccugaaccacaugggcaucugcagcugcgggcucuacaagcaccccggcguccccgugaaguggaagcggugaggacuaguaauaaggaaacuguaugaaugucugugggcaggaagugaagagauccuucuguaaagguuuuuggaauuaugucugcugaauaauaaacuuuuuugaaauaauaaaucugguagaaaaaugagaucucaaaggcucuuuucagagccaccaaaaaaaaaaaaaaaaaaaaaaaaaaaaaaaaaaaaaaaaaaaaaaaaaaaaaaaaaaaaaaaaagaauu

SEQ ID NO: 27316 - RNA, 1778 nt, Artificial Sequence
  mRNA product Design b-4 (hSL-A64-N5) comprising derived and/or modified sequence from LASV(LASV035-NIG-2009;Clade II)__AIT17588__GPCmut4 (opt1)
aggagagucccgcagucggcguccagcggcucugcuuguucgugugugugucguugcaggccuuauucaagcuuaccaugggccagaucaucaccuucuuccaggaggugccccacgucaucgaggaggugaugaacaucgugcugaucgcccucagccugcuggccauccucaaggggaucuacaacgucgcgaccugcggccuguucgggcugguguccuuccuccugcugugcggccgcagcugcuccacgaccuacaaggggguguacgagcuccagacccuggagcuggacauggccagccucaacaugugcaugccgcuguccugcaccaagaacaacagccaccacuacaucauggucggcaacgagacgggccuggagcucacccugaccaacaccuccaucaucaaccacaaguucugcaaccugagcgacgcccacaagaagaaccucuacgaccacgcccugauguccaucaucagcacguuccaccuguccauccccaacuucaaccaguacgaggccaugagcugcgacuucaacgggggcaagaucuccgugcaguacaaccucagccacgcguacgccguggacgccgccaaccacugcgggaccaucgcgaacggcguccugcagaccuucaugcggauggccuggggcggguccuacaucgcccuggacagcggcaagggguccugggacugcaucaugaccagcuaccaguaccucaucauccagaacacgaccugggaggaccacugccaguucucccgccccagccccaucggcuaccuggggcugcucagccagcggacccgcgacaucuacaucucccggcgccggcgcggcaccuucacguggacccugagcgacuccgagggcaacgagacccccgggggcuacugccugacccgguggaugcucaucgaggccgagcugaagugcuucgggaacacggccguggcgaagugcaacgagaagcacgacgaggaguucugcgacaugcugcgccucuucgacuucugcaagcaggccauccggcgccugaaggccccggcccagaugagcauccagcugaucaacaaggccgugaacgcgcucaucaacgaccagcugaucaugaagaaccaccuccgggacaucaugggcauccccuacugcaacuacuccaaguacugcuaccugaaccacaccgucaccgggaagaccagccugccccgcugcugccugguguccaacggcagcuaccucaacgagacgcacuucuccgacgacaucgagcagcaggccgacaacaugaucaccgagcugcugcagaaggaguacaucgaccggcagggcaagaccccgcucgggcugguggaccuguucgucuucagcaccuccuucuaccugaucagcaucuuccuccaccuggugaagauccccacgcaccgccacgugaucggcaagcccugccccaagccgcaccggcugaaccacauggggaucugcuccugcggccucuacaagcaccccgggguccccgugaaguggaagcgcugaggacuaguaauaaggaaacuguaugaaugucugugggcaggaagugaagagauccuucuguaaagguuuuuggaauuaugucugcugaauaauaaacuuuuuugaaauaauaaaucugguagaaaaaugagaucucaaaggcucuuuucagagccaccaaaaaaaaaaaaaaaaaaaaaaaaaaaaaaaaaaaaaaaaaaaaaaaaaaaaaaaaaaaaaaaaagaauu

SEQ ID NO: 27317 - RNA, 1778 nt, Artificial Sequence
  mRNA product Design b-4 (hSL-A64-N5) comprising derived and/or modified sequence from LASV(LASV1000-NIG-2009;Clade II)__AIT17782__GPCmut4 (opt1)
aggagagucccgcagucggcguccagcggcucugcuuguucgugugugugucguugcaggccuuauucaagcuuaccaugggccagaucaucaccuucuuccaggaggugccccacgucaucgaggaggugaugaacaucgugcugaucgcccucagccugcuggccauccucaaggggaucuacaacgucgcgaccugcggccuguucgggcugguguccuuccuccugcugugcggccgcagcugcuccacgaccuacaaggggguguacgagcuccagacccuggagcuggacauggccagccucaacaugugcaugccgcuguccugcaccaagaacaacagccaccacuacaucauggucggcaacgagacgggccuggagcucacccugaccaacaccuccaucaucaaccacaaguucugcaaccugagcgacgcccacaagaagaaccucuacgaccacgcccugauguccaucaucagcacguuccaccuguccauccccaacuucaaccaguacgaggccaugagcugcgacuucaacgggggcaagaucuccgugcaguacaaccucagccacaccuacgcgguggacgccgccaaccacugcgggaccaucgccaacggcguccugcagaccuucaugcggauggcguggggcggguccuacaucgcccuggacagcggcaagggguccugggacugcaucaugacgagcuaccaguaccucaucauccagaacaccaccugggaggaccacugccaguucucccgccccagccccaucggcuaccuggggcugcucagccagcggacccgcgacaucuacaucucccggcgccggcgcggcacguucaccuggacccugagcgacuccgagggcaacgagacccccgggggcuacugccugacgcgguggaugcucaucgaggccgagcugaagugcuucgggaacaccgccguggccaagugcaacgagaagcacgacgaggaguucugcgacaugcugcgccucuucgacuucugcaagcaggcgaucaagcggcugaagaccccggcccagaugagcauccagcugaucaacaaggccgugaacgcccucaucaacgaccagcugaucaugaagaaccaccuccgcgacaucaugggcauccccuacugcaacuacuccaaguacugcuaccugaaccacaccgucacggggaagaccagccugccccggugcugccugguguccaacggcagcuaccucaacgagacccacuucuccgacgacaucgagcagcaggccgacaacaugaucaccgagcugcugcagaaggaguacaucgaccgccagggcaagacgccgcucgggcugguggaccuguucgucuucagcaccuccuucuaccugaucagcaucuuccuccaccuggugaagauccccacccaccggcacguggucggcaagcccugccccaagccgcaccgccugaaccacauggggaucugcuccugcggccucuacaagcaccccggggugcccgugaaguggaagcggugaggacuaguaauaaggaaacuguaugaaugucugugggcaggaagugaagagauccuucuguaaagguuuuuggaauuaugucugcugaauaauaaacuuuuuugaaauaauaaaucugguagaaaaaugagaucucaaaggcucuuuucagagccaccaaaaaaaaaaaaaaaaaaaaaaaaaaaaaaaaaaaaaaaaaaaaaaaaaaaaaaaaaaaaaaaaagaauu

SEQ ID NO: 27318 - RNA, 1778 nt, Artificial Sequence
  mRNA product Design b-4 (hSL-A64-N5) comprising derived and/or modified sequence from LASV(LASV221-NIG-2010;Clade II)__AIT17624__GPCmut4 (opt1)
aggagagucccgcagucggcguccagcggcucugcuuguucgugugugugucguugcaggccuuauucaagcuuaccaugggccagaucaucaccuucuuccaggaggugccccacgucaucgaggaggugaugaacaucgugcugaucgcccucagccugcuggccauccucaaggggaucuacaacgucgcgaccugcggccuguucgggcugguguccuuccuccugcugugcggccgcagcugcuccacgaccuacaaggggguguacgagcuccagacccuggagcuggacauggccagccucaacaugugcaugccgcuguccugcaccaagaacaacagccaccacuacaucauggucggcaacgagacgggccuggagcucacccugaccaacaccuccaucaucaaccacaaguucugcaaccugagcgacgcccacaagaagaaccucuacgaccacgcccugauguccaucaucagcacguuccaccuguccauccccaacuucaaccaguacgaggccaugagcugcgacuucaacgggggcaagaucuccgugcaguacaaccucagccacaccuacgcgaucgacgccgccaaccacugcgggaccaucgccaacggcgugcugcagaccuucaugcggauggcguggggcggguccuacaucgcccuggacagcggcaagggguccugggacugcaucaugacgagcuaccaguaccucaucauccagaacaccaccugggaggaccacugccaguucucccgccccagccccaucggcuaccuggggcugcucagccagcggacccgcgacaucuacaucucccggcgccggcgcggcacguucaccuggacccugagcgacuccgagggcaacgagacccccgggggcuacugccugacgcgguggaugcucaucgaggccgagcugaagugcuucgggaacaccgccgucgccaagugcaacgagaagcacgacgaggaguucugcgacaugcugcgccucuucgacuucugcaagcaggcgauccggcgccugaagaccccggcccagaugagcauccagcugaucaacaaggccgugaacgcccucaucaacgaccagcugaucaugaagaaccaccuccgggacaucaugggcauccccuacugcaacuacuccaaguacugcuaccugaaccacaccgugacggggaagaccagccugccccgcugcugccuggucuccaacggcagcuaccucaacgagacccacuucuccgacgacaucgagcagcaggccgacaacaugaucaccgagaugcugcagaaggaguacauggaccggcagggcaagacgccgcuggggcucguggaccuguucguguucagcaccuccuucuaccugaucagcaucuuccugcaccucgucaagauccccacccaccgccacgugaucggcaagcccugccccaagccgcaccggcugaaccacauggggaucugcuccugcggccuguacaagcaccccggggugcccgucaaguggaagcgcugaggacuaguaauaaggaaacuguaugaaugucugugggcaggaagugaagagauccuucuguaaagguuuuuggaauuaugucugcugaauaauaaacuuuuuugaaauaauaaaucugguagaaaaaugagaucucaaaggcucuuuucagagccaccaaaaaaaaaaaaaaaaaaaaaaaaaaaaaaaaaaaaaaaaaaaaaaaaaaaaaaaaaaaaaaaaagaauu

SEQ ID NO: 27319 - RNA, 1778 nt, Artificial Sequence
  mRNA product Design b-4 (hSL-A64-N5) comprising derived and/or modified sequence from LASV(LASV237-NIG-2010;Clade II)__AIT17638__GPCmut4 (opt1)
aggagagucccgcagucggcguccagcggcucugcuuguucgugugugugucguugcaggccuuauucaagcuuaccaugggccagaucaucaccuucuuccaggaggugccccacgucaucgaggaggugaugaacaucgugcugaucgcccucagccugcuggccauccucaaggggaucuacaacgucgcgaccugcggccuguucgggcugguguccuuccuccugcugugcggccgcagcugcuccacgaccuacaaggggguguacgagcuccagacccuggagcuggacauggccagccucaacaugugcaugccgcuguccugcaccaagaacaacagccaccacuacaucauggucggcaacgagacgggccuggagcucacccugaccaacaccuccaucaucaaccacaaguucugcaaccugagcgacgcccacaagaaggaccucuacgaccacgcccugauguccaucaucagcacguuccaccuguccauccccaacuucaaccaguacgaggccaugagcugcgacuucaacgggggcaagaucuccgugcaguacaaccucagccacaccuacgcgguggacgccgccaaccacugcgggaccaucgccaacggcguccugcagaccuucaugcggauggcguggggcggguccuacaucgcccuggacagcggcaagggguccugggacugcaucaugacgagcuaccaguaccucaucauccagaacaccaccugggaggaccacugccaguucucccgccccagccccaucggcuaccuggggcugcucagccagcggacccgcgacaucuacaucucccggcgccggcgcggcacguucaccuggacccugagcgacuccgagggcaacgagacccccgggggcuacugccugacgcgguggaugcucaucgaggccgagcugaagugcuucgggaacaccgccguggccaagugcaacgagaagcacgacgaggaguucugcgacaugcugcgccucuucgacuucugcaagcaggcgauccggcgccugaagaccccggcccagaugagcauccagcugaucaacaaggccgugaacgcccucaucaacgaccagcugaucaugaagaaccaccuccgggacaucaugggcauccccuacugcaacuacuccaaguacugcuaccugaaccacaccgucacggggaagaccagccugccccgcugcugccugguguccaacggcagcuaccucaacgagacccacuucuccgacgacaucgagcagcaggccgacaacaugaucaccgagcugcugcagaaggaguacauggaccggcagggcaagacgccgcucgggcugguggaccuguucgucuucagcaccuccuucuaccugaucagcaucuuccuccaccugaucaagauccccacccaccgccacaucaccggcaagcccugccccaagccgcaccggcugaaccacauggggaucugcuccugcggccucuacaagcaccccggggugcccgugaaguggaagcgcugaggacuaguaauaaggaaacuguaugaaugucugugggcaggaagugaagagauccuucuguaaagguuuuuggaauuaugucugcugaauaauaaacuuuuuugaaauaauaaaucugguagaaaaaugagaucucaaaggcucuuuucagagccaccaaaaaaaaaaaaaaaaaaaaaaaaaaaaaaaaaaaaaaaaaaaaaaaaaaaaaaaaaaaaaaaaagaauu

SEQ ID NO: 27320 - RNA, 1778 nt, Artificial Sequence
  mRNA product Design b-4 (hSL-A64-N5) comprising derived and/or modified sequence from LASV(LASV253-NIG-2011;Clade II)__AIT17670__GPCmut4 (opt1)
aggagagucccgcagucggcguccagcggcucugcuuguucgugugugugucguugcaggccuuauucaagcuuaccaugggccagaucaucaccuucuuccaggaggugccccacgucaucgaggaggugaugaacaucgugcugaucgcccucagccugcuggccauccucaaggggaucuacaacgucgcgaccugcggccuguucgggcugguguccuuccuccugcugugcggccgcagcugcuccacgaccuacaaggggguguacgagcuccagacccuggagcuggacauggccagccucaacaugugcaugccgcuguccugcaccaagaacaacagccaccacuacaucauggucggcaacgagacgggccuggagcucacccugaccaacaccuccaucaucaaccacaaguucugcaaccugagcgacgcccacaagaagaaccucuacgaccacgcccugauguccaucaucagcacguuccaccuguccauccccaacuucaaccaguacgaggccaugagcugcgacuucaacgggggcaagaucuccgugcaguacaaccucagccacaccuacgcgguggacgccgccaaccacugcgggaccaucgccaacggcguccugcagaccuucaugcggauggcguggggcggguccuacaucgcccuggacagcggcaagggguccugggacugcaucaugacgagcuaccaguaccucaucauccagaacaccaccugggaggaccacugccaguucucccgccccagccccaucggcuaccuggggcugcucagccagcggacccgcgacaucuacaucucccggcgccggcgcggcacguucaccuggacccugagcgacuccgagggcaacgagacccccgggggcuacugccugacgcgguggaugcucaucgaggccgagcugaagugcuucgggaacaccgccguggccaagugcaacgagaagcacgacgaggaguucugcgacaugcugcgccucuucgacuucugcaagcaggcgauccggcgccugaaggccccggcccagaugagcauccagcugaucaacaaggccgugaacgcccucaucaacgaccagcugaucaugaagaaccaccuccgggacaucaugggcauccccuacugcaacuacuccaaguacugcuaccugaaccacaccgucaccgggcgcacgagccugccccggugcugccugguguccaacggcagcuaccucaacgagacccacuucuccgacgacaucgagcagcaggcggacaacaugaucaccgagcugcugcagaaggaguacaucgaccgccagggcaagaccccgcucgggcugguggaccuguucgucuucagcacguccuucuaccugaucagcaucuuccuccaccuggugaagauccccacccaccggcacaucaucggcaagcccugccccaagccgcaccgccugaaccacauggggaucugcuccugcggccucuacaagcaccccggggugcccgucaaguggaagcggugaggacuaguaauaaggaaacuguaugaaugucugugggcaggaagugaagagauccuucuguaaagguuuuuggaauuaugucugcugaauaauaaacuuuuuugaaauaauaaaucugguagaaaaaugagaucucaaaggcucuuuucagagccaccaaaaaaaaaaaaaaaaaaaaaaaaaaaaaaaaaaaaaaaaaaaaaaaaaaaaaaaaaaaaaaaaagaauu

SEQ ID NO: 27321 - RNA, 1778 nt, Artificial Sequence
  mRNA product Design b-4 (hSL-A64-N5) comprising derived and/or modified sequence from LASV(LASV254-NIG-2011;Clade II)__AIT17674__GPCmut4 (opt1)
aggagagucccgcagucggcguccagcggcucugcuuguucgugugugugucguugcaggccuuauucaagcuuaccaugggccagaucaucaccuucuuccaggaggugccccacgucaucgaggaggugaugaacaucgugcugaucgcccucagccugcuggccauccucaaggggaucuacaacgucgcgaccugcggccuguucgggcugguguccuuccuccugcugugcggccgcagcugcuccacgaccuacaaggggguguacgagcuccagacccuggagcuggacaugaccaaccucaacaugugcaugccgcugagcugcacgaagaacaacucccaccacuacaucauggucggcaacgagaccggccuggagcucacccugaccaacacgagcaucaucaaccacaaguucugcaaccuguccgacgcccacaagaagaaccucuacaaccacgcccugaugagcaucaucuccaccuuccaccugagcauccccaacuucaaccaguacgaggccauguccugcgacuucaacgggggcaagaucagcgugcaguacaaccucucccacagcuacgccguggacgcggccaaccacugcgggaccaucgccaacggcguccugcagaccuucaugcggauggccuggggcggguccuacaucgcgcuggacagcggcaaggggaacugggacugcaucaugacguccuaccaguaccucaucauccagaacaccaccugggaggaccacugccaguucagccgccccucccccaucggcuaccuggggcugcucagccagcggacccgcgacaucuacaucagccggcgccggcgcggcacguucaccuggacccuguccgacagcgagggcaacgagacccccgggggcuacugccugacgcgguggaugcucaucgaggccgagcugaagugcuucgggaacaccgccguggccaagugcaacgagaagcacgacgaggaguucugcgacaugcugcgccucuucgacuucugcaagcaggccauccggcgccugaagaccccggcgcaggccaacauccagcugaucaacaaggccgugaacgcccucaucaacgaccagcugaucaugaagaaccaccuccgggacaucaugggcauccccuacugcaacuacuccaaguacugcuaccugaaccacaccgucacggggaagaccagccugccccgcugcugccugguguccaacggcagcuaccucaacgagacccacuucuccgacgacaucgagcagcaggccgacaacaugaucaccgagcugcugcagaaggaguacauggaccggcagggcaagacgccgcucgggcugguggaccuguucgucuucagcaccuccuucuaccugaucagcaucuuccuccaccuggugaagauccccacccaccgccacgugaucggcaagcccugccccaagccgcaccggcugaaccacauggggaucugcuccugcggccucuacaagcaccccgggguccccgugaaguggaagcgcugaggacuaguaauaaggaaacuguaugaaugucugugggcaggaagugaagagauccuucuguaaagguuuuuggaauuaugucugcugaauaauaaacuuuuuugaaauaauaaaucugguagaaaaaugagaucucaaaggcucuuuucagagccaccaaaaaaaaaaaaaaaaaaaaaaaaaaaaaaaaaaaaaaaaaaaaaaaaaaaaaaaaaaaaaaaaagaauu

SEQ ID NO: 27322 - RNA, 1778 nt, Artificial Sequence
  mRNA product Design b-4 (hSL-A64-N5) comprising derived and/or modified sequence from LASV(Nig08-A19;Clade III)__ADU56618__GPCmut4 (opt1)
aggagagucccgcagucggcguccagcggcucugcuuguucgugugugugucguugcaggccuuauucaagcuuaccaugggccagaucgugaccuucuuccaggaggucccccacgugaucgaggaggugaugaacaucguccugaucgcccucagcauccuggccauccugaaggggcucuacaacaucgcgaccugcggccugaucgggcuggugacguuccuccugcuguccggccgcagcugcuccaugaccuacaaggggguguacgagcuccagacccuggagcugaacaugaacacccucaacaugugcaugccgcugagcugcacgaagaacaacucccaccacuacaucauggucggcaacgagaccggccuggagcucacccugaccaacacgagccugcuccaccacaaguucugcaaccuguccgacgcccacaagaagaaccuguacgaccacacccucaugagcaucaucuccaccuuccaccugagcauccccaacuucaaccaguacgaggccauguccugcgacuucaacgggggcaagaucaccgugcaguacaaccugagccacuccuacgccaucgacgccgcgaaccacugcgggacgguggccaacggcguccuccagaccuucaugcggauggccuggggcgggagcuacaucgcccuggacuccggccgcgggaagugggacugcaucaugaccagcuaccaguaccugaucauccagaacaccacgugggaggaccacugccaguucucccggcccagccccaucggcuaccucgggcugcugucccagcgcacccgggacaucuacaucagccgccggcgccggggcaccuucaccuggacgcucagcgacuccgagggcaacgagacccccgggggcuacugccugacccgcuggaugcugaucgaggcggagcucaagugcuucgggaacaccgccguggccaagugcaacgagaagcacgacgaggaguucugcgacaugcugcggcuguucgacuucugcaagcaggccauccgccggcucaaggccccggcgcagaugagcauccagcugaucaacaaggccgugaacgcccugaucaacgaccagcucaucaugaagaaccaccuccgcgacaucaugggcauccccuacugcaacuacuccaaguacugcuaccugaaccacacgagcaccgggcggaccucccugccccgcugcugccuggucagcaacggcuccuaccugaacgagacccacuucagcgacgacaucgagcagcaggccgacaacaugaucacggagaugcuccagaaggaguaccuggaccggcagggcaagaccccgcuggggcugguggaccucuucguguucuccaccagcuucuaccugaucuccaucuuccugcaccucgucaagauccccacccaccgccacaucgugggcaagcccugccccaagccgcaccggcugaaccacauggggaucugcagcugcggccuguacaagcagcccggggugcccguccgcuggaagcggugaggacuaguaauaaggaaacuguaugaaugucugugggcaggaagugaagagauccuucuguaaagguuuuuggaauuaugucugcugaauaauaaacuuuuuugaaauaauaaaucugguagaaaaaugagaucucaaaggcucuuuucagagccaccaaaaaaaaaaaaaaaaaaaaaaaaaaaaaaaaaaaaaaaaaaaaaaaaaaaaaaaaaaaaaaaaagaauu

SEQ ID NO: 27323 - RNA, 1781 nt, Artificial Sequence
  mRNA product Design b-4 (hSL-A64-N5) comprising derived and/or modified sequence from LASV(G1180-SLE-2010;Clade IV)__AIT17168__GPCmut4 (opt1)
aggagagucccgcagucggcguccagcggcucugcuuguucgugugugugucguugcaggccuuauucaagcuuaccaugggccagaucgugaccuucuuccaggaggucccccacgugaucgaggaggugaugaacaucguccugaucgcccucagcauccuggccgugcugaaggggcucuacaacuucgcgaccugcggccugguggggcugcucacguuccugcugcucugcggccgcuccugcaccgccagccgguacaagggggucuacgagcugcagacccuggagcucaacauggagacccugaacaugugcaugccgcuguccugcacgaagaacaacagccaccacuacaucauggugggcaacgagaccggccucgagcugacccugaccaacacguccaucaucaaccacaaguucugcaaccucagcgacgcccacaagaagaaccuguacgaccacgcccugauguccaucaucagcaccuuccaccucuccauccccaacuucaaccaguacgaggccaugagcugcgacuucaacgggggcaagaucuccgugcaguacaaccugagccacuccuacgcgggggacgccgccaaccacugcggcaccgucgccaacggggugcugcagaccuucaugcgcauggcguggggcggcagcuacaucgcccucgacuccgggcacggcagcugggacugcaucaugacguccuaccaguaccugaucauccagaacaccaccugggaggaccacugccaguucagccggcccucccccaucggguaccugggccuccugagccagcgcacccgggacaucuacaucagccgccggcgccggggcacguucaccuggacccuguccgacagcgaggggaaggacaccccgggcggguacugccucacgcgcuggaugcugaucgaggccgagcugaagugcuucggcaacaccgccguggccaagugcaacgagaagcacgacgaggaguucugcgacaugcuccggcuguucgacuucugcaagcaggcgauccagcgccugaaggcccccgcccagauguccauccagcucaucaacaaggccgucaacgcccugaucaacgaccagcugaucaugaagaaccaccuccgggacaucauggggauccccuacugcaacuacagcaaguacugcuaccugaaccacaccaccacgggcaagaccucccugcccaagugcugccucgugagcaacggcuccuaccugaacgagacccacuucagcgacgacaucgagcagcaggcggacaacaugaucaccgagaugcugcagaaggaguacauggagcgccaggggaagacgccgcucggccugguggaccuguucgucuucuccaccagcuucuaccugaucuccaucuuccuccaccuggugaagauccccacccaccggcacaucgugggcaagagcugccccaagccccaccgccugaaccacauggggaucugcuccugcgggcucuacaagcagccgggcguccccgugaaguggaagcggugaggacuaguaauaaggaaacuguaugaaugucugugggcaggaagugaagagauccuucuguaaagguuuuuggaauuaugucugcugaauaauaaacuuuuuugaaauaauaaaucugguagaaaaaugagaucucaaaggcucuuuucagagccaccaaaaaaaaaaaaaaaaaaaaaaaaaaaaaaaaaaaaaaaaaaaaaaaaaaaaaaaaaaaaaaaaagaauu

SEQ ID NO: 27324 - RNA, 1781 nt, Artificial Sequence
  mRNA product Design b-4 (hSL-A64-N5) comprising derived and/or modified sequence from LASV(G1442-SLE-2011;Clade IV)__AIT17180__GPCmut4 (opt1)
aggagagucccgcagucggcguccagcggcucugcuuguucgugugugugucguugcaggccuuauucaagcuuaccaugggccagaucgugaccuucuuccaggaggucccccacgugaucgaggaggugaugaacaucguccugaucgcccucagcauccuggccgugcugaaggggcucuacaacguggcgaccugcggccugaucgggcuggucacguuccuccugcugugcggccgcuccugcaccaccacccucuacaaggggguguacgagcugcagacgcuggagcucaacauggagacccugaacaugugcaugccgcugagcugcaccaagaacaacucccaccacuacauccgggugggcaacgagaccggccucgagcugacgcugaccaacaccagcaucaucaaccacaaguucugcaaccucuccgacgcccacaagaagaaccuguacgaccacgcccugaugagcaucaucuccaccuuccaccucagcauccccaacuucaaccaguacgaggccauguccugcgacuucaacgggggcaagaucagcguccaguacaaccugucccacagcuacgccggggacgcggccaaccacugcggcacgguggccaacggggugcugcagaccuucaugcgcauggccuggggcggcuccuacaucgcgcucgacagcgggcggggcaacugggacugcaucaugaccuccuaccaguaccugaucauccagaacaccacgugggacgaccacugccaguucagccgccccucccccaucggguaccugggccuccugagccagcggacccgcgacgucuacaucucccggcgccggcgcggcaccuucaccuggacgcugagcgacagcgaggggaaggacaccccgggcggguacugccucacccgguggaugcugaucgaggccgagcugaagugcuucggcaacaccgccguggccaagugcaacgagaagcacgacgaggaguucugcgacaugcuccgccuguucgacuucugcaagcaggccauccagcggcugaaggcgcccgcccagauguccauccagcucaucaacaaggccgugaacgcccugaucaacgaccagcugaucaugaagaaccaccuccgcgacaucauggggauccccuacugcaacuacagcaaguacugcuaccugaacaacacggccaccggcaagaccucccugcccaagugcugccucaucagcaacggcuccuaccugaacgagacccacuucagcgacgacaucgagcaggaggcggacaacaugaucacggagaugcugcagaaggaguacauggagcggcaggggaagaccccgcucggccuggucgaccuguucguguucuccaccagcuucuaccugaucuccaucuuccuccaccuggugaagauccccacccaccgccacaucgucggcaagagcugccccaagccccaccggcugaaccacauggggaucugcuccugcgggcucuacaagcagccgggcgugcccgugcgcuggaagcggugaggacuaguaauaaggaaacuguaugaaugucugugggcaggaagugaagagauccuucuguaaagguuuuuggaauuaugucugcugaauaauaaacuuuuuugaaauaauaaaucugguagaaaaaugagaucucaaaggcucuuuucagagccaccaaaaaaaaaaaaaaaaaaaaaaaaaaaaaaaaaaaaaaaaaaaaaaaaaaaaaaaaaaaaaaaaagaauu

SEQ ID NO: 27325 - RNA, 1781 nt, Artificial Sequence
  mRNA product Design b-4 (hSL-A64-N5) comprising derived and/or modified sequence from LASV(G3010-SLE-2013;Clade IV)__AIT17344__GPCmut4 (opt1)
aggagagucccgcagucggcguccagcggcucugcuuguucgugugugugucguugcaggccuuauucaagcuuaccaugggccagaucgugaccuucuuccaggaggucccccacgugaucgaggaggugaugaacaucguccugaucgcccucagcauccuggccgugcugaaggggcucuacaacuucgcgaccugcggccugguggggcuggucacguuccuccugcugugcggccgcuccugcaccaccagccucuacaaggggguguacgagcugcagacccuggagcucaacauggagacgcugaacaugugcaugccgcuguccugcaccaagaacaacagccaccacuacaucauggugggcaacgagaccggccucgagcugacccugacgaacaccuccaucaucaaccacaaguucugcaaccucagcgacgcccacaagaagaaccuguacaaccacgcccugauguccaucaucagcaccuuccaccucuccauccccaacuucaaccaguacgaggccaugagcugcgacuucaacgggggcaagaucuccguccaguacaaccugagccacuccuacgccggggacgcggccagccacugcggcaccguggccaacggggugcugcagacguucaugcggauggccuggggcggcuccuacaucgcgcucgacagcggguacggcaagugggacugcaucaugaccuccuaccaguaccugaucauccagaacaccaccugggaggaccacugccaguucagccgccccucccccaucggguaccugggccuccugagccagcggacgcgcgacaucuacaucagccggcgccggcgcggcaccuucaccuggacccuguccgacagcgaggggaaggacacgccgggcggguacugccucacccgguggaugcugaucgaggccgagcugaagugcuucggcaacaccgccgucgccaagugcaacgagaagcacgacgaggaguucugcgacaugcuccgccuguucgacuucugcaagcaggccauccagcggcugaagacccccgcgcagauguccauccagcucaucaacaaggccgugaacgcccugaucaacgaccagcugaucaugaagaaccaccuccgcgacaucauggggauccccuacugcaacuacagcaaguacugcuaccugaaccacacgaccaccggcaagaccucccugcccaagugcugccucgugagcaacggcuccuaccugaacgagacgcacuucagcgacgacaucgagcagcaggccgacaacaugaucaccgagaugcugcagaaggaguacauggagcggcaggggaagaccccgcucggccuggucgaccuguucguguucuccaccagcuucuaccugaucuccaucuuccuccaccuggugaagauccccacgcaccgccacaucgucggcaagagcugccccaagccccaccggcugaaccacauggggaucugcuccugcgggcucuacaagcagccgggcgugcccgugcgcuggaagcggugaggacuaguaauaaggaaacuguaugaaugucugugggcaggaagugaagagauccuucuguaaagguuuuuggaauuaugucugcugaauaauaaacuuuuuugaaauaauaaaucugguagaaaaaugagaucucaaaggcucuuuucagagccaccaaaaaaaaaaaaaaaaaaaaaaaaaaaaaaaaaaaaaaaaaaaaaaaaaaaaaaaaaaaaaaaaagaauu

SEQ ID NO: 27326 - RNA, 1781 nt, Artificial Sequence
  mRNA product Design b-4 (hSL-A64-N5) comprising derived and/or modified sequence from LASV(G502-SLE-2009;Clade IV)__AIT17126__GPCmut4 (opt1)
aggagagucccgcagucggcguccagcggcucugcuuguucgugugugugucguugcaggccuuauucaagcuuaccaugggccagaucgugaccuucuuccaggaggucccccacgugaucgaggaggugaugaacaucguccugaucgcccucagcauccuggccgugcugaaggggcucuacaacuucgcgaccugcggccugguggggcugcucacguuccugcugcucugcggccgcuccugcaccaccgggcuguacaagggcgucuacgagcugcagacccucgagcugaacauggagacgcugaacaugugcaugccgcucagcugcaccaagaacaacucccaccacuacaucauggugggcaacgagaccgggcuggagcugacccucacgaacaccagcaucaucaaccacaaguucugcaaccuguccgacgcccacaagaagaaccuguacgaccacgcccucaugagcaucaucuccaccuuccaccugagcauccccaacuucaaccaguacgaggccauguccugcgacuucaacggcgggaagaucagcgugcaguacaaccugucccacagcuacgccggcgacgcggccgaccacugcgggaccgucgccaacggcgugcuccagacguucaugcggauggccuggggcggguccuacaucgcgcuggacagcggccgcgggcggugggacugcaucaugaccuccuaccaguaccugaucauccagaacaccaccugggaggaccacugccaguucagccgccccucccccaucggcuaccucggccugcugagccagcggacgcgcgacaucuacaucucccggcgccggcgcgggaccuucaccuggacccucagcgacagcgagggcaaggacacgcccgggggcuacugccugacccgguggaugcugaucgaggccgagcucaagugcuucgggaacaccgccguggccaagugcaacgagaagcacgacgaggaguucugcgacaugcugcgccuguucgacuucugcaagcaggccauccagcggcucaaggcgccggcccagauguccauccagcugaucaacaaggccgucaacgcccugaucaacgaccagcucgugaugaagaaccaccuccgcgacaucaugggcauccccuacugcaacuacagccgguacugcuaccugaaccacaccacgaccggccgcaccucccugcccaagugcugccuggugagcaacggguccuaccugaacgagacccacuucagcgacgacaucgagcagcaggccgacaacaugaucacggagaugcuccagaaggaguacauggagcggcagggcaagaccccgcuggggcuggucgaccuguucguguucuccaccagcuucuaccucaucuccaucuuccugcaccuggugaagauccccacccaccgccacaucgucggcaagagcugccccaagccccaccggcucaaccacauggggaucugcuccugcggccuguacaagcagccgggcgugcccgugaaguggaagcgcugaggacuaguaauaaggaaacuguaugaaugucugugggcaggaagugaagagauccuucuguaaagguuuuuggaauuaugucugcugaauaauaaacuuuuuugaaauaauaaaucugguagaaaaaugagaucucaaaggcucuuuucagagccaccaaaaaaaaaaaaaaaaaaaaaaaaaaaaaaaaaaaaaaaaaaaaaaaaaaaaaaaaaaaaaaaaagaauu

SEQ ID NO: 27327 - RNA, 1781 nt, Artificial Sequence
  mRNA product Design b-4 (hSL-A64-N5) comprising derived and/or modified sequence from LASV(G733-SLE-2010;Clade IV)__AIT17154__GPCmut4 (opt1)
aggagagucccgcagucggcguccagcggcucugcuuguucgugugugugucguugcaggccuuauucaagcuuaccaugggccagaucgugaccuucuuccaggaggucccccacgugaucgaggaggugaugaacaucguccugaucgcccucagcauccuggccgugcugaaggggcucuacaacuucgcgaccugcggcaucguggggcuggucuccuuccugcuccugugcggccgcagcugcacgaccucccuguacaaggggguguacgagcuccagacccuggagcugaacauggagacccucaacaugugcaugccgcugagcugcacgaagaacaacucccaccacuacaucauggugggcaacgagaccggccuggagcucacccugaccaacacgagcaucaucaaccacaaguucugcaaccuguccgacgcccacaagaagaaccucuacgaccacgcccugaugagcaucaucuccaccuuccaccugagcauccccaacuucaaccaguacgaggccauguccugcgacuucaacgggggcaagaucagcguccaguacaaccucucccacagcuacgccggggacgcggccaaccacugcggcaccaucgccaacggggugcugcagaccuucaugcggauggccuggggcggcuccuacaucgcgcuggacagcgggcgcgaccggugggacugcaucaugacguccuaccaguaccucaucauccagaacaccaccugggaggaccacugccaguucagccgccccucccccaucggcuaccuggggcugcucagccagcggacccgcgacaucuacaucagccggcgccggcgcggcacguucaccuggacccuguccgacagcgagggcaaggacacccccgggggcuacugccugacgcgguggaugcucaucgaggccgagcugaagugcuucgggaacaccgccguggccaagugcaacgagaagcacgacgaggaguucugcgacaugcugcgccucuucgacuucugcaagcaggccauccagcggcugaaggcgccggcccagauguccauccagcugaucaacaaggccgucaacgcccucaucaacgaccagcugaucaugaagaaccaccuccgcgacaucaugggcauccccuacugcaacuacagcaaguacugcuaccugaaccacaccaccacggggaagaccucccugcccaagugcugccuggugagcaacggcuccuaccucaacgagacccacuucagcgacgacaucgagcagcaggccgacaacaugaucaccgagaugcugcagaaggaguacauggagcggcagggcaagacgccgcuggggcucguggaccuguucgucuucuccaccagcuucuaccugaucuccaucuuccugcaccucgugaagauccccacccaccgccacguggucggcaagagcugccccaagccccaccggcugaaccacauggggaucugcuccugcggccuguacgggcagccgggcgugcccgugaaguggaagcgcugaggacuaguaauaaggaaacuguaugaaugucugugggcaggaagugaagagauccuucuguaaagguuuuuggaauuaugucugcugaauaauaaacuuuuuugaaauaauaaaucugguagaaaaaugagaucucaaaggcucuuuucagagccaccaaaaaaaaaaaaaaaaaaaaaaaaaaaaaaaaaaaaaaaaaaaaaaaaaaaaaaaaaaaaaaaaagaauu

SEQ ID NO: 27328 - RNA, 1781 nt, Artificial Sequence
  mRNA product Design b-4 (hSL-A64-N5) comprising derived and/or modified sequence from MOPV/LASV reassortant(IGS-1;Clade IV)__AFY05576__GPCmut4 (opt1)
aggagagucccgcagucggcguccagcggcucugcuuguucgugugugugucguugcaggccuuauucaagcuuaccaugggccagaucgugaccuucuuccaggaggucccccacgugaucgaggaggugaugaacaucguccugaucgcccucagcgugcuggccgugcugaaggggcucuacaacuucgcgaccugcggccuggucgggcuggugacguuccuccugcugugcggccgcuccugcaccaccagccucuacaaggggguguacgagcugcagacccuggagcucaacauggagacgcugaacaugugcaugccgcuguccugcaccaagaacaacagccaccacuacaucauggucggcaacgagaccggccucgagcugacccugacgaacaccuccaucaucaaccacaaguucugcaaccucagcgacgcccacaagaagaaccuguacgaccacgcccugauguccaucaucagcaccuuccaccucuccauccccaacuucaaccaguacgaggccaugagcugcgacuucaacgggggcaagaucuccgugcaguacaaccugagccacuccuacgccggggacgcggccaaccacugcggcaccguggccaacgggguccugcagacguucaugcggauggccuggggcggcagcuacaucgcgcucgacuccgggcgcggcaacugggacugcaucaugaccagcuaccaguaccugaucauccagaacaccaccugggaggaccacugccaguucucccggcccagccccaucggguaccugggccuccugucccagcgcacgcgggacaucuacaucagccgccggcgccggggcaccuucaccuggacccugagcgacuccgagggggaggacacgccgggcggguacugccucacccgcuggaugcugaucgaggccgagcugaagugcuucggcaacaccgccguggccaagugcaacgagaagcacgacgaggaguucugcgacaugcuccggcuguucgacuucugcaagcaggccauccagcgccugaaggcgcccgcccagaugagcauccagcucaucaacaaggccgugaacgcccugaucaacgaccagcugaucaugaagaaccaccuccgggacaucauggggauccccuacugcaacuacuccaaguacugcuaccugaaccacaccacgaccggccgcaccagccugcccaagugcugccucgucuccaacggcagcuaccugaacgagacccacuucuccgacgacaucgagcagcaggccgacaacaugaucacggagaugcugcagaaggaguacauggagcggcaggggaagaccccgcucggccugguggaccuguucguguucagcaccuccuucuaccugaucagcaucuuccuccaccuggucaagauccccacccaccgccacaucguggggaaguccugccccaagccccaccggcugaaccacaugggcaucugcagcugcgggcucuacaagcagccgggcgugcccgucaaguggaagcgcugaggacuaguaauaaggaaacuguaugaaugucugugggcaggaagugaagagauccuucuguaaagguuuuuggaauuaugucugcugaauaauaaacuuuuuugaaauaauaaaucugguagaaaaaugagaucucaaaggcucuuuucagagccaccaaaaaaaaaaaaaaaaaaaaaaaaaaaaaaaaaaaaaaaaaaaaaaaaaaaaaaaaaaaaaaaaagaauu

SEQ ID NO: 27329 - RNA, 1781 nt, Artificial Sequence
  mRNA product Design b-4 (hSL-A64-N5) comprising derived and/or modified sequence from LASV(LM765-SLE-2012;Clade IV)__AIT17814__GPCmut4 (opt1)
aggagagucccgcagucggcguccagcggcucugcuuguucgugugugugucguugcaggccuuauucaagcuuaccaugggccagaucgugaccuucuuccaggaggucccccacgugaucgaggaggugaugaacaucguccugaucgcccucagcauccuggccgugcugaaggggcucuacaacuucgcgaccugcggccugguggggcuggucacguuccuccugcugugcggccgcuccugcaccaccagccucuacaaggggguguacgagcugcagacccuggagcucaacauggagacgcugaacaugugcaugccgcuguccugcaccaagaacaacagccaccacuacaucauggugggcaacgagaccggccucgagcugacccugacgaacaccuccaucaucgaccacaaguucugcaaccucagcgacgcccaccggaagaaccuguacgaccacgcccugauguccaucaucagcaccuuccaccucuccauccccaacuucaaccaguacgaggccaugagcugcgacuucaacgggggcaagaucuccguccaguacaaccugagccacuccuacgccaaggacgcggccgaccacugcgggaccguggccaacggcgugcugcagacguucaugcgcauggccuggggcgggagcuacaucgcgcucgacuccggccgggggcgcugggacugcaucaugaccagcuaccaguaccugaucauccagaacaccaccugggaggaccacugccaguucucccggcccagccccaucggcuaccuggggcuccugucccagcgcacgcgggacaucuacaucagccgccggcgccggggcaccuucaccuggacccugagcgacuccgagggcaaggacacgcccgggggcuacugccucacccgcuggaugcugaucgaggccgagcugaagugcuucgggaacaccgccgucgccaagugcaacgagaagcacgacgaggaguucugcgacaugcuccggcuguucgacuucugcaagcaggccauccagcgccugaaggcgccggcccagaugagcauccagcucaucaacaaggccgugaacgcccugaucaacgaccagcugaucaugaagaaccaccuccgggacaucaugggcauccccuacugcaacuacuccaaguacugcuaccugaaccacaccacgaccgggaagaccagccugcccaagugcugccucguguccaacggcagcuaccugaacgagacccacuucuccgacgacaucgagcagcaggccgacaacaugaucacggagaugcugcagaaggaguacauggagcgccagggcaagaccccgcucgggcuggucgaccuguucguguucagcaccuccuucuaccugaucagcaucuuccuccaccuggugaagauccccacccaccggcacaucgucggcaagcccugccccaagccgcaccgccugaaccacauggggaucugcuccugcggccucuacaagcagcccggggugcccgugaaguggaagcggugaggacuaguaauaaggaaacuguaugaaugucugugggcaggaagugaagagauccuucuguaaagguuuuuggaauuaugucugcugaauaauaaacuuuuuugaaauaauaaaucugguagaaaaaugagaucucaaaggcucuuuucagagccaccaaaaaaaaaaaaaaaaaaaaaaaaaaaaaaaaaaaaaaaaaaaaaaaaaaaaaaaaaaaaaaaaagaauu

SEQ ID NO: 27330 - RNA, 1781 nt, Artificial Sequence
  mRNA product Design b-4 (hSL-A64-N5) comprising derived and/or modified sequence from LASV(LM776-SLE-2012;Clade IV)__AIT17824__GPCmut4 (opt1)
aggagagucccgcagucggcguccagcggcucugcuuguucgugugugugucguugcaggccuuauucaagcuuaccaugggccagaucgugaccuucuuccaggaggucccccacgugaucgaggaggugaugaacaucguccugaucgcccucagcauccuggccgugcugaaggggcucuacaacuucgcgaccugcggccugguggggcuggucacguuccuccugcugugcggccgcuccugcaccaccagcguguacaaggggguguacgagcuccagacccuggagcugaacauggagacgcucaacaugugcaugccgcuguccugcaccaagaacaacagccaccacuacaucauggucggcaacgagaccggccuggagcucacccugacgaacaccuccaucaucaaccacaaguucugcaaccugagcgacgcccacaagaagaaccucuacgaccacgcccugauguccaucaucagcaccuuccaccuguccauccccaacuucaaccaguacgaggccaugagcugcgacuucaacgggggcaagaucuccgugcaguacaaccucagccacuccuacgccggggacgcggccaaccacugcggcaccguggccaacgggguccugcagacguucaugcggauggccuggggcggcagcuacaucgcgcuggacuccgggcacggcaagugggacugcaucaugaccagcuaccaguaccucaucauccagaacaccaccugggaggaccacugccaguucucccgccccagccccaucggguaccugggccugcucucccagcggacgcgcgacaucuacaucagccggcgccggcgcggcaccuucaccuggacccugagcgacuccgaggggaaggacacgccgggcggguacugccugacccgguggaugcucaucgaggccgagcugaagugcuucggcaacaccgccguggccaagugcaacgagaagcacgacgaggaguucugcgacaugcugcgccucuucgacuucugcaagcaggccauccagcggcugaaggcgcccgcccagaugagcauccagcugaucaacaaggccgugaacgcccucaucaacgaccagcugaucaugaagaaccaccuccgcgacaucauggggauccccuacugcaacuacuccaaguacugcuaccugaaccacaccacgaccggcaagaccagccugcccaagugcugccuggucuccaacggcagcuaccucaacgagacccacuucuccgacgacaucgagcagcaggccgacaacaugaucacggagaugcugcagaaggaguacauggagcggcaggggaagaccccgcugggccucguggaccuguucguguucagcaccuccuucuaccugaucagcaucuuccugcaccucgucaagauccccacccaccgccacaucguggggaaguccugccccaagccccaccggcugaaccacaugggcaucugcagcugcgggcuguacaagcagccgggcgugcccguccgcuggaagcggugaggacuaguaauaaggaaacuguaugaaugucugugggcaggaagugaagagauccuucuguaaagguuuuuggaauuaugucugcugaauaauaaacuuuuuugaaauaauaaaucugguagaaaaaugagaucucaaaggcucuuuucagagccaccaaaaaaaaaaaaaaaaaaaaaaaaaaaaaaaaaaaaaaaaaaaaaaaaaaaaaaaaaaaaaaaaagaauu

SEQ ID NO: 27331 - RNA, 1781 nt, Artificial Sequence
  mRNA product Design b-4 (hSL-A64-N5) comprising derived and/or modified sequence from LASV(Mad39;Clade IV)__ANH09722__GPCmut4 (opt1)
aggagagucccgcagucggcguccagcggcucugcuuguucgugugugugucguugcaggccuuauucaagcuuaccaugggccagaucgugaccuucuuccaggaggucccccacgugaucgaggaggugaugaacaucguccugaucgcccucagcauccuggccgugcugaaggggcucuacaacguggcgaccugcggccugaucgggcuggucacguuccuccugcugugcggccgcuccugcaccaccacccucuacaaggggguguacgagcugcaggcccuggagcucaacauggagacgcugaacaugugcaugccgcugagcugcaccaagaacaacucccaccacuacauccgggugggcaacgagaccggccucgagcugacccugacgaacaccagccucaucaaccacaaguucugcaaccuguccgacgcccacaagaagaaccuguacgaccacgcccucaugagcaucaucuccaccuuccaccugagcauccccaacuucaaccaguacgaggccauguccugcgacuucaacgacgggaagaucagcguccaguacaaccugucccacaccuacgcgggcgacacggccaaccacugcgggaccguggccaacggcgugcuccagaccuucaugcgcauggccuggggcgggagcuacaucgcgcuggacuccggccgcgggggcugggacugcaucaugaccagcuaccaguaccugaucauccagaacacgaccugggaggaccacugccaguucucccggcccagccccaucggguaccucggccugcugucccagcggacccgcgacaucuacaucagccggcgccggcgcggcaccuucacguggacccucuccgacagcgaggggaaggacaccccgggcggguacugccugacccgguggaugcugaucgaggccgagcucaagugcuucggcaacacggccgucgccaagugcaacgagaagcacgacgaggaguucugcgacaugcugcgccuguucgacuucugcaagcaggccauccagcggcucaaggcgcccgcccagaugagcauccagcugaucaacaaggccgugaacgcccugaucaacgaccagcucaucaugaagaaccaccuccgcgacaucauggggauccccuacugcaacuacuccaaguacugcuaccugaaccacaccgugaccggcaagaccagccugcccaagugcugccuggucuccaacggcagcuaccugaacgagacgcacuucuccgacgacaucgagcagcaggccgacaacaugaucaccgagaugcuccagaaggaguacauggagcggcaggggaagaccccgcugggccugguggaccuguucguguucagcaccuccuucuaccucaucagcaucuuccugcaccuggucaagauccccacgcaccgccacgugguggggaagcccugccccaagccgcaccggcucaaccacaugggcaucugcuccugcggguucuacaagcagcccggcguccccgugcgcuggaagcggugaggacuaguaauaaggaaacuguaugaaugucugugggcaggaagugaagagauccuucuguaaagguuuuuggaauuaugucugcugaauaauaaacuuuuuugaaauaauaaaucugguagaaaaaugagaucucaaaggcucuuuucagagccaccaaaaaaaaaaaaaaaaaaaaaaaaaaaaaaaaaaaaaaaaaaaaaaaaaaaaaaaaaaaaaaaaagaauu

SEQ ID NO: 27332 - RNA, 1781 nt, Artificial Sequence
  mRNA product Design b-4 (hSL-A64-N5) comprising derived and/or modified sequence from LASV(Z0947-SLE-2011;Clade IV)__AIT17840__GPCmut4 (opt1)
aggagagucccgcagucggcguccagcggcucugcuuguucgugugugugucguugcaggccuuauucaagcuuaccaugggccagaucgugaccuucuuccaggaggucccccacgugaucgaggaggugaugaacaucguccugaucgcccucagcauccuggccgugcugaaggggcucuacaacuucgcgaccugcggccugguggggcuggucacguuccuccugcugugcggccgcuccugcaccaucagccucuacaaggggguguacgagcugcagacccuggagcucaacauggagacccugaacaugugcaugccgcuguccugcacgaagaacaacagccaccacuacaucauggugggcaacgagaccggccucgagcugacccugaccaacacguccaucaucaaccacaaguucugcaaccucagcgacgcccacaagaagaaccuguacgaccacgcccugauguccaucaucagcaccuuccaccucuccauccccaacuucaaccaguacgaggccaugagcugcgacuucaacgggggcaagaucuccguccaguacaaccugagccacuccuacgccggggacgcggccaaccacugcggcaccguggccaacggggugcugcagaccuucaugcggauggccuggggcggcagcuacaucgcgcucgacuccgggcgcgaccggugggacugcaucaugacgagcuaccaguaccugaucauccagaacaccaccugggaggaccacugccaguucucccgccccagccccaucggcuaccuggggcuccugucccagcggacccgcgacaucuacaucagccggcgccggcgcggcacguucaccuggacccugagcgacuccgagggcaaggacacccccgggggcuacugccucacgcgguggaugcugaucgaggccgagcugaagugcuucgggaacaccgccgucgccaagugcaacgagaagcacgacgaggaguucugcgacaugcuccgccuguucgacuucugcaagcaggccauccagcggcugaaggcgccggcccagaugagcauccagcucaucaacaaggccgugaacgcccugaucaacgaccagcugaucaugaagaaccaccuccgcgacaucaugggcauccccuacugcaacuacuccaaguacugcuaccugaaccacaccaccacggggaagaccagccugcccaagugcugccucguguccaacggcagcuaccugaacgagacccacuucuccgacgacaucgagcagcaggccgacaacaugaucaccgagaugcugcagaaggaguacauggagcggcagggcaagacgccgcucgggcuggucgaccuguucguguucagcaccuccuucuaccugaucagcaucuuccuccaccuggugaagauccccacccaccgccacaucgucggcaagcccugccccaagccgcaccggcugaaccacauggggaucugcuccugcggccucuacaagcagcccggggugcccgugaaguggaagcgcugaggacuaguaauaaggaaacuguaugaaugucugugggcaggaagugaagagauccuucuguaaagguuuuuggaauuaugucugcugaauaauaaacuuuuuugaaauaauaaaucugguagaaaaaugagaucucaaaggcucuuuucagagccaccaaaaaaaaaaaaaaaaaaaaaaaaaaaaaaaaaaaaaaaaaaaaaaaaaaaaaaaaaaaaaaaaagaauu

SEQ ID NO: 27333 - RNA, 1781 nt, Artificial Sequence
  mRNA product Design b-4 (hSL-A64-N5) comprising derived and/or modified sequence from LASV(Josiah;Clade IV)__NP_694870__GPCmut4 (opt4)
aggagagucccgcagucggcguccagcggcucugcuuguucgugugugugucguugcaggccuuauucaagcuuaccaugggccagaucgugaccuucuuccaggaggugccccacgugaucgaggaggugaugaacaucgugcugaucgcccugagcgugcuggccgugcugaagggccuguacaacuucgccaccugcggccuggugggccuggugaccuuccugcugcugugcggcagaagcugcaccaccagccuguacaagggcguguacgagcugcagacccuggagcugaacauggagacccugaacaugugcaugccccugagcugcaccaagaacaacagccaccacuacaucauggugggcaacgagaccggccuggagcugacccugaccaacaccagcaucaucaaccacaaguucugcaaccugagcgacgcccacaagaagaaccuguacgaccacgcccugaugagcaucaucagcaccuuccaccugagcauccccaacuucaaccaguacgaggccaugagcugcgacuucaacggcggcaagaucagcgugcaguacaaccugagccacagcuacgccggcgacgccgccaaccacugcggcaccguggccaacggcgugcugcagaccuucaugagaauggccuggggcggcagcuacaucgcccuggacagcggcagaggcaacugggacugcaucaugaccagcuaccaguaccugaucauccagaacaccaccugggaggaccacugccaguucagcagacccagccccaucggcuaccugggccugcugagccagagaaccagagacaucuacaucagcagaagaagaagaggcaccuucaccuggacccugagcgacagcgagggcaaggacacccccggcggcuacugccugaccagauggaugcugaucgaggccgagcugaagugcuucggcaacaccgccguggccaagugcaacgagaagcacgacgaggaguucugcgacaugcugagacuguucgacuucugcaagcaggccauccagagacugaaggcccccgcccagaugagcauccagcugaucaacaaggccgugaacgcccugaucaacgaccagcugaucaugaagaaccaccugagagacaucaugggcauccccuacugcaacuacagcaaguacugcuaccugaaccacaccaccaccggcagaaccagccugcccaagugcugccuggugagcaacggcagcuaccugaacgagacccacuucagcgacgacaucgagcagcaggccgacaacaugaucaccgagaugcugcagaaggaguacauggagagacagggcaagaccccccugggccugguggaccuguucguguucagcaccagcuucuaccugaucagcaucuuccugcaccuggugaagauccccacccacagacacaucgugggcaagagcugccccaagccccacagacugaaccacaugggcaucugcagcugcggccuguacaagcagcccggcgugcccgugaaguggaagagaugaggacuaguaauaaggaaacuguaugaaugucugugggcaggaagugaagagauccuucuguaaagguuuuuggaauuaugucugcugaauaauaaacuuuuuugaaauaauaaaucugguagaaaaaugagaucucaaaggcucuuuucagagccaccaaaaaaaaaaaaaaaaaaaaaaaaaaaaaaaaaaaaaaaaaaaaaaaaaaaaaaaaaaaaaaaaagaauu

SEQ ID NO: 27334 - RNA, 1778 nt, Artificial Sequence
  mRNA product Design b-4 (hSL-A64-N5) comprising derived and/or modified sequence from LASV(LP;Clade I)__AAF86701__GPCmut4 (opt4)
aggagagucccgcagucggcguccagcggcucugcuuguucgugugugugucguugcaggccuuauucaagcuuaccaugggccagaucaucaccuucuuccaggaggugccccacgugaucgaggaggugaugaacaucgugcugaucgcccugagccugcuggccauccugaagggccuguacaacaucgccaccugcggcaucaucggccugguggccuuccuguuccugugcggcaagagcugcagccugacccugaagggcggcuacgagcugcagacccuggagcugaacauggagacccugaacaugugcaugccccugagcugcaccaagaacagcagccaccacuacaucagagugggcaacgagaccggccuggagcugacccugaccaacaccagcaucaucaaccacaaguucugcaaccugagcgacgcccacaagaagaaccuguacgaccacgcccugaugagcaucaucagcaccuuccaccugagcauccccaacuucaaccaguacgaggccaugagcugcgacuucaacggcggcaagaucagcgugcaguacaaccugagccacagcuacgccggcgacgccgccgagcacugcggcaccguggccaacggcgugcugcagaccuucaugagaauggccuggggcggcagauacaucgcccuggacagcggcaagggcaacugggacugcaucaugaccagcuaccaguaccugaucauccagaacaccaccugggaggaccacugccaguucagcagacccagccccaucggcuaccugggccugcugagccagagaaccagagacaucuacaucagcagaagaagaagaggcaccuucaccuggacccugagcgacagcgagggcaacgagacccccggcggcuacugccugaccagauggaugcugaucgaggccgagcugaagugcuucggcaacaccgccguggccaagugcaacgagaagcacgacgaggaguucugcgacaugcugagacuguucgacuucugcaagcaggccaucagaagacugaaggcccccgcccagaugagcauccagcugaucaacaaggccgugaacgcccugaucaacgaccagcugaucaugaagaaccaccugagagacaucaugggcauccccuacugcaacuacagcaaguacugcuaccugaaccacaccagcagcggcagaaccagccugcccaagugcugccugaucagcaacggcagcuaccugaacgagacccaguucagcgacgacaucgagcagcaggccgacaacaugaucaccgagaugcugcagaaggaguacaucgagagacagggcaagaccccccugggccugguggacaucuucaucuucagcaccagcuucuaccugaucagcaucuuccugcaccugaucaagauccccacccacagacacaucgugggcaagcccugccccaagccccacagacugaaccacaugggcgugugcagcugcggccuguacaagcaccccggcgugcccaccaaguggaagagaugaggacuaguaauaaggaaacuguaugaaugucugugggcaggaagugaagagauccuucuguaaagguuuuuggaauuaugucugcugaauaauaaacuuuuuugaaauaauaaaucugguagaaaaaugagaucucaaaggcucuuuucagagccaccaaaaaaaaaaaaaaaaaaaaaaaaaaaaaaaaaaaaaaaaaaaaaaaaaaaaaaaaaaaaaaaaagaauu

SEQ ID NO: 27335 - RNA, 1778 nt, Artificial Sequence
  mRNA product Design b-4 (hSL-A64-N5) comprising derived and/or modified sequence from LASV(803213;Clade II)__AAF86703__GPCmut4 (opt4)
aggagagucccgcagucggcguccagcggcucugcuuguucgugugugugucguugcaggccuuauucaagcuuaccaugggccagaucaucaccuucuuccaggaggugccccacgugaucgaggaggugaugaacaucgugcugaucgcccugagccugcuggccauccugaagggcaucuacaacguggccaccugcggccuguucggccugaucagcuuccugcugcugugcggcagaagcugcagcgugaccuacaagggcguguacgagcugcagacccuggagcugaacauggccaaccugaacaugugcaugccccugagcugcaccaagaacaacagccaccacuacaucauggugggcaacgagaccggccuggagcugacccugaccaacaccagcaucaucaaccacaaguucugcaaccugagcgacgcccacaagaagaaccuguacgaccacgcccugaugagcaucaucagcaccuuccaccugagcauccccaacuucaaccaguacgaggccaugagcugcgacuucaacggcggcaagaucagcgugcaguacaaccugagccacagcuucgccguggacgccgccaaccacugcggcaccaucgccaacggcgugcugcagaccuucaugagaauggccuggggcggcagcuacaucgcccuggacagcggcaagggcaacugggacugcaucaugaccagcuaccaguaccugaucauccagaacaccaccugggaggaccacugccaguucagcagacccagccccaucggcuaccugggccugcugagccagagaaccagagacaucuacaucagcagaagaagaagaggcaccuucaccuggacccugagcgacagcgagggcaacgaggcccccggcggcuacugccugaccagauggaugcugaucgaggccgagcugaagugcuucggcaacaccgccguggccaagugcaacgagaagcacgacgaggaguucugcgacaugcugagacuguucgacuucugcaagcaggccaucaagagacugaagacccccgcccagaugagcauccagcugaucaacaaggccgugaacgcccugaucaacgaccagcugaucaugaagaaccaccugagagacaucaugggcauccccuacugcaacuacagcagauacugcuaccugaaccacaccgugaccggcaagaccagccugcccagaugcugccuggugagcaacggcagcuaccugaacgagacccacuucagcgacgacaucgagcagcaggccgacaacaugaucaccgagaugcugcagaaggaguacauggacagacagggcaagaccccccugggccugguggaccuguucguguucagcaccagcuucuaccugaucagcaucuuccugcaccuggugaagauccccacccacagacacaucgugggcaagcccugccccaagccccacagacugaaccacaugggcaucugcagcugcggccuguacaagcaccccggcgugcccgugaaguggaagagaugaggacuaguaauaaggaaacuguaugaaugucugugggcaggaagugaagagauccuucuguaaagguuuuuggaauuaugucugcugaauaauaaacuuuuuugaaauaauaaaucugguagaaaaaugagaucucaaaggcucuuuucagagccaccaaaaaaaaaaaaaaaaaaaaaaaaaaaaaaaaaaaaaaaaaaaaaaaaaaaaaaaaaaaaaaaaagaauu

SEQ ID NO: 27336 - RNA, 1778 nt, Artificial Sequence
  mRNA product Design b-4 (hSL-A64-N5) comprising derived and/or modified sequence from LASV(GA391;Clade III)__CAA36645__GPCmut4 (opt4)
aggagagucccgcagucggcguccagcggcucugcuuguucgugugugugucguugcaggccuuauucaagcuuaccaugggccagaucgugaccuucuuccaggaggugccccacgugaucgaggaggugaugaacaucgugcugaucgcccugagcauccuggccauccugaagggccuguacaacguggccaccugcggccugaucggccuggugaccuuccugcugcugagcggcagaagcugcagccugaucuacaagggcaccuacgagcugcagacccuggagcugaacauggagacccugaacaugugcaugccccugagcugcaccaagaacaacagccaccacuacaucagagugggcaacgagaccggccuggagcugacccugaccaacaccagcauccugaaccacaaguucugcaaccugagcgacgcccacaagagaaaccuguacgaccacagccugaugagcaucaucagcaccuuccaccugagcauccccaacuucaaccaguacgaggccaugagcugcgacuucaacggcggcaagaucaccgugcaguacaaccugagccacagcuucgccguggacgccgccggccacugcggcacccuggccaacggcgugcugcagaccuucaugagaauggccuggggcggcagcuacaucgcccuggacagcggcagaggcaacugggacugcaucaugaccagcuaccaguaccugaucauccagaacaccaccugggacgaccacugccaguucagcagacccagccccaucggcuaccugggccugcugagccagagaaccagagacaucuacaucagcagaagaagaagaggcaccuucaccuggacccugagcgacagcgagggcaacgagacccccggcggcuacugccugaccagauggaugcugaucgaggccgagcugaagugcuucggcaacaccgccguggccaagugcaacgagaagcacgacgaggaguucugcgacaugcugagacuguucgacuucugcaagcaggccaucagaagacugaagacccccgcccagaugagcauccagcugaucaacaaggccgugaacgcccugaucaacgaccagcugaucaugaagaaccaccugagagacaucaugggcauccccuacugcaacuacagcagauacugcuaccugaaccacaccagcaccggcaagaccagccugcccagaugcugccugaucagcaacggcagcuaccugaacgagaccaaguucagcgacgacaucgagcagcaggccgacaacaugaucaccgagaugcugcagaaggaguacaucgacagacagggcaagaccccccugggccugguggaccuguucguguucagcaccagcuucuaccugaucagcaucuuccugcaccuggugaagauccccacccacagacacaucgugggcaagcccugccccaagccccacagacugaaccacaugggcaucugcagcugcggccuguacaagcagcccggcgugcccgugagauggaagagaugaggacuaguaauaaggaaacuguaugaaugucugugggcaggaagugaagagauccuucuguaaagguuuuuggaauuaugucugcugaauaauaaacuuuuuugaaauaauaaaucugguagaaaaaugagaucucaaaggcucuuuucagagccaccaaaaaaaaaaaaaaaaaaaaaaaaaaaaaaaaaaaaaaaaaaaaaaaaaaaaaaaaaaaaaaaaagaauu

SEQ ID NO: 27337 - RNA, 1781 nt, Artificial Sequence
  mRNA product Design b-4 (hSL-A64-N5) comprising derived and/or modified sequence from LASV(AV;Clade V)__CCA30314__GPCmut4 (opt4)
aggagagucccgcagucggcguccagcggcucugcuuguucgugugugugucguugcaggccuuauucaagcuuaccaugggccagaucgugaccuucuuccaggaggugccccacgugaucgaggaggugaugaacaucgugcugaucgcccugagcauccuggccgugcugaagggccuguacaacaucgccaccugcggccugaucggccugaucaccuuccugcugcugugcggcagaagcugcagcagcaaccuguacaagggcguguacgagcugcagagccuggaccugaacauggagacccugaacaugugcaugccccugagcugcaccaagaacaacagccaccacuacaucagagugggcaacgacaccggccuggagcugacccugaccaacaccagcauccugaaccacaaguucugcaaccugagcgacgcccacaagaaggaccuguacgaccacgcccugaugagcaucaucagcaccuuccaccugagcauccccaacuucaaccaguacgaggccaugagcugcgacuucaacggcggcaagaucagcgugcaguacaaccugagccacagcuacgccaucgacgccgccaaccacugcggcaccguggccaacggcauccugcagaccuucaugagaauggccuggggcggcagcuacaucgcccuggacagcggcagaggcaacugggacugcaucaugaccagcuaccaguaccugaucauccagaacaccaccugggagaaccacugccaguucagcagacccagccccaucggcuaccugggccugcugagccagagaaccagagacaucuacaucagcagaagaagaagaggcaccuucaccuggacccugagcgacagcgagggcaacgccacccccggcggcuacugccugaccagauggaugcugaucgaggccgagcugaagugcuucggcaacaccgccguggccaagugcaacgagaagcacgacgaggaguucugcgacaugcugagacuguucgacuucugcaagcaggccaucagcagacugaagagccccgcccagaugagcauccagcugaucaacaaggccgugaacgcccugaucaacgaccagcugaucaugaagaaccaccugagagacaucaugggcauccccuacugcaacuacagcaaguacugcuaccugaaccacaccaucaccggcaagaccagccugcccaagugcugccuggugagcaacggcagcuaccugaacgagacccacuucagcgacgacaucgagcagcaggccgacaacaugaucaccgagaugcugcagaaggaguacauggagagacagggcaagaccccccugggccugguggaccuguucguguucagcaccagcuucuaccugaucagcaucuuccugagacuggugaagauccccacccacagacacaucgugggcaagcccugccccaagccccacagacugaaccacaugggcaucugcagcugcggccuguacaagcagcccggcgugcccgugagauggaagagaugaggacuaguaauaaggaaacuguaugaaugucugugggcaggaagugaagagauccuucuguaaagguuuuuggaauuaugucugcugaauaauaaacuuuuuugaaauaauaaaucugguagaaaaaugagaucucaaaggcucuuuucagagccaccaaaaaaaaaaaaaaaaaaaaaaaaaaaaaaaaaaaaaaaaaaaaaaaaaaaaaaaaaaaaaaaaagaauu

SEQ ID NO: 27338 - RNA, 1778 nt, Artificial Sequence
  mRNA product Design b-4 (hSL-A64-N5) comprising derived and/or modified sequence from LASV(Togo/2016/7082;Clade VI)__AMR44577__GPCmut4 (opt4)
aggagagucccgcagucggcguccagcggcucugcuuguucgugugugugucguugcaggccuuauucaagcuuaccaugggccagaucaucaccuucuuccaggaggugccccacgugaucgaggaggugaugaacaucgugcugaucgcccugagccugcuggccauccugaagggcguguacaacguggccaccugcggcaucaucggccuggugaccuuccuguuccugugcggcagaagcugcagccugaucuacaagggcagcuacgagcugcagacccuggagcugaacauggagacccugaacaugugcaugccccugagcugcaccaagaacagcagccaccacuacaucagagugggcaacgagaccggccuggagcugacccugaccaacaccagcaucaucaaccacaaguucugcaaccugagcgacgcccacaagagaaaccuguacgaccacgcccugaugagcauccugagcaccuuccaccugagcauccccaacuucaaccaguacgaggccaugagcugcgacuucaacggcggcaagaucagcgugcaguacaaccugagccacgccuacgccguggacgccgccgagcacugcggcaccguggccaacggcgugcugcagaccuucaugagaauggccuggggcggcagcuacaucgcccuggacagcggcagaggcaacugggacugcaucaugaccagcuaccaguaccugaucauccagaacaccaccugggaggaccacugccaguucagcagacccagccccaucggcuaccugggccugcugagccagagaaccagagacaucuacaucagcagaagaagaagaggcaccuucaccuggacccugagcgacagcgagggcaacgagacccccggcggcuacugccugaccagauggaugcugaucgaggccgagcugaagugcuucggcaacaccgccguggccaagugcaacgagaagcacgacgaggaguucugcgacaugcugagacuguucgacuucugcaagcaggccauccagagacugaagagccccgcccagaugagcauccagcugaucaacaaggccgugaacgcccugaucaacgaccagcugaucaugaagaaccaccugagagacaugaugggcauccccuacugcaacuacagcaaguacugcuaccugaaccacaccagcagcggcagaaccagccugcccaagugcugccuggugagcaacggcagcuaccugaacgagacccacuucagcgacgacaucgagcagcaggccgacaacaugaucaccgagaugcugcagaaggaguacaucgacagacagggcaagaccccccugggccugguggaccuguucguguucagcaccagcuucuaccugaucagcaucuuccugcaccugaucaagauccccacccacagacacaucgugggcaagcccugccccaagccccacagacugaaccacaugggcaucugcagcugcggccuguacaagcagcccggcgugcccaccagauggaagagaugaggacuaguaauaaggaaacuguaugaaugucugugggcaggaagugaagagauccuucuguaaagguuuuuggaauuaugucugcugaauaauaaacuuuuuugaaauaauaaaucugguagaaaaaugagaucucaaaggcucuuuucagagccaccaaaaaaaaaaaaaaaaaaaaaaaaaaaaaaaaaaaaaaaaaaaaaaaaaaaaaaaaaaaaaaaaagaauu

SEQ ID NO: 27339 - RNA, 1778 nt, Artificial Sequence
  mRNA product Design b-4 (hSL-A64-N5) comprising derived and/or modified sequence from LASV(KAK-428;Clade n.d. (VII))__ANH09740__GPCmut4 (opt4)
aggagagucccgcagucggcguccagcggcucugcuuguucgugugugugucguugcaggccuuauucaagcuuaccaugggccagaucgugaccuucuuccaggaggugccccacgugaucgaggaggugaugaacaucgugcugaucgcccugagccugcuggccauccugaagggccuguacaacuucgccaccugcggcgugaucggccugaucaccuuccugcugcugugcggcagaagcugcagcgccaccuacaagggccaguacgagcugcagacccuggagcugaacauggagagccugaacaugugcaugccccugagcugcaccaagaacaacagccaccacuacaucagagccggcaacaacaccggccuggagcugacccugaccaacaccagcaucaucagccacaaguucugcaaccugagcgacgcccacaagaagaaccuguacgaccacacccugaugagcaucaucaccaccuuccaccugagcauccccaacuucaaccaguacgaggccaugagcugcgacuucaacggcggcaagaucagcauccaguacaaccugagccacagcuacgccggcgacgccgcccagcacugcggcaccguggccaacggcgugcugcagaccuucaugagaauggccuggggcggcagcuaccuggcccuggacagcggcagaagaggcugggacugcaucaucagcagcuaccaguaccugaucauccagaacaccaccugggacgaccacugccaguucagcagacccagccccaucggcuaccugggcuucgugagccagaagaccagagacaucuacaucagcagaagaagaagaggcaccuucaccuggacccugagcgacagcgagggccacgacaugcccggcggcuacugccugaccagauggaugcugaucgaggccgaccugaagugcuucggcaacaccgccguggccaagugcaacgagaagcacgacgaggaguucugcgacauguggagacuguucgacuucugcaagcaggccauccagagacugaaggcccccgcccagaugaacauccagcugaucaacaaggccgugaacgcccugaucaacgaccagcugaugaugaagaaccaccugagagacaucaugggcauccccuacugcaacuacagcaaguucugcuaccugaacaacaccaccaccggcagaaccagccugcccagaugcugccugaucagcaacggcagcuaccugaacgagacccacuucagcgacgacaucgagcagcaggccgacaacaugaucaccgagaugcugcagaaggaguacauggacagacagggcaagaccccccugggccugguggaccuguucguguucagcaccagcuucuaccugaucaccaucuuccugcaccuggugaagauccccacccacagacacaucgugggcaagcccugccccaagccccacagacugaaccacaugggcaucugcagcugcggccuguacaagcagcccggcgugcccgugagauggaagagaugaggacuaguaauaaggaaacuguaugaaugucugugggcaggaagugaagagauccuucuguaaagguuuuuggaauuaugucugcugaauaauaaacuuuuuugaaauaauaaaucugguagaaaaaugagaucucaaaggcucuuuucagagccaccaaaaaaaaaaaaaaaaaaaaaaaaaaaaaaaaaaaaaaaaaaaaaaaaaaaaaaaaaaaaaaaaagaauu

SEQ ID NO: 27340 - RNA, 1778 nt, Artificial Sequence; identical to SEQ ID NO: 27334
  mRNA product Design b-4 (hSL-A64-N5) comprising derived and/or modified sequence from LASV(Pinneo-NIG-1969;Clade I)__AIT17836__GPCmut4 (opt4)

SEQ ID NO: 27341 - RNA, 1778 nt, Artificial Sequence
  mRNA product Design b-4 (hSL-A64-N5) comprising derived and/or modified sequence from LASV(ISTH0009-NIG-2011;Clade II)__AIT17404__GPCmut4 (opt4)
aggagagucccgcagucggcguccagcggcucugcuuguucgugugugugucguugcaggccuuauucaagcuuaccaugggccagaucaucaccuucuuccaggaggugccccacgugaucgaggaggugaugaacaucgugcugaucgcccugagccugcuggccauccugaagggcaucuacaacguggccaccugcggccuguucggccuggugagcuuccugcugcugugcggcagaagcugcagcaccaccuacaagggcguguacgagcugcagacccuggagcuggacauggccagccugaacaugugcaugccccugagcugcaccaagaacaacagccaccacuacaucauggugggcaacgagaccggccuggagcugacccugaccaacaccagcaucaucaaccacaaguucugcaaccugagcgacgcccacaagaagaaccuguacgaccacgcccugaugagcaucaucagcaccuuccaccugagcauccccaacuucaaccaguacgaggccaugagcugcgacuucaacggcggcaagaucagcgugcaguacaaccugagccacgccuacgccguggacgccgccaaccacugcggcaccaucgccaacggcgugcugcagaccuucaugagaauggccuggggcggcagcuacaucgcccuggacagcggcaagggcagcugggacugcaucaugaccagcuaccaguaccugaucauccagaacaccaccugggaggaccacugccaguucagcagacccagccccaucggcuaccugggccugcugagccagagaaccagagacaucuacaucagcagaagaagaagaggcaccuucaccuggacccugagcgacagcgagggcaacgagacccccggcggcuacugccugaccagauggaugcugaucgaggccgagcugaagugcuucggcaacaccgccguggccaagugcaacgagaagcacgacgaggaguucugcgacaugcugagacuguucgacuucugcaagcaggccaucagaagacugaagacccccgcccagaugagcauccagcugaucaacaaggccgugaacgcccugaucaacgaccagcugaucaugaagaaccaccugagagacaucaugggcauccccuacugcaacuacagcaaguacugcuaccugaaccacaccgugaccggcaagaccagccugcccagaugcugccuggugagcaacggcagcuaccugaacgagacccacuucagcgacgacaucgagcagcaggccgacaacaugaucaccgagcugcugcagaaggaguacauggacagacagggcaagaccccccugggccugguggaccuguucguguucagcaccagcuucuaccugaucagcaucuuccugcaccugaucaagauccccacccacagacacaucaccggcaagcccugccccaagccccacagacugaaccacaugggcaucugcagcugcggccuguacaagcaccccggcgugcccgugaaguggaagagaugaggacuaguaauaaggaaacuguaugaaugucugugggcaggaagugaagagauccuucuguaaagguuuuuggaauuaugucugcugaauaauaaacuuuuuugaaauaauaaaucugguagaaaaaugagaucucaaaggcucuuuucagagccaccaaaaaaaaaaaaaaaaaaaaaaaaaaaaaaaaaaaaaaaaaaaaaaaaaaaaaaaaaaaaaaaaagaauu

SEQ ID NO: 27342 - RNA, 1778 nt, Artificial Sequence
  mRNA product Design b-4 (hSL-A64-N5) comprising derived and/or modified sequence from LASV(ISTH2010-NIG-2012;Clade II)__AIT17482__GPCmut4 (opt4)
aggagagucccgcagucggcguccagcggcucugcuuguucgugugugugucguugcaggccuuauucaagcuuaccaugggccagaucaucaccuucuuccaggaggugccccacgugaucgaggaggugaugaacaucgugcugaucgcccugagccugcuggccauccugaagggcaucuacaacguggccaccugcggccuguucggccuggugagcuuccugcugcugugcggcagaagcugcagcaccaccuacaagggcguguacgagcugcagacccuggagcuggacauggccagccugaacaugugcaugccccugagcugcaccaagaacaacagccaccacuacaucauggugggcaacgagaccggccuggagcugacccugaccaacaccagcaucaucaaccacaaguucugcaaccugagcgacgcccacaagaagaaccuguacgaccacgcccugaugagcaucaucagcaccuuccaccugagcauccccaacuucaaccaguacgaggccaugagcugcgacuucaacggcggcaagaucagcgugcaguacaaccugagccacgccuacgccguggacgccgccaaccacugcggcaccaucgccaacggcgugcugcagaccuucaugagaauggccuggggcggcagcuacaucgcccuggacagcggcaagggcagcugggacugcaucaugaccagcuaccaguaccugaucauccagaacaucaccugggaggaccacugccaguucagcagacccagccccaucggcuaccugggccugcugagccagagaaccagagacaucuacaucagcagaagaagaagaggcaccuucaccuggacccugagcgacagcgagggcaacgagacccccggcggcuacugccugaccagauggaugcugaucgaggccgagcugaagugcuucggcaacaccgccguggccaagugcaacgagaagcacgacgaggaguucugcgacaugcugagacuguucgacuucugcaagcaggccaucagaagacugaagacccccgcccagaugagcauccagcugaucaacaaggccgugaacgcccugaucaacgaccagcugaucaugaagaaccaccugagagacaucaugggcauccccuacugcaacuacagcaaguacugcuaccugaaccacaccgugaccggcaagaccagccugcccagaugcugccuggugagcaacggcagcuaccugaacgagacccacuucagcgacgacaucgagcagcaggccgacaacaugaucaccgagcugcugcagaaggaguacaucgacagacagggcaagaccccccugggccugguggaccuguucguguucagcaccagcuucuaccugaucagcaucuuccugcaccuggugaagauccccacccacagacacguggugggcaagcccugccccaagccccacagacugaaccacaugggcaucugcagcugcggccuguacaagcaccccggcgugcccgugaaguggaagagaugaggacuaguaauaaggaaacuguaugaaugucugugggcaggaagugaagagauccuucuguaaagguuuuuggaauuaugucugcugaauaauaaacuuuuuugaaauaauaaaucugguagaaaaaugagaucucaaaggcucuuuucagagccaccaaaaaaaaaaaaaaaaaaaaaaaaaaaaaaaaaaaaaaaaaaaaaaaaaaaaaaaaaaaaaaaaagaauu

SEQ ID NO: 27343 - RNA, 1778 nt, Artificial Sequence
  mRNA product Design b-4 (hSL-A64-N5) comprising derived and/or modified sequence from LASV(Lassa virus/H.sapiens-wt/NGA/2015/ISTH_0543;Clade II)__AVO03639__GPCmut4 (opt4)
aggagagucccgcagucggcguccagcggcucugcuuguucgugugugugucguugcaggccuuauucaagcuuaccaugggccagaucaucaccuucuuccaggaggugccccacgugaucgaggaggugaugaacaucgugcugaucgcccugagccugcuggccauccugaagggcaucuacaacguggccaccugcggccuguucggccuggugagcuuccugcugcugugcggcagaagcugcagcaccaccuacaagggcguguacgagcugcagacccuggagcuggacauggccaaccugaacaugugcaugccccugagcugcaccaagaacaacagccaccacuacaucauggugggcaacgagaccggccuggagcugacccugaccaacaccagcaucaucaaccacaaguucugcaaccugagcgacgcccacaagaagaaccuguacgaccacgcccugaugagcaucaucagcaccuuccaccugagcauccccaacuucaaccaguacgaggccaugagcugcgacuucaacggcggcaagaucagcgugcaguacaaccugagccacaccuacgccguggacgccgccaaccacugcggcaccaucgccaacggcgugcugcagaccuucaugagaauggccuggggcggcagcuacaucgcccuggacagcggcaagggcagcugggacugcaucaugaccagcuaccaguaccuggugauccagaacaccaccugggaggaccacugccaguucagcagacccagccccaucggcuaccugggccugcugagccagagaaccagagacaucuacaucagcagaagaagaagaggcaccuucaccuggacccugagcgacagcgagggcaacgagacccccggcggcuacugccugaccagauggaugcugaucgaggccgagcugaagugcuucggcaacaccgccguggccaagugcaacgagaagcacgacgaggaguucugcgacaugcugagacuguucgacuucugcaagcaggccaucagaagacugaagacccccgcccagaugagcauccagcugaucaacaaggccgugaacgcccugaucaacgaccagcugaucaugaagaaccaccugagagacaucaugggcauccccuacugcaacuacagcaaguacugcuaccugaaccacaccgugaccggcaagaccagccugcccagaugcugccuggugagcaacggcagcuaccugaacgagacccacuucagcgacgacaucgagcagcaggccgacaacaugaucaccgagcugcugcagaaggaguacaucgacagacagggcaagaccccccugggccugguggaccuguucguguucagcaccagcuucuaccugaucagcaucuuccugcaccuggugaagauccccacccacagacacaucaccggcaagcccugccccaagccccacagacugaaccacaugggcaucugcagcugcggccuguacaagcaccccggcgugcccgugaaguggaagagaugaggacuaguaauaaggaaacuguaugaaugucugugggcaggaagugaagagauccuucuguaaagguuuuuggaauuaugucugcugaauaauaaacuuuuuugaaauaauaaaucugguagaaaaaugagaucucaaaggcucuuuucagagccaccaaaaaaaaaaaaaaaaaaaaaaaaaaaaaaaaaaaaaaaaaaaaaaaaaaaaaaaaaaaaaaaaagaauu

SEQ ID NO: 27344 - RNA, 1778 nt, Artificial Sequence
  mRNA product Design b-4 (hSL-A64-N5) comprising derived and/or modified sequence from LASV(Lassa virus/H.sapiens-wt/NGA/2016/ISTH_0009;Clade II)__AVO03571__GPCmut4 (opt4)
aggagagucccgcagucggcguccagcggcucugcuuguucgugugugugucguugcaggccuuauucaagcuuaccaugggccagaucaucaccuucuuccaggaggugccccacgugaucgaggaggugaugaacaucgugcugaucgcccugagccugcuggccauccugaagggcaucuacaacguggccaccugcggccugcugggccuggugagcuuccugcugcugugcggcagaagcugcagcaccaccuacaagggcguguacgagcugcagacccuggagcuggacauggccagccugaacaugugcaugccccugagcugcaccaagaacaacagccaccacuacaucauggugggcaacgagaccggccuggagcugacccugaccaacaccagcaucaucaaccacaaguucugcaaccugagcgacgcccacaagaagaaccuguacgaccacgcccugaugagcaucaucagcaccuuccaccugagcauccccaacuucaaccaguacgaggccaugagcugcgacuucaacggcggcagaaucagcgugcaguacaaccugagccacagcuacgccguggacgccgccaaccacugcggcaccaucgccaacggcgugcugcagaccuucaugagaauggccuggggcggcagcuacaucgcccuggacagcggcaagggcagcugggacugcaucaugaccagcuaccaguaccugaucauccagaacaccaccugggaggaccacugccaguucagcagacccagccccaucggcuaccugggccugcugagccagagaaccagagacaucuacaucagcagaagaagaagaggcaccuucaccuggacccugagcgacagcgagggcaacgagacccccggcggcuacugccugaccagauggaugcugaucgaggccgagcugaagugcuucggcaacaccgccguggccaagugcaacgagaagcacgacgaggaguucugcgacaugcugagacuguucgacuucugcaagcaggccaucagaagacugaagacccccgcccagaugagcauccagcugaucaacaaggccgugaacgcccugaucaacgaccagcugaucaugaagaaccaccugagagacaucaugggcauccccuacugcaacuacagcaaguacugcuaccugaaccacaccgugaccggcaagaccagccugcccagaugcugccuggugagcaacggcagcuaccugaacgagacccacuucagcgacgacaucgagcagcaggccgacaacaugaucaccgagcugcugcagaaggaguacaucgacagacagggcaagaccccccugggccugguggaccuguucguguucagcaccagcuucuaccugaucagcaucuuccugcaccuggugaagauccccacccacagacacaucaccggcaagcccugccccaagccccacagacugaaccacaugggcaucugcagcugcggccuguacaaccaccccggcgugcccgugaaguggaagagaugaggacuaguaauaaggaaacuguaugaaugucugugggcaggaagugaagagauccuucuguaaagguuuuuggaauuaugucugcugaauaauaaacuuuuuugaaauaauaaaucugguagaaaaaugagaucucaaaggcucuuuucagagccaccaaaaaaaaaaaaaaaaaaaaaaaaaaaaaaaaaaaaaaaaaaaaaaaaaaaaaaaaaaaaaaaaagaauu

SEQ ID NO: 27345 - RNA, 1778 nt, Artificial Sequence
  mRNA product Design b-4 (hSL-A64-N5) comprising derived and/or modified sequence from LASV(Lassa virus/H.sapiens-wt/NGA/2016/ISTH_0017;Clade II)__AVO03567__GPCmut4 (opt4)
aggagagucccgcagucggcguccagcggcucugcuuguucgugugugugucguugcaggccuuauucaagcuuaccaugggccagaucaucaccuucuuccaggaggugccccacgugaucgaggaggugaugaacaucgugcugaucgcccugagccugcuggccauccugaagggcaucuacaacguggccaccugcggccuguucggccuggugagcuuccugcugcugugcggcagaagcugcagcaccaccuacaagggcguguacgagcugcagacccuggagcuggacauggccagccugaacaugugcaugccccugagcugcaccaagaacaacagccaccacuacaucauggugggcaacgagaccggccuggagcugacccugaccaacaccagcaucaucaaccacaaguucugcaaccugagcgacgcccacaagaagaaccuguacgaccacgcccugaugagcaucaucagcaccuuccaccugagcauccccaacuucaaccaguacgaggccaugagcugcgacuucaacggcggcaagaucagcgugcaguacaaccugagccacaccuacgccaucgacgccgccaaccacugcggcaccaucgccaacggcgugcugcagaccuucaugagaauggccuggggcggcagcuacaucgcccuggacagcggcaagggcagcugggacugcaucaugaccagcuaccaguaccugaucauccagaacaccaccugggaggaccacugccaguucagcagacccagccccaucggcuaccugggccugcugagccagagaaccagagacaucuacaucagcagaagaagaagaggcaccuucaccuggacccugagcgacagcgagggcaacgagacccccggcggcuacugccugaccagauggaugcugaucgaggccgagcugaagugcuucggcaacaccgccguggccaagugcaacgagaagcacgacgaggaguucugcgacaugcugagacuguucgacuucugcaagcaggccaucagaagacugaagacccccgcccagaugagcauccagcugaucaacaaggccgugaacgcccugaucaacgaccagcugaucaugaagaaccaccugagagacaucaugggcauccccuacugcaacuacagcaaguacugcuaccugaaccacaccgugaccggcaagaccagccugcccagaugcugccuggugagcaacggcagcuaccugaacgagacccacuucagcgacgacaucgagcagcaggccgacaacaugaucaccgagcugcugcagaaggaguacauggacagacagggcaagaccccccugggccugguggaccuguucguguucagcaccagcuucuaccugaucagcaucuuccugcaccuggugagaauccccacccacagacacgugaucggcaagcccugccccaagccccacagacugaaccacaugggcaucugcagcugcggccuguacaagcaccccggcgugcccgugaaguggaagagaugaggacuaguaauaaggaaacuguaugaaugucugugggcaggaagugaagagauccuucuguaaagguuuuuggaauuaugucugcugaauaauaaacuuuuuugaaauaauaaaucugguagaaaaaugagaucucaaaggcucuuuucagagccaccaaaaaaaaaaaaaaaaaaaaaaaaaaaaaaaaaaaaaaaaaaaaaaaaaaaaaaaaaaaaaaaaagaauu

SEQ ID NO: 27346 - RNA, 1778 nt, Artificial Sequence
  mRNA product Design b-4 (hSL-A64-N5) comprising derived and/or modified sequence from LASV(Lassa virus/H.sapiens-wt/NGA/2018/ISTH_0959;Clade II)__AVV65099__GPCmut4 (opt4)
aggagagucccgcagucggcguccagcggcucugcuuguucgugugugugucguugcaggccuuauucaagcuuaccaugggccagaucaucaccuucuuccaggaggugccccacgugaucgaggaggugaugaacaucgugcugaucgcccugagccugcuggccauccugaagggcaucuacaacguggugaccugcggccuguucggccuggugagcuuccugcugcugugcggcagaagcugcagcaccaccuacaagggcguguacgagcugcagacccuggagcuggacauggccagccugaacaugugcaugccccugagcugcaccaagaacaacagccaccacuacaucauggugggcaacgagaccggccuggagcugacccugaccaacaccagcaucaucaaccacaaguucugcaaccugagcgacgcccacaagaagaaccuguacgaccacgcccugaugagcaucaucagcaccuuccaccugagcauccccaacuucaaccaguacgaggccaugagcugcgacuucaacggcggcaagaucagcgugcaguacaaccugagccacgccuacgccaucgacgccgccaaccacugcggcaccaucgccaacggcgugcugcagaccuucaugagaauggccuggggcggcagcuacaucgcccuggacagcggcaagggcagcugggacugcaucaugaccagcuaccaguaccugaucauccagaacaccaccugggaggaccacugccaguucagcagacccagccccaucggcuaccugggccugcugagccagagaaccagagacaucuacaucagcagaagaagaagaggcaccuucaccuggacccugagcgacagcgagggcaacgagacccccggcggcuacugccugaccagauggaugcugaucgaggccgagcugaagugcuucggcaacaccgccguggccaagugcaacgagaagcacgacgaggaguucugcgacaugcugagacuguucgacuucugcaagcaggccaucagaagacugaagacccccgcccagaugagcauccagcugaucaacaaggccgugaacgcccugaucaacgaccagcugaucaugaagaaccaccugagagacaucaugggcauccccuacugcaacuacagcaaguacugcuaccugaaccacaccgugaccggcaagaccagccugcccagaugcugccuggugagcaacggcagcuaccugaacgagacccacuucagcgacgacaucgagcagcaggccgacaacaugaucaccgagcugcugcagaaggaguacaucgacagacagggcaagaccccccugggccugguggaccuguucguguucagcaccagcuucuaccugaucagcaucuuccugcaccuggugaagauccccacccacagacacgugaucggcaagcccugccccaagccccacagacugaaccacaugggcaucugcagcugcggccuguacaagcaccccggcgugcccgugaaguggaagagaugaggacuaguaauaaggaaacuguaugaaugucugugggcaggaagugaagagauccuucuguaaagguuuuuggaauuaugucugcugaauaauaaacuuuuuugaaauaauaaaucugguagaaaaaugagaucucaaaggcucuuuucagagccaccaaaaaaaaaaaaaaaaaaaaaaaaaaaaaaaaaaaaaaaaaaaaaaaaaaaaaaaaaaaaaaaaagaauu

SEQ ID NO: 27347 - RNA, 1778 nt, Artificial Sequence
  mRNA product Design b-4 (hSL-A64-N5) comprising derived and/or modified sequence from LASV(LASV003-NIG-2008;Clade II)__AIT17580__GPCmut4 (opt4)
aggagagucccgcagucggcguccagcggcucugcuuguucgugugugugucguugcaggccuuauucaagcuuaccaugggccagaucaucaccuucuuccaggaggugccccacgugaucgaggaggugaugaacaucgugcugaucgcccugagccugcuggccauccugaagggcaucuacaacguggccaccugcggccuguucggccuggugagcuuccugcugcugugcggcagaagcugcagcaccaccuacaagggcguguacgagcugcagacccuggagcuggacauggccagccugaacaugugcaugccccugagcugcaccaagaacaacagccaccacuacaucauggugggcaacgagaccggccuggagcugacccugaccaacaccagcaucaucaaccacaaguucugcaaccugagcgacgcccacaagaagaaccuguacgaccacgcccugaugagcaucaucagcaccuuccaccugagcauccccaacuucaaccaguacgaggccaugagcugcgacuucaacggcggcaagaucagcgugcaguacaaccugagccacaccuacgccguggacgccgccaaccacugcggcaccaucgccaacggcgugcugcagaccuucaugagaauggccuggggcggcagcuacaucgcccuggacagcggcaagggcagcugggacugcaucaugaccagcuaccaguaccugaucauccagaacaccaccugggaggaccacugccaguucagcagacccagccccaucggcuaccugggccugcugagccagagaaccagagacaucuacaucagcagaagaagaagaggcaccuucaccuggacccugagcgacagcgagagcaacgagacccccggcggcuacugccugaccagauggaugcugaucgaggccgagcugaagugcuucggcaacaccgccguggccaagugcaacgagaagcacgacgaggaguucugcgacaugcugagacuguucgacuucugcaagcaggccaucagaagacugaaggcccccgcccagaugagcauccagcugaucaacaaggccgugaacgcccugaucaacgaccagcugaucaugaagaaccaccugagagacaucaugggcauccccuacugcaacuacagcaaguacugcuaccugaaccacaccgugaccggcagaaccagccugcccagaugcugccuggugagcaacggcagcuaccugaacgagacccacuucagcgacgacaucgagcagcaggccgacaacaugaucaccgagcugcugcagaaggaguacauggacagacagggcaagaccccccugggccugguggaccuguucguguucagcaccagcuucuaccugaucagcaucuuccugcaccuggugaagauccccacccacagacacgugaucggcaagcccugccccaagccccacagacugaaccacaugggcaucugcagcugcggccuguacaagcaccccggcgugcccgugaaguggaagagaugaggacuaguaauaaggaaacuguaugaaugucugugggcaggaagugaagagauccuucuguaaagguuuuuggaauuaugucugcugaauaauaaacuuuuuugaaauaauaaaucugguagaaaaaugagaucucaaaggcucuuuucagagccaccaaaaaaaaaaaaaaaaaaaaaaaaaaaaaaaaaaaaaaaaaaaaaaaaaaaaaaaaaaaaaaaaagaauu

SEQ ID NO: 27348 - RNA, 1778 nt, Artificial Sequence
  mRNA product Design b-4 (hSL-A64-N5) comprising derived and/or modified sequence from LASV(LASV035-NIG-2009;Clade II)__AIT17588__GPCmut4 (opt4)
aggagagucccgcagucggcguccagcggcucugcuuguucgugugugugucguugcaggccuuauucaagcuuaccaugggccagaucaucaccuucuuccaggaggugccccacgugaucgaggaggugaugaacaucgugcugaucgcccugagccugcuggccauccugaagggcaucuacaacguggccaccugcggccuguucggccuggugagcuuccugcugcugugcggcagaagcugcagcaccaccuacaagggcguguacgagcugcagacccuggagcuggacauggccagccugaacaugugcaugccccugagcugcaccaagaacaacagccaccacuacaucauggugggcaacgagaccggccuggagcugacccugaccaacaccagcaucaucaaccacaaguucugcaaccugagcgacgcccacaagaagaaccuguacgaccacgcccugaugagcaucaucagcaccuuccaccugagcauccccaacuucaaccaguacgaggccaugagcugcgacuucaacggcggcaagaucagcgugcaguacaaccugagccacgccuacgccguggacgccgccaaccacugcggcaccaucgccaacggcgugcugcagaccuucaugagaauggccuggggcggcagcuacaucgcccuggacagcggcaagggcagcugggacugcaucaugaccagcuaccaguaccugaucauccagaacaccaccugggaggaccacugccaguucagcagacccagccccaucggcuaccugggccugcugagccagagaaccagagacaucuacaucagcagaagaagaagaggcaccuucaccuggacccugagcgacagcgagggcaacgagacccccggcggcuacugccugaccagauggaugcugaucgaggccgagcugaagugcuucggcaacaccgccguggccaagugcaacgagaagcacgacgaggaguucugcgacaugcugagacuguucgacuucugcaagcaggccaucagaagacugaaggcccccgcccagaugagcauccagcugaucaacaaggccgugaacgcccugaucaacgaccagcugaucaugaagaaccaccugagagacaucaugggcauccccuacugcaacuacagcaaguacugcuaccugaaccacaccgugaccggcaagaccagccugcccagaugcugccuggugagcaacggcagcuaccugaacgagacccacuucagcgacgacaucgagcagcaggccgacaacaugaucaccgagcugcugcagaaggaguacaucgacagacagggcaagaccccccugggccugguggaccuguucguguucagcaccagcuucuaccugaucagcaucuuccugcaccuggugaagauccccacccacagacacgugaucggcaagcccugccccaagccccacagacugaaccacaugggcaucugcagcugcggccuguacaagcaccccggcgugcccgugaaguggaagagaugaggacuaguaauaaggaaacuguaugaaugucugugggcaggaagugaagagauccuucuguaaagguuuuuggaauuaugucugcugaauaauaaacuuuuuugaaauaauaaaucugguagaaaaaugagaucucaaaggcucuuuucagagccaccaaaaaaaaaaaaaaaaaaaaaaaaaaaaaaaaaaaaaaaaaaaaaaaaaaaaaaaaaaaaaaaaagaauu

SEQ ID NO: 27349 - RNA, 1778 nt, Artificial Sequence
  mRNA product Design b-4 (hSL-A64-N5) comprising derived and/or modified sequence from LASV(LASV1000-NIG-2009;Clade II)__AIT17782__GPCmut4 (opt4)
aggagagucccgcagucggcguccagcggcucugcuuguucgugugugugucguugcaggccuuauucaagcuuaccaugggccagaucaucaccuucuuccaggaggugccccacgugaucgaggaggugaugaacaucgugcugaucgcccugagccugcuggccauccugaagggcaucuacaacguggccaccugcggccuguucggccuggugagcuuccugcugcugugcggcagaagcugcagcaccaccuacaagggcguguacgagcugcagacccuggagcuggacauggccagccugaacaugugcaugccccugagcugcaccaagaacaacagccaccacuacaucauggugggcaacgagaccggccuggagcugacccugaccaacaccagcaucaucaaccacaaguucugcaaccugagcgacgcccacaagaagaaccuguacgaccacgcccugaugagcaucaucagcaccuuccaccugagcauccccaacuucaaccaguacgaggccaugagcugcgacuucaacggcggcaagaucagcgugcaguacaaccugagccacaccuacgccguggacgccgccaaccacugcggcaccaucgccaacggcgugcugcagaccuucaugagaauggccuggggcggcagcuacaucgcccuggacagcggcaagggcagcugggacugcaucaugaccagcuaccaguaccugaucauccagaacaccaccugggaggaccacugccaguucagcagacccagccccaucggcuaccugggccugcugagccagagaaccagagacaucuacaucagcagaagaagaagaggcaccuucaccuggacccugagcgacagcgagggcaacgagacccccggcggcuacugccugaccagauggaugcugaucgaggccgagcugaagugcuucggcaacaccgccguggccaagugcaacgagaagcacgacgaggaguucugcgacaugcugagacuguucgacuucugcaagcaggccaucaagagacugaagacccccgcccagaugagcauccagcugaucaacaaggccgugaacgcccugaucaacgaccagcugaucaugaagaaccaccugagagacaucaugggcauccccuacugcaacuacagcaaguacugcuaccugaaccacaccgugaccggcaagaccagccugcccagaugcugccuggugagcaacggcagcuaccugaacgagacccacuucagcgacgacaucgagcagcaggccgacaacaugaucaccgagcugcugcagaaggaguacaucgacagacagggcaagaccccccugggccugguggaccuguucguguucagcaccagcuucuaccugaucagcaucuuccugcaccuggugaagauccccacccacagacacguggugggcaagcccugccccaagccccacagacugaaccacaugggcaucugcagcugcggccuguacaagcaccccggcgugcccgugaaguggaagagaugaggacuaguaauaaggaaacuguaugaaugucugugggcaggaagugaagagauccuucuguaaagguuuuuggaauuaugucugcugaauaauaaacuuuuuugaaauaauaaaucugguagaaaaaugagaucucaaaggcucuuuucagagccaccaaaaaaaaaaaaaaaaaaaaaaaaaaaaaaaaaaaaaaaaaaaaaaaaaaaaaaaaaaaaaaaaagaauu

SEQ ID NO: 27350 - RNA, 1778 nt, Artificial Sequence
  mRNA product Design b-4 (hSL-A64-N5) comprising derived and/or modified sequence from LASV(LASV221-NIG-2010;Clade II)__AIT17624__GPCmut4 (opt4)
aggagagucccgcagucggcguccagcggcucugcuuguucgugugugugucguugcaggccuuauucaagcuuaccaugggccagaucaucaccuucuuccaggaggugccccacgugaucgaggaggugaugaacaucgugcugaucgcccugagccugcuggccauccugaagggcaucuacaacguggccaccugcggccuguucggccuggugagcuuccugcugcugugcggcagaagcugcagcaccaccuacaagggcguguacgagcugcagacccuggagcuggacauggccagccugaacaugugcaugccccugagcugcaccaagaacaacagccaccacuacaucauggugggcaacgagaccggccuggagcugacccugaccaacaccagcaucaucaaccacaaguucugcaaccugagcgacgcccacaagaagaaccuguacgaccacgcccugaugagcaucaucagcaccuuccaccugagcauccccaacuucaaccaguacgaggccaugagcugcgacuucaacggcggcaagaucagcgugcaguacaaccugagccacaccuacgccaucgacgccgccaaccacugcggcaccaucgccaacggcgugcugcagaccuucaugagaauggccuggggcggcagcuacaucgcccuggacagcggcaagggcagcugggacugcaucaugaccagcuaccaguaccugaucauccagaacaccaccugggaggaccacugccaguucagcagacccagccccaucggcuaccugggccugcugagccagagaaccagagacaucuacaucagcagaagaagaagaggcaccuucaccuggacccugagcgacagcgagggcaacgagacccccggcggcuacugccugaccagauggaugcugaucgaggccgagcugaagugcuucggcaacaccgccguggccaagugcaacgagaagcacgacgaggaguucugcgacaugcugagacuguucgacuucugcaagcaggccaucagaagacugaagacccccgcccagaugagcauccagcugaucaacaaggccgugaacgcccugaucaacgaccagcugaucaugaagaaccaccugagagacaucaugggcauccccuacugcaacuacagcaaguacugcuaccugaaccacaccgugaccggcaagaccagccugcccagaugcugccuggugagcaacggcagcuaccugaacgagacccacuucagcgacgacaucgagcagcaggccgacaacaugaucaccgagaugcugcagaaggaguacauggacagacagggcaagaccccccugggccugguggaccuguucguguucagcaccagcuucuaccugaucagcaucuuccugcaccuggugaagauccccacccacagacacgugaucggcaagcccugccccaagccccacagacugaaccacaugggcaucugcagcugcggccuguacaagcaccccggcgugcccgugaaguggaagagaugaggacuaguaauaaggaaacuguaugaaugucugugggcaggaagugaagagauccuucuguaaagguuuuuggaauuaugucugcugaauaauaaacuuuuuugaaauaauaaaucugguagaaaaaugagaucucaaaggcucuuuucagagccaccaaaaaaaaaaaaaaaaaaaaaaaaaaaaaaaaaaaaaaaaaaaaaaaaaaaaaaaaaaaaaaaaagaauu

SEQ ID NO: 27351 - RNA, 1778 nt, Artificial Sequence
  mRNA product Design b-4 (hSL-A64-N5) comprising derived and/or modified sequence from LASV(LASV237-NIG-2010;Clade II)__AIT17638__GPCmut4 (opt4)
aggagagucccgcagucggcguccagcggcucugcuuguucgugugugugucguugcaggccuuauucaagcuuaccaugggccagaucaucaccuucuuccaggaggugccccacgugaucgaggaggugaugaacaucgugcugaucgcccugagccugcuggccauccugaagggcaucuacaacguggccaccugcggccuguucggccuggugagcuuccugcugcugugcggcagaagcugcagcaccaccuacaagggcguguacgagcugcagacccuggagcuggacauggccagccugaacaugugcaugccccugagcugcaccaagaacaacagccaccacuacaucauggugggcaacgagaccggccuggagcugacccugaccaacaccagcaucaucaaccacaaguucugcaaccugagcgacgcccacaagaaggaccuguacgaccacgcccugaugagcaucaucagcaccuuccaccugagcauccccaacuucaaccaguacgaggccaugagcugcgacuucaacggcggcaagaucagcgugcaguacaaccugagccacaccuacgccguggacgccgccaaccacugcggcaccaucgccaacggcgugcugcagaccuucaugagaauggccuggggcggcagcuacaucgcccuggacagcggcaagggcagcugggacugcaucaugaccagcuaccaguaccugaucauccagaacaccaccugggaggaccacugccaguucagcagacccagccccaucggcuaccugggccugcugagccagagaaccagagacaucuacaucagcagaagaagaagaggcaccuucaccuggacccugagcgacagcgagggcaacgagacccccggcggcuacugccugaccagauggaugcugaucgaggccgagcugaagugcuucggcaacaccgccguggccaagugcaacgagaagcacgacgaggaguucugcgacaugcugagacuguucgacuucugcaagcaggccaucagaagacugaagacccccgcccagaugagcauccagcugaucaacaaggccgugaacgcccugaucaacgaccagcugaucaugaagaaccaccugagagacaucaugggcauccccuacugcaacuacagcaaguacugcuaccugaaccacaccgugaccggcaagaccagccugcccagaugcugccuggugagcaacggcagcuaccugaacgagacccacuucagcgacgacaucgagcagcaggccgacaacaugaucaccgagcugcugcagaaggaguacauggacagacagggcaagaccccccugggccugguggaccuguucguguucagcaccagcuucuaccugaucagcaucuuccugcaccugaucaagauccccacccacagacacaucaccggcaagcccugccccaagccccacagacugaaccacaugggcaucugcagcugcggccuguacaagcaccccggcgugcccgugaaguggaagagaugaggacuaguaauaaggaaacuguaugaaugucugugggcaggaagugaagagauccuucuguaaagguuuuuggaauuaugucugcugaauaauaaacuuuuuugaaauaauaaaucugguagaaaaaugagaucucaaaggcucuuuucagagccaccaaaaaaaaaaaaaaaaaaaaaaaaaaaaaaaaaaaaaaaaaaaaaaaaaaaaaaaaaaaaaaaaagaauu

SEQ ID NO: 27352 - RNA, 1778 nt, Artificial Sequence
  mRNA product Design b-4 (hSL-A64-N5) comprising derived and/or modified sequence from LASV(LASV253-NIG-2011;Clade II)__AIT17670__GPCmut4 (opt4)
aggagagucccgcagucggcguccagcggcucugcuuguucgugugugugucguugcaggccuuauucaagcuuaccaugggccagaucaucaccuucuuccaggaggugccccacgugaucgaggaggugaugaacaucgugcugaucgcccugagccugcuggccauccugaagggcaucuacaacguggccaccugcggccuguucggccuggugagcuuccugcugcugugcggcagaagcugcagcaccaccuacaagggcguguacgagcugcagacccuggagcuggacauggccagccugaacaugugcaugccccugagcugcaccaagaacaacagccaccacuacaucauggugggcaacgagaccggccuggagcugacccugaccaacaccagcaucaucaaccacaaguucugcaaccugagcgacgcccacaagaagaaccuguacgaccacgcccugaugagcaucaucagcaccuuccaccugagcauccccaacuucaaccaguacgaggccaugagcugcgacuucaacggcggcaagaucagcgugcaguacaaccugagccacaccuacgccguggacgccgccaaccacugcggcaccaucgccaacggcgugcugcagaccuucaugagaauggccuggggcggcagcuacaucgcccuggacagcggcaagggcagcugggacugcaucaugaccagcuaccaguaccugaucauccagaacaccaccugggaggaccacugccaguucagcagacccagccccaucggcuaccugggccugcugagccagagaaccagagacaucuacaucagcagaagaagaagaggcaccuucaccuggacccugagcgacagcgagggcaacgagacccccggcggcuacugccugaccagauggaugcugaucgaggccgagcugaagugcuucggcaacaccgccguggccaagugcaacgagaagcacgacgaggaguucugcgacaugcugagacuguucgacuucugcaagcaggccaucagaagacugaaggcccccgcccagaugagcauccagcugaucaacaaggccgugaacgcccugaucaacgaccagcugaucaugaagaaccaccugagagacaucaugggcauccccuacugcaacuacagcaaguacugcuaccugaaccacaccgugaccggcagaaccagccugcccagaugcugccuggugagcaacggcagcuaccugaacgagacccacuucagcgacgacaucgagcagcaggccgacaacaugaucaccgagcugcugcagaaggaguacaucgacagacagggcaagaccccccugggccugguggaccuguucguguucagcaccagcuucuaccugaucagcaucuuccugcaccuggugaagauccccacccacagacacaucaucggcaagcccugccccaagccccacagacugaaccacaugggcaucugcagcugcggccuguacaagcaccccggcgugcccgugaaguggaagagaugaggacuaguaauaaggaaacuguaugaaugucugugggcaggaagugaagagauccuucuguaaagguuuuuggaauuaugucugcugaauaauaaacuuuuuugaaauaauaaaucugguagaaaaaugagaucucaaaggcucuuuucagagccaccaaaaaaaaaaaaaaaaaaaaaaaaaaaaaaaaaaaaaaaaaaaaaaaaaaaaaaaaaaaaaaaaagaauu

SEQ ID NO: 27353 - RNA, 1778 nt, Artificial Sequence
  mRNA product Design b-4 (hSL-A64-N5) comprising derived and/or modified sequence from LASV(LASV254-NIG-2011;Clade II)__AIT17674__GPCmut4 (opt4)
aggagagucccgcagucggcguccagcggcucugcuuguucgugugugugucguugcaggccuuauucaagcuuaccaugggccagaucaucaccuucuuccaggaggugccccacgugaucgaggaggugaugaacaucgugcugaucgcccugagccugcuggccauccugaagggcaucuacaacguggccaccugcggccuguucggccuggugagcuuccugcugcugugcggcagaagcugcagcaccaccuacaagggcguguacgagcugcagacccuggagcuggacaugaccaaccugaacaugugcaugccccugagcugcaccaagaacaacagccaccacuacaucauggugggcaacgagaccggccuggagcugacccugaccaacaccagcaucaucaaccacaaguucugcaaccugagcgacgcccacaagaagaaccuguacaaccacgcccugaugagcaucaucagcaccuuccaccugagcauccccaacuucaaccaguacgaggccaugagcugcgacuucaacggcggcaagaucagcgugcaguacaaccugagccacagcuacgccguggacgccgccaaccacugcggcaccaucgccaacggcgugcugcagaccuucaugagaauggccuggggcggcagcuacaucgcccuggacagcggcaagggcaacugggacugcaucaugaccagcuaccaguaccugaucauccagaacaccaccugggaggaccacugccaguucagcagacccagccccaucggcuaccugggccugcugagccagagaaccagagacaucuacaucagcagaagaagaagaggcaccuucaccuggacccugagcgacagcgagggcaacgagacccccggcggcuacugccugaccagauggaugcugaucgaggccgagcugaagugcuucggcaacaccgccguggccaagugcaacgagaagcacgacgaggaguucugcgacaugcugagacuguucgacuucugcaagcaggccaucagaagacugaagacccccgcccaggccaacauccagcugaucaacaaggccgugaacgcccugaucaacgaccagcugaucaugaagaaccaccugagagacaucaugggcauccccuacugcaacuacagcaaguacugcuaccugaaccacaccgugaccggcaagaccagccugcccagaugcugccuggugagcaacggcagcuaccugaacgagacccacuucagcgacgacaucgagcagcaggccgacaacaugaucaccgagcugcugcagaaggaguacauggacagacagggcaagaccccccugggccugguggaccuguucguguucagcaccagcuucuaccugaucagcaucuuccugcaccuggugaagauccccacccacagacacgugaucggcaagcccugccccaagccccacagacugaaccacaugggcaucugcagcugcggccuguacaagcaccccggcgugcccgugaaguggaagagaugaggacuaguaauaaggaaacuguaugaaugucugugggcaggaagugaagagauccuucuguaaagguuuuuggaauuaugucugcugaauaauaaacuuuuuugaaauaauaaaucugguagaaaaaugagaucucaaaggcucuuuucagagccaccaaaaaaaaaaaaaaaaaaaaaaaaaaaaaaaaaaaaaaaaaaaaaaaaaaaaaaaaaaaaaaaaagaauu

SEQ ID NO: 27354 - RNA, 1778 nt, Artificial Sequence
  mRNA product Design b-4 (hSL-A64-N5) comprising derived and/or modified sequence from LASV(Nig08-A19;Clade III)__ADU56618__GPCmut4 (opt4)
aggagagucccgcagucggcguccagcggcucugcuuguucgugugugugucguugcaggccuuauucaagcuuaccaugggccagaucgugaccuucuuccaggaggugccccacgugaucgaggaggugaugaacaucgugcugaucgcccugagcauccuggccauccugaagggccuguacaacaucgccaccugcggccugaucggccuggugaccuuccugcugcugagcggcagaagcugcagcaugaccuacaagggcguguacgagcugcagacccuggagcugaacaugaacacccugaacaugugcaugccccugagcugcaccaagaacaacagccaccacuacaucauggugggcaacgagaccggccuggagcugacccugaccaacaccagccugcugcaccacaaguucugcaaccugagcgacgcccacaagaagaaccuguacgaccacacccugaugagcaucaucagcaccuuccaccugagcauccccaacuucaaccaguacgaggccaugagcugcgacuucaacggcggcaagaucaccgugcaguacaaccugagccacagcuacgccaucgacgccgccaaccacugcggcaccguggccaacggcgugcugcagaccuucaugagaauggccuggggcggcagcuacaucgcccuggacagcggcagaggcaagugggacugcaucaugaccagcuaccaguaccugaucauccagaacaccaccugggaggaccacugccaguucagcagacccagccccaucggcuaccugggccugcugagccagagaaccagagacaucuacaucagcagaagaagaagaggcaccuucaccuggacccugagcgacagcgagggcaacgagacccccggcggcuacugccugaccagauggaugcugaucgaggccgagcugaagugcuucggcaacaccgccguggccaagugcaacgagaagcacgacgaggaguucugcgacaugcugagacuguucgacuucugcaagcaggccaucagaagacugaaggcccccgcccagaugagcauccagcugaucaacaaggccgugaacgcccugaucaacgaccagcugaucaugaagaaccaccugagagacaucaugggcauccccuacugcaacuacagcaaguacugcuaccugaaccacaccagcaccggcagaaccagccugcccagaugcugccuggugagcaacggcagcuaccugaacgagacccacuucagcgacgacaucgagcagcaggccgacaacaugaucaccgagaugcugcagaaggaguaccuggacagacagggcaagaccccccugggccugguggaccuguucguguucagcaccagcuucuaccugaucagcaucuuccugcaccuggugaagauccccacccacagacacaucgugggcaagcccugccccaagccccacagacugaaccacaugggcaucugcagcugcggccuguacaagcagcccggcgugcccgugagauggaagagaugaggacuaguaauaaggaaacuguaugaaugucugugggcaggaagugaagagauccuucuguaaagguuuuuggaauuaugucugcugaauaauaaacuuuuuugaaauaauaaaucugguagaaaaaugagaucucaaaggcucuuuucagagccaccaaaaaaaaaaaaaaaaaaaaaaaaaaaaaaaaaaaaaaaaaaaaaaaaaaaaaaaaaaaaaaaaagaauu

SEQ ID NO: 27355 - RNA, 1781 nt, Artificial Sequence
  mRNA product Design b-4 (hSL-A64-N5) comprising derived and/or modified sequence from LASV(G1180-SLE-2010;Clade IV)__AIT17168__GPCmut4 (opt4)
aggagagucccgcagucggcguccagcggcucugcuuguucgugugugugucguugcaggccuuauucaagcuuaccaugggccagaucgugaccuucuuccaggaggugccccacgugaucgaggaggugaugaacaucgugcugaucgcccugagcauccuggccgugcugaagggccuguacaacuucgccaccugcggccuggugggccugcugaccuuccugcugcugugcggcagaagcugcaccgccagcagauacaagggcguguacgagcugcagacccuggagcugaacauggagacccugaacaugugcaugccccugagcugcaccaagaacaacagccaccacuacaucauggugggcaacgagaccggccuggagcugacccugaccaacaccagcaucaucaaccacaaguucugcaaccugagcgacgcccacaagaagaaccuguacgaccacgcccugaugagcaucaucagcaccuuccaccugagcauccccaacuucaaccaguacgaggccaugagcugcgacuucaacggcggcaagaucagcgugcaguacaaccugagccacagcuacgccggcgacgccgccaaccacugcggcaccguggccaacggcgugcugcagaccuucaugagaauggccuggggcggcagcuacaucgcccuggacagcggccacggcagcugggacugcaucaugaccagcuaccaguaccugaucauccagaacaccaccugggaggaccacugccaguucagcagacccagccccaucggcuaccugggccugcugagccagagaaccagagacaucuacaucagcagaagaagaagaggcaccuucaccuggacccugagcgacagcgagggcaaggacacccccggcggcuacugccugaccagauggaugcugaucgaggccgagcugaagugcuucggcaacaccgccguggccaagugcaacgagaagcacgacgaggaguucugcgacaugcugagacuguucgacuucugcaagcaggccauccagagacugaaggcccccgcccagaugagcauccagcugaucaacaaggccgugaacgcccugaucaacgaccagcugaucaugaagaaccaccugagagacaucaugggcauccccuacugcaacuacagcaaguacugcuaccugaaccacaccaccaccggcaagaccagccugcccaagugcugccuggugagcaacggcagcuaccugaacgagacccacuucagcgacgacaucgagcagcaggccgacaacaugaucaccgagaugcugcagaaggaguacauggagagacagggcaagaccccccugggccugguggaccuguucguguucagcaccagcuucuaccugaucagcaucuuccugcaccuggugaagauccccacccacagacacaucgugggcaagagcugccccaagccccacagacugaaccacaugggcaucugcagcugcggccuguacaagcagcccggcgugcccgugaaguggaagagaugaggacuaguaauaaggaaacuguaugaaugucugugggcaggaagugaagagauccuucuguaaagguuuuuggaauuaugucugcugaauaauaaacuuuuuugaaauaauaaaucugguagaaaaaugagaucucaaaggcucuuuucagagccaccaaaaaaaaaaaaaaaaaaaaaaaaaaaaaaaaaaaaaaaaaaaaaaaaaaaaaaaaaaaaaaaaagaauu

SEQ ID NO: 27356 - RNA, 1781 nt, Artificial Sequence
  mRNA product Design b-4 (hSL-A64-N5) comprising derived and/or modified sequence from LASV(G1442-SLE-2011;Clade IV)__AIT17180__GPCmut4 (opt4)
aggagagucccgcagucggcguccagcggcucugcuuguucgugugugugucguugcaggccuuauucaagcuuaccaugggccagaucgugaccuucuuccaggaggugccccacgugaucgaggaggugaugaacaucgugcugaucgcccugagcauccuggccgugcugaagggccuguacaacguggccaccugcggccugaucggccuggugaccuuccugcugcugugcggcagaagcugcaccaccacccuguacaagggcguguacgagcugcagacccuggagcugaacauggagacccugaacaugugcaugccccugagcugcaccaagaacaacagccaccacuacaucagagugggcaacgagaccggccuggagcugacccugaccaacaccagcaucaucaaccacaaguucugcaaccugagcgacgcccacaagaagaaccuguacgaccacgcccugaugagcaucaucagcaccuuccaccugagcauccccaacuucaaccaguacgaggccaugagcugcgacuucaacggcggcaagaucagcgugcaguacaaccugagccacagcuacgccggcgacgccgccaaccacugcggcaccguggccaacggcgugcugcagaccuucaugagaauggccuggggcggcagcuacaucgcccuggacagcggcagaggcaacugggacugcaucaugaccagcuaccaguaccugaucauccagaacaccaccugggacgaccacugccaguucagcagacccagccccaucggcuaccugggccugcugagccagagaaccagagacguguacaucagcagaagaagaagaggcaccuucaccuggacccugagcgacagcgagggcaaggacacccccggcggcuacugccugaccagauggaugcugaucgaggccgagcugaagugcuucggcaacaccgccguggccaagugcaacgagaagcacgacgaggaguucugcgacaugcugagacuguucgacuucugcaagcaggccauccagagacugaaggcccccgcccagaugagcauccagcugaucaacaaggccgugaacgcccugaucaacgaccagcugaucaugaagaaccaccugagagacaucaugggcauccccuacugcaacuacagcaaguacugcuaccugaacaacaccgccaccggcaagaccagccugcccaagugcugccugaucagcaacggcagcuaccugaacgagacccacuucagcgacgacaucgagcaggaggccgacaacaugaucaccgagaugcugcagaaggaguacauggagagacagggcaagaccccccugggccugguggaccuguucguguucagcaccagcuucuaccugaucagcaucuuccugcaccuggugaagauccccacccacagacacaucgugggcaagagcugccccaagccccacagacugaaccacaugggcaucugcagcugcggccuguacaagcagcccggcgugcccgugagauggaagagaugaggacuaguaauaaggaaacuguaugaaugucugugggcaggaagugaagagauccuucuguaaagguuuuuggaauuaugucugcugaauaauaaacuuuuuugaaauaauaaaucugguagaaaaaugagaucucaaaggcucuuuucagagccaccaaaaaaaaaaaaaaaaaaaaaaaaaaaaaaaaaaaaaaaaaaaaaaaaaaaaaaaaaaaaaaaaagaauu

SEQ ID NO: 27357 - RNA, 1781 nt, Artificial Sequence
  mRNA product Design b-4 (hSL-A64-N5) comprising derived and/or modified sequence from LASV(G3010-SLE-2013;Clade IV)__AIT17344__GPCmut4 (opt4)
aggagagucccgcagucggcguccagcggcucugcuuguucgugugugugucguugcaggccuuauucaagcuuaccaugggccagaucgugaccuucuuccaggaggugccccacgugaucgaggaggugaugaacaucgugcugaucgcccugagcauccuggccgugcugaagggccuguacaacuucgccaccugcggccuggugggccuggugaccuuccugcugcugugcggcagaagcugcaccaccagccuguacaagggcguguacgagcugcagacccuggagcugaacauggagacccugaacaugugcaugccccugagcugcaccaagaacaacagccaccacuacaucauggugggcaacgagaccggccuggagcugacccugaccaacaccagcaucaucaaccacaaguucugcaaccugagcgacgcccacaagaagaaccuguacaaccacgcccugaugagcaucaucagcaccuuccaccugagcauccccaacuucaaccaguacgaggccaugagcugcgacuucaacggcggcaagaucagcgugcaguacaaccugagccacagcuacgccggcgacgccgccagccacugcggcaccguggccaacggcgugcugcagaccuucaugagaauggccuggggcggcagcuacaucgcccuggacagcggcuacggcaagugggacugcaucaugaccagcuaccaguaccugaucauccagaacaccaccugggaggaccacugccaguucagcagacccagccccaucggcuaccugggccugcugagccagagaaccagagacaucuacaucagcagaagaagaagaggcaccuucaccuggacccugagcgacagcgagggcaaggacacccccggcggcuacugccugaccagauggaugcugaucgaggccgagcugaagugcuucggcaacaccgccguggccaagugcaacgagaagcacgacgaggaguucugcgacaugcugagacuguucgacuucugcaagcaggccauccagagacugaagacccccgcccagaugagcauccagcugaucaacaaggccgugaacgcccugaucaacgaccagcugaucaugaagaaccaccugagagacaucaugggcauccccuacugcaacuacagcaaguacugcuaccugaaccacaccaccaccggcaagaccagccugcccaagugcugccuggugagcaacggcagcuaccugaacgagacccacuucagcgacgacaucgagcagcaggccgacaacaugaucaccgagaugcugcagaaggaguacauggagagacagggcaagaccccccugggccugguggaccuguucguguucagcaccagcuucuaccugaucagcaucuuccugcaccuggugaagauccccacccacagacacaucgugggcaagagcugccccaagccccacagacugaaccacaugggcaucugcagcugcggccuguacaagcagcccggcgugcccgugagauggaagagaugaggacuaguaauaaggaaacuguaugaaugucugugggcaggaagugaagagauccuucuguaaagguuuuuggaauuaugucugcugaauaauaaacuuuuuugaaauaauaaaucugguagaaaaaugagaucucaaaggcucuuuucagagccaccaaaaaaaaaaaaaaaaaaaaaaaaaaaaaaaaaaaaaaaaaaaaaaaaaaaaaaaaaaaaaaaaagaauu

SEQ ID NO: 27358 - RNA, 1781 nt, Artificial Sequence
  mRNA product Design b-4 (hSL-A64-N5) comprising derived and/or modified sequence from LASV(G502-SLE-2009;Clade IV)__AIT17126__GPCmut4 (opt4)
aggagagucccgcagucggcguccagcggcucugcuuguucgugugugugucguugcaggccuuauucaagcuuaccaugggccagaucgugaccuucuuccaggaggugccccacgugaucgaggaggugaugaacaucgugcugaucgcccugagcauccuggccgugcugaagggccuguacaacuucgccaccugcggccuggugggccugcugaccuuccugcugcugugcggcagaagcugcaccaccggccuguacaagggcguguacgagcugcagacccuggagcugaacauggagacccugaacaugugcaugccccugagcugcaccaagaacaacagccaccacuacaucauggugggcaacgagaccggccuggagcugacccugaccaacaccagcaucaucaaccacaaguucugcaaccugagcgacgcccacaagaagaaccuguacgaccacgcccugaugagcaucaucagcaccuuccaccugagcauccccaacuucaaccaguacgaggccaugagcugcgacuucaacggcggcaagaucagcgugcaguacaaccugagccacagcuacgccggcgacgccgccgaccacugcggcaccguggccaacggcgugcugcagaccuucaugagaauggccuggggcggcagcuacaucgcccuggacagcggcagaggcagaugggacugcaucaugaccagcuaccaguaccugaucauccagaacaccaccugggaggaccacugccaguucagcagacccagccccaucggcuaccugggccugcugagccagagaaccagagacaucuacaucagcagaagaagaagaggcaccuucaccuggacccugagcgacagcgagggcaaggacacccccggcggcuacugccugaccagauggaugcugaucgaggccgagcugaagugcuucggcaacaccgccguggccaagugcaacgagaagcacgacgaggaguucugcgacaugcugagacuguucgacuucugcaagcaggccauccagagacugaaggcccccgcccagaugagcauccagcugaucaacaaggccgugaacgcccugaucaacgaccagcuggugaugaagaaccaccugagagacaucaugggcauccccuacugcaacuacagcagauacugcuaccugaaccacaccaccaccggcagaaccagccugcccaagugcugccuggugagcaacggcagcuaccugaacgagacccacuucagcgacgacaucgagcagcaggccgacaacaugaucaccgagaugcugcagaaggaguacauggagagacagggcaagaccccccugggccugguggaccuguucguguucagcaccagcuucuaccugaucagcaucuuccugcaccuggugaagauccccacccacagacacaucgugggcaagagcugccccaagccccacagacugaaccacaugggcaucugcagcugcggccuguacaagcagcccggcgugcccgugaaguggaagagaugaggacuaguaauaaggaaacuguaugaaugucugugggcaggaagugaagagauccuucuguaaagguuuuuggaauuaugucugcugaauaauaaacuuuuuugaaauaauaaaucugguagaaaaaugagaucucaaaggcucuuuucagagccaccaaaaaaaaaaaaaaaaaaaaaaaaaaaaaaaaaaaaaaaaaaaaaaaaaaaaaaaaaaaaaaaaagaauu

SEQ ID NO: 27359 - RNA, 1781 nt, Artificial Sequence
  mRNA product Design b-4 (hSL-A64-N5) comprising derived and/or modified sequence from LASV(G733-SLE-2010;Clade IV)__AIT17154__GPCmut4 (opt4)
aggagagucccgcagucggcguccagcggcucugcuuguucgugugugugucguugcaggccuuauucaagcuuaccaugggccagaucgugaccuucuuccaggaggugccccacgugaucgaggaggugaugaacaucgugcugaucgcccugagcauccuggccgugcugaagggccuguacaacuucgccaccugcggcaucgugggccuggugagcuuccugcugcugugcggcagaagcugcaccaccagccuguacaagggcguguacgagcugcagacccuggagcugaacauggagacccugaacaugugcaugccccugagcugcaccaagaacaacagccaccacuacaucauggugggcaacgagaccggccuggagcugacccugaccaacaccagcaucaucaaccacaaguucugcaaccugagcgacgcccacaagaagaaccuguacgaccacgcccugaugagcaucaucagcaccuuccaccugagcauccccaacuucaaccaguacgaggccaugagcugcgacuucaacggcggcaagaucagcgugcaguacaaccugagccacagcuacgccggcgacgccgccaaccacugcggcaccaucgccaacggcgugcugcagaccuucaugagaauggccuggggcggcagcuacaucgcccuggacagcggcagagacagaugggacugcaucaugaccagcuaccaguaccugaucauccagaacaccaccugggaggaccacugccaguucagcagacccagccccaucggcuaccugggccugcugagccagagaaccagagacaucuacaucagcagaagaagaagaggcaccuucaccuggacccugagcgacagcgagggcaaggacacccccggcggcuacugccugaccagauggaugcugaucgaggccgagcugaagugcuucggcaacaccgccguggccaagugcaacgagaagcacgacgaggaguucugcgacaugcugagacuguucgacuucugcaagcaggccauccagagacugaaggcccccgcccagaugagcauccagcugaucaacaaggccgugaacgcccugaucaacgaccagcugaucaugaagaaccaccugagagacaucaugggcauccccuacugcaacuacagcaaguacugcuaccugaaccacaccaccaccggcaagaccagccugcccaagugcugccuggugagcaacggcagcuaccugaacgagacccacuucagcgacgacaucgagcagcaggccgacaacaugaucaccgagaugcugcagaaggaguacauggagagacagggcaagaccccccugggccugguggaccuguucguguucagcaccagcuucuaccugaucagcaucuuccugcaccuggugaagauccccacccacagacacguggugggcaagagcugccccaagccccacagacugaaccacaugggcaucugcagcugcggccuguacggccagcccggcgugcccgugaaguggaagagaugaggacuaguaauaaggaaacuguaugaaugucugugggcaggaagugaagagauccuucuguaaagguuuuuggaauuaugucugcugaauaauaaacuuuuuugaaauaauaaaucugguagaaaaaugagaucucaaaggcucuuuucagagccaccaaaaaaaaaaaaaaaaaaaaaaaaaaaaaaaaaaaaaaaaaaaaaaaaaaaaaaaaaaaaaaaaagaauu

SEQ ID NO: 27360 - RNA, 1781 nt, Artificial Sequence
  mRNA product Design b-4 (hSL-A64-N5) comprising derived and/or modified sequence from MOPV/LASV reassortant(IGS-1;Clade IV)__AFY05576__GPCmut4 (opt4)
aggagagucccgcagucggcguccagcggcucugcuuguucgugugugugucguugcaggccuuauucaagcuuaccaugggccagaucgugaccuucuuccaggaggugccccacgugaucgaggaggugaugaacaucgugcugaucgcccugagcgugcuggccgugcugaagggccuguacaacuucgccaccugcggccuggugggccuggugaccuuccugcugcugugcggcagaagcugcaccaccagccuguacaagggcguguacgagcugcagacccuggagcugaacauggagacccugaacaugugcaugccccugagcugcaccaagaacaacagccaccacuacaucauggugggcaacgagaccggccuggagcugacccugaccaacaccagcaucaucaaccacaaguucugcaaccugagcgacgcccacaagaagaaccuguacgaccacgcccugaugagcaucaucagcaccuuccaccugagcauccccaacuucaaccaguacgaggccaugagcugcgacuucaacggcggcaagaucagcgugcaguacaaccugagccacagcuacgccggcgacgccgccaaccacugcggcaccguggccaacggcgugcugcagaccuucaugagaauggccuggggcggcagcuacaucgcccuggacagcggcagaggcaacugggacugcaucaugaccagcuaccaguaccugaucauccagaacaccaccugggaggaccacugccaguucagcagacccagccccaucggcuaccugggccugcugagccagagaaccagagacaucuacaucagcagaagaagaagaggcaccuucaccuggacccugagcgacagcgagggcgaggacacccccggcggcuacugccugaccagauggaugcugaucgaggccgagcugaagugcuucggcaacaccgccguggccaagugcaacgagaagcacgacgaggaguucugcgacaugcugagacuguucgacuucugcaagcaggccauccagagacugaaggcccccgcccagaugagcauccagcugaucaacaaggccgugaacgcccugaucaacgaccagcugaucaugaagaaccaccugagagacaucaugggcauccccuacugcaacuacagcaaguacugcuaccugaaccacaccaccaccggcagaaccagccugcccaagugcugccuggugagcaacggcagcuaccugaacgagacccacuucagcgacgacaucgagcagcaggccgacaacaugaucaccgagaugcugcagaaggaguacauggagagacagggcaagaccccccugggccugguggaccuguucguguucagcaccagcuucuaccugaucagcaucuuccugcaccuggugaagauccccacccacagacacaucgugggcaagagcugccccaagccccacagacugaaccacaugggcaucugcagcugcggccuguacaagcagcccggcgugcccgugaaguggaagagaugaggacuaguaauaaggaaacuguaugaaugucugugggcaggaagugaagagauccuucuguaaagguuuuuggaauuaugucugcugaauaauaaacuuuuuugaaauaauaaaucugguagaaaaaugagaucucaaaggcucuuuucagagccaccaaaaaaaaaaaaaaaaaaaaaaaaaaaaaaaaaaaaaaaaaaaaaaaaaaaaaaaaaaaaaaaaagaauu

SEQ ID NO: 27361 - RNA, 1781 nt, Artificial Sequence
  mRNA product Design b-4 (hSL-A64-N5) comprising derived and/or modified sequence from LASV(LM765-SLE-2012;Clade IV)__AIT17814__GPCmut4 (opt4)
aggagagucccgcagucggcguccagcggcucugcuuguucgugugugugucguugcaggccuuauucaagcuuaccaugggccagaucgugaccuucuuccaggaggugccccacgugaucgaggaggugaugaacaucgugcugaucgcccugagcauccuggccgugcugaagggccuguacaacuucgccaccugcggccuggugggccuggugaccuuccugcugcugugcggcagaagcugcaccaccagccuguacaagggcguguacgagcugcagacccuggagcugaacauggagacccugaacaugugcaugccccugagcugcaccaagaacaacagccaccacuacaucauggugggcaacgagaccggccuggagcugacccugaccaacaccagcaucaucgaccacaaguucugcaaccugagcgacgcccacagaaagaaccuguacgaccacgcccugaugagcaucaucagcaccuuccaccugagcauccccaacuucaaccaguacgaggccaugagcugcgacuucaacggcggcaagaucagcgugcaguacaaccugagccacagcuacgccaaggacgccgccgaccacugcggcaccguggccaacggcgugcugcagaccuucaugagaauggccuggggcggcagcuacaucgcccuggacagcggcagaggcagaugggacugcaucaugaccagcuaccaguaccugaucauccagaacaccaccugggaggaccacugccaguucagcagacccagccccaucggcuaccugggccugcugagccagagaaccagagacaucuacaucagcagaagaagaagaggcaccuucaccuggacccugagcgacagcgagggcaaggacacccccggcggcuacugccugaccagauggaugcugaucgaggccgagcugaagugcuucggcaacaccgccguggccaagugcaacgagaagcacgacgaggaguucugcgacaugcugagacuguucgacuucugcaagcaggccauccagagacugaaggcccccgcccagaugagcauccagcugaucaacaaggccgugaacgcccugaucaacgaccagcugaucaugaagaaccaccugagagacaucaugggcauccccuacugcaacuacagcaaguacugcuaccugaaccacaccaccaccggcaagaccagccugcccaagugcugccuggugagcaacggcagcuaccugaacgagacccacuucagcgacgacaucgagcagcaggccgacaacaugaucaccgagaugcugcagaaggaguacauggagagacagggcaagaccccccugggccugguggaccuguucguguucagcaccagcuucuaccugaucagcaucuuccugcaccuggugaagauccccacccacagacacaucgugggcaagcccugccccaagccccacagacugaaccacaugggcaucugcagcugcggccuguacaagcagcccggcgugcccgugaaguggaagagaugaggacuaguaauaaggaaacuguaugaaugucugugggcaggaagugaagagauccuucuguaaagguuuuuggaauuaugucugcugaauaauaaacuuuuuugaaauaauaaaucugguagaaaaaugagaucucaaaggcucuuuucagagccaccaaaaaaaaaaaaaaaaaaaaaaaaaaaaaaaaaaaaaaaaaaaaaaaaaaaaaaaaaaaaaaaaagaauu

SEQ ID NO: 27362 - RNA, 1781 nt, Artificial Sequence
  mRNA product Design b-4 (hSL-A64-N5) comprising derived and/or modified sequence from LASV(LM776-SLE-2012;Clade IV)__AIT17824__GPCmut4 (opt4)
aggagagucccgcagucggcguccagcggcucugcuuguucgugugugugucguugcaggccuuauucaagcuuaccaugggccagaucgugaccuucuuccaggaggugccccacgugaucgaggaggugaugaacaucgugcugaucgcccugagcauccuggccgugcugaagggccuguacaacuucgccaccugcggccuggugggccuggugaccuuccugcugcugugcggcagaagcugcaccaccagcguguacaagggcguguacgagcugcagacccuggagcugaacauggagacccugaacaugugcaugccccugagcugcaccaagaacaacagccaccacuacaucauggugggcaacgagaccggccuggagcugacccugaccaacaccagcaucaucaaccacaaguucugcaaccugagcgacgcccacaagaagaaccuguacgaccacgcccugaugagcaucaucagcaccuuccaccugagcauccccaacuucaaccaguacgaggccaugagcugcgacuucaacggcggcaagaucagcgugcaguacaaccugagccacagcuacgccggcgacgccgccaaccacugcggcaccguggccaacggcgugcugcagaccuucaugagaauggccuggggcggcagcuacaucgcccuggacagcggccacggcaagugggacugcaucaugaccagcuaccaguaccugaucauccagaacaccaccugggaggaccacugccaguucagcagacccagccccaucggcuaccugggccugcugagccagagaaccagagacaucuacaucagcagaagaagaagaggcaccuucaccuggacccugagcgacagcgagggcaaggacacccccggcggcuacugccugaccagauggaugcugaucgaggccgagcugaagugcuucggcaacaccgccguggccaagugcaacgagaagcacgacgaggaguucugcgacaugcugagacuguucgacuucugcaagcaggccauccagagacugaaggcccccgcccagaugagcauccagcugaucaacaaggccgugaacgcccugaucaacgaccagcugaucaugaagaaccaccugagagacaucaugggcauccccuacugcaacuacagcaaguacugcuaccugaaccacaccaccaccggcaagaccagccugcccaagugcugccuggugagcaacggcagcuaccugaacgagacccacuucagcgacgacaucgagcagcaggccgacaacaugaucaccgagaugcugcagaaggaguacauggagagacagggcaagaccccccugggccugguggaccuguucguguucagcaccagcuucuaccugaucagcaucuuccugcaccuggugaagauccccacccacagacacaucgugggcaagagcugccccaagccccacagacugaaccacaugggcaucugcagcugcggccuguacaagcagcccggcgugcccgugagauggaagagaugaggacuaguaauaaggaaacuguaugaaugucugugggcaggaagugaagagauccuucuguaaagguuuuuggaauuaugucugcugaauaauaaacuuuuuugaaauaauaaaucugguagaaaaaugagaucucaaaggcucuuuucagagccaccaaaaaaaaaaaaaaaaaaaaaaaaaaaaaaaaaaaaaaaaaaaaaaaaaaaaaaaaaaaaaaaaagaauu

SEQ ID NO: 27363 - RNA, 1781 nt, Artificial Sequence
  mRNA product Design b-4 (hSL-A64-N5) comprising derived and/or modified sequence from LASV(Mad39;Clade IV)__ANH09722__GPCmut4 (opt4)
aggagagucccgcagucggcguccagcggcucugcuuguucgugugugugucguugcaggccuuauucaagcuuaccaugggccagaucgugaccuucuuccaggaggugccccacgugaucgaggaggugaugaacaucgugcugaucgcccugagcauccuggccgugcugaagggccuguacaacguggccaccugcggccugaucggccuggugaccuuccugcugcugugcggcagaagcugcaccaccacccuguacaagggcguguacgagcugcaggcccuggagcugaacauggagacccugaacaugugcaugccccugagcugcaccaagaacaacagccaccacuacaucagagugggcaacgagaccggccuggagcugacccugaccaacaccagccugaucaaccacaaguucugcaaccugagcgacgcccacaagaagaaccuguacgaccacgcccugaugagcaucaucagcaccuuccaccugagcauccccaacuucaaccaguacgaggccaugagcugcgacuucaacgacggcaagaucagcgugcaguacaaccugagccacaccuacgccggcgacaccgccaaccacugcggcaccguggccaacggcgugcugcagaccuucaugagaauggccuggggcggcagcuacaucgcccuggacagcggcagaggcggcugggacugcaucaugaccagcuaccaguaccugaucauccagaacaccaccugggaggaccacugccaguucagcagacccagccccaucggcuaccugggccugcugagccagagaaccagagacaucuacaucagcagaagaagaagaggcaccuucaccuggacccugagcgacagcgagggcaaggacacccccggcggcuacugccugaccagauggaugcugaucgaggccgagcugaagugcuucggcaacaccgccguggccaagugcaacgagaagcacgacgaggaguucugcgacaugcugagacuguucgacuucugcaagcaggccauccagagacugaaggcccccgcccagaugagcauccagcugaucaacaaggccgugaacgcccugaucaacgaccagcugaucaugaagaaccaccugagagacaucaugggcauccccuacugcaacuacagcaaguacugcuaccugaaccacaccgugaccggcaagaccagccugcccaagugcugccuggugagcaacggcagcuaccugaacgagacccacuucagcgacgacaucgagcagcaggccgacaacaugaucaccgagaugcugcagaaggaguacauggagagacagggcaagaccccccugggccugguggaccuguucguguucagcaccagcuucuaccugaucagcaucuuccugcaccuggugaagauccccacccacagacacguggugggcaagcccugccccaagccccacagacugaaccacaugggcaucugcagcugcggcuucuacaagcagcccggcgugcccgugagauggaagagaugaggacuaguaauaaggaaacuguaugaaugucugugggcaggaagugaagagauccuucuguaaagguuuuuggaauuaugucugcugaauaauaaacuuuuuugaaauaauaaaucugguagaaaaaugagaucucaaaggcucuuuucagagccaccaaaaaaaaaaaaaaaaaaaaaaaaaaaaaaaaaaaaaaaaaaaaaaaaaaaaaaaaaaaaaaaaagaauu

SEQ ID NO: 27364 - RNA, 1781 nt, Artificial Sequence
  mRNA product Design b-4 (hSL-A64-N5) comprising derived and/or modified sequence from LASV(Z0947-SLE-2011;Clade IV)__AIT17840__GPCmut4 (opt4)
aggagagucccgcagucggcguccagcggcucugcuuguucgugugugugucguugcaggccuuauucaagcuuaccaugggccagaucgugaccuucuuccaggaggugccccacgugaucgaggaggugaugaacaucgugcugaucgcccugagcauccuggccgugcugaagggccuguacaacuucgccaccugcggccuggugggccuggugaccuuccugcugcugugcggcagaagcugcaccaucagccuguacaagggcguguacgagcugcagacccuggagcugaacauggagacccugaacaugugcaugccccugagcugcaccaagaacaacagccaccacuacaucauggugggcaacgagaccggccuggagcugacccugaccaacaccagcaucaucaaccacaaguucugcaaccugagcgacgcccacaagaagaaccuguacgaccacgcccugaugagcaucaucagcaccuuccaccugagcauccccaacuucaaccaguacgaggccaugagcugcgacuucaacggcggcaagaucagcgugcaguacaaccugagccacagcuacgccggcgacgccgccaaccacugcggcaccguggccaacggcgugcugcagaccuucaugagaauggccuggggcggcagcuacaucgcccuggacagcggcagagacagaugggacugcaucaugaccagcuaccaguaccugaucauccagaacaccaccugggaggaccacugccaguucagcagacccagccccaucggcuaccugggccugcugagccagagaaccagagacaucuacaucagcagaagaagaagaggcaccuucaccuggacccugagcgacagcgagggcaaggacacccccggcggcuacugccugaccagauggaugcugaucgaggccgagcugaagugcuucggcaacaccgccguggccaagugcaacgagaagcacgacgaggaguucugcgacaugcugagacuguucgacuucugcaagcaggccauccagagacugaaggcccccgcccagaugagcauccagcugaucaacaaggccgugaacgcccugaucaacgaccagcugaucaugaagaaccaccugagagacaucaugggcauccccuacugcaacuacagcaaguacugcuaccugaaccacaccaccaccggcaagaccagccugcccaagugcugccuggugagcaacggcagcuaccugaacgagacccacuucagcgacgacaucgagcagcaggccgacaacaugaucaccgagaugcugcagaaggaguacauggagagacagggcaagaccccccugggccugguggaccuguucguguucagcaccagcuucuaccugaucagcaucuuccugcaccuggugaagauccccacccacagacacaucgugggcaagcccugccccaagccccacagacugaaccacaugggcaucugcagcugcggccuguacaagcagcccggcgugcccgugaaguggaagagaugaggacuaguaauaaggaaacuguaugaaugucugugggcaggaagugaagagauccuucuguaaagguuuuuggaauuaugucugcugaauaauaaacuuuuuugaaauaauaaaucugguagaaaaaugagaucucaaaggcucuuuucagagccaccaaaaaaaaaaaaaaaaaaaaaaaaaaaaaaaaaaaaaaaaaaaaaaaaaaaaaaaaaaaaaaaaagaauu

SEQ ID NO: 27365 - RNA, 1781 nt, Artificial Sequence
  mRNA product Design b-4 (hSL-A64-N5) comprising derived and/or modified sequence from LASV(Josiah;Clade IV)__NP_694870__GPCmut4 (opt5)
aggagagucccgcagucggcguccagcggcucugcuuguucgugugugugucguugcaggccuuauucaagcuuaccaugggccagaucgugaccuucuuucaagaggucccccacguuauugaagaggugaugaacaucgugcugauugcccucagcguccuggcugugcuuaaggggcuguacaauuucgccacaugcggacucguuggccuggugacguuucuucugcucugugggagauccugcaccacaucucuguauaaaggagucuacgaacugcagacccucgagcugaacauggaaacacuuaauauguguaugccucugagcugcaccaagaacaauucccaucacuauaucauggugggcaacgagacagggcucgagcugacccuuacgaauaccucuauuaucaaccauaaauucuguaaucugagcgacgcgcacaagaaaaaccucuacgaucaugcucugauguccaucauuucuacauuucaccugagcaucccgaauuucaaccaguaugaagccauguccugcgacuuuaauggaggcaagauuagcguucaguacaaccucucucacuccuaugccggcgaugcugccaaucauugugggaccguggcuaacggaguccugcaaacauucaugcggauggccuggggcgggagcuacaucgcgcuugacucuggacgcggcaacugggauugcauuaugaccuccuaccaguaucugaucauucagaauacgacaugggaggaccacugucaguuuagcagacccucuccuaucggguaccucggacugcuuucccaacggacccgcgauaucuauauuagcagacggcgcagaggcacauucaccuggacccuguccgacucugaaggcaaggauacacccgggggauacugccucacgcgguggaugcugaucgaggccgagcugaaauguuuuggcaacaccgcuguggccaagugcaaugaaaaacaugacgaggaguucugcgauaugcuccgccuguuugacuucuguaagcaggcuauucagagacuuaaagccccugcgcagaugagcauccaacugauuaacaaggccgugaaugcucucaucaacgaucagcugaucaugaagaaucaccuucgggacauuauggggauccccuauugcaacuacuccaaauauuguuaccugaaucacacaaccacaggacgcaccagccucccuaagugcugucuggucucuaacggcuccuaccugaaugaaacgcauuucagcgacgauauugaacagcaagccgacaacaugaucacagagaugcuccagaaagaguauauggaaagacaggggaagaccccgcugggacuuguugaucuguuuguguucucuaccagcuuuuaccucauuuccaucuuccugcaccuggugaaaauccccacacaucggcacauugucggcaagucuugcccuaaaccccaucgccuuaaucacaugggcaucuguagcugcgggcucuauaagcagccuggagugcccguuaaguggaaaagaugaggacuaguaauaaggaaacuguaugaaugucugugggcaggaagugaagagauccuucuguaaagguuuuuggaauuaugucugcugaauaauaaacuuuuuugaaauaauaaaucugguagaaaaaugagaucucaaaggcucuuuucagagccaccaaaaaaaaaaaaaaaaaaaaaaaaaaaaaaaaaaaaaaaaaaaaaaaaaaaaaaaaaaaaaaaaagaauu

SEQ ID NO: 27366 - RNA, 1778 nt, Artificial Sequence
  mRNA product Design b-4 (hSL-A64-N5) comprising derived and/or modified sequence from LASV(LP;Clade I)__AAF86701__GPCmut4 (opt5)
aggagagucccgcagucggcguccagcggcucugcuuguucgugugugugucguugcaggccuuauucaagcuuaccaugggccagaucauuaccuucuuucaagaggugccccacgucaucgaagagguuaugaacauugugcugaucgcccucagccugcuugcuauucugaaggggcucuacaauaucgccacaugcggaaucauuggccugguggcguuccuuuuucugugugggaaauccugcucucucacgcugaagggaggcuaugaacugcagacccucgagcugaacauggaaacacuuaauauguguaugccucugagcugcaccaaaaacuccucucaucacuacaucagagucgggaaugagacaggacucgagcugacccuuacaaacaccagcauuaucaaucauaaguucuguaaccuguccgacgcucacaaaaagaaucucuaugaucaugcccugaugucuauuaucagcacguuucaccuguccauuccgaacuucaaucaguacgaagccaugagcugcgacuuuaacggcggcaagaucucugugcaguauaaucucucccacagcuacgcuggggaugccgcugagcauuguggaaccguugccaacggcgugcugcaaacauucaugcggauggcguggggagggcgcuauaucgcccuugacucuggcaaagggaauugggauugcauuaugaccuccuaccaguaccugaucauucagaacacaaccugggaagaccacugucaguuuagcagacccucuccuaucggauaucucggccugcuuucccaacggacgcgcgauauuuacaucagcagacggcgcagaggcacauucaccuggacacuguccgacucugaggggaacgagacccccggaggcuauugccucacccgguggaugcugaucgaagcugagcugaaguguuuugggaauacagccgucgcuaaaugcaacgaaaagcaugaugaggaguucugcgacaugcuccgccuguuugauuucuguaaacaggccauuagacggcuuaaggcgccugcccagaugagcauccagcugauuaauaaggcugugaacgcccucaucaaugaccaacugauuaugaaaaaccaccuucgcgauaucaugggaauccccuacugcaauuauuccaaguacuguuaucugaaccacacgagcucuggcagaaccucccucccuaaaugcugucugauuagcaaugggucuuaccugaacgaaacacaguucagcgacgacaucgagcagcaagcugauaauaugauuaccgaaaugcuccagaaggaguacaucgaacggcagggaaaaacaccgcugggccuuguugacauuuuuaucuucuccaccucuuuuuaucugauuagcaucuuccuccaucugaucaagauucccacgcaccgccauaucgugggcaaaccuugccccaagccucacagacugaaccauaugggggucuguuccugcggacuuuacaagcaccccggcgugccgacaaaauggaagcggugaggacuaguaauaaggaaacuguaugaaugucugugggcaggaagugaagagauccuucuguaaagguuuuuggaauuaugucugcugaauaauaaacuuuuuugaaauaauaaaucugguagaaaaaugagaucucaaaggcucuuuucagagccaccaaaaaaaaaaaaaaaaaaaaaaaaaaaaaaaaaaaaaaaaaaaaaaaaaaaaaaaaaaaaaaaaagaauu

SEQ ID NO: 27367 - RNA, 1778 nt, Artificial Sequence
  mRNA product Design b-4 (hSL-A64-N5) comprising derived and/or modified sequence from LASV(803213;Clade II)__AAF86703__GPCmut4 (opt5)
aggagagucccgcagucggcguccagcggcucugcuuguucgugugugugucguugcaggccuuauucaagcuuaccaugggccagaucauuaccuucuuucaagaggugccccacgucaucgaagagguuaugaacauugugcugaucgcccucagccugcuugcuauucugaaggggaucuacaauguggccacaugcggacucuucggccugaucuccuuucuucugcucugugggagaucuugcagcgucacguauaaaggaguguacgaacugcagacccuggagcucaacauggcgaaucugaacauguguaugccucuuuccugcacaaagaauaacucucaucacuauauuaugguuggcaaugaaaccgggcuggagcucacacugaccaacacaagcaucauuaaucauaaauucuguaaccuuuccgacgcucacaagaaaaaucuguacgaucaugcccucaugucuaucauuagcaccuuucaccuguccaucccgaacuucaaucaguaugaggccaugagcugcgacuuuaacggaggcaagauuucugugcaguacaaucugucccacagcuucgcugucgaugccgcuaaccauuguggcacgaucgccaacggggugcuccaaaccuuuaugcggauggcguggggaggcucuuauaucgcccuggacuccgggaagggaaauugggauugcauuaugacaagcuaccaguaccuuaucauucagaacaccacaugggaagaccacugucaguucucucgccccuccccuaucggcuaucuggggcuccugagccaaagaacccgggauauuuacaucucccgcagacggcgcggaacguuuacauggacccuuucugacagcgagggcaaugaagcucccggcggguauugccugacaagauggaugcucaucgaggccgagcugaaauguuucggaaacaccgcuguugccaagugcaaugaaaaacaugaugaggaauuuugcgacaugcugcgccucuucgauuucuguaagcaggcgauuaaacggcugaagaccccugcccagauguccauccagcuuauuaacaaggcugugaaugcccugaucaacgaccaacucauuaugaaaaaucaccugagagauaucaugggcauccccuacugcaacuauagccgguacuguuaucuuaaucacacagucacggggaagaccucucugccucgcugcugucucguguccaacggaagcuaccugaaugagacacauuuuucugacgacauugaacagcaggcugauaacaugaucaccgagaugcugcaaaaagaguacauggacagacagggcaagacaccgcucgggcugguggaucuuuucgucuuuagcaccuccuucuaucugauuucuaucuuucuccaccugguuaaaauucccacgcaucggcacaucgugggaaagccuugccccaaaccucaucgccugaaucacaugggcauuuguagcugcggccuuuacaagcaccccggggugccggucaaguggaaaagaugaggacuaguaauaaggaaacuguaugaaugucugugggcaggaagugaagagauccuucuguaaagguuuuuggaauuaugucugcugaauaauaaacuuuuuugaaauaauaaaucugguagaaaaaugagaucucaaaggcucuuuucagagccaccaaaaaaaaaaaaaaaaaaaaaaaaaaaaaaaaaaaaaaaaaaaaaaaaaaaaaaaaaaaaaaaaagaauu

SEQ ID NO: 27368 - RNA, 1778 nt, Artificial Sequence
  mRNA product Design b-4 (hSL-A64-N5) comprising derived and/or modified sequence from LASV(GA391;Clade III)__CAA36645__GPCmut4 (opt5)
aggagagucccgcagucggcguccagcggcucugcuuguucgugugugugucguugcaggccuuauucaagcuuaccaugggccagaucgugaccuucuuucaagaggucccccacguuauugaagaggugaugaacaucgugcugauugcccucagcauccuggcuauucuuaaggggcuguacaaugucgccacaugcggacucaucggccuggugacguuccuucugcucuccgggagaucuuguagccugaucuauaaaggaaccuacgaacugcagacacucgagcugaacauggaaacccuuaauaugugcaugccucuguccuguacaaagaacaauucucaucacuauauucggguuggcaacgagaccgggcucgagcugacacuuaccaauacgagcauccugaaccauaaauuuugcaaucucuccgacgcgcacaagcgcaaccuguacgaucauucucugaugagcauuaucuccaccuuccaccucagcauuccgaauuuuaaccaguaugaagcuaugucuugugacuucaauggaggcaaaaucacagugcaguacaaccugucccacagcuuugccgucgaugccgcuggccauugcgggacccuugccaauggagugcugcaaacauucaugagaauggcuuggggcgggucuuauauugcccucgacuccggacggggcaacugggauuguaucaugaccagcuaccaguaccugaucauucagaacacgacaugggacgaucacugccaguuuucucgccccuccccuaucggguaucuuggacugcucagccaaagaacccgggacauuuacaucucccgcagacggcgcggcacauucaccuggacccugucugauagcgagggcaaugaaacacccgggggauauugucugacgagauggaugcucauugaggcggagcugaagugcuuuggcaacaccgccguugcuaaguguaaugaaaaacaugacgaggaguucugcgauaugcuucggcuguuugacuucugcaagcaggccauccgcagacucaaaaccccugcucagauguccauccagcugauuaacaaggccgugaaugcgcuuaucaacgaucaacugauuaugaaaaaucaccuccgggacaucauggggauucccuacuguaacuauagccgcuacugcuaucugaaucacacaucuacaggaaagaccucccugccuagauguugccucaucagcaacggcucuuaccugaaugaaacgaaguucagcgacgauaucgaacagcaggccgacaacaugauuacagagaugcuucaaaaagaguacaucgaucggcaggggaagaccccgcugggacucgucgaccuguuuguguucuccaccucuuuuuaucugauuagcaucuuccuucaucucgugaaaauucccacacacagacauaucgucggcaagccuugucccaaaccucaccgccugaaucauaugggcauuugcuccugugggcuguacaagcagcccggaguuccggugcgguggaaaagaugaggacuaguaauaaggaaacuguaugaaugucugugggcaggaagugaagagauccuucuguaaagguuuuuggaauuaugucugcugaauaauaaacuuuuuugaaauaauaaaucugguagaaaaaugagaucucaaaggcucuuuucagagccaccaaaaaaaaaaaaaaaaaaaaaaaaaaaaaaaaaaaaaaaaaaaaaaaaaaaaaaaaaaaaaaaaagaauu

SEQ ID NO: 27369 - RNA, 1781 nt, Artificial Sequence
  mRNA product Design b-4 (hSL-A64-N5) comprising derived and/or modified sequence from LASV(AV;Clade V)__CCA30314__GPCmut4 (opt5)
aggagagucccgcagucggcguccagcggcucugcuuguucgugugugugucguugcaggccuuauucaagcuuaccaugggccagaucgugaccuucuuucaagaggucccccacguuauugaagaggugaugaacaucgugcugauugcccucagcauccuggcuguccuuaaggggcuguacaauauugccacaugcggacucaucggccugaucacguuccuucugcucugugggagauccugcucuagcaaccuguauaaaggaguguacgaacugcagucccucgaccugaauauggagacccuuaacauguguaugccucugucuugcacaaagaauaacagccaucacuauauucggguuggcaaugauaccgggcucgaacugacacuuaccaacacauccauccugaaucauaaauuuuguaaccucucugacgcgcacaagaaagaucuguacgaccaugcucugaugagcauuaucuccaccuuccaccucagcauuccgaauuuuaaccaguaugaggccaugucuugcgauuucaauggaggcaagaucuccgugcaguacaaccugagccacucuuaugccauugacgcugccaaucauuguggcacggucgcuaacgggauccuucaaaccuuuaugcgcauggccuggggaggcuccuacaucgcgcuggauagcgggagaggaaacugggacugcauuaugacaucuuaccaguaucucaucauucagaauaccacaugggagaaccacugucaguucucccggcccagcccuaucggcuaccuggggcuucugucccaacgcaccagagauauuuauaucucucggcgcagacggggaacguuuacauggacccucagcgacuccgaaggcaaugccacacccggcggguacugccugacccgcuggaugcugaucgaggcugaacucaaguguuucggaaacaccgccguggcuaaaugcaaugagaagcaugaugaggaauuuugcgacaugcugagacuuuucgauuuuuguaaacaggccauuagccggcugaagucuccugcgcagauguccauccagcucauuaacaaagccguuaaugcucugaucaacgaccaacuuauuaugaagaaucaucugcgcgacaucaugggcauccccuauugcaacuacagcaaguauuguuaccucaaucacacaauuacggggaaaaccucucugccuaagugcugucuggugagcaacggauccuaccucaaugagacacacuucucugaugacaucgaacagcaggccgauaacaugauuaccgagaugcugcaaaaagaauauauggagagacagggcaagacaccgcuugggcuggucgaccucuucguguuuagcaccuccuucuaccugaucagcauuuuucugcggcuugugaaaauccccacgcaccgccauauugucggaaagccuugccccaaaccucacagacucaaucauaugggcaucuguucuugcggccuguauaagcagcccgggguuccggugcgguggaagagaugaggacuaguaauaaggaaacuguaugaaugucugugggcaggaagugaagagauccuucuguaaagguuuuuggaauuaugucugcugaauaauaaacuuuuuugaaauaauaaaucugguagaaaaaugagaucucaaaggcucuuuucagagccaccaaaaaaaaaaaaaaaaaaaaaaaaaaaaaaaaaaaaaaaaaaaaaaaaaaaaaaaaaaaaaaaaagaauu

SEQ ID NO: 27370 - RNA, 1778 nt, Artificial Sequence
  mRNA product Design b-4 (hSL-A64-N5) comprising derived and/or modified sequence from LASV(Togo/2016/7082;Clade VI)__AMR44577__GPCmut4 (opt5)
aggagagucccgcagucggcguccagcggcucugcuuguucgugugugugucguugcaggccuuauucaagcuuaccaugggccagaucauuaccuucuuucaagaggugccccacgucaucgaagagguuaugaacauugugcugaucgcccucagccugcuugcuauucugaaggggguguacaaugucgccacaugcggaaucaucggccucgugacguuccuguuucuuugugggagauccugcucucugauuuauaaaggaagcuacgaacuccagacccuggagcugaacauggaaacacucaauauguguaugccucuguccugcaccaagaacucuagccaucacuauauccggguuggcaaugagacagggcuugagcugacccucacaaacaccuccauuaucaaucauaaauucuguaaccugucugacgcgcacaagcgcaaucuuuacgaucaugcucugaugagcauucucuccacguuucaccugagcaucccgaacuucaaucaguaugaagccaugucuugcgacuuuaacggaggcaaaauuuccgugcaguacaaucugagccacgccuaugcugucgaugccgcugagcauuguggcaccguggccaacgggguucuccaaacauucaugagaauggcguggggaggcucuuacaucgcccuggacuccgggcggggaaauugggauugcaucaugaccagcuaccaguaucuuauuauccagaacacaaccugggaagaccacugucaguuuucucgccccuccccuauuggcuaccuggggcuccugagccaaagaacgcgggauaucuauauuucccgcagacggcgcggaacauucaccuggacacuuucugacagcgagggcaacgagacccccggcggguacugccugaccagauggaugcucaucgaagcugagcugaaguguuuuggaaauacagccguggcuaagugcaacgaaaaacaugaugaggaguucugcgacaugcugcggcucuuugauuucuguaagcaggccauccagcgccugaaauccccugcgcagaugagcauucaacuuaucaauaaggccgucaacgcucugauuaaugaccagcucaucaugaaaaaccaccugagagauaugaugggcauucccuauugcaauuacucuaaguauuguuaccuuaaccacacguccagcgggcggaccucucugccuaagugcugucucgugagcaauggauccuaccugaacgaaacacauuucucugacgacaucgagcagcaagccgauaauaugaucaccgaaaugcugcagaaagaguauauugaccgccagggcaagacaccgcucgggcugguggaucuuuuugucuucagcaccuccuuuuaccugaucagcauuuuccuccaccugaucaaaauucccacgcauagacacaucguuggaaagccuugccccaaaccucaucggcugaaccacaugggcauuuguucuugcggccuuuauaagcagcccggggugccgacaagauggaaacgcugaggacuaguaauaaggaaacuguaugaaugucugugggcaggaagugaagagauccuucuguaaagguuuuuggaauuaugucugcugaauaauaaacuuuuuugaaauaauaaaucugguagaaaaaugagaucucaaaggcucuuuucagagccaccaaaaaaaaaaaaaaaaaaaaaaaaaaaaaaaaaaaaaaaaaaaaaaaaaaaaaaaaaaaaaaaaagaauu

SEQ ID NO: 27371 - RNA, 1778 nt, Artificial Sequence
  mRNA product Design b-4 (hSL-A64-N5) comprising derived and/or modified sequence from LASV(KAK-428;Clade n.d. (VII))__ANH09740__GPCmut4 (opt5)
aggagagucccgcagucggcguccagcggcucugcuuguucgugugugugucguugcaggccuuauucaagcuuaccaugggccagaucgugaccuucuuucaagaggucccccacguuauugaagaggugaugaacaucgugcugauugcccucagccugcuugcuauccugaaggggcucuacaauuucgccacaugcggagucauuggccugaucacguuucuucugcucugugggagauccugcucugcgaccuauaaaggacaguacgaacugcagacacuggagcucaacauggaaagccugaauauguguaugccucuuuccugcaccaagaacaauucucaucacuauauccgggcuggcaacaauacagggcuggagcucacccugacaaacaccagcauuaucucccauaaauucuguaaucuuucugacgcccacaagaaaaaccuguacgaucauacgcucaugagcauuaucaccacauuucaccuguccauuccgaauuucaaccaguaugaggccaugagcugcgacuuuaauggaggcaagaucucuauucaauacaaccugucccacagcuaugcuggcgaugccgcucagcauugugggaccguggccaauggaguucuccagacauucaugcgcauggcguggggcgggucuuaccuggcccuugacuccggaagacggggcugggauugcaucaucagcucuuaccaguaucugauuauccaaaacaccacgugggacgaucacugucaguuuucccgccccagcccuauuggguaccucggauucgugucccagaagacaagagacaucuauauuucucggcgcagacggggcaccuuuacauggacccugagcgauuccgaaggccaugacaugcccgggggauacugccuuacccgcuggaugcugaucgaggcugaucucaaauguuucggcaacacagccgucgcuaagugcaaugaaaaacacgacgaggaguuuugcgauauguggagacuguucgacuucuguaagcaggccauccaacggcugaaagcgccugcccagaugaacauucagcucaucaauaaggcugugaacgcccugauuaaugaccaacuuaugaugaagaaccaucugcgcgauaucauggggauucccuauugcaauuacagcaaauuuuguuaucucaacaauacgaccacaggaagaaccucucugccucggugcugucuuaucuccaacggcagcuaccugaaugaaacacacuucucugacgauaucgagcagcaggcugacaacaugauuaccgaaaugcuccagaaggaguacauggaucgccaagggaaaacgccgcugggacugguugaccucuuuguguucagcacauccuuuuaucugaucaccauuuuccuucaccuggucaagauccccacccauagacacauugugggcaaaccuugccccaagccucaucggcucaaucacaugggcaucuguucuugcgggcuguacaaacagcccggagugccggucagauggaagcgcugaggacuaguaauaaggaaacuguaugaaugucugugggcaggaagugaagagauccuucuguaaagguuuuuggaauuaugucugcugaauaauaaacuuuuuugaaauaauaaaucugguagaaaaaugagaucucaaaggcucuuuucagagccaccaaaaaaaaaaaaaaaaaaaaaaaaaaaaaaaaaaaaaaaaaaaaaaaaaaaaaaaaaaaaaaaaagaauu

SEQ ID NO: 27372 - RNA, 1778 nt, Artificial Sequence; identical to SEQ ID NO: 27366
  mRNA product Design b-4 (hSL-A64-N5) comprising derived and/or modified sequence from LASV(Pinneo-NIG-1969;Clade I)__AIT17836__GPCmut4 (opt5)

SEQ ID NO: 27373 - RNA, 1778 nt, Artificial Sequence
  mRNA product Design b-4 (hSL-A64-N5) comprising derived and/or modified sequence from LASV(ISTH0009-NIG-2011;Clade II)__AIT17404__GPCmut4 (opt5)
aggagagucccgcagucggcguccagcggcucugcuuguucgugugugugucguugcaggccuuauucaagcuuaccaugggccagaucauuaccuucuuucaagaggugccccacgucaucgaagagguuaugaacauugugcugaucgcccucagccugcuugcuauucugaaggggaucuacaauguggccacaugcggacucuucggccuggucuccuuucuucugcucugugggagaucuugcagcacgaccuauaaaggaguguacgaacugcagacacuggagcucgacauggcgucccugaacauguguaugccucuuucuugcaccaagaauaacagccaucacuauaucaugguuggcaaugaaacagggcuggagcucacccugacaaacaccuccauuaucaaucauaaauucuguaaccuuucugaugcucacaagaaaaaucuguacgaccaugcccucaugagcauuaucuccacguuucaccugagcauuccgaacuucaaucaguaugaggccaugucuugcgauuuuaacggaggcaagaucuccgugcaguacaaucugagccacgcuuaugccgucgacgcugccaaccauuguggcaccauugcgaauggggugcuccaaacauucaugcggauggccuggggaggcucuuacaucgcucuggauuccgggaagggaagcugggacugcaucaugaccucuuaccaguaucuuauuauccagaacacaaccugggaagaucacugucaguuuucccgccccagcccuauuggcuaccuggggcuccugucccaaagaacgcgggacaucuauauuucucgcagacggcgcggaacauucaccuggacacuuagcgauuccgagggcaacgaaacccccggcggguacugccugaccagauggaugcucaucgaggccgagcugaaauguuuuggaaauacagcuguugccaagugcaacgaaaaacaugacgaggaguucugcgauaugcugcggcucuuugacuucuguaagcaggcgauccgcagacugaaaacgccugcccagaugagcauucagcuuaucaauaaggcugugaacgcccugauuaaugaucaacucaucaugaagaaccaucugcgggacauuaugggcauccccuauugcaauuacucuaaauauuguuaccuuaaccacaccgucacagggaagaccucccugccucgcugcugucucgugagcaauggaucuuaccugaacgaaacacacuucagcgacgauaucgaacagcaggcugacaauaugauuaccgagcugcuccaaaaagaguauauggauagacagggcaagacgccgcuggggcuuguggaccuguuugucuucuccacaucuuuuuaccucaucagcauuuuccugcaccugaucaaaauucccacccaucggcacaucaccggaaagccuugccccaaaccucaucgccuuaaccacaugggcauuuguuccugcggccucuauaagcaccccgggguuccggugaaguggaaaagaugaggacuaguaauaaggaaacuguaugaaugucugugggcaggaagugaagagauccuucuguaaagguuuuuggaauuaugucugcugaauaauaaacuuuuuugaaauaauaaaucugguagaaaaaugagaucucaaaggcucuuuucagagccaccaaaaaaaaaaaaaaaaaaaaaaaaaaaaaaaaaaaaaaaaaaaaaaaaaaaaaaaaaaaaaaaaagaauu

SEQ ID NO: 27374 - RNA, 1778 nt, Artificial Sequence
  mRNA product Design b-4 (hSL-A64-N5) comprising derived and/or modified sequence from LASV(ISTH2010-NIG-2012;Clade II)__AIT17482__GPCmut4 (opt5)
aggagagucccgcagucggcguccagcggcucugcuuguucgugugugugucguugcaggccuuauucaagcuuaccaugggccagaucauuaccuucuuucaagaggugccccacgucaucgaagagguuaugaacauugugcugaucgcccucagccugcuugcuauucugaaggggaucuacaauguggccacaugcggacucuucggccuggucuccuuucuucugcucugugggagaucuugcagcacgaccuauaaaggaguguacgaacugcagacacuggagcucgacauggcgucccugaacauguguaugccucuuucuugcaccaagaauaacagccaucacuauaucaugguuggcaaugaaacagggcuggagcucacccugacaaacaccuccauuaucaaucauaaauucuguaaccuuucugaugcucacaagaaaaaucuguacgaccaugcccucaugagcauuaucuccacguuucaccugagcauuccgaacuucaaucaguaugaggccaugucuugcgauuuuaacggaggcaagaucuccgugcaguacaaucugagccacgcuuaugccgucgacgcugccaaccauuguggcaccauugcgaauggggugcuccaaacauucaugcggauggccuggggaggcucuuacaucgcucuggauuccgggaagggaagcugggacugcaucaugaccucuuaccaguaucuuauuauccagaacauuacaugggaagaucacugucaguuuucccgccccagcccuaucggcuaccuggggcuccugucccaaagaacccgggacauuuauaucucucgcagacggcgcggaacguucacauggacccuuagcgauuccgagggcaacgaaacacccggcggguacugccugaccagauggaugcucaucgaggccgagcugaaauguuuuggaaauaccgcuguugccaagugcaacgaaaaacaugacgaggaguucugcgauaugcugcggcucuuugacuucuguaagcaggcgauucgcagacugaaaacgccugcccagaugagcauccagcuuauuaauaaggcugugaacgcccugaucaaugaucaacucauuaugaagaaccaucugcgggacaucaugggcauccccuauugcaauuacucuaaauauuguuaccuuaaccacacagucaccgggaagacaucccugccucgcugcugucucgugagcaauggaucuuaccugaacgaaacccacuucagcgacgauauugaacagcaggcugacaauaugaucacagagcugcuccaaaaagaguauauugauagacagggcaagaccccgcuggggcuuguggaccuguuugucuucuccacgucuuuuuaccucaucagcauuuuccugcaccugguuaaaauccccacacaucggcacguggugggaaagccuugccccaaaccucaucgccuuaaccacaugggcauuuguuccugcggccucuauaagcaccccggggucccggugaaguggaaaagaugaggacuaguaauaaggaaacuguaugaaugucugugggcaggaagugaagagauccuucuguaaagguuuuuggaauuaugucugcugaauaauaaacuuuuuugaaauaauaaaucugguagaaaaaugagaucucaaaggcucuuuucagagccaccaaaaaaaaaaaaaaaaaaaaaaaaaaaaaaaaaaaaaaaaaaaaaaaaaaaaaaaaaaaaaaaaagaauu

SEQ ID NO: 27375 - RNA, 1778 nt, Artificial Sequence
  mRNA product Design b-4 (hSL-A64-N5) comprising derived and/or modified sequence from LASV(Lassa virus/H.sapiens-wt/NGA/2015/ISTH_0543;Clade II)__AVO03639__GPCmut4 (opt5)
aggagagucccgcagucggcguccagcggcucugcuuguucgugugugugucguugcaggccuuauucaagcuuaccaugggccagaucauuaccuucuuucaagaggugccccacgucaucgaagagguuaugaacauugugcugaucgcccucagccugcuugcuauucugaaggggaucuacaauguggccacaugcggacucuucggccuggucuccuuucuucugcucugugggagaucuugcagcacgaccuauaaaggaguguacgaacugcagacacuggagcucgacauggcgaaccugaauauguguaugccucuuuccugcaccaagaacaauucucaucacuauaucaugguuggcaacgaaacagggcuggagcucacccugacaaauaccagcauuaucaaccauaaauucuguaaucuuuccgaugcucacaagaaaaaccuguacgaccaugcccucaugucuauuaucagcacguuucaccuguccauuccgaauuucaaccaguaugaggccaugagcugcgauuuuaauggaggcaagaucucugugcaguacaaccugucccacaccuaugcugucgacgccgcuaaucauuguggcacaauugccaacggggugcuccaaaccuucaugcggauggcguggggaggcagcuacaucgcccuggauucugggaagggauccugggacugcaucaugacaagcuaccaguaucuuguuauucagaacaccacgugggaagaucacugucaguuuucucgccccuccccuaucggcuaccuggggcuccugagccaaagaacacgggacauuuauaucucccgcagacggcgcggaaccuucacauggacccuuucugauagcgagggcaaugaaacccccggcggguacugccugacaagauggaugcucauugaggcugagcugaaauguuuuggaaacacggccguggcuaagugcaaugaaaaacaugacgaggaguucugcgauaugcugcggcucuuugacuucuguaagcaggccauccgcagacugaaaaccccugcgcagauguccauccagcuuauuaacaaggccgucaaugcucugaucaacgaucaacucauuaugaagaaucaucugcgggacaucaugggcauucccuauugcaacuacagcaaauauuguuaccuuaaucacacagugaccgggaagacaucucugccucgcugcugucucguguccaacggaagcuaccugaaugaaacccacuucucugacgauaucgaacagcaggccgacaacaugaucacggagcugcuccaaaaagaguauauugauagacagggcaagacaccgcuggggcuugucgaccuguuuguuuucagcaccuccuuuuaccucaucucuauuuuccugcaccuggugaaaauccccacccaucggcacauuacaggaaagccuugccccaaaccucaucgccuuaaucacaugggcaucuguagcugcggccucuauaagcaccccggggugccggucaaguggaaaagaugaggacuaguaauaaggaaacuguaugaaugucugugggcaggaagugaagagauccuucuguaaagguuuuuggaauuaugucugcugaauaauaaacuuuuuugaaauaauaaaucugguagaaaaaugagaucucaaaggcucuuuucagagccaccaaaaaaaaaaaaaaaaaaaaaaaaaaaaaaaaaaaaaaaaaaaaaaaaaaaaaaaaaaaaaaaaagaauu

SEQ ID NO: 27376 - RNA, 1778 nt, Artificial Sequence
  mRNA product Design b-4 (hSL-A64-N5) comprising derived and/or modified sequence from LASV(Lassa virus/H.sapiens-wt/NGA/2016/ISTH_0009;Clade II)__AVO03571__GPCmut4 (opt5)
aggagagucccgcagucggcguccagcggcucugcuuguucgugugugugucguugcaggccuuauucaagcuuaccaugggccagaucauuaccuucuuucaagaggugccccacgucaucgaagagguuaugaacauugugcugaucgcccucagccugcuugcuauucugaaggggaucuacaauguggccacaugcggacuccugggccuugucuccuuccugcuccugugugggagaucuugcagcacgaccuauaaaggaguguacgaacugcagacacucgagcuggacauggcgucccuuaacauguguaugccucugucuugcaccaagaauaacagccaucacuauaucaugguuggcaaugaaacagggcucgagcugacccuuacaaacaccuccauuaucaaucauaaauuuuguaaccugucugaugcucacaagaaaaaucucuacgaccaugcccugaugagcauuaucuccacguuccaccugagcauuccgaacuuuaaucaguaugaggccaugucuugcgauuucaacggaggccggaucuccgugcaguacaaucucagccacucuuaugcugucgacgccgcuaaccauuguggcaccauugccaauggggugcugcaaacauuuaugcgcauggcguggggaggcuccuacaucgcccuugauagcgggaagggaucuugggacugcaucaugaccuccuaccaguaucugauuauccagaacacaaccugggaagaucacugucaguucagcagacccuccccuauuggcuaccucgggcugcuuucucaacggacgcgcgacaucuauauuagcagacggcgcagaggaacauuuaccuggacacuguccgauagcgagggcaacgaaacccccggcggguacugccucacccgguggaugcugaucgaggcugagcugaaguguuucggaaauacagccguugcuaaaugcaacgaaaagcaugacgaggaauuuugcgauaugcuccgccuguucgacuuuuguaaacaggccaucagacggcuuaagacgccugcgcagaugucuauucagcugaucaauaaagccgugaacgcucucauuaaugaucaacugaucaugaagaaccaccuucgcgacauuaugggcauccccuauugcaauuacuccaaguauuguuaccugaaccacaccgucacagggaaaaccagccucccuagaugcugucuggugucuaauggaagcuaccugaacgagacacauuucuccgacgauaucgaacagcaggccgacaauaugauuaccgagcuccugcaaaaggaguauaucgaucggcagggcaaaacgccgcuugggcugguggaccucuucgucuuuucuaccagcuucuaccugauuuccaucuuucugcaccuuguuaagauucccacacaucgccacaucaccggaaaaccuugccccaagccucauagacucaaccacaugggcauuuguagcugcggccuguauaaucaccccggggugccggugaaauggaagcggugaggacuaguaauaaggaaacuguaugaaugucugugggcaggaagugaagagauccuucuguaaagguuuuuggaauuaugucugcugaauaauaaacuuuuuugaaauaauaaaucugguagaaaaaugagaucucaaaggcucuuuucagagccaccaaaaaaaaaaaaaaaaaaaaaaaaaaaaaaaaaaaaaaaaaaaaaaaaaaaaaaaaaaaaaaaaagaauu

SEQ ID NO: 27377 - RNA, 1778 nt, Artificial Sequence
  mRNA product Design b-4 (hSL-A64-N5) comprising derived and/or modified sequence from LASV(Lassa virus/H.sapiens-wt/NGA/2016/ISTH_0017;Clade II)__AVO03567__GPCmut4 (opt5)
aggagagucccgcagucggcguccagcggcucugcuuguucgugugugugucguugcaggccuuauucaagcuuaccaugggccagaucauuaccuucuuucaagaggugccccacgucaucgaagagguuaugaacauugugcugaucgcccucagccugcuugcuauucugaaggggaucuacaauguggccacaugcggacucuucggccuggucuccuuucuucugcucugugggagaucuugcagcacgaccuauaaaggaguguacgaacugcagacacuggagcucgacauggcgucccugaacauguguaugccucuuucuugcaccaagaauaacagccaucacuauaucaugguuggcaaugaaacagggcuggagcucacccugacaaacaccuccauuaucaaucauaaauucuguaaccuuucugaugcucacaagaaaaaucuguacgaccaugcccucaugagcauuaucuccacguuucaccugagcauuccgaacuucaaucaguaugaggccaugucuugcgauuuuaacggaggcaagaucuccgugcaguacaaucugagccacaccuaugcuauugacgccgcuaaccauuguggcacaaucgccaaugggguccuccaaaccuucaugcggauggcguggggaggcucuuacaucgcccuggauuccgggaagggaagcugggacugcauuaugacaucuuaccaguaucuuaucauucagaacaccacgugggaagaucacugucaguuuucccgccccagcccuaucggcuaccuggggcuccugucccaaagaacacgggacauuuauaucucucgcagacggcgcggaaccuucacauggacccuuagcgauuccgagggcaacgaaacccccggcggguacugccugacaagauggaugcucaucgaggcugagcugaaauguuuuggaaauacggccguggcuaagugcaacgaaaaacaugacgaggaguucugcgauaugcugcggcucuuugacuucuguaagcaggccauucgcagacugaaaaccccugcgcagaugagcauccagcuuauuaauaaggccguuaacgcucugaucaaugaucaacucauuaugaagaaccaucugcgggacaucaugggcauccccuauugcaauuacucuaaauauuguuaccuuaaccacacagugaccgggaagacaucccugccucgcugcugucucgucagcaauggaucuuaccugaacgaaacccacuucagcgacgauauugaacagcaggccgacaauaugaucacggagcugcuccaaaaagaguauauggauagacagggcaagacaccgcuggggcuuguggaccuguuuguguucuccaccucuuuuuaccucauuagcaucuuccugcaccugguccggauucccacccaucgccacguuaucggaaaaccuugccccaagccucauagacuuaaccacaugggcauuuguuccugcggccucuauaaacaccccggggugccggugaaguggaagcggugaggacuaguaauaaggaaacuguaugaaugucugugggcaggaagugaagagauccuucuguaaagguuuuuggaauuaugucugcugaauaauaaacuuuuuugaaauaauaaaucugguagaaaaaugagaucucaaaggcucuuuucagagccaccaaaaaaaaaaaaaaaaaaaaaaaaaaaaaaaaaaaaaaaaaaaaaaaaaaaaaaaaaaaaaaaaagaauu

SEQ ID NO: 27378 - RNA, 1778 nt, Artificial Sequence
  mRNA product Design b-4 (hSL-A64-N5) comprising derived and/or modified sequence from LASV(Lassa virus/H.sapiens-wt/NGA/2018/ISTH_0959;Clade II)__AVV65099__GPCmut4 (opt5)
aggagagucccgcagucggcguccagcggcucugcuuguucgugugugugucguugcaggccuuauucaagcuuaccaugggccagaucauuaccuucuuucaagaggugccccacgucaucgaagagguuaugaacauugugcugaucgcccucagccugcuugcuauucugaaggggaucuacaauguggucacaugcggacucuucggccugguguccuuucuucugcucugugggagaucuugcagcacgaccuauaaaggaguuuacgaacugcagacacuggagcucgacauggccucccugaacauguguaugccucuuucuugcaccaagaauaacagccaucacuauaucauggugggcaaugaaacagggcuggagcucacccugacaaacaccuccauuaucaaucauaaauucuguaaccuuucugaugcgcacaagaaaaaucuguacgaccaugcucucaugagcauuaucuccacguuucaccugagcauuccgaacuucaaucaguaugaggccaugucuugcgauuuuaacggaggcaagaucuccguccaguacaaucugagccacgccuaugcuauugacgccgcuaaccauuguggcaccaucgccaauggggugcuccaaacauucaugcggauggcguggggaggcucuuacaucgcccuggauuccgggaagggaagcugggacugcauuaugaccucuuaccaguaucuuaucauucagaacacaaccugggaagaucacugucaguuuucccgccccagcccuaucggcuaccuggggcuccugucccaaagaacgcgggacauuuauaucucucgcagacggcgcggaacauucaccuggacacuuagcgauuccgagggcaacgaaacccccggcggguacugccugaccagauggaugcucaucgaggcugagcugaaauguuuuggaaauacagccguugcuaagugcaacgaaaaacaugacgaggaguucugcgauaugcugcggcucuuugacuucuguaagcaggccauucgcagacugaaaacgccugcgcagaugagcauccagcuuauuaauaaggccgugaacgcucugaucaaugaucaacucauuaugaagaaccaucugcgggacaucaugggcauccccuauugcaauuacucuaaauauuguuaccuuaaccacaccgucacagggaagaccucccugccucgcugcugucucgugagcaauggaucuuaccugaacgaaacacacuucagcgacgauauugaacagcaggccgacaauaugaucaccgagcugcuccaaaaagaguauauugauagacagggcaagacgccgcuggggcuuguggaccuguuugucuucuccacaucuuuuuaccucaucagcauuuuccugcaccugguuaaaauccccacccaucggcacgugauuggaaagccuugccccaaaccucaucgccuuaaccacaugggcaucuguuccugcggccucuauaagcaccccggggugccggucaaguggaaaagaugaggacuaguaauaaggaaacuguaugaaugucugugggcaggaagugaagagauccuucuguaaagguuuuuggaauuaugucugcugaauaauaaacuuuuuugaaauaauaaaucugguagaaaaaugagaucucaaaggcucuuuucagagccaccaaaaaaaaaaaaaaaaaaaaaaaaaaaaaaaaaaaaaaaaaaaaaaaaaaaaaaaaaaaaaaaaagaauu

SEQ ID NO: 27379 - RNA, 1778 nt, Artificial Sequence
  mRNA product Design b-4 (hSL-A64-N5) comprising derived and/or modified sequence from LASV(LASV003-NIG-2008;Clade II)__AIT17580__GPCmut4 (opt5)
aggagagucccgcagucggcguccagcggcucugcuuguucgugugugugucguugcaggccuuauucaagcuuaccaugggccagaucauuaccuucuuucaagaggugccccacgucaucgaagagguuaugaacauugugcugaucgcccucagccugcuugcuauucugaaggggaucuacaauguggccacaugcggacucuucggccuggucuccuuucuucugcucugugggagaucuugcagcacgaccuauaaaggaguguacgaacugcagacacuggagcucgacauggcgucccugaacauguguaugccucuuucuugcaccaagaauaacagccaucacuauaucaugguuggcaaugaaacagggcuggagcucacccugacaaacaccuccauuaucaaucauaaauucuguaaccuuucugaugcucacaagaaaaaucuguacgaccaugcccucaugagcauuaucuccacguuucaccugagcauuccgaacuucaaucaguaugaggccaugucuugcgauuuuaacggaggcaagaucuccgugcaguacaaucugagccacaccuaugcugucgacgccgcuaaccauuguggcacaauugccaauggggugcuccaaaccuucaugcggauggcguggggaggcucuuacaucgcccuggauuccgggaagggaagcugggacugcaucaugacaucuuaccaguaucuuauuauccagaacaccacgugggaagaucacugucaguuuucccgccccagcccuauuggcuaccuggggcuccugucccaaagaacacgggacaucuauauuucucgcagacggcgcggaaccuucacauggacccuuagcgauuccgagagcaacgaaacccccggcggcuacugccugacaagauggaugcucaucgaggcugagcugaaauguuuugggaauacggccguugcuaagugcaacgaaaaacaugacgaggaguucugcgauaugcugcggcucuuugacuucuguaagcaggccauccgcagacugaaagcgccugcccagaugucuauucagcuuaucaauaaggcugugaacgcccugauuaaugaucaacucaucaugaagaaccaucugcgggacauuaugggaauccccuauugcaauuacuccaaauauuguuaccuuaaccacaccgucacaggccgcaccagccugccuagaugcugucucgugucuaaugggagcuaccugaacgaaacacacuucuccgacgauaucgaacagcaggcugacaauaugauuaccgagcugcuccaaaaggaguauauggaucggcagggaaaaacgccgcugggccuuguggaccuguuugucuucucuaccagcuuuuaccucaucuccauuuuccugcaccugguuaagauccccacacaucgccacgugauugggaaaccuugccccaagccucauagacuuaaccacaugggaaucuguagcugcggccucuauaaacaccccggcgugccggucaaguggaagcggugaggacuaguaauaaggaaacuguaugaaugucugugggcaggaagugaagagauccuucuguaaagguuuuuggaauuaugucugcugaauaauaaacuuuuuugaaauaauaaaucugguagaaaaaugagaucucaaaggcucuuuucagagccaccaaaaaaaaaaaaaaaaaaaaaaaaaaaaaaaaaaaaaaaaaaaaaaaaaaaaaaaaaaaaaaaaagaauu

SEQ ID NO: 27380 - RNA, 1778 nt, Artificial Sequence
  mRNA product Design b-4 (hSL-A64-N5) comprising derived and/or modified sequence from LASV(LASV035-NIG-2009;Clade II)__AIT17588__GPCmut4 (opt5)
aggagagucccgcagucggcguccagcggcucugcuuguucgugugugugucguugcaggccuuauucaagcuuaccaugggccagaucauuaccuucuuucaagaggugccccacgucaucgaagagguuaugaacauugugcugaucgcccucagccugcuugcuauucugaaggggaucuacaauguggccacaugcggacucuucggccuggucuccuuucuucugcucugugggagaucuugcagcacgaccuauaaaggaguguacgaacugcagacacuggagcucgacauggcgucccugaacauguguaugccucuuucuugcaccaagaauaacagccaucacuauaucaugguuggcaaugaaacagggcuggagcucacccugacaaacaccuccauuaucaaucauaaauucuguaaccuuucugaugcucacaagaaaaaucuguacgaccaugcccucaugagcauuaucuccacguuucaccugagcauuccgaacuucaaucaguaugaggccaugucuugcgauuuuaacggaggcaagaucuccgugcaguacaaucugagccacgcuuaugccgucgacgcugccaaccauuguggcaccauugcgaauggggugcuccaaacauucaugcggauggccuggggaggcucuuacaucgcucuggauuccgggaagggaagcugggacugcaucaugaccucuuaccaguaucuuauuauccagaacacaaccugggaagaucacugucaguuuucccgccccagcccuauuggcuaccuggggcuccugucccaaagaacgcgggacaucuauauuucucgcagacggcgcggaacauucaccuggacacuuagcgauuccgagggcaacgaaacccccggcggguacugccugaccagauggaugcucaucgaggccgagcugaaauguuuuggaaauacagcuguugccaagugcaacgaaaaacaugacgaggaguucugcgauaugcugcggcucuuugacuucuguaagcaggcgauccgcagacugaaagccccugcucagaugagcauucagcuuaucaauaaggccgugaacgcucugauuaaugaucaacucaucaugaagaaccaucugcgggacauuaugggcauccccuauugcaauuacucuaaauauuguuaccuuaaccacacggucaccgggaagacaucccugccucgcugcugucucgugagcaauggaucuuaccugaacgaaacccacuucagcgacgauaucgaacagcaggccgacaauaugauuacagagcugcuccaaaaagaguauaucgauagacagggcaagaccccgcuggggcuuguggaccuguuugucuucuccacgucuuuuuaccucauuagcaucuuccugcaccugguuaaaauucccacacaucggcacgugaucggaaagccuugccccaaaccucaucgccuuaaccacaugggcauuuguuccugcggccucuauaagcaccccggggugccggucaaguggaaaagaugaggacuaguaauaaggaaacuguaugaaugucugugggcaggaagugaagagauccuucuguaaagguuuuuggaauuaugucugcugaauaauaaacuuuuuugaaauaauaaaucugguagaaaaaugagaucucaaaggcucuuuucagagccaccaaaaaaaaaaaaaaaaaaaaaaaaaaaaaaaaaaaaaaaaaaaaaaaaaaaaaaaaaaaaaaaaagaauu

SEQ ID NO: 27381 - RNA, 1778 nt, Artificial Sequence
  mRNA product Design b-4 (hSL-A64-N5) comprising derived and/or modified sequence from LASV(LASV1000-NIG-2009;Clade II)__AIT17782__GPCmut4 (opt5)
aggagagucccgcagucggcguccagcggcucugcuuguucgugugugugucguugcaggccuuauucaagcuuaccaugggccagaucauuaccuucuuucaagaggugccccacgucaucgaagagguuaugaacauugugcugaucgcccucagccugcuugcuauucugaaggggaucuacaauguggccacaugcggacucuucggccuggucuccuuucuucugcucugugggagaucuugcagcacgaccuauaaaggaguguacgaacugcagacacuggagcucgacauggcgucccugaacauguguaugccucuuucuugcaccaagaauaacagccaucacuauaucaugguuggcaaugaaacagggcuggagcucacccugacaaacaccuccauuaucaaucauaaauucuguaaccuuucugaugcucacaagaaaaaucuguacgaccaugcccucaugagcauuaucuccacguuucaccugagcauuccgaacuucaaucaguaugaggccaugucuugcgauuuuaacggaggcaagaucuccgugcaguacaaucugagccacaccuaugcugucgacgccgcuaaccauuguggcacaauugccaauggggugcuccaaaccuucaugcggauggcguggggaggcucuuacaucgcccuggauuccgggaagggaagcugggacugcaucaugacaucuuaccaguaucuuauuauccagaacaccacgugggaagaucacugucaguuuucccgccccagcccuauuggcuaccuggggcuccugucccaaagaacacgggacaucuauauuucucgcagacggcgcggaaccuucacauggacccuuagcgauuccgagggcaacgaaacccccggcggguacugccugacaagauggaugcucaucgaggcugagcugaaauguuuuggaaauacggccguugcuaagugcaacgaaaaacaugacgaggaguucugcgauaugcugcggcucuuugacuucuguaagcaggccaucaaacgccugaagaccccugcgcagaugagcauucagcuuaucaauaaggccgugaacgcucugauuaaugaucaacucaucaugaaaaaccaccugagagacauuaugggcauccccuauugcaauuacucuaaguauuguuaccuuaaccacacagucaccgggaaaacaucccugccucggugcugucucgugagcaauggaucuuaccugaacgaaacccauuucagcgacgauaucgaacagcaggccgacaauaugauuacggagcugcuccaaaaggaguauaucgaucgccagggcaaaacaccgcuggggcuuguggaccuguuugucuucuccaccucuuuuuaccucauuagcaucuuccugcaccugguuaagauucccacccauagacacguggugggaaaaccuugccccaagccucaucggcuuaaccacaugggcaucuguuccugcggccucuauaagcaccccggggucccggugaaauggaagcgcugaggacuaguaauaaggaaacuguaugaaugucugugggcaggaagugaagagauccuucuguaaagguuuuuggaauuaugucugcugaauaauaaacuuuuuugaaauaauaaaucugguagaaaaaugagaucucaaaggcucuuuucagagccaccaaaaaaaaaaaaaaaaaaaaaaaaaaaaaaaaaaaaaaaaaaaaaaaaaaaaaaaaaaaaaaaaagaauu

SEQ ID NO: 27382 - RNA, 1778 nt, Artificial Sequence
  mRNA product Design b-4 (hSL-A64-N5) comprising derived and/or modified sequence from LASV(LASV221-NIG-2010;Clade II)__AIT17624__GPCmut4 (opt5)
aggagagucccgcagucggcguccagcggcucugcuuguucgugugugugucguugcaggccuuauucaagcuuaccaugggccagaucauuaccuucuuucaagaggugccccacgucaucgaagagguuaugaacauugugcugaucgcccucagccugcuugcuauucugaaggggaucuacaauguggccacaugcggacucuucggccuggucuccuuucuucugcucugugggagaucuugcagcacgaccuauaaaggaguguacgaacugcagacacuggagcucgacauggcgucccugaacauguguaugccucuuucuugcaccaagaauaacagccaucacuauaucaugguuggcaaugaaacagggcuggagcucacccugacaaacaccuccauuaucaaucauaaauucuguaaccuuucugaugcucacaagaaaaaucuguacgaccaugcccucaugagcauuaucuccacguuucaccugagcauuccgaacuucaaucaguaugaggccaugucuugcgauuuuaacggaggcaagaucuccgugcaguacaaucugagccacaccuaugcuauugacgccgcuaaccauuguggcacaaucgccaaugggguccuccaaaccuucaugcggauggcguggggaggcucuuacaucgcccuggauuccgggaagggaagcugggacugcauuaugacaucuuaccaguaucuuaucauucagaacaccacgugggaagaucacugucaguuuucccgccccagcccuaucggcuaccuggggcuccugucccaaagaacacgggacauuuauaucucucgcagacggcgcggaaccuucacauggacccuuagcgauuccgagggcaacgaaacccccggcggguacugccugacaagauggaugcucaucgaggcugagcugaaauguuuuggaaauacggccguggcuaagugcaacgaaaaacaugacgaggaguucugcgauaugcugcggcucuuugacuucuguaagcaggccauucgcagacugaaaaccccugcgcagaugagcauccagcuuauuaauaaggccguuaacgcucugaucaaugaucaacucauuaugaagaaccaucugcgggacaucaugggcauccccuauugcaauuacucuaaauauuguuaccuuaaccacacagugaccgggaagacaucccugccucgcugcugucucgucagcaauggaucuuaccugaacgaaacccacuucagcgacgauauugaacagcaggccgacaauaugaucacggagaugcugcaaaaagaguauauggauagacagggcaagacaccgcucgggcugguggaccuuuuuguguucuccaccucuuuuuaccugauuagcaucuuccuccaccuggucaaaauucccacccaucggcacguuaucggaaagccuugccccaaaccucaucgccugaaccacaugggcauuuguuccugcggccuuuauaagcaccccggggugccggugaaguggaaaagaugaggacuaguaauaaggaaacuguaugaaugucugugggcaggaagugaagagauccuucuguaaagguuuuuggaauuaugucugcugaauaauaaacuuuuuugaaauaauaaaucugguagaaaaaugagaucucaaaggcucuuuucagagccaccaaaaaaaaaaaaaaaaaaaaaaaaaaaaaaaaaaaaaaaaaaaaaaaaaaaaaaaaaaaaaaaaagaauu

SEQ ID NO: 27383 - RNA, 1778 nt, Artificial Sequence
  mRNA product Design b-4 (hSL-A64-N5) comprising derived and/or modified sequence from LASV(LASV237-NIG-2010;Clade II)__AIT17638__GPCmut4 (opt5)
aggagagucccgcagucggcguccagcggcucugcuuguucgugugugugucguugcaggccuuauucaagcuuaccaugggccagaucauuaccuucuuucaagaggugccccacgucaucgaagagguuaugaacauugugcugaucgcccucagccugcuugcuauucugaaggggaucuacaauguggccacaugcggacucuucggccuggucuccuuucuucugcucugugggagaucuugcagcacgaccuauaaaggaguguacgaacugcagacacuggagcucgacauggcgucccugaacauguguaugccucuuucuugcaccaagaauaacagccaucacuauaucaugguuggcaaugaaacagggcuggagcucacccugacaaacaccuccauuaucaaucauaaauucuguaaccuuucugaugcucacaagaaagaccuguacgaucaugcccucaugagcauuaucuccacguuucaccugagcauuccgaauuucaaccaguaugaggccaugucuugcgacuuuaauggaggcaagaucuccgugcaguacaaccugagccacaccuaugcugucgaugccgcuaaucauuguggcacaauugccaacggggugcuccaaaccuucaugcggauggcguggggaggcucuuacaucgcccuggacuccgggaagggaagcugggauugcaucaugacaucuuaccaguaucuuauuauccagaauaccacgugggaagaccacugucaguuuucccgccccagcccuauuggcuaccuggggcuccugucccaaagaacacgggauaucuauauuucucgcagacggcgcggaaccuucacauggacccuuagcgacuccgagggcaacgaaacccccggcggguacugccugacaagauggaugcucaucgaggcugagcugaaauguuuuggaaacacggccguugcuaagugcaaugaaaaacaugaugaggaguucugcgacaugcugcggcucuuugauuucuguaagcaggccauccgcagacugaaaaccccugcgcagaugagcauucagcuuaucaacaaggccgugaaugcucugauuaacgaccaacucaucaugaagaaucaucugcgggacauuaugggcauccccuauugcaacuacucuaaauauuguuaccuuaaucacacagucaccgggaagacaucccugccucgcugcugucucgugagcaacggaucuuaccugaaugaaacccacuucagcgaugacaucgaacagcaggccgauaacaugauuacggagcugcuccaaaaagaguauauggacagacagggcaagacaccgcuggggcuuguggaucuguuugucuucuccaccucuuuuuaccucaucagcauuuuccugcaccugaucaaaauucccacccaucggcacaucacaggaaagccuugccccaaaccucaucgccuuaaucacaugggcauuuguuccugcggccucuauaagcaccccgggguuccggugaaguggaaaagaugaggacuaguaauaaggaaacuguaugaaugucugugggcaggaagugaagagauccuucuguaaagguuuuuggaauuaugucugcugaauaauaaacuuuuuugaaauaauaaaucugguagaaaaaugagaucucaaaggcucuuuucagagccaccaaaaaaaaaaaaaaaaaaaaaaaaaaaaaaaaaaaaaaaaaaaaaaaaaaaaaaaaaaaaaaaaagaauu

SEQ ID NO: 27384 - RNA, 1778 nt, Artificial Sequence
  mRNA product Design b-4 (hSL-A64-N5) comprising derived and/or modified sequence from LASV(LASV253-NIG-2011;Clade II)__AIT17670__GPCmut4 (opt5)
aggagagucccgcagucggcguccagcggcucugcuuguucgugugugugucguugcaggccuuauucaagcuuaccaugggccagaucauuaccuucuuucaagaggugccccacgucaucgaagagguuaugaacauugugcugaucgcccucagccugcuugcuauucugaaggggaucuacaauguggccacaugcggacucuucggccuggucuccuuucuucugcucugugggagaucuugcagcacgaccuauaaaggaguguacgaacugcagacacuggagcucgacauggcgucccugaacauguguaugccucuuucuugcaccaagaauaacagccaucacuauaucaugguuggcaaugaaacagggcuggagcucacccugacaaacaccuccauuaucaaucauaaauucuguaaccuuucugaugcucacaagaaaaaucuguacgaccaugcccucaugagcauuaucuccacguuucaccugagcauuccgaacuucaaucaguaugaggccaugucuugcgauuuuaacggaggcaagaucuccgugcaguacaaucugagccacaccuaugcugucgacgccgcuaaccauuguggcacaauugccaauggggugcuccaaaccuucaugcggauggcguggggaggcucuuacaucgcccuggauuccgggaagggaagcugggacugcaucaugacaucuuaccaguaucuuauuauccagaacaccacgugggaagaucacugucaguuuucccgccccagcccuauuggcuaccuggggcuccugucccaaagaacacgggacaucuauauuucucgcagacggcgcggaaccuucacauggacccuuagcgauuccgagggcaacgaaacccccggcggguacugccugacaagauggaugcucaucgaggcugagcugaaauguuuuggaaauacggccguugcuaagugcaacgaaaaacaugacgaggaguucugcgauaugcugcggcucuuugacuucuguaagcaggccauccgcagacugaaagcgccugcccagaugagcauucagcuuaucaauaaggcugugaacgcccugauuaaugaucaacucaucaugaagaaccaucugcgggacauuaugggcauccccuauugcaauuacucuaaauauuguuaccuuaaccacaccgucacagggcgcaccucccugccuagaugcugucucgugagcaauggaucuuaccugaacgaaacacacuucagcgacgauaucgaacagcaggcugacaauaugauuaccgagcugcuccaaaaggaguauaucgaucggcagggcaaaacgccgcuggggcuuguggaccuguuugucuucuccacaucuuuuuaccucauuagcaucuuccugcaccugguuaagauucccacccaucgccacaucauuggaaaaccuugccccaagccucauagacuuaaccacaugggcaucuguuccugcggccucuauaaacaccccggggugccggugaaguggaagcggugaggacuaguaauaaggaaacuguaugaaugucugugggcaggaagugaagagauccuucuguaaagguuuuuggaauuaugucugcugaauaauaaacuuuuuugaaauaauaaaucugguagaaaaaugagaucucaaaggcucuuuucagagccaccaaaaaaaaaaaaaaaaaaaaaaaaaaaaaaaaaaaaaaaaaaaaaaaaaaaaaaaaaaaaaaaaagaauu

SEQ ID NO: 27385 - RNA, 1778 nt, Artificial Sequence
  mRNA product Design b-4 (hSL-A64-N5) comprising derived and/or modified sequence from LASV(LASV254-NIG-2011;Clade II)__AIT17674__GPCmut4 (opt5)
aggagagucccgcagucggcguccagcggcucugcuuguucgugugugugucguugcaggccuuauucaagcuuaccaugggccagaucauuaccuucuuucaagaggugccccacgucaucgaagagguuaugaacauugugcugaucgcccucagccugcuugcuauucugaaggggaucuacaauguggccacaugcggacucuucggccuggucuccuuucuucugcucugugggagaucuugcagcacgaccuauaaaggaguguacgaacugcagacacuggagcucgacaugaccaaccugaauauguguaugccucuuuccugcacaaagaacaauucucaucacuauaucaugguuggcaacgaaaccgggcuggagcucacacugaccaauacgagcauuaucaaccauaaauucuguaaucuuuccgaugcgcacaagaaaaaccuguacaaucaugcucucaugucuauuaucagcaccuuucaccuguccauuccgaacuucaaucaguaugaggccaugagcugcgacuuuaacggaggcaagaucucugugcaguacaaucugucccacagcuaugccgucgaugcugccaaccauuguggcacaauugcuaacggggugcuccaaaccuucaugcggauggccuggggaggcucuuacaucgcgcuggacuccgggaagggaaauugggauugcaucaugacaagcuaccaguaucuuauuauccagaacaccacgugggaagaccacugucaguuuucucgccccuccccuauuggcuaccuggggcuccugagccaaagaacacgggauaucuauauuucccgcagacggcgcggaaccuucacauggacccuuucugacagcgagggcaaugaaacccccggcggguacugccugacaagauggaugcucaucgaggccgagcugaaauguuuuggaaacacggcuguugccaagugcaaugaaaaacaugaugaggaguucugcgacaugcugcggcucuuugauuucuguaagcaggcuauccgcagacugaaaaccccugcccaggcgaacauucagcuuaucaauaaggccgugaacgcucugauuaaugaccaacucaucaugaagaaccaucugcgggauauuaugggcauccccuauugcaauuacuccaaauauuguuaccuuaaccacacagucaccgggaagacaagccugccucgcugcugucucgugucuaauggauccuaccugaacgaaacccacuucagcgacgacaucgaacagcaggccgauaauaugauuacggagcugcuccaaaaagaguauauggacagacagggcaagacaccgcuggggcuuguggaucuguuugucuucucuaccagcuuuuaccucaucuccauuuuccugcaccugguuaaaauccccacccaucggcacgugauuggaaagccuugccccaaaccucaucgccuuaaccacaugggcaucuguucuugcggccucuauaagcaccccggggugccggucaaguggaaaagaugaggacuaguaauaaggaaacuguaugaaugucugugggcaggaagugaagagauccuucuguaaagguuuuuggaauuaugucugcugaauaauaaacuuuuuugaaauaauaaaucugguagaaaaaugagaucucaaaggcucuuuucagagccaccaaaaaaaaaaaaaaaaaaaaaaaaaaaaaaaaaaaaaaaaaaaaaaaaaaaaaaaaaaaaaaaaagaauu

SEQ ID NO: 27386 - RNA, 1778 nt, Artificial Sequence
  mRNA product Design b-4 (hSL-A64-N5) comprising derived and/or modified sequence from LASV(Nig08-A19;Clade III)__ADU56618__GPCmut4 (opt5)
aggagagucccgcagucggcguccagcggcucugcuuguucgugugugugucguugcaggccuuauucaagcuuaccaugggccagaucgugaccuucuuucaagaggucccccacguuauugaagaggugaugaacaucgugcugauugcccucagcauccuggcuauucuuaaggggcuguacaauaucgccacaugcggacucaucggccuggucacguuccuucugcucuccgggagaucuuguagcaugaccuauaaaggaguguacgaacugcagacacuggagcucaacaugaauacccugaacaugugcaugccucuuuccuguacaaagaauaacucucaucacuauauuaugguuggcaaugaaaccgggcuggagcucacacugaccaacacgagccuucugcaucacaaauuuugcaaucucuccgacgcgcauaagaaaaaccuguacgaucacacccugaugucuaucauuagcacauuccaccucuccaucccgaauuuuaaccaguaugaggcuaugagcugugacuucaauggaggcaagauuaccgugcaguacaaccugucucauuccuaugccaucgaugccgcuaaucacugcggcacagucgccaacggggugcuucaaaccuuuaugcggauggcuuggggaggcagcuacauugcccuggacucugggcgcggaaagugggauuguaucaugacguccuaccaguaucucaucauucagaacacaaccugggaagaccauugccaguucagcagacccucuccuaucggcuaccuggggcuucugucccaacggacacgcgauauuuauaucagcagacggcgcagaggaaccuuuaccuggacacucuccgacucugagggcaaugaaacgcccggcggguacugucugacccgguggaugcugauugaggcggagcucaaaugcuucggaaacacagccguugcuaaguguaaugaaaaacacgaugaggaauuuugcgacaugcugcgccuuuucgauuuuugcaagcaggccaucagacggcugaaagcuccugcccagaugagcauccagcucauuaacaaggcggugaaugcccugaucaacgaccaacuuauuaugaagaaucaucugcgcgauaucaugggcauucccuauuguaacuacuccaaauauugcuaccucaaucacaccagcacagggagaaccucucugccucgguguugccuggucuccaacggaagcuaccucaaugagacgcacuucucugacgacaucgaacagcaggcugauaacaugaucacagagaugcugcaaaaggaguaucuugaccgccagggcaaaaccccgcuggggcucguggaucuguucguguuuagcaccuccuucuaccugauuucuaucuuucuucaucucgucaagauucccacacacagacauaucguuggaaaaccuugucccaagccucaccggcugaaucacaugggcauuugcagcuguggccuguauaaacagcccggggugccggugagauggaagcgcugaggacuaguaauaaggaaacuguaugaaugucugugggcaggaagugaagagauccuucuguaaagguuuuuggaauuaugucugcugaauaauaaacuuuuuugaaauaauaaaucugguagaaaaaugagaucucaaaggcucuuuucagagccaccaaaaaaaaaaaaaaaaaaaaaaaaaaaaaaaaaaaaaaaaaaaaaaaaaaaaaaaaaaaaaaaaagaauu

SEQ ID NO: 27387 - RNA, 1781 nt, Artificial Sequence
  mRNA product Design b-4 (hSL-A64-N5) comprising derived and/or modified sequence from LASV(G1180-SLE-2010;Clade IV)__AIT17168__GPCmut4 (opt5)
aggagagucccgcagucggcguccagcggcucugcuuguucgugugugugucguugcaggccuuauucaagcuuaccaugggccagaucgugaccuucuuucaagaggucccccacguuauugaagaggugaugaacaucgugcugauugcccucagcauccuggcuguccuuaaggggcuguacaauuucgccacaugcggacucgugggccugcuuacguuucugcuccugugugggagauccugcaccgcgucucgguauaaaggaguuuacgaacugcagacacucgagcugaacauggaaacccuuaauauguguaugccucugagcugcacaaagaacaauucccaucacuauauuauggugggcaacgagaccgggcucgagcugacacuuaccaauacgucuaucaucaaccauaaauucuguaaucugagcgacgcucacaagaaaaaccucuacgaucaugcccugauguccauuaucucuaccuuucaccugagcauuccgaauuucaaccaguaugaagccauguccugcgacuuuaauggaggcaagaucagcguccaguacaaccucucucacuccuaugcuggcgaugccgcuaaucauugugggacaguggccaacggaguucugcaaaccuucaugcgcauggcguggggcgggagcuacauugcccuugacucuggacacggcuccugggauugcaucaugacaagcuaccaguaucugauuauccagaacaccacgugggaggaccauugucaguuuucuagacccuccccuaucggguaccucggacugcuuagccaacggacacgcgauauuuauaucuccagacggcgcagaggcaccuucacauggacccugucugacagcgaaggcaaggauacccccgggggauacugccucacacgguggaugcugauugaggcugagcugaaauguuuuggcaauacggccguggcuaagugcaacgaaaaacacgacgaggaguucugcgauaugcuccgccuguuugacuucuguaagcaggccauccagagacuuaaagcgccugcccagauguccauucaacugaucaauaaggcugucaacgcccucaucaaugaucagcugauuaugaagaaccaccuucgggacaucauggggauucccuauugcaauuacagcaaauauuguuaccugaaccauaccacaaccggaaagacaucucucccuaaaugcugucugguguccaauggcagcuaccugaacgaaacccacuucucugacgauaucgaacagcaagcugacaauaugauuacggagaugcuccagaaggaguauauggaacgccaggggaaaacaccgcugggacuuguggaucuguuugucuucagcaccuccuuuuaccucaucucuaucuuccugcaucugguuaagauucccacccacagacauaucgugggcaaaagcugcccuaagccccaccggcuuaaccacaugggcauuuguuccugcgggcucuauaagcagccuggagugcccgucaaauggaagcgcugaggacuaguaauaaggaaacuguaugaaugucugugggcaggaagugaagagauccuucuguaaagguuuuuggaauuaugucugcugaauaauaaacuuuuuugaaauaauaaaucugguagaaaaaugagaucucaaaggcucuuuucagagccaccaaaaaaaaaaaaaaaaaaaaaaaaaaaaaaaaaaaaaaaaaaaaaaaaaaaaaaaaaaaaaaaaagaauu

SEQ ID NO: 27388 - RNA, 1781 nt, Artificial Sequence
  mRNA product Design b-4 (hSL-A64-N5) comprising derived and/or modified sequence from LASV(G1442-SLE-2011;Clade IV)__AIT17180__GPCmut4 (opt5)
aggagagucccgcagucggcguccagcggcucugcuuguucgugugugugucguugcaggccuuauucaagcuuaccaugggccagaucgugaccuucuuucaagaggucccccacguuauugaagaggugaugaacaucgugcugauugcccucagcauccuggcuguccuuaaggggcuguacaauguggccacaugcggacucauuggccugguuacguuccuucugcucugugggagauccugcaccacaacccuguauaaaggaguguacgaacugcagacacucgagcugaacauggaaacccuuaauauguguaugccucugucuugcacaaagaacaauagccaucacuauauccgggucggcaacgagaccgggcucgagcugacgcuuaccaauacauccaucauuaaccauaaauuuuguaaucugucugacgcgcacaagaaaaaccucuacgaucaugcucugaugagcaucauuuccaccuuccaccugucuaucccgaauuuuaaccaguaugaagccaugagcugcgacuucaauggaggcaagauuuccgugcaguacaaccucagccacucuuaugccggcgaugcugccaaucauugugggacaguugcuaacggagugcugcaaaccuuuaugcgcauggccuggggcggguccuacaucgcgcuugacagcggaagaggcaacugggauugcauuaugacgucuuaccaguaucugaucauccagaauacaaccugggacgaucacugucaguucucccggcccagcccuauuggguaccucggacugcuuucucaacgcacaagagacgucuauaucucccggcgcagacggggcaccuuuaccuggacacugagcgauuccgagggcaaggacacgcccgggggauacugccucacccgcuggaugcugauugaagccgagcugaaauguuucggcaacacagcuguggccaagugcaaugagaaacaugaugaagaguuuugcgacaugcucagacuguucgauuuuuguaagcaggcuauccagcggcuuaaagccccugcgcagaugucuauucaacugaucaacaaggccgugaaugcucucaucaacgaccagcugauuaugaagaaucaccuucgcgacaucauggggauucccuauugcaacuacagcaaauauuguuaccugaauaacaccgccacaggaaagaccucccucccuaaaugcugucugaucagcaauggcucuuaccugaacgaaacgcacuucuccgaugacauugagcaggaagcugauaauaugaucacagagaugcuccaaaaggaguauauggaaagacaggggaaaaccccgcugggacuugucgaccuguucguuuuuagcaccucuuucuaccucaucagcauuuuucugcaucuggugaagauccccacacaccggcauauugugggcaaauccugcccuaagccccaccgccuuaaccauaugggcaucuguucuugcgggcucuauaagcagccuggaguccccgugagauggaaacggugaggacuaguaauaaggaaacuguaugaaugucugugggcaggaagugaagagauccuucuguaaagguuuuuggaauuaugucugcugaauaauaaacuuuuuugaaauaauaaaucugguagaaaaaugagaucucaaaggcucuuuucagagccaccaaaaaaaaaaaaaaaaaaaaaaaaaaaaaaaaaaaaaaaaaaaaaaaaaaaaaaaaaaaaaaaaagaauu

SEQ ID NO: 27389 - RNA, 1781 nt, Artificial Sequence
  mRNA product Design b-4 (hSL-A64-N5) comprising derived and/or modified sequence from LASV(G3010-SLE-2013;Clade IV)__AIT17344__GPCmut4 (opt5)
aggagagucccgcagucggcguccagcggcucugcuuguucgugugugugucguugcaggccuuauucaagcuuaccaugggccagaucgugaccuucuuucaagaggucccccacguuauugaagaggugaugaacaucgugcugauugcccucagcauccuggcuguccuuaaggggcuguacaauuucgccacaugcggacucgugggccugguuacguuucuucugcucugugggagauccugcaccacaucucuguauaaaggaguguacgaacugcagacccucgagcugaacauggaaacacuuaauauguguaugccucugagcugcaccaagaacaauucccaucacuauauuauggucggcaacgagacagggcucgagcugacccuuacgaauaccucuaucaucaaccauaaauucuguaaucugagcgacgcgcacaagaaaaaccucuacaaucaugcucugauguccauuaucucuacauuucaccugagcauuccgaacuucaaucaguaugaagccauguccugcgauuuuaacggaggcaagaucagcgugcaguacaaucucucucacuccuaugccggcgacgcugccagccauugugggaccguugcuaacggagugcugcaaacauucaugcggauggccuggggcgggucuuacauugcgcuugauuccggauacggcaagugggacugcaucaugaccagcuaucaguaccugauuauccagaacacgacaugggaggaucacugucaguuuucucgccccuccccuaucggguaucucggacugcuuagccaaagaacccgggacauuuacaucucccgcagacggcgcggcacauucaccuggacccugucugauagcgaaggcaaagacacacccgggggauauugccucacgagauggaugcugauugaggccgagcugaaguguuuuggcaauaccgcugucgccaaaugcaacgaaaagcaugaugaggaguucugcgacaugcuccggcuguuugauuucuguaaacaggcuauccagcgccuuaagaccccugcccagauguccauucaacugaucaauaaggcggugaacgcccucaucaaugaccagcugauuaugaaaaaccaccuuagagauaucauggggauucccuacugcaauuauagcaaguacuguuaccugaaccacacaacaaccggaaaaacgucucucccuaagugcugucugguguccaauggcagcuaucugaacgaaacacauuucucugacgacaucgaacagcaagcugauaauaugauuaccgagaugcuccagaaagaguacauggaacggcaggggaagaccccgcugggacuugucgaccuguuuguuuucagcacauccuuuuaucucaucucuaucuuccugcaccuggugaaaauucccacccaucgccacaucgugggcaagagcugcccuaagccccauagacuuaaccacaugggcauuuguuccugcgggcucuacaaacagccuggaguccccgugcgguggaagcgcugaggacuaguaauaaggaaacuguaugaaugucugugggcaggaagugaagagauccuucuguaaagguuuuuggaauuaugucugcugaauaauaaacuuuuuugaaauaauaaaucugguagaaaaaugagaucucaaaggcucuuuucagagccaccaaaaaaaaaaaaaaaaaaaaaaaaaaaaaaaaaaaaaaaaaaaaaaaaaaaaaaaaaaaaaaaaagaauu

SEQ ID NO: 27390 - RNA, 1781 nt, Artificial Sequence
  mRNA product Design b-4 (hSL-A64-N5) comprising derived and/or modified sequence from LASV(G502-SLE-2009;Clade IV)__AIT17126__GPCmut4 (opt5)
aggagagucccgcagucggcguccagcggcucugcuuguucgugugugugucguugcaggccuuauucaagcuuaccaugggccagaucgugaccuucuuucaagaggucccccacguuauugaagaggugaugaacaucgugcugauugcccucagcauccuggcuguccuuaaggggcuguacaauuucgccacaugcggacucgugggccugcuuacguuucugcuccugugugggagauccugcaccacaggacuguauaaaggcguuuacgaacuccagacccuggagcuuaacauggaaacacugaauauguguaugccucucucuugcaccaagaacaauagccaucacuauauuaugguggggaacgagacaggacuggagcuuacccugacgaauaccuccaucaucaaccauaaauucuguaaucucucugacgcgcacaagaaaaaccuguacgaucaugcucugaugagcauuaucuccacauuucaccucucuauuccgaauuucaaccaguaugaagccaugagcugcgacuuuaauggcggcaagaucuccguccaguacaaccugagccacucuuaugccggggaugcugccgaccauuguggaaccguggcuaauggcguucuucaaacauucaugcggauggccuggggaggguccuacauugcgcuggauagcggccgcgggagaugggacugcaucaugaccucuuaccaguaucucauuauccagaacacgacaugggaggaucacugucaguuuucccggcccagcccuaucggauaccugggccuucugucucaacgcaccagagacauuuauaucucccggcgcagacggggcacauucaccuggacccucagcgauuccgaagggaaggacacacccggaggcuacugccugacgcgcuggaugcugauugaggccgagcucaaauguuuugggaacaccgcuguggccaagugcaaugaaaaacaugaugaggaguucugcgacaugcugagacuuuuugauuucuguaagcaggcuauccagcggcugaaagccccugcgcagaugucuauucaacucaucaacaaggccgucaaugcucugaucaacgaccagcuugugaugaagaaucaucugcgcgacauuaugggaauccccuauugcaacuacagcagauauuguuaccucaaucacacaaccacaggccggaccucccugccuaaaugcugucuggugagcaacgggucuuaccucaaugaaacgcacuucuccgaugacauugaacagcaagccgauaacaugaucacagagaugcugcagaaggaguauauggaacgccagggaaaaaccccgcuuggccuggucgaccucuuuguuuucagcaccucuuuuuaccugauuagcaucuuccugcaccuugugaagauccccacacauagacacauugugggcaaauccugcccuaagccccaucggcucaaucacauggggaucuguucuugcggacuguauaaacagccuggcguccccgugaaguggaagagaugaggacuaguaauaaggaaacuguaugaaugucugugggcaggaagugaagagauccuucuguaaagguuuuuggaauuaugucugcugaauaauaaacuuuuuugaaauaauaaaucugguagaaaaaugagaucucaaaggcucuuuucagagccaccaaaaaaaaaaaaaaaaaaaaaaaaaaaaaaaaaaaaaaaaaaaaaaaaaaaaaaaaaaaaaaaaagaauu

SEQ ID NO: 27391 - RNA, 1781 nt, Artificial Sequence
  mRNA product Design b-4 (hSL-A64-N5) comprising derived and/or modified sequence from LASV(G733-SLE-2010;Clade IV)__AIT17154__GPCmut4 (opt5)
aggagagucccgcagucggcguccagcggcucugcuuguucgugugugugucguugcaggccuuauucaagcuuaccaugggccagaucgugaccuucuuucaagaggucccccacguuauugaagaggugaugaacaucgugcugauugcccucagcauccuggcuguccuuaaggggcuguacaauuucgccacaugcggaauugugggccucguuuccuuucugcuucugugugggagaucuugcacgaccagccucuauaaaggaguguacgaacugcagacacuggagcucaacauggaaacccugaauauguguaugccucuuuccugcacaaagaacaauucucaucacuauaucauggucggcaacgagaccgggcuggagcucacacugaccaauacgagcaucauuaaccauaaauucuguaaucuuuccgacgcgcacaagaaaaaccuguacgaucaugcucucaugucuaucauuagcaccuuucaccuguccaucccgaauuucaaccaguaugaagccaugagcugcgacuuuaauggaggcaagauuucugugcaguacaaccugucccacagcuaugccggcgaugcugccaaucauugugggacaaucgcuaacggaguucuccaaaccuucaugcggauggccuggggcgggucuuacauugcgcuggacuccggacgcgauagaugggacugcaucaugacaagcuaccaguaucuuaucauucagaacaccacgugggaggaucacugucaguuuucucggcccuccccuaucggcuaccuggggcuccugagccaacgcacaagagacauuuauaucucccggcgcagacggggaaccuucacauggacccuuucugauagcgaaggcaaggacacccccggcggguacugccugacacgcuggaugcucauugaggccgagcugaaauguuuuggaaauacggcuguggccaagugcaacgaaaaacaugaugaggaguucugcgacaugcugagacucuuugauuucuguaagcaggcuauccagcggcugaaagccccugcgcagauguccauccaacuuauuaauaaggccgucaacgcucugaucaaugaccagcucauuaugaagaaccaucugcgcgacaucaugggcauucccuauugcaauuacagcaaauauuguuaccuuaaccacaccacaaccgggaagacaucucugccuaaaugcugucucguguccaauggaagcuaccugaacgaaacccacuucucugaugacaucgaacagcaagccgauaauaugaucacggagaugcugcagaaggaguauauggaaagacagggcaaaacaccgcucgggcugguggaccuuuuugucuucagcaccuccuuuuaccugauuucuaucuuccuccaccugguuaagauucccacccaucggcacguggugggaaaaagcugcccuaagccccaucgccugaaccacaugggcaucuguuccugcggccuuuaugggcagccuggaguccccgugaaguggaaaagaugaggacuaguaauaaggaaacuguaugaaugucugugggcaggaagugaagagauccuucuguaaagguuuuuggaauuaugucugcugaauaauaaacuuuuuugaaauaauaaaucugguagaaaaaugagaucucaaaggcucuuuucagagccaccaaaaaaaaaaaaaaaaaaaaaaaaaaaaaaaaaaaaaaaaaaaaaaaaaaaaaaaaaaaaaaaaagaauu

SEQ ID NO: 27392 - RNA, 1781 nt, Artificial Sequence
  mRNA product Design b-4 (hSL-A64-N5) comprising derived and/or modified sequence from MOPV/LASV reassortant(IGS-1;Clade IV)__AFY05576__GPCmut4 (opt5)
aggagagucccgcagucggcguccagcggcucugcuuguucgugugugugucguugcaggccuuauucaagcuuaccaugggccagaucgugaccuucuuucaagaggucccccacguuauugaagaggugaugaacaucgugcugauugcccucagcguccuggcugugcuuaaggggcuguacaauuucgccacaugcggacucguuggccuggugacguuucuucugcucugugggagauccugcaccacaucucuguauaaaggagucuacgaacugcagacccucgagcugaacauggaaacacuuaauauguguaugccucugagcugcaccaagaacaauucccaucacuauaucauggugggcaacgagacagggcucgagcugacccuuacgaauaccucuauuaucaaccauaaauucuguaaucugagcgacgcgcacaagaaaaaccucuacgaucaugcucugauguccaucauuucuacauuucaccugagcaucccgaauuucaaccaguaugaagccauguccugcgacuuuaauggaggcaagauuagcguucaguacaaccucucucacuccuaugccggcgaugcugccaaucauugugggaccguggcuaacggaguccugcaaacauucaugcggauggccuggggcgggagcuacaucgcgcuugacucuggacgcggcaacugggauugcauuaugaccuccuaccaguaucugaucauucagaauacgacaugggaggaccacugucaguuuagcagacccucuccuaucggguaccucggacugcuuucccaacggacccgcgauaucuauauuagcagacggcgcagaggcacauucaccuggacccuguccgacucugaaggcgaggauacacccgggggauacugccucacgcgguggaugcugaucgaggccgaacugaaguguuuuggcaacaccgcuguggccaaaugcaaugagaagcaugacgaagaguucugcgauaugcuccgccuguuugacuucuguaaacaggcuauucagagacuuaaggccccugcgcagaugagcauccaacugauuaacaaagccgugaaugcucucaucaacgaucagcugaucaugaagaaucaccuucgggacauuauggggauccccuauugcaacuacuccaaguauuguuaccugaaucacacaaccacaggacgcaccagccucccuaaaugcugucuggucucuaacggcuccuaccugaaugaaacgcauuucagcgacgauauugagcagcaagccgacaacaugaucacagagaugcuccagaaggaauauauggagagacaggggaaaaccccgcugggacuuguugaucuguuuguguucucuaccagcuuuuaccucauuuccaucuuccugcaccuggugaagauccccacacaucggcacauugucggcaaaucuugcccuaagccccaucgccuuaaucacaugggcaucuguagcugcgggcucuauaaacagccuggagugcccguuaaguggaagagaugaggacuaguaauaaggaaacuguaugaaugucugugggcaggaagugaagagauccuucuguaaagguuuuuggaauuaugucugcugaauaauaaacuuuuuugaaauaauaaaucugguagaaaaaugagaucucaaaggcucuuuucagagccaccaaaaaaaaaaaaaaaaaaaaaaaaaaaaaaaaaaaaaaaaaaaaaaaaaaaaaaaaaaaaaaaaagaauu

SEQ ID NO: 27393 - RNA, 1781 nt, Artificial Sequence
  mRNA product Design b-4 (hSL-A64-N5) comprising derived and/or modified sequence from LASV(LM765-SLE-2012;Clade IV)__AIT17814__GPCmut4 (opt5)
aggagagucccgcagucggcguccagcggcucugcuuguucgugugugugucguugcaggccuuauucaagcuuaccaugggccagaucgugaccuucuuucaagaggucccccacguuauugaagaggugaugaacaucgugcugauugcccucagcauccuggcuguccuuaaggggcuguacaauuucgccacaugcggacucgugggccugguuacguuucuucugcucugugggagauccugcaccacaucucuguauaaaggaguguacgaacugcagacccucgagcugaacauggaaacacuuaauauguguaugccucugagcugcaccaagaacaauucccaucacuauauuauggucggcaacgagacagggcucgagcugacccuuacgaauaccucuaucaucgaccauaaauucuguaaccugagcgaugcgcaccggaagaaucucuacgaccaugcucugauguccauuaucucuacauuucaccugagcauuccgaacuucaaucaguaugaagccauguccugcgauuuuaacggaggcaaaaucagcgugcaguacaaucucucucacuccuaugccaaggacgcugccgaucauuguggcaccguugcuaacggggugcugcaaacauucaugcgcauggccuggggaggcagcuacauugcgcuugacucugggagaggacggugggauugcaucaugaccuccuaccaguaucugauuauccagaauacgacaugggaggaccacugucaguuuagccgccccucuccuaucggcuaccucgggcugcuuucccaaagaacccgggauauuuauaucagccgcagacggcgcggaacauucaccuggacccuguccgacucugaaggcaaggauacacccggcggguacugccucacgagauggaugcugauugaggccgagcugaaauguuuuggaaacaccgcugucgccaagugcaacgaaaaacaugacgaggaguucugcgauaugcuccggcuguuugacuucuguaagcaggcuauccagcgccuuaaagccccugcgcagaugagcauucaacugaucaauaaggccgugaacgcucucaucaaugaccagcugauuaugaagaaccaccuuagagauaucaugggcauucccuauugcaauuacuccaaauauuguuaccugaaccacacaaccacagggaagaccagccucccuaaaugcugucuggugucuaauggauccuaccugaacgaaacgcauuucagcgacgauaucgaacagcaagccgacaauaugauuacagagaugcuccagaaggaguauauggaacggcagggcaaaaccccgcuggggcuugucgaucuguuuguuuucucuaccagcuuuuaccucaucuccaucuuccugcaccuggugaagauucccacacaucgccacaucgugggaaaaccuugccccaagccucauagacuuaaccacaugggcauuuguucuugcggccucuauaagcagcccggggucccggugaaauggaagcggugaggacuaguaauaaggaaacuguaugaaugucugugggcaggaagugaagagauccuucuguaaagguuuuuggaauuaugucugcugaauaauaaacuuuuuugaaauaauaaaucugguagaaaaaugagaucucaaaggcucuuuucagagccaccaaaaaaaaaaaaaaaaaaaaaaaaaaaaaaaaaaaaaaaaaaaaaaaaaaaaaaaaaaaaaaaaagaauu

SEQ ID NO: 27394 - RNA, 1781 nt, Artificial Sequence
  mRNA product Design b-4 (hSL-A64-N5) comprising derived and/or modified sequence from LASV(LM776-SLE-2012;Clade IV)__AIT17824__GPCmut4 (opt5)
aggagagucccgcagucggcguccagcggcucugcuuguucgugugugugucguugcaggccuuauucaagcuuaccaugggccagaucgugaccuucuuucaagaggucccccacguuauugaagaggugaugaacaucgugcugauugcccucagcauccuggcuguccuuaaggggcuguacaauuucgccacaugcggacucgugggccugguuacguuucuucugcucugugggagauccugcaccacaucuguguauaaaggagucuacgaacugcagacccuggagcucaacauggaaacacugaauauguguaugccucuuagcugcaccaagaacaauucccaucacuauauuauggugggcaacgagacagggcuggagcucacccugacgaauaccucuaucaucaaccauaaauucuguaaucuuagcgacgcgcacaagaaaaaccuguacgaucaugcucucauguccauuaucucuacauuucaccugagcauuccgaauuucaaccaguaugaagccauguccugcgacuuuaauggaggcaagaucagcguucaguacaaccugucucacuccuaugccggcgaugcugccaaucauugugggaccguggcuaacggaguccuccaaacauucaugcggauggccuggggcgggagcuacauugcgcuggacucuggacacggcaagugggauugcaucaugaccuccuaccaguaucuuauuauccagaacacgacaugggaggaccauugucaguuuagccgccccucuccuaucggguaccugggacuccugucccaaagaacccgggauauuuauaucagccgcagacggcgcggcacauucaccuggacccuuuccgacucugaaggcaaagauacacccgggggauacugccugacgagauggaugcucauugaggccgagcugaaguguuuuggcaauaccgcuguggccaaaugcaacgaaaagcacgacgaggaguucugcgauaugcugcggcucuuugacuucuguaaacaggcuauccagcgccugaaggccccugcgcagaugagcauucaacuuaucaauaaggccgugaacgcucugaucaaugaucagcucauuaugaaaaaccaccugagagacaucauggggauucccuauugcaauuacuccaaguauuguuaccuuaaccauacaaccacaggaaaaaccagccugccuaagugcugucucgucucuaauggcuccuaccugaacgaaacgcacuucagcgacgauaucgaacagcaagccgacaauaugauuacagagaugcugcagaaagaguauauggaacggcaggggaagaccccgcucggacugguugaucuuuuuguguucucuaccagcuuuuaccugaucuccaucuuccuccaucuggugaaaauucccacacaccgccauaucgucggcaagucuugcccuaagccccacagacugaaccacaugggcauuuguagcugcgggcuuuauaaacagccuggagugcccguucgguggaagcgcugaggacuaguaauaaggaaacuguaugaaugucugugggcaggaagugaagagauccuucuguaaagguuuuuggaauuaugucugcugaauaauaaacuuuuuugaaauaauaaaucugguagaaaaaugagaucucaaaggcucuuuucagagccaccaaaaaaaaaaaaaaaaaaaaaaaaaaaaaaaaaaaaaaaaaaaaaaaaaaaaaaaaaaaaaaaaagaauu

SEQ ID NO: 27395 - RNA, 1781 nt, Artificial Sequence
  mRNA product Design b-4 (hSL-A64-N5) comprising derived and/or modified sequence from LASV(Mad39;Clade IV)__ANH09722__GPCmut4 (opt5)
aggagagucccgcagucggcguccagcggcucugcuuguucgugugugugucguugcaggccuuauucaagcuuaccaugggccagaucgugaccuucuuucaagaggucccccacguuauugaagaggugaugaacaucgugcugauugcccucagcauccuggcuguccuuaaggggcuguacaauguggccacaugcggacucauuggccugguuacguuccuucugcucugugggagauccugcaccacaacccuguauaaaggaguguacgaacugcaggcgcucgagcugaacauggaaacacuuaauauguguaugccucugucuugcaccaagaacaauagccaucacuauauccgggucggcaacgagacagggcucgagcugacccuuacgaauaccucccugaucaaccauaaauuuuguaaucucucugacgcucacaagaaaaaccuguacgaucaugcccugaugagcauuaucuccacauuccaccucucuauuccgaauuuuaaccaguaugaagccaugagcugcgacuucaaugauggaaagaucuccgugcaguacaaccugagccacaccuaugcuggcgacacagccaaucauuguggcaccguugcuaacggggugcuucaaacguuuaugcgcauggccuggggaggcucuuacauugcgcuggauuccgggagaggaggcugggacugcaucaugacaagcuaccaguaucucauuauccagaacaccacaugggaggaucacugucaguucucucggcccuccccuaucggguaccugggacuucugagccaacgcaccagagacauuuauaucucucggcgcagacggggcaccuuuacauggacgcucuccgauagcgaaggcaaggacacccccgggggauacugccugacacgcuggaugcugauugaggccgagcucaaauguuucggcaauaccgcugucgccaagugcaacgaaaaacaugaugaggaauuuugcgacaugcugagacuuuucgauuuuuguaagcaggcuauccagcggcugaaagccccugcgcagauguccauucaacucaucaauaaggccgugaacgcucugaucaaugaccagcuuauuaugaagaaccaucugcgcgacaucauggggauucccuauugcaauuacucuaaauauuguuaccucaaccacacagugaccggaaagacgagccugccuaaaugcugucuggucuccaauggcagcuaccucaacgagacacacuucucugaugacaucgaacagcaagccgauaauaugauuaccgagaugcugcagaaggaguauauggaaagacaggggaaaaccccgcuuggacugguugaccucuucguguuuuccaccagcuucuaccugaucucuaucuuucugcaccuugugaagauucccacacaucggcacgucgugggcaaaccuugccccaagccucaucgccucaaccacaugggcaucuguagcugcggguucuauaagcagcccggaguuccggugagauggaaacggugaggacuaguaauaaggaaacuguaugaaugucugugggcaggaagugaagagauccuucuguaaagguuuuuggaauuaugucugcugaauaauaaacuuuuuugaaauaauaaaucugguagaaaaaugagaucucaaaggcucuuuucagagccaccaaaaaaaaaaaaaaaaaaaaaaaaaaaaaaaaaaaaaaaaaaaaaaaaaaaaaaaaaaaaaaaaagaauu

SEQ ID NO: 27396 - RNA, 1781 nt, Artificial Sequence
  mRNA product Design b-4 (hSL-A64-N5) comprising derived and/or modified sequence from LASV(Z0947-SLE-2011;Clade IV)__AIT17840__GPCmut4 (opt5)
aggagagucccgcagucggcguccagcggcucugcuuguucgugugugugucguugcaggccuuauucaagcuuaccaugggccagaucgugaccuucuuucaagaggucccccacguuauugaagaggugaugaacaucgugcugauugcccucagcauccuggcuguccuuaaggggcuguacaauuucgccacaugcggacucgugggccugguuacguuucuucugcucugugggagauccugcaccauuucucuguauaaaggaguguacgaacugcagacacucgagcugaacauggaaacccuuaauauguguaugccucugagcugcacaaagaacaauucccaucacuauaucauggucggcaacgagaccgggcucgagcugacacuuaccaauacgucuaucauuaaccauaaauucuguaaucugagcgacgcgcacaagaaaaaccucuacgaucaugcucugauguccaucauuucuaccuuucaccugagcaucccgaauuucaaccaguaugaagccauguccugcgacuuuaauggaggcaagauuagcgugcaguacaaccucucucacuccuaugccggcgaugcugccaaucauugugggacaguugcuaacggagugcugcaaaccuucaugcggauggccuggggcgggagcuacaucgcgcuugacucuggacgcgauagaugggacugcauuaugacauccuaccaguaucugaucauccagaacaccacgugggaggaucacugucaguuuagccggcccucuccuauuggcuaccucgggcugcuuucccaacgcacaagagacaucuauauuagccggcgcagacggggaaccuucacauggacccuguccgauucugaaggcaaggacacccccggcggguacugccucacacgcuggaugcugaucgaggccgagcugaaauguuuuggaaauacggcugucgccaagugcaacgaaaaacaugaugaggaguucugcgacaugcucagacuguuugauuucuguaagcaggcuauucagcggcuuaaagccccugcgcagaugagcauccaacugaucaauaaggccgugaacgcucucauuaaugaccagcugaucaugaagaaccaccuucgcgacauuaugggcauccccuauugcaauuacuccaaauauuguuaccugaaccacaccacaaccgggaagacaagccucccuaaaugcugucuggugucuaauggauccuaccugaacgaaacccauuucagcgaugacauugaacagcaagccgauaauaugaucacggagaugcuccagaaggaguauauggaaagacagggcaaaacaccgcuggggcuugucgaccuguuuguuuucucuaccagcuuuuaccucaucuccauuuuccugcaccuggugaagauccccacccaucggcacauugugggaaaaccuugccccaagccucaucgccuuaaccacaugggcaucuguucuugcggccucuauaagcagcccggggucccggugaaauggaagagaugaggacuaguaauaaggaaacuguaugaaugucugugggcaggaagugaagagauccuucuguaaagguuuuuggaauuaugucugcugaauaauaaacuuuuuugaaauaauaaaucugguagaaaaaugagaucucaaaggcucuuuucagagccaccaaaaaaaaaaaaaaaaaaaaaaaaaaaaaaaaaaaaaaaaaaaaaaaaaaaaaaaaaaaaaaaaagaauu

SEQ ID NO: 27397 - RNA, 1812 nt, Artificial Sequence
  mRNA product Design b-4 (hSL-A100) comprising derived and/or modified sequence from LASV(Josiah;Clade IV)__NP_694870__GPCmut4 (opt1)
aggagagucccgcagucggcguccagcggcucugcuuguucgugugugugucguugcaggccuuauucaagcuuaccaugggccagaucgugaccuucuuccaggaggucccccacgugaucgaggaggugaugaacaucguccugaucgcccucagcgugcuggccgugcugaaggggcucuacaacuucgcgaccugcggccuggucgggcuggugacguuccuccugcugugcggccgcuccugcaccaccagccucuacaaggggguguacgagcugcagacccuggagcucaacauggagacgcugaacaugugcaugccgcuguccugcaccaagaacaacagccaccacuacaucauggucggcaacgagaccggccucgagcugacgcugaccaacaccuccaucaucaaccacaaguucugcaaccucagcgacgcccacaagaagaaccuguacgaccacgcccugauguccaucaucagcaccuuccaccucuccauccccaacuucaaccaguacgaggccaugagcugcgacuucaacgggggcaagaucuccgugcaguacaaccugagccacuccuacgccggggacgcggccaaccacugcggcacgguggccaacgggguccugcagaccuucaugcggauggccuggggcggcagcuacaucgcgcucgacuccgggcgcggcaacugggacugcaucaugaccagcuaccaguaccugaucauccagaacaccacgugggaggaccacugccaguucucccggcccagccccaucggguaccugggccuccugucccagcgcacccgggacaucuacaucagccgccggcgccggggcaccuucaccuggacgcugagcgacuccgaggggaaggacaccccgggcggguacugccugacccgcuggaugcucaucgaggccgagcugaagugcuucggcaacaccgccguggccaagugcaacgagaagcacgacgaggaguucugcgacaugcugcggcuguucgacuucugcaagcaggccauccagcgccugaaggcgcccgcccagaugagcauccagcugaucaacaaggccgugaacgcccucaucaacgaccagcugaucaugaagaaccaccuccgggacaucauggggauccccuacugcaacuacuccaaguacugcuaccucaaccacacgaccaccggccgcaccagccugcccaagugcugccuggucuccaacggcagcuaccucaacgagacgcacuucuccgacgacaucgagcagcaggccgacaacaugaucaccgagaugcugcagaaggaguacauggagcggcaggggaagacgccccugggccucguggaccuguucguguucagcaccuccuucuaccugaucagcaucuuccugcaccucgucaagaucccgacccaccgccacaucguggggaaguccugccccaagccccaccggcugaaccacaugggcaucugcagcugcgggcuguacaagcagcccggcgugccggucaaguggaagcgcugaggacuaguaauaaggaaacuguaugaaugucugugggcaggaagugaagagauccuucuguaaagguuuuuggaauuaugucugcugaauaauaaacuuuuuugaaauaauaaaucugguagaaaaaugagaucucaaaggcucuuuucagagccaccaaaaaaaaaaaaaaaaaaaaaaaaaaaaaaaaaaaaaaaaaaaaaaaaaaaaaaaaaaaaaaaaaaaaaaaaaaaaaaaaaaaaaaaaaaaaaaaaaaaaa

SEQ ID NO: 27398 - RNA, 1809 nt, Artificial Sequence
  mRNA product Design b-4 (hSL-A100) comprising derived and/or modified sequence from LASV(LP;Clade I)__AAF86701__GPCmut4 (opt1)
aggagagucccgcagucggcguccagcggcucugcuuguucgugugugugucguugcaggccuuauucaagcuuaccaugggccagaucaucaccuucuuccaggaggugccccacgucaucgaggaggugaugaacaucgugcugaucgcccucagccugcuggccauccucaaggggcuguacaacaucgcgaccugcggcaucaucgggcuggucgccuuccucuuccugugcggcaaguccugcagccugacgcucaagggcggguacgagcugcagacccuggagcucaacauggagacccugaacaugugcaugccgcuguccugcacgaagaacagcucccaccacuacauccgcgugggcaacgagaccgggcucgagcugacccugaccaacacgagcaucaucaaccacaaguucugcaaccucuccgacgcccacaagaagaaccuguacgaccacgcccugaugagcaucaucuccaccuuccaccucagcauccccaacuucaaccaguacgaggccauguccugcgacuucaacggcgggaagaucagcgugcaguacaaccugucccacagcuacgcgggcgacgccgccgagcacugcgggaccgucgccaacggcgugcugcagaccuucaugcggauggcguggggcgggcgcuacaucgcccucgacuccggcaaggggaacugggacugcaucaugacgagcuaccaguaccugaucauccagaacaccaccugggaggaccacugccaguucucccggcccagccccaucggcuaccugggccuccugucccagcgcacccgggacaucuacaucagccgccggcgccgggggacguucaccuggacccugagcgacuccgagggcaacgagacccccgggggcuacugccugacgcgcuggaugcucaucgaggccgagcugaagugcuucgggaacaccgccguggccaagugcaacgagaagcacgacgaggaguucugcgacaugcugcggcuguucgacuucugcaagcaggcgauccgccggcugaaggcccccgcccagaugagcauccagcugaucaacaaggccgucaacgcccucaucaacgaccagcugaucaugaagaaccaccuccgcgacaucaugggcauccccuacugcaacuacuccaaguacugcuaccucaaccacaccagcuccggccggaccagccugcccaagugcugccugaucuccaacgggagcuaccucaacgagacgcaguucuccgacgacaucgagcagcaggcggacaacaugaucaccgagaugcugcagaaggaguacaucgagcgccagggcaagaccccgcuggggcucguggacaucuucaucuucagcaccuccuucuaccugaucagcaucuuccugcaccugaucaagaucccgacgcaccggcacaucgugggcaagcccugccccaagccccaccgccucaaccacaugggggucugcuccugcggccuguacaagcacccgggcgugcccaccaaguggaagcggugaggacuaguaauaaggaaacuguaugaaugucugugggcaggaagugaagagauccuucuguaaagguuuuuggaauuaugucugcugaauaauaaacuuuuuugaaauaauaaaucugguagaaaaaugagaucucaaaggcucuuuucagagccaccaaaaaaaaaaaaaaaaaaaaaaaaaaaaaaaaaaaaaaaaaaaaaaaaaaaaaaaaaaaaaaaaaaaaaaaaaaaaaaaaaaaaaaaaaaaaaaaaaaaaa

SEQ ID NO: 27399 - RNA, 1809 nt, Artificial Sequence
  mRNA product Design b-4 (hSL-A100) comprising derived and/or modified sequence from LASV(803213;Clade II)__AAF86703__GPCmut4 (opt1)
aggagagucccgcagucggcguccagcggcucugcuuguucgugugugugucguugcaggccuuauucaagcuuaccaugggccagaucaucaccuucuuccaggaggugccccacgucaucgaggaggugaugaacaucgugcugaucgcccucagccugcuggccauccucaaggggaucuacaacgucgcgaccugcggccuguucgggcugaucuccuuccuccugcugugcggccgcagcugcuccgugacguacaaggggguguacgagcuccagacccuggagcugaacauggccaaccucaacaugugcaugccgcugagcugcaccaagaacaacucccaccacuacaucauggucggcaacgagacgggccuggagcucacccugaccaacaccagcaucaucaaccacaaguucugcaaccuguccgacgcccacaagaagaaccucuacgaccacgcccugaugagcaucaucuccacguuccaccugagcauccccaacuucaaccaguacgaggccauguccugcgacuucaacgggggcaagaucagcgugcaguacaaccucucccacagcuucgcgguggacgccgccaaccacugcgggaccaucgccaacggcguccugcagaccuucaugcggauggcguggggcggguccuacaucgcccuggacagcggcaaggggaacugggacugcaucaugaccuccuaccaguaccucaucauccagaacacgaccugggaggaccacugccaguucagccgccccucccccaucggcuaccuggggcugcucagccagcggacccgcgacaucuacaucagccggcgccgccggggcaccuucacguggacccucuccgacagcgagggcaacgaggcccccgggggcuacugccugacccgguggaugcugaucgaggccgagcucaagugcuucgggaacaccgccguggcgaagugcaacgagaagcacgacgaggaguucugcgacaugcugcgccuguucgacuucugcaagcaggccaucaagcggcucaagacgcccgcccagauguccauccagcugaucaacaaggccgugaacgcccugaucaacgaccagcucaucaugaagaaccaccuccgcgacaucaugggcauccccuacugcaacuacagccgguacugcuaccugaaccacaccgucaccgggaagaccucccugccccgcugcugccuggugagcaacggcuccuaccugaacgagacgcacuucagcgacgacaucgagcagcaggcggacaacaugaucaccgagaugcuccagaaggaguacauggaccggcagggcaagaccccgcuggggcugguggaccucuucgucuucuccaccagcuucuaccugaucuccaucuuccugcaccuggugaagaucccgacgcaccgccacaucgugggcaagcccugccccaagccccaccggcucaaccacauggggaucugcagcugcggccuguacaagcacccggggguccccgugaaguggaagcgcugaggacuaguaauaaggaaacuguaugaaugucugugggcaggaagugaagagauccuucuguaaagguuuuuggaauuaugucugcugaauaauaaacuuuuuugaaauaauaaaucugguagaaaaaugagaucucaaaggcucuuuucagagccaccaaaaaaaaaaaaaaaaaaaaaaaaaaaaaaaaaaaaaaaaaaaaaaaaaaaaaaaaaaaaaaaaaaaaaaaaaaaaaaaaaaaaaaaaaaaaaaaaaaaaa

SEQ ID NO: 27400 - RNA, 1809 nt, Artificial Sequence
  mRNA product Design b-4 (hSL-A100) comprising derived and/or modified sequence from LASV(GA391;Clade III)__CAA36645__GPCmut4 (opt1)
aggagagucccgcagucggcguccagcggcucugcuuguucgugugugugucguugcaggccuuauucaagcuuaccaugggccagaucgugaccuucuuccaggaggucccccacgugaucgaggaggugaugaacaucguccugaucgcccucagcauccuggccauccugaaggggcucuacaacguggcgaccugcggccugaucgggcuggugacguuccuccugcuguccggccgcagcugcucccucaucuacaaggggaccuacgagcugcagacccuggagcucaacauggagacccugaacaugugcaugccgcugagcugcaccaagaacaacucccaccacuacauccgggucggcaacgagaccggccucgagcugacccugacgaacaccagcauccucaaccacaaguucugcaaccuguccgacgcccacaagcgcaaccuguacgaccacagccucauguccaucaucagcaccuuccaccuguccauccccaacuucaaccaguacgaggccaugagcugcgacuucaacgggggcaagaucaccgugcaguacaaccugucccacagcuucgccguggacgccgcggggcacugcggcacgcucgccaacgggguccugcagaccuucaugcggauggccuggggcggcuccuacaucgcccuggacagcgggcgcggcaacugggacugcaucaugaccuccuaccaguaccucaucauccagaacaccacgugggacgaccacugccaguucagccggcccucccccaucggguaccugggccugcucagccagcgcacccgggacaucuacaucagccgccggcgccggggcaccuucaccuggacgcucuccgacagcgaggggaacgagaccccgggcggguacugccugacccgcuggaugcugaucgaggcggagcucaagugcuucggcaacaccgccguggccaagugcaacgagaagcacgacgaggaguucugcgacaugcugcggcuguucgacuucugcaagcaggccauccgccggcucaagacgcccgcccagauguccauccagcugaucaacaaggcggugaacgcccugaucaacgaccagcucaucaugaagaaccaccuccgcgacaucauggggauccccuacugcaacuacagccgguacugcuaccugaaccacaccuccaccggcaagaccagccugccccgcugcugccugaucuccaacggcagcuaccugaacgagacgaaguucuccgacgacaucgagcagcaggccgacaacaugaucaccgagaugcuccagaaggaguacaucgaccggcaggggaagacgccccugggccuggucgaccuguucguguucagcaccuccuucuaccucaucagcaucuuccugcaccuggugaagaucccgacccaccgccacaucgucgggaagcccugccccaagccccaccggcucaaccacaugggcaucugcuccugcgggcuguacaagcagccgggcgugcccgugcgcuggaagcggugaggacuaguaauaaggaaacuguaugaaugucugugggcaggaagugaagagauccuucuguaaagguuuuuggaauuaugucugcugaauaauaaacuuuuuugaaauaauaaaucugguagaaaaaugagaucucaaaggcucuuuucagagccaccaaaaaaaaaaaaaaaaaaaaaaaaaaaaaaaaaaaaaaaaaaaaaaaaaaaaaaaaaaaaaaaaaaaaaaaaaaaaaaaaaaaaaaaaaaaaaaaaaaaaa

SEQ ID NO: 27401 - RNA, 1812 nt, Artificial Sequence
  mRNA product Design b-4 (hSL-A100) comprising derived and/or modified sequence from LASV(AV;Clade V)__CCA30314__GPCmut4 (opt1)
aggagagucccgcagucggcguccagcggcucugcuuguucgugugugugucguugcaggccuuauucaagcuuaccaugggccagaucgugaccuucuuccaggaggucccccacgugaucgaggaggugaugaacaucguccugaucgcccucagcauccuggccgugcugaaggggcucuacaacaucgcgaccugcggccugaucgggcugaucacguuccuccugcugugcggccgcuccugcagcuccaaccucuacaaggggguguacgagcugcagagccuggaccucaacauggagacccugaacaugugcaugccgcuguccugcaccaagaacaacagccaccacuacauccgggucggcaacgacacgggccucgagcugacccugaccaacaccuccauccucaaccacaaguucugcaaccugagcgacgcccacaagaaggaccuguacgaccacgcccucauguccaucaucagcacguuccaccuguccauccccaacuucaaccaguacgaggccaugagcugcgacuucaacgggggcaagaucuccgugcaguacaaccugagccacuccuacgccaucgacgcggccaaccacugcgggaccguggccaacggcauccuccagaccuucaugcgcauggccuggggcgggagcuacaucgcgcuggacuccggccgggggaacugggacugcaucaugaccagcuaccaguaccugaucauccagaacacgaccugggagaaccacugccaguucucccgccccagccccaucggcuaccucgggcugcugagccagcggacccgcgacaucuacaucucccggcgccgccggggcaccuucacguggacccugagcgacuccgagggcaacgccacccccgggggcuacugccucacccgguggaugcugaucgaggccgagcugaagugcuucgggaacacggccgucgccaagugcaacgagaagcacgacgaggaguucugcgacaugcuccgccuguucgacuucugcaagcaggcgaucagccggcugaagucccccgcccagaugagcauccagcucaucaacaaggccgugaacgcccugaucaacgaccagcugaucaugaagaaccaccuccgcgacaucaugggcauccccuacugcaacuacuccaaguacugcuaccugaaccacaccaucaccgggaagaccagccugcccaagugcugccucguguccaacggcagcuaccugaacgagacgcacuucuccgacgacaucgagcagcaggccgacaacaugaucaccgagaugcugcagaaggaguacauggagcggcagggcaagaccccgcucgggcuggucgaccuguucguguucagcaccuccuucuaccugaucagcaucuuccuccgccuggugaagaucccgacgcaccggcacaucgucggcaagcccugccccaagccccaccgccugaaccacauggggaucugcuccugcggccucuacaagcagccgggggugcccgugcgguggaagcgcugaggacuaguaauaaggaaacuguaugaaugucugugggcaggaagugaagagauccuucuguaaagguuuuuggaauuaugucugcugaauaauaaacuuuuuugaaauaauaaaucugguagaaaaaugagaucucaaaggcucuuuucagagccaccaaaaaaaaaaaaaaaaaaaaaaaaaaaaaaaaaaaaaaaaaaaaaaaaaaaaaaaaaaaaaaaaaaaaaaaaaaaaaaaaaaaaaaaaaaaaaaaaaaaaa

SEQ ID NO: 27402 - RNA, 1809 nt, Artificial Sequence
  mRNA product Design b-4 (hSL-A100) comprising derived and/or modified sequence from LASV(Togo/2016/7082;Clade VI)__AMR44577__GPCmut4 (opt1)
aggagagucccgcagucggcguccagcggcucugcuuguucgugugugugucguugcaggccuuauucaagcuuaccaugggccagaucaucaccuucuuccaggaggugccccacgucaucgaggaggugaugaacaucgugcugaucgcccucagccugcuggccauccucaagggggucuacaacguggcgaccugcggcaucaucgggcuggugacguuccuguuccucugcggccgcuccugcagccugaucuacaagggguccuacgagcugcagacccucgagcugaacauggagacccugaacaugugcaugccgcucagcugcacgaagaacuccagccaccacuacauccgggucggcaacgagaccggccuggagcugacccucaccaacacguccaucaucaaccacaaguucugcaaccugagcgacgcccacaagcgcaaccuguacgaccacgcccucauguccauccugagcaccuuccaccuguccauccccaacuucaaccaguacgaggccaugagcugcgacuucaacgggggcaagaucuccgugcaguacaaccucagccacgccuacgcgguggacgccgccgagcacugcgggaccgucgccaacggcgugcugcagaccuucaugcggauggcguggggcggguccuacaucgcccuggacagcggccgcgggaacugggacugcaucaugacguccuaccaguaccucaucauccagaacaccaccugggaggaccacugccaguucagccggcccucccccaucggcuaccuggggcugcucagccagcgcacccgggacaucuacaucagccgccggcgccggggcacguucaccuggacccucuccgacagcgagggcaacgagacccccgggggcuacugccugacgcgcuggaugcugaucgaggccgagcucaagugcuucgggaacaccgccguggccaagugcaacgagaagcacgacgaggaguucugcgacaugcugcggcuguucgacuucugcaagcaggcgauccagcgccucaagucccccgcccagaugagcauccagcugaucaacaaggccgucaacgcccugaucaacgaccagcucaucaugaagaaccaccuccgggacaugaugggcauccccuacugcaacuacuccaaguacugcuaccugaaccacaccagcuccgggcgcaccagccugcccaagugcugccugguguccaacggcagcuaccugaacgagacgcacuucuccgacgacaucgagcagcaggccgacaacaugaucaccgagaugcuccagaaggaguacaucgaccggcagggcaagaccccgcuggggcugguggaccucuucgucuucagcaccuccuucuaccugaucagcaucuuccugcaccugaucaagaucccgacgcaccgccacaucgugggcaagcccugccccaagccccaccggcucaaccacauggggaucugcuccugcggccuguacaagcagccgggggugcccacccgcuggaagcggugaggacuaguaauaaggaaacuguaugaaugucugugggcaggaagugaagagauccuucuguaaagguuuuuggaauuaugucugcugaauaauaaacuuuuuugaaauaauaaaucugguagaaaaaugagaucucaaaggcucuuuucagagccaccaaaaaaaaaaaaaaaaaaaaaaaaaaaaaaaaaaaaaaaaaaaaaaaaaaaaaaaaaaaaaaaaaaaaaaaaaaaaaaaaaaaaaaaaaaaaaaaaaaaaa

SEQ ID NO: 27403 - RNA, 1809 nt, Artificial Sequence
  mRNA product Design b-4 (hSL-A100) comprising derived and/or modified sequence from LASV(KAK-428;Clade n.d. (VII))__ANH09740__GPCmut4 (opt1)
aggagagucccgcagucggcguccagcggcucugcuuguucgugugugugucguugcaggccuuauucaagcuuaccaugggccagaucgugaccuucuuccaggaggucccccacgugaucgaggaggugaugaacaucguccugaucgcccucagccugcuggccauccucaaggggcuguacaacuucgcgaccugcggcgugaucgggcugaucacguuccuccugcugugcggccgcuccugcagcgccaccuacaaggggcaguacgagcuccagacccuggagcugaacauggagucccucaacaugugcaugccgcugagcugcacgaagaacaacucccaccacuacauccgggccggcaacaacaccggccuggagcucacccugaccaacacgagcaucaucucccacaaguucugcaaccugagcgacgcccacaagaagaaccucuacgaccacacccugauguccaucaucaccaccuuccaccugagcauccccaacuucaaccaguacgaggccauguccugcgacuucaacgggggcaagaucagcauccaguacaaccucucccacagcuacgcgggggacgccgcccagcacugcggcacgguggccaacgggguccugcagaccuucaugcgcauggcguggggcggcuccuaccuggcccucgacagcgggcggcgcggcugggacugcaucaucuccagcuaccaguaccugaucauccagaacaccaccugggacgaccacugccaguucucccggcccagccccaucggguaccugggcuucgugagccagaagacgcgcgacaucuacaucucccggcgccgccggggcaccuucaccuggacccugagcgacuccgaggggcacgacaugccgggcggguacugccucacgcgguggaugcugaucgaggccgaccugaagugcuucggcaacaccgccguggccaagugcaacgagaagcacgacgaggaguucugcgacauguggcgccucuucgacuucugcaagcaggcgauccagcggcugaaggcccccgcccagaugaacauccagcugaucaacaaggccgucaacgcccucaucaacgaccagcugaugaugaagaaccaccuccgcgacaucauggggauccccuacugcaacuacagcaaguucugcuaccugaacaacaccaccacgggccggaccucccugccccgcugcugccugaucagcaacggcuccuaccucaacgagacccacuucagcgacgacaucgagcagcaggcggacaacaugaucaccgagaugcugcagaaggaguacauggaccggcaggggaagacgccccugggccucguggaccuguucguguucuccaccagcuucuaccugaucaccaucuuccuccaccuggucaagaucccgacccaccgccacaucguggggaagcccugccccaagccccaccggcugaaccacaugggcaucugcuccugcgggcuguacaagcagccgggcgugcccguccgcuggaagcggugaggacuaguaauaaggaaacuguaugaaugucugugggcaggaagugaagagauccuucuguaaagguuuuuggaauuaugucugcugaauaauaaacuuuuuugaaauaauaaaucugguagaaaaaugagaucucaaaggcucuuuucagagccaccaaaaaaaaaaaaaaaaaaaaaaaaaaaaaaaaaaaaaaaaaaaaaaaaaaaaaaaaaaaaaaaaaaaaaaaaaaaaaaaaaaaaaaaaaaaaaaaaaaaaa

SEQ ID NO: 27404 - RNA, 1809 nt, Artificial Sequence; identical to SEQ ID NO: 27398
  mRNA product Design b-4 (hSL-A100) comprising derived and/or modified sequence from LASV(Pinneo-NIG-1969;Clade I)__AIT17836__GPCmut4 (opt1)

SEQ ID NO: 27405 - RNA, 1809 nt, Artificial Sequence
  mRNA product Design b-4 (hSL-A100) comprising derived and/or modified sequence from LASV(ISTH0009-NIG-2011;Clade II)__AIT17404__GPCmut4 (opt1)
aggagagucccgcagucggcguccagcggcucugcuuguucgugugugugucguugcaggccuuauucaagcuuaccaugggccagaucaucaccuucuuccaggaggugccccacgucaucgaggaggugaugaacaucgugcugaucgcccucagccugcuggccauccucaaggggaucuacaacgucgcgaccugcggccuguucgggcugguguccuuccuccugcugugcggccgcagcugcuccacgaccuacaaggggguguacgagcuccagacccuggagcuggacauggccagccucaacaugugcaugccgcuguccugcacgaagaacaacagccaccacuacaucauggucggcaacgagaccggccuggagcucacccugaccaacacguccaucaucaaccacaaguucugcaaccugagcgacgcccacaagaagaaccucuacgaccacgcccugauguccaucaucagcaccuuccaccuguccauccccaacuucaaccaguacgaggccaugagcugcgacuucaacgggggcaagaucuccgugcaguacaaccucagccacgcguacgccguggacgccgccaaccacugcgggaccaucgcgaacggcguccugcagaccuucaugcggauggccuggggcggguccuacaucgcccuggacagcggcaagggguccugggacugcaucaugacgagcuaccaguaccucaucauccagaacaccaccugggaggaccacugccaguucucccgccccagccccaucggcuaccuggggcugcucagccagcggacccgcgacaucuacaucucccggcgccgccggggcacguucaccuggacccucagcgacuccgagggcaacgagacccccgggggcuacugccugacgcgguggaugcugaucgaggccgagcucaagugcuucgggaacaccgccguggcgaagugcaacgagaagcacgacgaggaguucugcgacaugcugcgccuguucgacuucugcaagcaggccauccggcgccucaagacccccgcccagaugagcauccagcugaucaacaaggccgugaacgcccugaucaacgaccagcucaucaugaagaaccaccuccgggacaucaugggcaucccguacugcaacuacuccaaguacugcuaccugaaccacaccgucacggggaagaccagccugccccgcugcugccugguguccaacggcagcuaccugaacgagacccacuucuccgacgacaucgagcagcaggcggacaacaugaucaccgagcuccugcagaaggaguacauggaccggcagggcaagacgccccuggggcucguggaccuguucgucuucagcaccuccuucuaccugaucagcaucuuccugcaccucaucaagaucccgacccaccgccacaucaccggcaagcccugccccaagccccaccggcugaaccacauggggaucugcuccugcggccuguacaagcacccgggggugcccgugaaguggaagcgcugaggacuaguaauaaggaaacuguaugaaugucugugggcaggaagugaagagauccuucuguaaagguuuuuggaauuaugucugcugaauaauaaacuuuuuugaaauaauaaaucugguagaaaaaugagaucucaaaggcucuuuucagagccaccaaaaaaaaaaaaaaaaaaaaaaaaaaaaaaaaaaaaaaaaaaaaaaaaaaaaaaaaaaaaaaaaaaaaaaaaaaaaaaaaaaaaaaaaaaaaaaaaaaaaa

SEQ ID NO: 27406 - RNA, 1809 nt, Artificial Sequence
  mRNA product Design b-4 (hSL-A100) comprising derived and/or modified sequence from LASV(ISTH2010-NIG-2012;Clade II)__AIT17482__GPCmut4 (opt1)
aggagagucccgcagucggcguccagcggcucugcuuguucgugugugugucguugcaggccuuauucaagcuuaccaugggccagaucaucaccuucuuccaggaggugccccacgucaucgaggaggugaugaacaucgugcugaucgcccucagccugcuggccauccucaaggggaucuacaacgucgcgaccugcggccuguucgggcugguguccuuccuccugcugugcggccgcagcugcuccacgaccuacaaggggguguacgagcuccagacccuggagcuggacauggccagccucaacaugugcaugccgcuguccugcacgaagaacaacagccaccacuacaucauggucggcaacgagaccggccuggagcucacccugaccaacacguccaucaucaaccacaaguucugcaaccugagcgacgcccacaagaagaaccucuacgaccacgcccugauguccaucaucagcaccuuccaccuguccauccccaacuucaaccaguacgaggccaugagcugcgacuucaacgggggcaagaucuccgugcaguacaaccucagccacgcguacgccguggacgccgccaaccacugcgggaccaucgcgaacggcguccugcagaccuucaugcggauggccuggggcggguccuacaucgcccuggacagcggcaagggguccugggacugcaucaugacgagcuaccaguaccucaucauccagaacaucaccugggaggaccacugccaguucucccgccccagccccaucggcuaccuggggcugcucagccagcggacccgcgacaucuacaucucccggcgccgccggggcaccuucacguggacccucagcgacuccgagggcaacgagacccccgggggcuacugccugacccgguggaugcugaucgaggccgagcucaagugcuucgggaacacggccguggcgaagugcaacgagaagcacgacgaggaguucugcgacaugcugcgccuguucgacuucugcaagcaggccauccggcgccucaagacccccgcccagaugagcauccagcugaucaacaaggccgugaacgcccugaucaacgaccagcucaucaugaagaaccaccuccgggacaucaugggcauccccuacugcaacuacuccaaguacugcuaccugaaccacaccgucaccgggaagacgagccugccccgcugcugccugguguccaacggcagcuaccugaacgagacccacuucuccgacgacaucgagcagcaggcggacaacaugaucaccgagcuccugcagaaggaguacaucgaccggcagggcaagaccccgcuggggcucguggaccuguucgucuucagcacguccuucuaccugaucagcaucuuccugcaccucgugaagaucccgacccaccgccacguggucggcaagcccugccccaagccccaccggcugaaccacauggggaucugcuccugcggccuguacaagcacccgggggugcccgugaaguggaagcgcugaggacuaguaauaaggaaacuguaugaaugucugugggcaggaagugaagagauccuucuguaaagguuuuuggaauuaugucugcugaauaauaaacuuuuuugaaauaauaaaucugguagaaaaaugagaucucaaaggcucuuuucagagccaccaaaaaaaaaaaaaaaaaaaaaaaaaaaaaaaaaaaaaaaaaaaaaaaaaaaaaaaaaaaaaaaaaaaaaaaaaaaaaaaaaaaaaaaaaaaaaaaaaaaaa

SEQ ID NO: 27407 - RNA, 1809 nt, Artificial Sequence
  mRNA product Design b-4 (hSL-A100) comprising derived and/or modified sequence from LASV(Lassa virus/H.sapiens-wt/NGA/2015/ISTH_0543;Clade II)__AVO03639__GPCmut4 (opt1)
aggagagucccgcagucggcguccagcggcucugcuuguucgugugugugucguugcaggccuuauucaagcuuaccaugggccagaucaucaccuucuuccaggaggugccccacgucaucgaggaggugaugaacaucgugcugaucgcccucagccugcuggccauccucaaggggaucuacaacgucgcgaccugcggccuguucgggcugguguccuuccuccugcugugcggccgcagcugcuccacgaccuacaaggggguguacgagcuccagacccuggagcuggacauggccaaccucaacaugugcaugccgcugagcugcacgaagaacaacucccaccacuacaucauggucggcaacgagaccggccuggagcucacccugaccaacacgagcaucaucaaccacaaguucugcaaccuguccgacgcccacaagaagaaccucuacgaccacgcccugaugagcaucaucuccaccuuccaccugagcauccccaacuucaaccaguacgaggccauguccugcgacuucaacgggggcaagaucagcgugcaguacaaccucucccacaccuacgcgguggacgccgccaaccacugcgggaccaucgccaacggcguccugcagacguucaugcggauggcguggggcgggagcuacaucgcccuggacuccggcaaggggagcugggacugcaucaugaccuccuaccaguaccucgugauccagaacaccaccugggaggaccacugccaguucagccgccccucccccaucggcuaccuggggcugcucagccagcggacgcgcgacaucuacaucagccggcgccgccggggcaccuucaccuggacccucuccgacagcgagggcaacgagacgcccgggggcuacugccugacccgguggaugcugaucgaggccgagcucaagugcuucgggaacaccgccguggccaagugcaacgagaagcacgacgaggaguucugcgacaugcugcgccuguucgacuucugcaagcaggcgauccggcgccucaagacccccgcccagauguccauccagcugaucaacaaggccgucaacgcccugaucaacgaccagcucaucaugaagaaccaccuccgggacaucaugggcauccccuacugcaacuacagcaaguacugcuaccugaaccacacggugaccgggaagaccucccugccccgcugcugccuggugagcaacggcuccuaccugaacgagacccacuucagcgacgacaucgagcagcaggccgacaacaugaucacggagcuccugcagaaggaguacaucgaccggcagggcaagaccccgcuggggcucgucgaccuguucguguucuccaccagcuucuaccugaucuccaucuuccugcaccucgugaagaucccgacccaccgccacaucacgggcaagcccugccccaagccccaccggcugaaccacauggggaucugcagcugcggccuguacaagcacccggggguccccgugaaguggaagcgcugaggacuaguaauaaggaaacuguaugaaugucugugggcaggaagugaagagauccuucuguaaagguuuuuggaauuaugucugcugaauaauaaacuuuuuugaaauaauaaaucugguagaaaaaugagaucucaaaggcucuuuucagagccaccaaaaaaaaaaaaaaaaaaaaaaaaaaaaaaaaaaaaaaaaaaaaaaaaaaaaaaaaaaaaaaaaaaaaaaaaaaaaaaaaaaaaaaaaaaaaaaaaaaaaa

SEQ ID NO: 27408 - RNA, 1809 nt, Artificial Sequence
  mRNA product Design b-4 (hSL-A100) comprising derived and/or modified sequence from LASV(Lassa virus/H.sapiens-wt/NGA/2016/ISTH_0009;Clade II)__AVO03571__GPCmut4 (opt1)
aggagagucccgcagucggcguccagcggcucugcuuguucgugugugugucguugcaggccuuauucaagcuuaccaugggccagaucaucaccuucuuccaggaggugccccacgucaucgaggaggugaugaacaucgugcugaucgcccucagccugcuggccauccucaaggggaucuacaacgucgcgaccugcggccugcuggggcucguguccuuccugcugcucugcggccgcagcugcuccacgaccuacaaggggguguacgagcugcagacccuggagcucgacauggccagccugaacaugugcaugccgcuguccugcacgaagaacaacagccaccacuacaucauggucggcaacgagaccggccucgagcugacccugaccaacacguccaucaucaaccacaaguucugcaaccucagcgacgcccacaagaagaaccuguacgaccacgcccugauguccaucaucagcaccuuccaccucuccauccccaacuucaaccaguacgaggccaugagcugcgacuucaacgggggccggaucuccgugcaguacaaccugagccacuccuacgcgguggacgccgccaaccacugcgggaccaucgccaacggcguccugcagaccuucaugcgcauggcguggggcgggagcuacaucgcccucgacuccggcaaggggagcugggacugcaucaugacguccuaccaguaccugaucauccagaacaccaccugggaggaccacugccaguucagccggcccagccccaucggcuaccuggggcuccugucccagcgcacccgggacaucuacaucagccgccggcgccggggcacguucaccuggacccuguccgacagcgagggcaacgagacccccgggggcuacugccugacgcgcuggaugcucaucgaggccgagcugaagugcuucgggaacaccgccguggccaagugcaacgagaagcacgacgaggaguucugcgacaugcugcggcuguucgacuucugcaagcaggcgauccgccggcugaagacccccgcccagauguccauccagcugaucaacaaggccgugaacgcccucaucaacgaccagcugaucaugaagaaccaccuccgcgacaucaugggcaucccguacugcaacuacagcaaguacugcuaccucaaccacaccgucacggggaagaccucccugccccggugcugccuggugagcaacggcuccuaccucaacgagacccacuucagcgacgacaucgagcagcaggccgacaacaugaucaccgagcugcugcagaaggaguacaucgaccgccagggcaagacgccccucgggcugguggaccuguucgucuucuccaccagcuucuaccugaucuccaucuuccuccaccuggugaagaucccgacccaccggcacaucaccggcaagcccugccccaagccccaccgccugaaccacauggggaucugcagcugcggccucuacaaccacccgggggugcccgucaaguggaagcggugaggacuaguaauaaggaaacuguaugaaugucugugggcaggaagugaagagauccuucuguaaagguuuuuggaauuaugucugcugaauaauaaacuuuuuugaaauaauaaaucugguagaaaaaugagaucucaaaggcucuuuucagagccaccaaaaaaaaaaaaaaaaaaaaaaaaaaaaaaaaaaaaaaaaaaaaaaaaaaaaaaaaaaaaaaaaaaaaaaaaaaaaaaaaaaaaaaaaaaaaaaaaaaaaa

SEQ ID NO: 27409 - RNA, 1809 nt, Artificial Sequence
  mRNA product Design b-4 (hSL-A100) comprising derived and/or modified sequence from LASV(Lassa virus/H.sapiens-wt/NGA/2016/ISTH_0017;Clade II)__AVO03567__GPCmut4 (opt1)
aggagagucccgcagucggcguccagcggcucugcuuguucgugugugugucguugcaggccuuauucaagcuuaccaugggccagaucaucaccuucuuccaggaggugccccacgucaucgaggaggugaugaacaucgugcugaucgcccucagccugcuggccauccucaaggggaucuacaacgucgcgaccugcggccuguucgggcugguguccuuccuccugcugugcggccgcagcugcuccacgaccuacaaggggguguacgagcuccagacccuggagcuggacauggccagccucaacaugugcaugccgcuguccugcacgaagaacaacagccaccacuacaucauggucggcaacgagaccggccuggagcucacccugaccaacacguccaucaucaaccacaaguucugcaaccugagcgacgcccacaagaagaaccucuacgaccacgcccugauguccaucaucagcaccuuccaccuguccauccccaacuucaaccaguacgaggccaugagcugcgacuucaacgggggcaagaucuccgugcaguacaaccucagccacaccuacgcgaucgacgccgccaaccacugcgggaccaucgccaacggcgugcugcagacguucaugcggauggcguggggcggguccuacaucgcccuggacagcggcaagggguccugggacugcaucaugaccagcuaccaguaccucaucauccagaacaccaccugggaggaccacugccaguucucccgccccagccccaucggcuaccuggggcugcucagccagcggacgcgcgacaucuacaucucccggcgccgccggggcaccuucaccuggacccucagcgacuccgagggcaacgagacgcccgggggcuacugccugacccgguggaugcugaucgaggccgagcucaagugcuucgggaacaccgccgucgccaagugcaacgagaagcacgacgaggaguucugcgacaugcugcgccuguucgacuucugcaagcaggcgauccggcgccucaagacccccgcccagaugagcauccagcugaucaacaaggccgugaacgcccugaucaacgaccagcucaucaugaagaaccaccuccgggacaucaugggcauccccuacugcaacuacuccaaguacugcuaccugaaccacacggugaccgggaagaccagccugccccgcugcugccuggucuccaacggcagcuaccugaacgagacccacuucuccgacgacaucgagcagcaggccgacaacaugaucacggagcuccugcagaaggaguacauggaccggcagggcaagaccccgcuggggcucguggaccuguucguguucagcaccuccuucuaccugaucagcaucuuccugcaccucguccgcaucccgacccaccggcacgugaucggcaagcccugccccaagccccaccgccugaaccacauggggaucugcuccugcggccuguacaagcacccgggggugcccgucaaguggaagcggugaggacuaguaauaaggaaacuguaugaaugucugugggcaggaagugaagagauccuucuguaaagguuuuuggaauuaugucugcugaauaauaaacuuuuuugaaauaauaaaucugguagaaaaaugagaucucaaaggcucuuuucagagccaccaaaaaaaaaaaaaaaaaaaaaaaaaaaaaaaaaaaaaaaaaaaaaaaaaaaaaaaaaaaaaaaaaaaaaaaaaaaaaaaaaaaaaaaaaaaaaaaaaaaaa

SEQ ID NO: 27410 - RNA, 1809 nt, Artificial Sequence
  mRNA product Design b-4 (hSL-A100) comprising derived and/or modified sequence from LASV(Lassa virus/H.sapiens-wt/NGA/2018/ISTH_0959;Clade II)__AVV65099__GPCmut4 (opt1)
aggagagucccgcagucggcguccagcggcucugcuuguucgugugugugucguugcaggccuuauucaagcuuaccaugggccagaucaucaccuucuuccaggaggugccccacgucaucgaggaggugaugaacaucgugcugaucgcccucagccugcuggccauccucaaggggaucuacaacgucgugaccugcggccuguucgggcugguguccuuccuccugcugugcggccgcagcugcuccacgaccuacaagggggucuacgagcuccagacccuggagcuggacauggcgagccucaacaugugcaugccgcuguccugcacgaagaacaacagccaccacuacaucauggugggcaacgagaccggccuggagcucacccugaccaacacguccaucaucaaccacaaguucugcaaccugagcgacgcccacaagaagaaccucuacgaccacgcccugauguccaucaucagcaccuuccaccuguccauccccaacuucaaccaguacgaggccaugagcugcgacuucaacgggggcaagaucuccgugcaguacaaccucagccacgccuacgcgaucgacgccgccaaccacugcgggaccaucgccaacggcguccugcagaccuucaugcggauggcguggggcggguccuacaucgcccuggacagcggcaagggguccugggacugcaucaugacgagcuaccaguaccucaucauccagaacaccaccugggaggaccacugccaguucucccgccccagccccaucggcuaccuggggcugcucagccagcggacccgcgacaucuacaucucccggcgccgccggggcacguucaccuggacccucagcgacuccgagggcaacgagacccccgggggcuacugccugacgcgguggaugcugaucgaggccgagcucaagugcuucgggaacaccgccguggccaagugcaacgagaagcacgacgaggaguucugcgacaugcugcgccuguucgacuucugcaagcaggcgauccggcgccucaagacccccgcccagaugagcauccagcugaucaacaaggccgugaacgcccugaucaacgaccagcucaucaugaagaaccaccuccgggacaucaugggcaucccguacugcaacuacuccaaguacugcuaccugaaccacaccgucacggggaagaccagccugccccgcugcugccugguguccaacggcagcuaccugaacgagacccacuucuccgacgacaucgagcagcaggccgacaacaugaucaccgagcuccugcagaaggaguacaucgaccggcagggcaagacgccccuggggcucguggaccuguucgucuucagcaccuccuucuaccugaucagcaucuuccugcaccucgugaagaucccgacccaccgccacgugaucggcaagcccugccccaagccccaccggcugaaccacauggggaucugcuccugcggccuguacaagcacccggggguccccgugaaguggaagcgcugaggacuaguaauaaggaaacuguaugaaugucugugggcaggaagugaagagauccuucuguaaagguuuuuggaauuaugucugcugaauaauaaacuuuuuugaaauaauaaaucugguagaaaaaugagaucucaaaggcucuuuucagagccaccaaaaaaaaaaaaaaaaaaaaaaaaaaaaaaaaaaaaaaaaaaaaaaaaaaaaaaaaaaaaaaaaaaaaaaaaaaaaaaaaaaaaaaaaaaaaaaaaaaaaa

SEQ ID NO: 27411 - RNA, 1809 nt, Artificial Sequence
  mRNA product Design b-4 (hSL-A100) comprising derived and/or modified sequence from LASV(LASV003-NIG-2008;Clade II)__AIT17580__GPCmut4 (opt1)
aggagagucccgcagucggcguccagcggcucugcuuguucgugugugugucguugcaggccuuauucaagcuuaccaugggccagaucaucaccuucuuccaggaggugccccacgucaucgaggaggugaugaacaucgugcugaucgcccucagccugcuggccauccucaaggggaucuacaacgucgcgaccugcggccuguucgggcugguguccuuccuccugcugugcggccgcagcugcuccacgaccuacaaggggguguacgagcuccagacccuggagcuggacauggccagccucaacaugugcaugccgcuguccugcacgaagaacaacagccaccacuacaucauggucggcaacgagaccggccuggagcucacccugaccaacacguccaucaucaaccacaaguucugcaaccugagcgacgcccacaagaagaaccucuacgaccacgcccugauguccaucaucagcaccuuccaccuguccauccccaacuucaaccaguacgaggccaugagcugcgacuucaacgggggcaagaucuccgugcaguacaaccucagccacaccuacgcgguggacgccgccaaccacugcgggaccaucgccaacggcguccugcagacguucaugcggauggcguggggcggguccuacaucgcccuggacagcggcaagggguccugggacugcaucaugaccagcuaccaguaccucaucauccagaacaccaccugggaggaccacugccaguucucccgccccagccccaucggcuaccuggggcugcucagccagcggacgcgcgacaucuacaucucccggcgccgccggggcaccuucaccuggacccucagcgacuccgagagcaacgagacgccgggcggguacugccugacccgguggaugcugaucgaggccgagcucaagugcuucggcaacaccgccguggccaagugcaacgagaagcacgacgaggaguucugcgacaugcugcgccuguucgacuucugcaagcaggcgauccggcgccucaaggcccccgcccagauguccauccagcugaucaacaaggccgugaacgcccugaucaacgaccagcucaucaugaagaaccaccuccgggacaucauggggauccccuacugcaacuacagcaaguacugcuaccugaaccacaccgucacgggccgcaccucccugccccggugcugccuggugagcaacggguccuaccugaacgagacccacuucagcgacgacaucgagcagcaggcggacaacaugaucaccgagcuccugcagaaggaguacauggaccgccagggcaagacgccccugggccucguggaccuguucgucuucuccaccagcuucuaccugaucuccaucuuccugcaccucgugaagaucccgacccaccggcacgugaucgggaagcccugccccaagccccaccgccugaaccacaugggcaucugcagcugcgggcuguacaagcacccgggcguccccgugaaguggaagcggugaggacuaguaauaaggaaacuguaugaaugucugugggcaggaagugaagagauccuucuguaaagguuuuuggaauuaugucugcugaauaauaaacuuuuuugaaauaauaaaucugguagaaaaaugagaucucaaaggcucuuuucagagccaccaaaaaaaaaaaaaaaaaaaaaaaaaaaaaaaaaaaaaaaaaaaaaaaaaaaaaaaaaaaaaaaaaaaaaaaaaaaaaaaaaaaaaaaaaaaaaaaaaaaaa

SEQ ID NO: 27412 - RNA, 1809 nt, Artificial Sequence
  mRNA product Design b-4 (hSL-A100) comprising derived and/or modified sequence from LASV(LASV035-NIG-2009;Clade II)__AIT17588__GPCmut4 (opt1)
aggagagucccgcagucggcguccagcggcucugcuuguucgugugugugucguugcaggccuuauucaagcuuaccaugggccagaucaucaccuucuuccaggaggugccccacgucaucgaggaggugaugaacaucgugcugaucgcccucagccugcuggccauccucaaggggaucuacaacgucgcgaccugcggccuguucgggcugguguccuuccuccugcugugcggccgcagcugcuccacgaccuacaaggggguguacgagcuccagacccuggagcuggacauggccagccucaacaugugcaugccgcuguccugcacgaagaacaacagccaccacuacaucauggucggcaacgagaccggccuggagcucacccugaccaacacguccaucaucaaccacaaguucugcaaccugagcgacgcccacaagaagaaccucuacgaccacgcccugauguccaucaucagcaccuuccaccuguccauccccaacuucaaccaguacgaggccaugagcugcgacuucaacgggggcaagaucuccgugcaguacaaccucagccacgcguacgccguggacgccgccaaccacugcgggaccaucgcgaacggcguccugcagaccuucaugcggauggccuggggcggguccuacaucgcccuggacagcggcaagggguccugggacugcaucaugacgagcuaccaguaccucaucauccagaacaccaccugggaggaccacugccaguucucccgccccagccccaucggcuaccuggggcugcucagccagcggacccgcgacaucuacaucucccggcgccgccggggcacguucaccuggacccucagcgacuccgagggcaacgagacccccgggggcuacugccugacgcgguggaugcugaucgaggccgagcucaagugcuucgggaacaccgccguggcgaagugcaacgagaagcacgacgaggaguucugcgacaugcugcgccuguucgacuucugcaagcaggccauccggcgccucaaggcccccgcccagaugagcauccagcugaucaacaaggccgugaacgcgcugaucaacgaccagcucaucaugaagaaccaccuccgggacaucaugggcauccccuacugcaacuacuccaaguacugcuaccugaaccacaccgucaccgggaagacgagccugccccgcugcugccugguguccaacggcagcuaccugaacgagacccacuucuccgacgacaucgagcagcaggccgacaacaugaucaccgagcuccugcagaaggaguacaucgaccggcagggcaagaccccgcuggggcucguggaccuguucgucuucagcacguccuucuaccugaucagcaucuuccugcaccucgugaagaucccgacccaccgccacgugaucggcaagcccugccccaagccccaccggcugaaccacauggggaucugcuccugcggccuguacaagcacccggggguccccgugaaguggaagcgcugaggacuaguaauaaggaaacuguaugaaugucugugggcaggaagugaagagauccuucuguaaagguuuuuggaauuaugucugcugaauaauaaacuuuuuugaaauaauaaaucugguagaaaaaugagaucucaaaggcucuuuucagagccaccaaaaaaaaaaaaaaaaaaaaaaaaaaaaaaaaaaaaaaaaaaaaaaaaaaaaaaaaaaaaaaaaaaaaaaaaaaaaaaaaaaaaaaaaaaaaaaaaaaaaa

SEQ ID NO: 27413 - RNA, 1809 nt, Artificial Sequence
  mRNA product Design b-4 (hSL-A100) comprising derived and/or modified sequence from LASV(LASV1000-NIG-2009;Clade II)__AIT17782__GPCmut4 (opt1)
aggagagucccgcagucggcguccagcggcucugcuuguucgugugugugucguugcaggccuuauucaagcuuaccaugggccagaucaucaccuucuuccaggaggugccccacgucaucgaggaggugaugaacaucgugcugaucgcccucagccugcuggccauccucaaggggaucuacaacgucgcgaccugcggccuguucgggcugguguccuuccuccugcugugcggccgcagcugcuccacgaccuacaaggggguguacgagcuccagacccuggagcuggacauggccagccucaacaugugcaugccgcuguccugcacgaagaacaacagccaccacuacaucauggucggcaacgagaccggccuggagcucacccugaccaacacguccaucaucaaccacaaguucugcaaccugagcgacgcccacaagaagaaccucuacgaccacgcccugauguccaucaucagcaccuuccaccuguccauccccaacuucaaccaguacgaggccaugagcugcgacuucaacgggggcaagaucuccgugcaguacaaccucagccacaccuacgcgguggacgccgccaaccacugcgggaccaucgccaacggcguccugcagacguucaugcggauggcguggggcggguccuacaucgcccuggacagcggcaagggguccugggacugcaucaugaccagcuaccaguaccucaucauccagaacaccaccugggaggaccacugccaguucucccgccccagccccaucggcuaccuggggcugcucagccagcggacgcgcgacaucuacaucucccggcgccgccggggcaccuucaccuggacccucagcgacuccgagggcaacgagacgcccgggggcuacugccugacccgguggaugcugaucgaggccgagcucaagugcuucgggaacaccgccguggccaagugcaacgagaagcacgacgaggaguucugcgacaugcugcgccuguucgacuucugcaagcaggcgaucaagcggcucaagacccccgcccagaugagcauccagcugaucaacaaggccgugaacgcccugaucaacgaccagcucaucaugaagaaccaccuccgcgacaucaugggcauccccuacugcaacuacuccaaguacugcuaccugaaccacacggucaccgggaagaccagccugccccggugcugccugguguccaacggcagcuaccugaacgagacccacuucuccgacgacaucgagcagcaggccgacaacaugaucacggagcuccugcagaaggaguacaucgaccgccagggcaagaccccgcuggggcucguggaccuguucgucuucagcaccuccuucuaccugaucagcaucuuccugcaccucgugaagaucccgacccaccggcacguggucggcaagcccugccccaagccccaccgccugaaccacauggggaucugcuccugcggccuguacaagcacccgggggugcccgugaaguggaagcggugaggacuaguaauaaggaaacuguaugaaugucugugggcaggaagugaagagauccuucuguaaagguuuuuggaauuaugucugcugaauaauaaacuuuuuugaaauaauaaaucugguagaaaaaugagaucucaaaggcucuuuucagagccaccaaaaaaaaaaaaaaaaaaaaaaaaaaaaaaaaaaaaaaaaaaaaaaaaaaaaaaaaaaaaaaaaaaaaaaaaaaaaaaaaaaaaaaaaaaaaaaaaaaaaa

SEQ ID NO: 27414 - RNA, 1809 nt, Artificial Sequence
  mRNA product Design b-4 (hSL-A100) comprising derived and/or modified sequence from LASV(LASV221-NIG-2010;Clade II)__AIT17624__GPCmut4 (opt1)
aggagagucccgcagucggcguccagcggcucugcuuguucgugugugugucguugcaggccuuauucaagcuuaccaugggccagaucaucaccuucuuccaggaggugccccacgucaucgaggaggugaugaacaucgugcugaucgcccucagccugcuggccauccucaaggggaucuacaacgucgcgaccugcggccuguucgggcugguguccuuccuccugcugugcggccgcagcugcuccacgaccuacaaggggguguacgagcuccagacccuggagcuggacauggccagccucaacaugugcaugccgcuguccugcacgaagaacaacagccaccacuacaucauggucggcaacgagaccggccuggagcucacccugaccaacacguccaucaucaaccacaaguucugcaaccugagcgacgcccacaagaagaaccucuacgaccacgcccugauguccaucaucagcaccuuccaccuguccauccccaacuucaaccaguacgaggccaugagcugcgacuucaacgggggcaagaucuccgugcaguacaaccucagccacaccuacgcgaucgacgccgccaaccacugcgggaccaucgccaacggcgugcugcagacguucaugcggauggcguggggcggguccuacaucgcccuggacagcggcaagggguccugggacugcaucaugaccagcuaccaguaccucaucauccagaacaccaccugggaggaccacugccaguucucccgccccagccccaucggcuaccuggggcugcucagccagcggacgcgcgacaucuacaucucccggcgccgccggggcaccuucaccuggacccucagcgacuccgagggcaacgagacgcccgggggcuacugccugacccgguggaugcugaucgaggccgagcucaagugcuucgggaacaccgccgucgccaagugcaacgagaagcacgacgaggaguucugcgacaugcugcgccuguucgacuucugcaagcaggcgauccggcgccucaagacccccgcccagaugagcauccagcugaucaacaaggccgugaacgcccugaucaacgaccagcucaucaugaagaaccaccuccgggacaucaugggcauccccuacugcaacuacuccaaguacugcuaccugaaccacacggugaccgggaagaccagccugccccgcugcugccuggucuccaacggcagcuaccugaacgagacccacuucuccgacgacaucgagcagcaggccgacaacaugaucacggagaugcuccagaaggaguacauggaccggcagggcaagaccccgcuggggcugguggaccucuucguguucagcaccuccuucuaccugaucagcaucuuccugcaccuggucaagaucccgacccaccgccacgugaucggcaagcccugccccaagccccaccggcucaaccacauggggaucugcuccugcggccuguacaagcacccgggggugcccgucaaguggaagcgcugaggacuaguaauaaggaaacuguaugaaugucugugggcaggaagugaagagauccuucuguaaagguuuuuggaauuaugucugcugaauaauaaacuuuuuugaaauaauaaaucugguagaaaaaugagaucucaaaggcucuuuucagagccaccaaaaaaaaaaaaaaaaaaaaaaaaaaaaaaaaaaaaaaaaaaaaaaaaaaaaaaaaaaaaaaaaaaaaaaaaaaaaaaaaaaaaaaaaaaaaaaaaaaaaa

SEQ ID NO: 27415 - RNA, 1809 nt, Artificial Sequence
  mRNA product Design b-4 (hSL-A100) comprising derived and/or modified sequence from LASV(LASV237-NIG-2010;Clade II)__AIT17638__GPCmut4 (opt1)
aggagagucccgcagucggcguccagcggcucugcuuguucgugugugugucguugcaggccuuauucaagcuuaccaugggccagaucaucaccuucuuccaggaggugccccacgucaucgaggaggugaugaacaucgugcugaucgcccucagccugcuggccauccucaaggggaucuacaacgucgcgaccugcggccuguucgggcugguguccuuccuccugcugugcggccgcagcugcuccacgaccuacaaggggguguacgagcuccagacccuggagcuggacauggccagccucaacaugugcaugccgcuguccugcacgaagaacaacagccaccacuacaucauggucggcaacgagaccggccuggagcucacccugaccaacacguccaucaucaaccacaaguucugcaaccugagcgacgcccacaagaaggaccucuacgaccacgcccugauguccaucaucagcaccuuccaccuguccauccccaacuucaaccaguacgaggccaugagcugcgacuucaacgggggcaagaucuccgugcaguacaaccucagccacaccuacgcgguggacgccgccaaccacugcgggaccaucgccaacggcguccugcagacguucaugcggauggcguggggcggguccuacaucgcccuggacagcggcaagggguccugggacugcaucaugaccagcuaccaguaccucaucauccagaacaccaccugggaggaccacugccaguucucccgccccagccccaucggcuaccuggggcugcucagccagcggacgcgcgacaucuacaucucccggcgccgccggggcaccuucaccuggacccucagcgacuccgagggcaacgagacgcccgggggcuacugccugacccgguggaugcugaucgaggccgagcucaagugcuucgggaacaccgccguggccaagugcaacgagaagcacgacgaggaguucugcgacaugcugcgccuguucgacuucugcaagcaggcgauccggcgccucaagacccccgcccagaugagcauccagcugaucaacaaggccgugaacgcccugaucaacgaccagcucaucaugaagaaccaccuccgggacaucaugggcauccccuacugcaacuacuccaaguacugcuaccugaaccacacggucaccgggaagaccagccugccccgcugcugccugguguccaacggcagcuaccugaacgagacccacuucuccgacgacaucgagcagcaggccgacaacaugaucacggagcuccugcagaaggaguacauggaccggcagggcaagaccccgcuggggcucguggaccuguucgucuucagcaccuccuucuaccugaucagcaucuuccugcaccucaucaagaucccgacccaccgccacaucacgggcaagcccugccccaagccccaccggcugaaccacauggggaucugcuccugcggccuguacaagcacccgggggugcccgugaaguggaagcgcugaggacuaguaauaaggaaacuguaugaaugucugugggcaggaagugaagagauccuucuguaaagguuuuuggaauuaugucugcugaauaauaaacuuuuuugaaauaauaaaucugguagaaaaaugagaucucaaaggcucuuuucagagccaccaaaaaaaaaaaaaaaaaaaaaaaaaaaaaaaaaaaaaaaaaaaaaaaaaaaaaaaaaaaaaaaaaaaaaaaaaaaaaaaaaaaaaaaaaaaaaaaaaaaaa

SEQ ID NO: 27416 - RNA, 1809 nt, Artificial Sequence
  mRNA product Design b-4 (hSL-A100) comprising derived and/or modified sequence from LASV(LASV253-NIG-2011;Clade II)__AIT17670__GPCmut4 (opt1)
aggagagucccgcagucggcguccagcggcucugcuuguucgugugugugucguugcaggccuuauucaagcuuaccaugggccagaucaucaccuucuuccaggaggugccccacgucaucgaggaggugaugaacaucgugcugaucgcccucagccugcuggccauccucaaggggaucuacaacgucgcgaccugcggccuguucgggcugguguccuuccuccugcugugcggccgcagcugcuccacgaccuacaaggggguguacgagcuccagacccuggagcuggacauggccagccucaacaugugcaugccgcuguccugcacgaagaacaacagccaccacuacaucauggucggcaacgagaccggccuggagcucacccugaccaacacguccaucaucaaccacaaguucugcaaccugagcgacgcccacaagaagaaccucuacgaccacgcccugauguccaucaucagcaccuuccaccuguccauccccaacuucaaccaguacgaggccaugagcugcgacuucaacgggggcaagaucuccgugcaguacaaccucagccacaccuacgcgguggacgccgccaaccacugcgggaccaucgccaacggcguccugcagacguucaugcggauggcguggggcggguccuacaucgcccuggacagcggcaagggguccugggacugcaucaugaccagcuaccaguaccucaucauccagaacaccaccugggaggaccacugccaguucucccgccccagccccaucggcuaccuggggcugcucagccagcggacgcgcgacaucuacaucucccggcgccgccggggcaccuucaccuggacccucagcgacuccgagggcaacgagacgcccgggggcuacugccugacccgguggaugcugaucgaggccgagcucaagugcuucgggaacaccgccguggccaagugcaacgagaagcacgacgaggaguucugcgacaugcugcgccuguucgacuucugcaagcaggcgauccggcgccucaaggcccccgcccagaugagcauccagcugaucaacaaggccgugaacgcccugaucaacgaccagcucaucaugaagaaccaccuccgggacaucaugggcaucccguacugcaacuacuccaaguacugcuaccugaaccacaccgucacggggcgcaccagccugccccggugcugccugguguccaacggcagcuaccugaacgagacccacuucuccgacgacaucgagcagcaggcggacaacaugaucaccgagcuccugcagaaggaguacaucgaccgccagggcaagacgccccuggggcucguggaccuguucgucuucagcaccuccuucuaccugaucagcaucuuccugcaccucgugaagaucccgacccaccggcacaucaucggcaagcccugccccaagccccaccgccugaaccacauggggaucugcuccugcggccuguacaagcacccgggggugcccgucaaguggaagcggugaggacuaguaauaaggaaacuguaugaaugucugugggcaggaagugaagagauccuucuguaaagguuuuuggaauuaugucugcugaauaauaaacuuuuuugaaauaauaaaucugguagaaaaaugagaucucaaaggcucuuuucagagccaccaaaaaaaaaaaaaaaaaaaaaaaaaaaaaaaaaaaaaaaaaaaaaaaaaaaaaaaaaaaaaaaaaaaaaaaaaaaaaaaaaaaaaaaaaaaaaaaaaaaaa

SEQ ID NO: 27417 - RNA, 1809 nt, Artificial Sequence
  mRNA product Design b-4 (hSL-A100) comprising derived and/or modified sequence from LASV(LASV254-NIG-2011;Clade II)__AIT17674__GPCmut4 (opt1)
aggagagucccgcagucggcguccagcggcucugcuuguucgugugugugucguugcaggccuuauucaagcuuaccaugggccagaucaucaccuucuuccaggaggugccccacgucaucgaggaggugaugaacaucgugcugaucgcccucagccugcuggccauccucaaggggaucuacaacgucgcgaccugcggccuguucgggcugguguccuuccuccugcugugcggccgcagcugcuccacgaccuacaaggggguguacgagcuccagacccuggagcuggacaugaccaaccucaacaugugcaugccgcugagcugcaccaagaacaacucccaccacuacaucauggucggcaacgagaccggccuggagcucacccugacgaacaccagcaucaucaaccacaaguucugcaaccuguccgacgcccacaagaagaaccucuacaaccacgcccugaugagcaucaucuccaccuuccaccugagcauccccaacuucaaccaguacgaggccauguccugcgacuucaacgggggcaagaucagcgugcaguacaaccucucccacagcuacgccguggacgcggccaaccacugcgggaccaucgccaacggcguccugcagacguucaugcggauggccuggggcggguccuacaucgcgcuggacagcggcaaggggaacugggacugcaucaugaccuccuaccaguaccucaucauccagaacaccaccugggaggaccacugccaguucagccgccccucccccaucggcuaccuggggcugcucagccagcggacgcgcgacaucuacaucagccggcgccgccggggcaccuucaccuggacccucuccgacagcgagggcaacgagacgcccgggggcuacugccugacccgguggaugcugaucgaggccgagcucaagugcuucgggaacaccgccguggccaagugcaacgagaagcacgacgaggaguucugcgacaugcugcgccuguucgacuucugcaagcaggccauccggcgccucaagacccccgcgcaggccaacauccagcugaucaacaaggccgugaacgcccugaucaacgaccagcucaucaugaagaaccaccuccgggacaucaugggcauccccuacugcaacuacuccaaguacugcuaccugaaccacacggucaccgggaagaccagccugccccgcugcugccugguguccaacggcagcuaccugaacgagacccacuucuccgacgacaucgagcagcaggccgacaacaugaucacggagcuccugcagaaggaguacauggaccggcagggcaagaccccgcuggggcucguggaccuguucgucuucagcaccuccuucuaccugaucagcaucuuccugcaccucgugaagaucccgacccaccgccacgugaucggcaagcccugccccaagccccaccggcugaaccacauggggaucugcuccugcggccuguacaagcacccggggguccccgugaaguggaagcgcugaggacuaguaauaaggaaacuguaugaaugucugugggcaggaagugaagagauccuucuguaaagguuuuuggaauuaugucugcugaauaauaaacuuuuuugaaauaauaaaucugguagaaaaaugagaucucaaaggcucuuuucagagccaccaaaaaaaaaaaaaaaaaaaaaaaaaaaaaaaaaaaaaaaaaaaaaaaaaaaaaaaaaaaaaaaaaaaaaaaaaaaaaaaaaaaaaaaaaaaaaaaaaaaaa

SEQ ID NO: 27418 - RNA, 1809 nt, Artificial Sequence
  mRNA product Design b-4 (hSL-A100) comprising derived and/or modified sequence from LASV(Nig08-A19;Clade III)__ADU56618__GPCmut4 (opt1)
aggagagucccgcagucggcguccagcggcucugcuuguucgugugugugucguugcaggccuuauucaagcuuaccaugggccagaucgugaccuucuuccaggaggucccccacgugaucgaggaggugaugaacaucguccugaucgcccucagcauccuggccauccugaaggggcucuacaacaucgcgaccugcggccugaucgggcuggugacguuccuccugcuguccggccgcagcugcuccaugaccuacaaggggguguacgagcuccagacccuggagcugaacaugaacacccucaacaugugcaugccgcugagcugcaccaagaacaacucccaccacuacaucauggucggcaacgagaccggccuggagcucacccugacgaacaccagccugcuccaccacaaguucugcaaccuguccgacgcccacaagaagaaccuguacgaccacacccucaugagcaucaucuccaccuuccaccugagcauccccaacuucaaccaguacgaggccauguccugcgacuucaacgggggcaagaucacggugcaguacaaccugagccacuccuacgccaucgacgccgcgaaccacugcgggaccguggccaacggcguccuccagaccuucaugcggauggccuggggcgggagcuacaucgcccuggacuccggccgcgggaagugggacugcaucaugaccagcuaccaguaccugaucauccagaacacgaccugggaggaccacugccaguucucccggcccagccccaucggcuaccucgggcugcugucccagcgcacccgggacaucuacaucagccgccggcgccggggcaccuucacguggacccugagcgacuccgagggcaacgagacccccgggggcuacugccucacccgcuggaugcugaucgaggcggagcugaagugcuucgggaacacggccguggccaagugcaacgagaagcacgacgaggaguucugcgacaugcuccggcuguucgacuucugcaagcaggccauccgccggcugaaggcccccgcgcagaugagcauccagcucaucaacaaggccgugaacgcccugaucaacgaccagcugaucaugaagaaccaccuccgcgacaucaugggcauccccuacugcaacuacuccaaguacugcuaccugaaccacaccagcaccgggcggaccucccugccccgcugcugccucgucagcaacggcuccuaccugaacgagacgcacuucagcgacgacaucgagcagcaggccgacaacaugaucaccgagaugcugcagaaggaguaccucgaccggcagggcaagaccccgcuggggcugguggaccuguucguguucuccaccagcuucuaccucaucuccaucuuccugcaccuggucaagaucccgacgcaccgccacaucgugggcaagcccugccccaagccccaccggcucaaccacauggggaucugcagcugcggccuguacaagcagccgggggugcccguccgcuggaagcggugaggacuaguaauaaggaaacuguaugaaugucugugggcaggaagugaagagauccuucuguaaagguuuuuggaauuaugucugcugaauaauaaacuuuuuugaaauaauaaaucugguagaaaaaugagaucucaaaggcucuuuucagagccaccaaaaaaaaaaaaaaaaaaaaaaaaaaaaaaaaaaaaaaaaaaaaaaaaaaaaaaaaaaaaaaaaaaaaaaaaaaaaaaaaaaaaaaaaaaaaaaaaaaaaa

SEQ ID NO: 27419 - RNA, 1812 nt, Artificial Sequence
  mRNA product Design b-4 (hSL-A100) comprising derived and/or modified sequence from LASV(G1180-SLE-2010;Clade IV)__AIT17168__GPCmut4 (opt1)
aggagagucccgcagucggcguccagcggcucugcuuguucgugugugugucguugcaggccuuauucaagcuuaccaugggccagaucgugaccuucuuccaggaggucccccacgugaucgaggaggugaugaacaucguccugaucgcccucagcauccuggccgugcugaaggggcucuacaacuucgcgaccugcggccugguggggcugcucaccuuccugcugcucugcggccgcuccugcaccgccagccgguacaagggggucuacgagcugcagacccuggagcucaacauggagacccugaacaugugcaugccgcuguccugcaccaagaacaacagccaccacuacaucauggugggcaacgagaccggccucgagcugacccugacgaacaccuccaucaucaaccacaaguucugcaaccucagcgacgcccacaagaagaaccuguacgaccacgcccugauguccaucaucagcaccuuccaccucuccauccccaacuucaaccaguacgaggccaugagcugcgacuucaacgggggcaagaucuccgugcaguacaaccugagccacuccuacgcgggggacgccgccaaccacugcggcaccgucgccaacggggugcugcagacguucaugcgcauggcguggggcggcagcuacaucgcccucgacuccgggcacggcagcugggacugcaucaugaccuccuaccaguaccugaucauccagaacaccaccugggaggaccacugccaguucagccggcccucccccaucggguaccugggccuccugagccagcgcacgcgggacaucuacaucagccgccggcgccggggcaccuucaccuggacccuguccgacagcgaggggaaggacacgccgggcggguacugccugacccgcuggaugcucaucgaggccgagcugaagugcuucggcaacaccgccguggccaagugcaacgagaagcacgacgaggaguucugcgacaugcugcggcuguucgacuucugcaagcaggcgauccagcgccugaaggcccccgcccagauguccauccagcugaucaacaaggccgucaacgcccucaucaacgaccagcugaucaugaagaaccaccuccgggacaucauggggauccccuacugcaacuacagcaaguacugcuaccucaaccacaccacgaccggcaagaccucccugcccaagugcugccuggugagcaacggcuccuaccucaacgagacccacuucagcgacgacaucgagcagcaggcggacaacaugaucacggagaugcugcagaaggaguacauggagcgccaggggaagacgccccugggccucguggaccuguucgucuucuccaccagcuucuaccugaucuccaucuuccugcaccucgugaagaucccgacccaccggcacaucgugggcaagagcugccccaagccccaccgccugaaccacauggggaucugcuccugcgggcuguacaagcagcccggcgucccggugaaguggaagcggugaggacuaguaauaaggaaacuguaugaaugucugugggcaggaagugaagagauccuucuguaaagguuuuuggaauuaugucugcugaauaauaaacuuuuuugaaauaauaaaucugguagaaaaaugagaucucaaaggcucuuuucagagccaccaaaaaaaaaaaaaaaaaaaaaaaaaaaaaaaaaaaaaaaaaaaaaaaaaaaaaaaaaaaaaaaaaaaaaaaaaaaaaaaaaaaaaaaaaaaaaaaaaaaaa

SEQ ID NO: 27420 - RNA, 1812 nt, Artificial Sequence
  mRNA product Design b-4 (hSL-A100) comprising derived and/or modified sequence from LASV(G1442-SLE-2011;Clade IV)__AIT17180__GPCmut4 (opt1)
aggagagucccgcagucggcguccagcggcucugcuuguucgugugugugucguugcaggccuuauucaagcuuaccaugggccagaucgugaccuucuuccaggaggucccccacgugaucgaggaggugaugaacaucguccugaucgcccucagcauccuggccgugcugaaggggcucuacaacguggcgaccugcggccugaucgggcuggucacguuccuccugcugugcggccgcuccugcaccaccacccucuacaaggggguguacgagcugcagacgcuggagcucaacauggagacccugaacaugugcaugccgcugagcugcaccaagaacaacucccaccacuacauccgggugggcaacgagacgggccucgagcugacccugaccaacaccagcaucaucaaccacaaguucugcaaccucuccgacgcccacaagaagaaccuguacgaccacgcccugaugagcaucaucuccacguuccaccucagcauccccaacuucaaccaguacgaggccauguccugcgacuucaacgggggcaagaucagcguccaguacaaccugucccacagcuacgccggggacgcggccaaccacugcggcaccguggccaacggggugcugcagaccuucaugcgcauggccuggggcggcuccuacaucgcgcucgacagcgggcggggcaacugggacugcaucaugaccuccuaccaguaccugaucauccagaacacgaccugggacgaccacugccaguucagccgccccucccccaucggguaccugggccuccugagccagcggacccgcgacgucuacaucucccggcgccgccggggcaccuucacguggacccugagcgacagcgaggggaaggacaccccgggcggguacugccugacccgguggaugcucaucgaggccgagcugaagugcuucggcaacacggccguggccaagugcaacgagaagcacgacgaggaguucugcgacaugcugcgccucuucgacuucugcaagcaggccauccagcggcugaaggcgcccgcccagauguccauccagcugaucaacaaggccgugaacgcccucaucaacgaccagcugaucaugaagaaccaccuccgcgacaucauggggauccccuacugcaacuacagcaaguacugcuaccugaacaacaccgccaccggcaagaccucccugcccaagugcugccugaucagcaacggcuccuaccucaacgagacgcacuucagcgacgacaucgagcaggaggcggacaacaugaucaccgagaugcugcagaaggaguacauggagcggcaggggaagacgccccugggccucgucgaccuguucguguucuccaccagcuucuaccugaucuccaucuuccugcaccucgugaagaucccgacccaccgccacaucgucggcaagagcugccccaagccccaccggcugaaccacauggggaucugcuccugcgggcuguacaagcagcccggcgugccggugcgcuggaagcggugaggacuaguaauaaggaaacuguaugaaugucugugggcaggaagugaagagauccuucuguaaagguuuuuggaauuaugucugcugaauaauaaacuuuuuugaaauaauaaaucugguagaaaaaugagaucucaaaggcucuuuucagagccaccaaaaaaaaaaaaaaaaaaaaaaaaaaaaaaaaaaaaaaaaaaaaaaaaaaaaaaaaaaaaaaaaaaaaaaaaaaaaaaaaaaaaaaaaaaaaaaaaaaaaa

SEQ ID NO: 27421 - RNA, 1812 nt, Artificial Sequence
  mRNA product Design b-4 (hSL-A100) comprising derived and/or modified sequence from LASV(G3010-SLE-2013;Clade IV)__AIT17344__GPCmut4 (opt1)
aggagagucccgcagucggcguccagcggcucugcuuguucgugugugugucguugcaggccuuauucaagcuuaccaugggccagaucgugaccuucuuccaggaggucccccacgugaucgaggaggugaugaacaucguccugaucgcccucagcauccuggccgugcugaaggggcucuacaacuucgcgaccugcggccugguggggcuggucacguuccuccugcugugcggccgcuccugcaccaccagccucuacaaggggguguacgagcugcagacccuggagcucaacauggagacgcugaacaugugcaugccgcuguccugcaccaagaacaacagccaccacuacaucauggugggcaacgagaccggccucgagcugacgcugaccaacaccuccaucaucaaccacaaguucugcaaccucagcgacgcccacaagaagaaccuguacaaccacgcccugauguccaucaucagcaccuuccaccucuccauccccaacuucaaccaguacgaggccaugagcugcgacuucaacgggggcaagaucuccguccaguacaaccugagccacuccuacgccggggacgcggccagccacugcggcacgguggccaacggggugcugcagaccuucaugcggauggccuggggcggcuccuacaucgcgcucgacagcggguacggcaagugggacugcaucaugaccuccuaccaguaccugaucauccagaacaccacgugggaggaccacugccaguucagccgccccucccccaucggguaccugggccuccugagccagcggacccgcgacaucuacaucagccggcgccgccggggcaccuucaccuggacgcuguccgacagcgaggggaaggacaccccgggcggguacugccugacccgguggaugcucaucgaggccgagcugaagugcuucggcaacaccgccgucgccaagugcaacgagaagcacgacgaggaguucugcgacaugcugcgccucuucgacuucugcaagcaggccauccagcggcugaagacgcccgcgcagauguccauccagcugaucaacaaggccgugaacgcccucaucaacgaccagcugaucaugaagaaccaccuccgcgacaucauggggauccccuacugcaacuacagcaaguacugcuaccugaaccacaccaccaccggcaagacgucccugcccaagugcugccuggugagcaacggcuccuaccucaacgagacccacuucagcgacgacaucgagcagcaggccgacaacaugaucaccgagaugcugcagaaggaguacauggagcggcaggggaagacgccccugggccucgucgaccuguucguguucuccaccagcuucuaccugaucuccaucuuccugcaccucgugaagaucccgacccaccgccacaucgucggcaagagcugccccaagccccaccggcugaaccacauggggaucugcuccugcgggcuguacaagcagcccggcgugccggugcgcuggaagcggugaggacuaguaauaaggaaacuguaugaaugucugugggcaggaagugaagagauccuucuguaaagguuuuuggaauuaugucugcugaauaauaaacuuuuuugaaauaauaaaucugguagaaaaaugagaucucaaaggcucuuuucagagccaccaaaaaaaaaaaaaaaaaaaaaaaaaaaaaaaaaaaaaaaaaaaaaaaaaaaaaaaaaaaaaaaaaaaaaaaaaaaaaaaaaaaaaaaaaaaaaaaaaaaaa

SEQ ID NO: 27422 - RNA, 1812 nt, Artificial Sequence
  mRNA product Design b-4 (hSL-A100) comprising derived and/or modified sequence from LASV(G502-SLE-2009;Clade IV)__AIT17126__GPCmut4 (opt1)
aggagagucccgcagucggcguccagcggcucugcuuguucgugugugugucguugcaggccuuauucaagcuuaccaugggccagaucgugaccuucuuccaggaggucccccacgugaucgaggaggugaugaacaucguccugaucgcccucagcauccuggccgugcugaaggggcucuacaacuucgcgaccugcggccugguggggcugcucacguuccugcugcucugcggccgcuccugcaccaccgggcuguacaagggcgucuacgagcugcagacccucgagcugaacauggagacgcugaacaugugcaugccgcucagcugcaccaagaacaacucccaccacuacaucauggugggcaacgagaccgggcuggagcugacgcucaccaacaccagcaucaucaaccacaaguucugcaaccuguccgacgcccacaagaagaaccuguacgaccacgcccucaugagcaucaucuccaccuuccaccugagcauccccaacuucaaccaguacgaggccauguccugcgacuucaacggcgggaagaucagcgugcaguacaaccugucccacagcuacgccggcgacgcggccgaccacugcgggacggucgccaacggcgugcuccagaccuucaugcggauggccuggggcggguccuacaucgcgcuggacagcggccgcgggcggugggacugcaucaugaccuccuaccaguaccugaucauccagaacaccacgugggaggaccacugccaguucagccgccccucccccaucggcuaccucggccugcugagccagcggacccgcgacaucuacaucucccggcgccgccgggggaccuucaccuggacgcugagcgacagcgagggcaaggacacccccgggggcuacugccucacccgguggaugcugaucgaggccgagcugaagugcuucgggaacaccgccguggccaagugcaacgagaagcacgacgaggaguucugcgacaugcuccgccuguucgacuucugcaagcaggccauccagcggcugaaggcgcccgcccagauguccauccagcucaucaacaaggccgucaacgcccugaucaacgaccagcuggugaugaagaaccaccuccgcgacaucaugggcauccccuacugcaacuacagccgguacugcuaccugaaccacacgaccaccggccgcaccucccugcccaagugcugccucgugagcaacggguccuaccugaacgagacgcacuucagcgacgacaucgagcagcaggccgacaacaugaucaccgagaugcugcagaaggaguacauggagcggcagggcaagaccccgcucgggcuggucgaccuguucguguucuccaccagcuucuaccugaucuccaucuuccuccaccuggugaagaucccgacgcaccgccacaucgucggcaagagcugccccaagccccaccggcugaaccacauggggaucugcuccugcggccucuacaagcagcccggcgugccggugaaguggaagcgcugaggacuaguaauaaggaaacuguaugaaugucugugggcaggaagugaagagauccuucuguaaagguuuuuggaauuaugucugcugaauaauaaacuuuuuugaaauaauaaaucugguagaaaaaugagaucucaaaggcucuuuucagagccaccaaaaaaaaaaaaaaaaaaaaaaaaaaaaaaaaaaaaaaaaaaaaaaaaaaaaaaaaaaaaaaaaaaaaaaaaaaaaaaaaaaaaaaaaaaaaaaaaaaaaa

SEQ ID NO: 27423 - RNA, 1812 nt, Artificial Sequence
  mRNA product Design b-4 (hSL-A100) comprising derived and/or modified sequence from LASV(G733-SLE-2010;Clade IV)__AIT17154__GPCmut4 (opt1)
aggagagucccgcagucggcguccagcggcucugcuuguucgugugugugucguugcaggccuuauucaagcuuaccaugggccagaucgugaccuucuuccaggaggucccccacgugaucgaggaggugaugaacaucguccugaucgcccucagcauccuggccgugcugaaggggcucuacaacuucgcgaccugcggcaucguggggcuggucuccuuccugcuccugugcggccgcagcugcacgaccucccuguacaaggggguguacgagcuccagacccuggagcugaacauggagacccucaacaugugcaugccgcugagcugcaccaagaacaacucccaccacuacaucauggugggcaacgagaccggccuggagcucacccugacgaacaccagcaucaucaaccacaaguucugcaaccuguccgacgcccacaagaagaaccucuacgaccacgcccugaugagcaucaucuccaccuuccaccugagcauccccaacuucaaccaguacgaggccauguccugcgacuucaacgggggcaagaucagcguccaguacaaccucucccacagcuacgccggggacgcggccaaccacugcggcaccaucgccaacggggugcugcagacguucaugcggauggccuggggcggcuccuacaucgcgcuggacagcgggcgcgaccggugggacugcaucaugaccuccuaccaguaccucaucauccagaacaccaccugggaggaccacugccaguucagccgccccucccccaucggcuaccuggggcugcucagccagcggacgcgcgacaucuacaucagccggcgccgccggggcaccuucaccuggacccucuccgacagcgagggcaaggacacgcccgggggcuacugccugacccgguggaugcugaucgaggccgagcucaagugcuucgggaacaccgccguggccaagugcaacgagaagcacgacgaggaguucugcgacaugcugcgccuguucgacuucugcaagcaggccauccagcggcucaaggcgcccgcccagauguccauccagcugaucaacaaggccgucaacgcccugaucaacgaccagcucaucaugaagaaccaccuccgcgacaucaugggcauccccuacugcaacuacagcaaguacugcuaccugaaccacaccacgaccgggaagaccucccugcccaagugcugccuggugagcaacggcuccuaccugaacgagacccacuucagcgacgacaucgagcagcaggccgacaacaugaucacggagaugcuccagaaggaguacauggagcggcagggcaagaccccgcuggggcugguggaccucuucgucuucuccaccagcuucuaccugaucuccaucuuccugcaccuggugaagaucccgacccaccgccacguggucggcaagagcugccccaagccccaccggcucaaccacauggggaucugcuccugcggccuguacgggcagcccggcgugccggugaaguggaagcgcugaggacuaguaauaaggaaacuguaugaaugucugugggcaggaagugaagagauccuucuguaaagguuuuuggaauuaugucugcugaauaauaaacuuuuuugaaauaauaaaucugguagaaaaaugagaucucaaaggcucuuuucagagccaccaaaaaaaaaaaaaaaaaaaaaaaaaaaaaaaaaaaaaaaaaaaaaaaaaaaaaaaaaaaaaaaaaaaaaaaaaaaaaaaaaaaaaaaaaaaaaaaaaaaaa

SEQ ID NO: 27424 - RNA, 1812 nt, Artificial Sequence
  mRNA product Design b-4 (hSL-A100) comprising derived and/or modified sequence from MOPV/LASV reassortant(IGS-1;Clade IV)__AFY05576__GPCmut4 (opt1)
aggagagucccgcagucggcguccagcggcucugcuuguucgugugugugucguugcaggccuuauucaagcuuaccaugggccagaucgugaccuucuuccaggaggucccccacgugaucgaggaggugaugaacaucguccugaucgcccucagcgugcuggccgugcugaaggggcucuacaacuucgcgaccugcggccuggucgggcuggugacguuccuccugcugugcggccgcuccugcaccaccagccucuacaaggggguguacgagcugcagacccuggagcucaacauggagacgcugaacaugugcaugccgcuguccugcaccaagaacaacagccaccacuacaucauggucggcaacgagaccggccucgagcugacgcugaccaacaccuccaucaucaaccacaaguucugcaaccucagcgacgcccacaagaagaaccuguacgaccacgcccugauguccaucaucagcaccuuccaccucuccauccccaacuucaaccaguacgaggccaugagcugcgacuucaacgggggcaagaucuccgugcaguacaaccugagccacuccuacgccggggacgcggccaaccacugcggcacgguggccaacgggguccugcagaccuucaugcggauggccuggggcggcagcuacaucgcgcucgacuccgggcgcggcaacugggacugcaucaugaccagcuaccaguaccugaucauccagaacaccacgugggaggaccacugccaguucucccggcccagccccaucggguaccugggccuccugucccagcgcacccgggacaucuacaucagccgccggcgccggggcaccuucaccuggacgcugagcgacuccgagggggaggacaccccgggcggguacugccugacccgcuggaugcucaucgaggccgagcugaagugcuucggcaacaccgccguggccaagugcaacgagaagcacgacgaggaguucugcgacaugcugcggcuguucgacuucugcaagcaggccauccagcgccugaaggcgcccgcccagaugagcauccagcugaucaacaaggccgugaacgcccucaucaacgaccagcugaucaugaagaaccaccuccgggacaucauggggauccccuacugcaacuacuccaaguacugcuaccucaaccacacgaccaccggccgcaccagccugcccaagugcugccuggucuccaacggcagcuaccucaacgagacgcacuucuccgacgacaucgagcagcaggccgacaacaugaucaccgagaugcugcagaaggaguacauggagcggcaggggaagacgccccugggccucguggaccuguucguguucagcaccuccuucuaccugaucagcaucuuccugcaccucgucaagaucccgacccaccgccacaucguggggaaguccugccccaagccccaccggcugaaccacaugggcaucugcagcugcgggcuguacaagcagcccggcgugccggucaaguggaagcgcugaggacuaguaauaaggaaacuguaugaaugucugugggcaggaagugaagagauccuucuguaaagguuuuuggaauuaugucugcugaauaauaaacuuuuuugaaauaauaaaucugguagaaaaaugagaucucaaaggcucuuuucagagccaccaaaaaaaaaaaaaaaaaaaaaaaaaaaaaaaaaaaaaaaaaaaaaaaaaaaaaaaaaaaaaaaaaaaaaaaaaaaaaaaaaaaaaaaaaaaaaaaaaaaaa

SEQ ID NO: 27425 - RNA, 1812 nt, Artificial Sequence
  mRNA product Design b-4 (hSL-A100) comprising derived and/or modified sequence from LASV(LM765-SLE-2012;Clade IV)__AIT17814__GPCmut4 (opt1)
aggagagucccgcagucggcguccagcggcucugcuuguucgugugugugucguugcaggccuuauucaagcuuaccaugggccagaucgugaccuucuuccaggaggucccccacgugaucgaggaggugaugaacaucguccugaucgcccucagcauccuggccgugcugaaggggcucuacaacuucgcgaccugcggccugguggggcuggucacguuccuccugcugugcggccgcuccugcaccaccagccucuacaaggggguguacgagcugcagacccuggagcucaacauggagacgcugaacaugugcaugccgcuguccugcaccaagaacaacagccaccacuacaucauggugggcaacgagaccggccucgagcugacgcugaccaacaccuccaucaucgaccacaaguucugcaaccucagcgacgcccaccggaagaaccuguacgaccacgcccugauguccaucaucagcaccuuccaccucuccauccccaacuucaaccaguacgaggccaugagcugcgacuucaacgggggcaagaucuccguccaguacaaccugagccacuccuacgccaaggacgcggccgaccacugcgggacgguggccaacggcgugcugcagaccuucaugcgcauggccuggggcgggagcuacaucgcgcucgacuccggccgggggcgcugggacugcaucaugaccagcuaccaguaccugaucauccagaacaccacgugggaggaccacugccaguucucccggcccagccccaucggcuaccuggggcuccugucccagcgcacccgggacaucuacaucagccgccggcgccggggcaccuucaccuggacgcugagcgacuccgagggcaaggacacccccgggggcuacugccugacccgcuggaugcucaucgaggccgagcugaagugcuucgggaacaccgccgucgccaagugcaacgagaagcacgacgaggaguucugcgacaugcugcggcuguucgacuucugcaagcaggccauccagcgccugaaggcgcccgcccagaugagcauccagcugaucaacaaggccgugaacgcccucaucaacgaccagcugaucaugaagaaccaccuccgggacaucaugggcauccccuacugcaacuacuccaaguacugcuaccucaaccacacgaccaccgggaagaccagccugcccaagugcugccugguguccaacggcagcuaccucaacgagacgcacuucuccgacgacaucgagcagcaggccgacaacaugaucaccgagaugcugcagaaggaguacauggagcgccagggcaagaccccgcuggggcucgucgaccuguucguguucagcaccuccuucuaccugaucagcaucuuccugcaccucgugaagaucccgacgcaccggcacaucgucggcaagcccugccccaagccccaccgccugaaccacauggggaucugcuccugcggccuguacaagcagccgggggugcccgugaaguggaagcggugaggacuaguaauaaggaaacuguaugaaugucugugggcaggaagugaagagauccuucuguaaagguuuuuggaauuaugucugcugaauaauaaacuuuuuugaaauaauaaaucugguagaaaaaugagaucucaaaggcucuuuucagagccaccaaaaaaaaaaaaaaaaaaaaaaaaaaaaaaaaaaaaaaaaaaaaaaaaaaaaaaaaaaaaaaaaaaaaaaaaaaaaaaaaaaaaaaaaaaaaaaaaaaaaa

SEQ ID NO: 27426 - RNA, 1812 nt, Artificial Sequence
  mRNA product Design b-4 (hSL-A100) comprising derived and/or modified sequence from LASV(LM776-SLE-2012;Clade IV)__AIT17824__GPCmut4 (opt1)
aggagagucccgcagucggcguccagcggcucugcuuguucgugugugugucguugcaggccuuauucaagcuuaccaugggccagaucgugaccuucuuccaggaggucccccacgugaucgaggaggugaugaacaucguccugaucgcccucagcauccuggccgugcugaaggggcucuacaacuucgcgaccugcggccugguggggcuggucacguuccuccugcugugcggccgcuccugcaccaccagcguguacaaggggguguacgagcuccagacccuggagcugaacauggagacgcucaacaugugcaugccgcuguccugcaccaagaacaacagccaccacuacaucauggucggcaacgagaccggccuggagcucacgcugaccaacaccuccaucaucaaccacaaguucugcaaccugagcgacgcccacaagaagaaccucuacgaccacgcccugauguccaucaucagcaccuuccaccuguccauccccaacuucaaccaguacgaggccaugagcugcgacuucaacgggggcaagaucuccgugcaguacaaccucagccacuccuacgccggggacgcggccaaccacugcggcacgguggccaacgggguccugcagaccuucaugcggauggccuggggcggcagcuacaucgcgcuggacuccgggcacggcaagugggacugcaucaugaccagcuaccaguaccucaucauccagaacaccacgugggaggaccacugccaguucucccgccccagccccaucggguaccugggccugcucucccagcggacccgcgacaucuacaucagccggcgccgccggggcaccuucaccuggacgcucagcgacuccgaggggaaggacaccccgggcggguacugccugacccgguggaugcugaucgaggccgagcucaagugcuucggcaacaccgccguggccaagugcaacgagaagcacgacgaggaguucugcgacaugcugcgccuguucgacuucugcaagcaggccauccagcggcucaaggcgcccgcccagaugagcauccagcugaucaacaaggccgugaacgcccugaucaacgaccagcucaucaugaagaaccaccuccgcgacaucauggggauccccuacugcaacuacuccaaguacugcuaccugaaccacacgaccaccggcaagaccagccugcccaagugcugccuggucuccaacggcagcuaccugaacgagacgcacuucuccgacgacaucgagcagcaggccgacaacaugaucaccgagaugcuccagaaggaguacauggagcggcaggggaagacgccccugggccugguggaccucuucguguucagcaccuccuucuaccugaucagcaucuuccugcaccuggucaagaucccgacccaccgccacaucguggggaaguccugccccaagccccaccggcucaaccacaugggcaucugcagcugcgggcuguacaagcagcccggcgugccgguccgcuggaagcggugaggacuaguaauaaggaaacuguaugaaugucugugggcaggaagugaagagauccuucuguaaagguuuuuggaauuaugucugcugaauaauaaacuuuuuugaaauaauaaaucugguagaaaaaugagaucucaaaggcucuuuucagagccaccaaaaaaaaaaaaaaaaaaaaaaaaaaaaaaaaaaaaaaaaaaaaaaaaaaaaaaaaaaaaaaaaaaaaaaaaaaaaaaaaaaaaaaaaaaaaaaaaaaaaa

SEQ ID NO: 27427 - RNA, 1812 nt, Artificial Sequence
  mRNA product Design b-4 (hSL-A100) comprising derived and/or modified sequence from LASV(Mad39;Clade IV)__ANH09722__GPCmut4 (opt1)
aggagagucccgcagucggcguccagcggcucugcuuguucgugugugugucguugcaggccuuauucaagcuuaccaugggccagaucgugaccuucuuccaggaggucccccacgugaucgaggaggugaugaacaucguccugaucgcccucagcauccuggccgugcugaaggggcucuacaacguggcgaccugcggccugaucgggcuggucacguuccuccugcugugcggccgcuccugcaccaccacccucuacaaggggguguacgagcugcaggcccuggagcucaacauggagacgcugaacaugugcaugccgcugagcugcaccaagaacaacucccaccacuacauccgggugggcaacgagaccggccucgagcugacgcugaccaacaccagccucaucaaccacaaguucugcaaccuguccgacgcccacaagaagaaccuguacgaccacgcccucaugagcaucaucuccaccuuccaccugagcauccccaacuucaaccaguacgaggccauguccugcgacuucaacgacgggaagaucagcguccaguacaaccugucccacacguacgcgggcgacaccgccaaccacugcgggaccguggccaacggcgugcuccagaccuucaugcgcauggccuggggcgggagcuacaucgcgcuggacuccggccgcgggggcugggacugcaucaugacgagcuaccaguaccugaucauccagaacaccaccugggaggaccacugccaguucucccggcccagccccaucggguaccucggccugcugucccagcggacccgcgacaucuacaucagccggcgccgccggggcacguucaccuggacccuguccgacagcgaggggaaggacaccccgggcggguacugccucacgcgguggaugcugaucgaggccgagcugaagugcuucggcaacaccgccgucgccaagugcaacgagaagcacgacgaggaguucugcgacaugcuccgccuguucgacuucugcaagcaggccauccagcggcugaaggcgcccgcccagaugagcauccagcucaucaacaaggccgugaacgcccugaucaacgaccagcugaucaugaagaaccaccuccgcgacaucauggggauccccuacugcaacuacuccaaguacugcuaccugaaccacaccgugaccggcaagacgagccugcccaagugcugccucgucuccaacggcagcuaccugaacgagacccacuucuccgacgacaucgagcagcaggccgacaacaugaucaccgagaugcugcagaaggaguacauggagcggcaggggaagacgccccucggccugguggaccuguucguguucagcaccuccuucuaccugaucagcaucuuccuccaccuggucaagaucccgacccaccgccacgugguggggaagcccugccccaagccccaccggcugaaccacaugggcaucugcuccugcggguucuacaagcagccgggcguccccgugcgcuggaagcggugaggacuaguaauaaggaaacuguaugaaugucugugggcaggaagugaagagauccuucuguaaagguuuuuggaauuaugucugcugaauaauaaacuuuuuugaaauaauaaaucugguagaaaaaugagaucucaaaggcucuuuucagagccaccaaaaaaaaaaaaaaaaaaaaaaaaaaaaaaaaaaaaaaaaaaaaaaaaaaaaaaaaaaaaaaaaaaaaaaaaaaaaaaaaaaaaaaaaaaaaaaaaaaaaa

SEQ ID NO: 27428 - RNA, 1812 nt, Artificial Sequence
  mRNA product Design b-4 (hSL-A100) comprising derived and/or modified sequence from LASV(Z0947-SLE-2011;Clade IV)__AIT17840__GPCmut4 (opt1)
aggagagucccgcagucggcguccagcggcucugcuuguucgugugugugucguugcaggccuuauucaagcuuaccaugggccagaucgugaccuucuuccaggaggucccccacgugaucgaggaggugaugaacaucguccugaucgcccucagcauccuggccgugcugaaggggcucuacaacuucgcgaccugcggccugguggggcuggucacguuccuccugcugugcggccgcuccugcaccaucagccucuacaaggggguguacgagcugcagacccuggagcucaacauggagacccugaacaugugcaugccgcuguccugcaccaagaacaacagccaccacuacaucauggugggcaacgagaccggccucgagcugacccugacgaacaccuccaucaucaaccacaaguucugcaaccucagcgacgcccacaagaagaaccuguacgaccacgcccugauguccaucaucagcaccuuccaccucuccauccccaacuucaaccaguacgaggccaugagcugcgacuucaacgggggcaagaucuccguccaguacaaccugagccacuccuacgccggggacgcggccaaccacugcggcaccguggccaacggggugcugcagacguucaugcggauggccuggggcggcagcuacaucgcgcucgacuccgggcgcgaccggugggacugcaucaugaccagcuaccaguaccugaucauccagaacaccaccugggaggaccacugccaguucucccgccccagccccaucggcuaccuggggcuccugucccagcggacgcgcgacaucuacaucagccggcgccgccggggcaccuucaccuggacccugagcgacuccgagggcaaggacacgcccgggggcuacugccugacccgguggaugcucaucgaggccgagcugaagugcuucgggaacaccgccgucgccaagugcaacgagaagcacgacgaggaguucugcgacaugcugcgccucuucgacuucugcaagcaggccauccagcggcugaaggcgcccgcccagaugagcauccagcugaucaacaaggccgugaacgcccucaucaacgaccagcugaucaugaagaaccaccuccgcgacaucaugggcauccccuacugcaacuacuccaaguacugcuaccugaaccacaccacgaccgggaagaccagccugcccaagugcugccugguguccaacggcagcuaccucaacgagacccacuucuccgacgacaucgagcagcaggccgacaacaugaucacggagaugcugcagaaggaguacauggagcggcagggcaagaccccgcuggggcucgucgaccuguucguguucagcaccuccuucuaccugaucagcaucuuccugcaccucgugaagaucccgacccaccgccacaucgucggcaagcccugccccaagccccaccggcugaaccacauggggaucugcuccugcggccuguacaagcagccgggggugcccgugaaguggaagcgcugaggacuaguaauaaggaaacuguaugaaugucugugggcaggaagugaagagauccuucuguaaagguuuuuggaauuaugucugcugaauaauaaacuuuuuugaaauaauaaaucugguagaaaaaugagaucucaaaggcucuuuucagagccaccaaaaaaaaaaaaaaaaaaaaaaaaaaaaaaaaaaaaaaaaaaaaaaaaaaaaaaaaaaaaaaaaaaaaaaaaaaaaaaaaaaaaaaaaaaaaaaaaaaaaa

SEQ ID NO: 27429 - RNA, 1812 nt, Artificial Sequence
  mRNA product Design b-4 (hSL-A100) comprising derived and/or modified sequence from LASV(Josiah;Clade IV)__NP_694870__GPCmut4 (opt1)
aggagagucccgcagucggcguccagcggcucugcuuguucgugugugugucguugcaggccuuauucaagcuuaccaugggccagaucgugaccuucuuccaggaggucccccacgugaucgaggaggugaugaacaucguccugaucgcccucagcgugcuggccgugcugaaggggcucuacaacuucgcgaccugcggccuggucgggcuggugacguuccuccugcugugcggccgcuccugcaccaccagccucuacaaggggguguacgagcugcagacccuggagcucaacauggagacgcugaacaugugcaugccgcuguccugcaccaagaacaacagccaccacuacaucauggucggcaacgagaccggccucgagcugacccugacgaacaccuccaucaucaaccacaaguucugcaaccucagcgacgcccacaagaagaaccuguacgaccacgcccugauguccaucaucagcaccuuccaccucuccauccccaacuucaaccaguacgaggccaugagcugcgacuucaacgggggcaagaucuccgugcaguacaaccugagccacuccuacgccggggacgcggccaaccacugcggcaccguggccaacgggguccugcagacguucaugcggauggccuggggcggcagcuacaucgcgcucgacuccgggcgcggcaacugggacugcaucaugaccagcuaccaguaccugaucauccagaacaccaccugggaggaccacugccaguucucccggcccagccccaucggguaccugggccuccugucccagcgcacgcgggacaucuacaucagccgccggcgccggggcaccuucaccuggacccugagcgacuccgaggggaaggacacgccgggcggguacugccucacccgcuggaugcugaucgaggccgagcugaagugcuucggcaacaccgccguggccaagugcaacgagaagcacgacgaggaguucugcgacaugcuccggcuguucgacuucugcaagcaggccauccagcgccugaaggcgcccgcccagaugagcauccagcucaucaacaaggccgugaacgcccugaucaacgaccagcugaucaugaagaaccaccuccgggacaucauggggauccccuacugcaacuacuccaaguacugcuaccugaaccacaccacgaccggccgcaccagccugcccaagugcugccucgucuccaacggcagcuaccugaacgagacccacuucuccgacgacaucgagcagcaggccgacaacaugaucacggagaugcugcagaaggaguacauggagcggcaggggaagaccccgcucggccugguggaccuguucguguucagcaccuccuucuaccugaucagcaucuuccuccaccuggucaagauccccacccaccgccacaucguggggaaguccugccccaagccccaccggcugaaccacaugggcaucugcagcugcgggcucuacaagcagccgggcgugcccgucaaguggaagcgcugaggacuaguaauaaggaaacuguaugaaugucugugggcaggaagugaagagauccuucuguaaagguuuuuggaauuaugucugcugaauaauaaacuuuuuugaaauaauaaaucugguagaaaaaugagaucucaaaggcucuuuucagagccaccaaaaaaaaaaaaaaaaaaaaaaaaaaaaaaaaaaaaaaaaaaaaaaaaaaaaaaaaaaaaaaaaaaaaaaaaaaaaaaaaaaaaaaaaaaaaaaaaaaaaa

SEQ ID NO: 27430 - RNA, 1809 nt, Artificial Sequence
  mRNA product Design b-4 (hSL-A100) comprising derived and/or modified sequence from LASV(LP;Clade I)__AAF86701__GPCmut4 (opt1)
aggagagucccgcagucggcguccagcggcucugcuuguucgugugugugucguugcaggccuuauucaagcuuaccaugggccagaucaucaccuucuuccaggaggugccccacgucaucgaggaggugaugaacaucgugcugaucgcccucagccugcuggccauccucaaggggcuguacaacaucgcgaccugcggcaucaucgggcuggucgccuuccucuuccugugcggcaaguccugcagccugacgcucaagggcggguacgagcugcagacccuggagcucaacauggagacccugaacaugugcaugccgcuguccugcaccaagaacagcucccaccacuacauccgcgugggcaacgagacggggcucgagcugacccugaccaacaccagcaucaucaaccacaaguucugcaaccucuccgacgcccacaagaagaaccuguacgaccacgcccugaugagcaucaucuccacguuccaccucagcauccccaacuucaaccaguacgaggccauguccugcgacuucaacggcgggaagaucagcgugcaguacaaccugucccacagcuacgcgggcgacgccgccgagcacugcgggaccgucgccaacggcgugcugcagaccuucaugcggauggcguggggcgggcgcuacaucgcccucgacuccggcaaggggaacugggacugcaucaugaccagcuaccaguaccugaucauccagaacacgaccugggaggaccacugccaguucucccggcccagccccaucggcuaccugggccuccugucccagcgcacccgggacaucuacaucagccgccggcgccgggggaccuucacguggacccugagcgacuccgagggcaacgagacccccgggggcuacugccucacccgcuggaugcugaucgaggccgagcugaagugcuucgggaacacggccguggccaagugcaacgagaagcacgacgaggaguucugcgacaugcuccggcuguucgacuucugcaagcaggcgauccgccggcugaaggccccggcccagaugagcauccagcucaucaacaaggccgucaacgcccugaucaacgaccagcugaucaugaagaaccaccuccgcgacaucaugggcauccccuacugcaacuacuccaaguacugcuaccugaaccacaccagcuccggccggaccagccugcccaagugcugccucaucuccaacgggagcuaccugaacgagacccaguucuccgacgacaucgagcagcaggcggacaacaugaucacggagaugcugcagaaggaguacaucgagcgccagggcaagaccccgcucgggcugguggacaucuucaucuucagcaccuccuucuaccugaucagcaucuuccugcaccucaucaagauccccacccaccggcacaucgugggcaagcccugccccaagccgcaccgccugaaccacaugggggucugcuccugcggccuguacaagcaccccggcgugcccacgaaguggaagcggugaggacuaguaauaaggaaacuguaugaaugucugugggcaggaagugaagagauccuucuguaaagguuuuuggaauuaugucugcugaauaauaaacuuuuuugaaauaauaaaucugguagaaaaaugagaucucaaaggcucuuuucagagccaccaaaaaaaaaaaaaaaaaaaaaaaaaaaaaaaaaaaaaaaaaaaaaaaaaaaaaaaaaaaaaaaaaaaaaaaaaaaaaaaaaaaaaaaaaaaaaaaaaaaaa

SEQ ID NO: 27431 - RNA, 1809 nt, Artificial Sequence
  mRNA product Design b-4 (hSL-A100) comprising derived and/or modified sequence from LASV(803213;Clade II)__AAF86703__GPCmut4 (opt1)
aggagagucccgcagucggcguccagcggcucugcuuguucgugugugugucguugcaggccuuauucaagcuuaccaugggccagaucaucaccuucuuccaggaggugccccacgucaucgaggaggugaugaacaucgugcugaucgcccucagccugcuggccauccucaaggggaucuacaacgucgcgaccugcggccuguucgggcugaucuccuuccuccugcugugcggccgcagcugcuccgugacguacaaggggguguacgagcuccagacccuggagcugaacauggccaaccucaacaugugcaugccgcugagcugcaccaagaacaacucccaccacuacaucauggucggcaacgagaccggccuggagcucacgcugaccaacaccagcaucaucaaccacaaguucugcaaccuguccgacgcccacaagaagaaccucuacgaccacgcccugaugagcaucaucuccaccuuccaccugagcauccccaacuucaaccaguacgaggccauguccugcgacuucaacgggggcaagaucagcgugcaguacaaccucucccacagcuucgcgguggacgccgccaaccacugcgggacgaucgccaacggcguccugcagaccuucaugcggauggcguggggcggguccuacaucgcccuggacagcggcaaggggaacugggacugcaucaugaccuccuaccaguaccucaucauccagaacaccacgugggaggaccacugccaguucagccgccccucccccaucggcuaccuggggcugcucagccagcggacccgcgacaucuacaucagccggcgccggcgcggcaccuucaccuggacgcuguccgacagcgagggcaacgaggcccccgggggcuacugccugacccgguggaugcucaucgaggccgagcugaagugcuucgggaacaccgccguggcgaagugcaacgagaagcacgacgaggaguucugcgacaugcugcgccucuucgacuucugcaagcaggccaucaagcggcugaagaccccggcccagauguccauccagcugaucaacaaggccgugaacgcccucaucaacgaccagcugaucaugaagaaccaccuccgcgacaucaugggcauccccuacugcaacuacagccgguacugcuaccugaaccacacggucaccgggaagaccucccugccccgcugcugccuggugagcaacggcuccuaccucaacgagacccacuucagcgacgacaucgagcagcaggcggacaacaugaucacggagaugcugcagaaggaguacauggaccggcagggcaagaccccgcuggggcucguggaccuguucgucuucuccaccagcuucuaccugaucuccaucuuccugcaccucgugaagauccccacccaccgccacaucgugggcaagcccugccccaagccgcaccggcugaaccacauggggaucugcagcugcggccuguacaagcaccccgggguccccgugaaguggaagcgcugaggacuaguaauaaggaaacuguaugaaugucugugggcaggaagugaagagauccuucuguaaagguuuuuggaauuaugucugcugaauaauaaacuuuuuugaaauaauaaaucugguagaaaaaugagaucucaaaggcucuuuucagagccaccaaaaaaaaaaaaaaaaaaaaaaaaaaaaaaaaaaaaaaaaaaaaaaaaaaaaaaaaaaaaaaaaaaaaaaaaaaaaaaaaaaaaaaaaaaaaaaaaaaaaa

SEQ ID NO: 27432 - RNA, 1809 nt, Artificial Sequence
  mRNA product Design b-4 (hSL-A100) comprising derived and/or modified sequence from LASV(GA391;Clade III)__CAA36645__GPCmut4 (opt1)
aggagagucccgcagucggcguccagcggcucugcuuguucgugugugugucguugcaggccuuauucaagcuuaccaugggccagaucgugaccuucuuccaggaggucccccacgugaucgaggaggugaugaacaucguccugaucgcccucagcauccuggccauccugaaggggcucuacaacguggcgaccugcggccugaucgggcuggugacguuccuccugcuguccggccgcagcugcucccucaucuacaaggggaccuacgagcugcagacccuggagcucaacauggagacccugaacaugugcaugccgcugagcugcacgaagaacaacucccaccacuacauccgggucggcaacgagaccggccucgagcugacccugaccaacacgagcauccucaaccacaaguucugcaaccuguccgacgcccacaagcgcaaccuguacgaccacagccucauguccaucaucagcaccuuccaccuguccauccccaacuucaaccaguacgaggccaugagcugcgacuucaacgggggcaagaucaccgugcaguacaaccugucccacagcuucgccguggacgccgcggggcacugcggcacccucgccaacgggguccugcagacguucaugcggauggccuggggcggcuccuacaucgcccuggacagcgggcgcggcaacugggacugcaucaugaccuccuaccaguaccucaucauccagaacaccaccugggacgaccacugccaguucagccggcccucccccaucggguaccugggccugcucagccagcgcacgcgggacaucuacaucagccgccggcgccggggcaccuucaccuggacccuguccgacagcgaggggaacgagacgccgggcggguacugccugacccgcuggaugcucaucgaggcggagcugaagugcuucggcaacaccgccguggccaagugcaacgagaagcacgacgaggaguucugcgacaugcugcggcuguucgacuucugcaagcaggccauccgccggcugaagacccccgcccagauguccauccagcugaucaacaaggcggugaacgcccucaucaacgaccagcugaucaugaagaaccaccuccgcgacaucauggggauccccuacugcaacuacagccgguacugcuaccucaaccacacguccaccggcaagaccagccugccccgcugcugccugaucuccaacggcagcuaccucaacgagaccaaguucuccgacgacaucgagcagcaggccgacaacaugaucacggagaugcugcagaaggaguacaucgaccggcaggggaagaccccgcugggccuggucgaccucuucguguucagcaccuccuucuaccugaucagcaucuuccugcaccucgugaagauccccacccaccgccacaucgucgggaagcccugccccaagccgcaccggcugaaccacaugggcaucugcuccugcgggcuguacaagcagcccggcgugcccgugcgcuggaagcgcugaggacuaguaauaaggaaacuguaugaaugucugugggcaggaagugaagagauccuucuguaaagguuuuuggaauuaugucugcugaauaauaaacuuuuuugaaauaauaaaucugguagaaaaaugagaucucaaaggcucuuuucagagccaccaaaaaaaaaaaaaaaaaaaaaaaaaaaaaaaaaaaaaaaaaaaaaaaaaaaaaaaaaaaaaaaaaaaaaaaaaaaaaaaaaaaaaaaaaaaaaaaaaaaaa

SEQ ID NO: 27433 - RNA, 1812 nt, Artificial Sequence
  mRNA product Design b-4 (hSL-A100) comprising derived and/or modified sequence from LASV(AV;Clade V)__CCA30314__GPCmut4 (opt1)
aggagagucccgcagucggcguccagcggcucugcuuguucgugugugugucguugcaggccuuauucaagcuuaccaugggccagaucgugaccuucuuccaggaggucccccacgugaucgaggaggugaugaacaucguccugaucgcccucagcauccuggccgugcugaaggggcucuacaacaucgcgaccugcggccugaucgggcugaucacguuccuccugcugugcggccgcuccugcagcuccaaccucuacaaggggguguacgagcugcagagccuggaccucaacauggagacccugaacaugugcaugccgcuguccugcaccaagaacaacagccaccacuacauccgggucggcaacgacaccggccucgagcugacgcugaccaacaccuccauccucaaccacaaguucugcaaccugagcgacgcccacaagaaggaccuguacgaccacgcccucauguccaucaucagcaccuuccaccuguccauccccaacuucaaccaguacgaggccaugagcugcgacuucaacgggggcaagaucuccgugcaguacaaccugagccacuccuacgccaucgacgcggccaaccacugcgggacgguggccaacggcauccuccagaccuucaugcgcauggccuggggcgggagcuacaucgcgcuggacuccggccgggggaacugggacugcaucaugaccagcuaccaguaccugaucauccagaacaccacgugggagaaccacugccaguucucccgccccagccccaucggcuaccucgggcugcugagccagcggacccgcgacaucuacaucucccggcgccggcgcggcaccuucaccuggacgcucagcgacuccgagggcaacgccacccccgggggcuacugccugacccgguggaugcugaucgaggccgagcucaagugcuucgggaacaccgccgucgccaagugcaacgagaagcacgacgaggaguucugcgacaugcugcgccuguucgacuucugcaagcaggcgaucagccggcucaaguccccggcccagaugagcauccagcugaucaacaaggccgugaacgcccugaucaacgaccagcucaucaugaagaaccaccuccgcgacaucaugggcauccccuacugcaacuacuccaaguacugcuaccugaaccacacgaucaccgggaagaccagccugcccaagugcugccugguguccaacggcagcuaccugaacgagacccacuucuccgacgacaucgagcagcaggccgacaacaugaucacggagaugcuccagaaggaguacauggagcggcagggcaagaccccgcuggggcuggucgaccuguucguguucagcaccuccuucuaccucaucagcaucuuccugcgccuggugaagauccccacccaccggcacaucgucggcaagcccugccccaagccgcaccgccucaaccacauggggaucugcuccugcggccuguacaagcagcccggggugcccgugcgguggaagcgcugaggacuaguaauaaggaaacuguaugaaugucugugggcaggaagugaagagauccuucuguaaagguuuuuggaauuaugucugcugaauaauaaacuuuuuugaaauaauaaaucugguagaaaaaugagaucucaaaggcucuuuucagagccaccaaaaaaaaaaaaaaaaaaaaaaaaaaaaaaaaaaaaaaaaaaaaaaaaaaaaaaaaaaaaaaaaaaaaaaaaaaaaaaaaaaaaaaaaaaaaaaaaaaaaa

SEQ ID NO: 27434 - RNA, 1809 nt, Artificial Sequence
  mRNA product Design b-4 (hSL-A100) comprising derived and/or modified sequence from LASV(Togo/2016/7082;Clade VI)__AMR44577__GPCmut4 (opt1)
aggagagucccgcagucggcguccagcggcucugcuuguucgugugugugucguugcaggccuuauucaagcuuaccaugggccagaucaucaccuucuuccaggaggugccccacgucaucgaggaggugaugaacaucgugcugaucgcccucagccugcuggccauccucaagggggucuacaacguggcgaccugcggcaucaucgggcuggugacguuccuguuccucugcggccgcuccugcagccugaucuacaagggguccuacgagcugcagacccucgagcugaacauggagacccugaacaugugcaugccgcucagcugcaccaagaacuccagccaccacuacauccgggucggcaacgagacgggccuggagcugacccucaccaacaccuccaucaucaaccacaaguucugcaaccugagcgacgcccacaagcgcaaccuguacgaccacgcccucauguccauccugagcacguuccaccuguccauccccaacuucaaccaguacgaggccaugagcugcgacuucaacgggggcaagaucuccgugcaguacaaccucagccacgccuacgcgguggacgccgccgagcacugcgggaccgucgccaacggcgugcugcagaccuucaugcggauggcguggggcggguccuacaucgcccuggacagcggccgcgggaacugggacugcaucaugaccuccuaccaguaccucaucauccagaacacgaccugggaggaccacugccaguucagccggcccucccccaucggcuaccuggggcugcucagccagcgcacccgggacaucuacaucagccgccggcgccggggcaccuucacguggacccuguccgacagcgagggcaacgagacccccgggggcuacugccugacccgcuggaugcucaucgaggccgagcugaagugcuucgggaacacggccguggccaagugcaacgagaagcacgacgaggaguucugcgacaugcugcggcuguucgacuucugcaagcaggcgauccagcgccugaaguccccggcccagaugagcauccagcugaucaacaaggccgucaacgcccucaucaacgaccagcugaucaugaagaaccaccuccgggacaugaugggcauccccuacugcaacuacuccaaguacugcuaccucaaccacaccagcuccgggcgcaccagccugcccaagugcugccugguguccaacggcagcuaccucaacgagacccacuucuccgacgacaucgagcagcaggccgacaacaugaucacggagaugcugcagaaggaguacaucgaccggcagggcaagaccccgcuggggcucguggaccuguucgucuucagcaccuccuucuaccugaucagcaucuuccugcaccucaucaagauccccacccaccgccacaucgugggcaagcccugccccaagccgcaccggcugaaccacauggggaucugcuccugcggccuguacaagcagcccggggugcccacgcgcuggaagcggugaggacuaguaauaaggaaacuguaugaaugucugugggcaggaagugaagagauccuucuguaaagguuuuuggaauuaugucugcugaauaauaaacuuuuuugaaauaauaaaucugguagaaaaaugagaucucaaaggcucuuuucagagccaccaaaaaaaaaaaaaaaaaaaaaaaaaaaaaaaaaaaaaaaaaaaaaaaaaaaaaaaaaaaaaaaaaaaaaaaaaaaaaaaaaaaaaaaaaaaaaaaaaaaaa

SEQ ID NO: 27435 - RNA, 1809 nt, Artificial Sequence
  mRNA product Design b-4 (hSL-A100) comprising derived and/or modified sequence from LASV(KAK-428;Clade n.d. (VII))__ANH09740__GPCmut4 (opt1)
aggagagucccgcagucggcguccagcggcucugcuuguucgugugugugucguugcaggccuuauucaagcuuaccaugggccagaucgugaccuucuuccaggaggucccccacgugaucgaggaggugaugaacaucguccugaucgcccucagccugcuggccauccucaaggggcuguacaacuucgcgaccugcggcgugaucgggcugaucacguuccuccugcugugcggccgcuccugcagcgccaccuacaaggggcaguacgagcuccagacccuggagcugaacauggagucccucaacaugugcaugccgcugagcugcaccaagaacaacucccaccacuacauccgggccggcaacaacacgggccuggagcucacccugaccaacaccagcaucaucucccacaaguucugcaaccugagcgacgcccacaagaagaaccucuacgaccacacgcugauguccaucaucaccaccuuccaccugagcauccccaacuucaaccaguacgaggccauguccugcgacuucaacgggggcaagaucagcauccaguacaaccucucccacagcuacgcgggggacgccgcccagcacugcggcaccguggccaacgggguccugcagacguucaugcgcauggcguggggcggcuccuaccuggcccucgacagcgggcggcgcggcugggacugcaucaucuccagcuaccaguaccugaucauccagaacaccaccugggacgaccacugccaguucucccggcccagccccaucggguaccugggcuucgugagccagaagacccgcgacaucuacaucucccggcgccggcgcggcacguucaccuggacccucagcgacuccgaggggcacgacaugccgggcggguacugccugacccgguggaugcugaucgaggccgaccucaagugcuucggcaacacggccguggccaagugcaacgagaagcacgacgaggaguucugcgacauguggcgccuguucgacuucugcaagcaggcgauccagcggcugaaggcccccgcccagaugaacauccagcucaucaacaaggccgucaacgcccugaucaacgaccagcugaugaugaagaaccaccuccgcgacaucauggggauccccuacugcaacuacagcaaguucugcuaccugaacaacaccaccaccggccggacgucccugccccgcugcugccucaucagcaacggcuccuaccugaacgagacccacuucagcgacgacaucgagcagcaggcggacaacaugaucaccgagaugcugcagaaggaguacauggaccggcaggggaagaccccgcucggccugguggaccuguucguguucuccacgagcuucuaccucaucaccaucuuccugcaccuggucaagauccccacccaccgccacaucguggggaagcccugccccaagccgcaccggcugaaccacaugggcaucugcuccugcgggcucuacaagcagcccggcgugcccguccgcuggaagcggugaggacuaguaauaaggaaacuguaugaaugucugugggcaggaagugaagagauccuucuguaaagguuuuuggaauuaugucugcugaauaauaaacuuuuuugaaauaauaaaucugguagaaaaaugagaucucaaaggcucuuuucagagccaccaaaaaaaaaaaaaaaaaaaaaaaaaaaaaaaaaaaaaaaaaaaaaaaaaaaaaaaaaaaaaaaaaaaaaaaaaaaaaaaaaaaaaaaaaaaaaaaaaaaaa

SEQ ID NO: 27436 - RNA, 1809 nt, Artificial Sequence; identical to SEQ ID NO: 27430
  mRNA product Design b-4 (hSL-A100) comprising derived and/or modified sequence from LASV(Pinneo-NIG-1969;Clade I)__AIT17836__GPCmut4 (opt1)

SEQ ID NO: 27437 - RNA, 1809 nt, Artificial Sequence
  mRNA product Design b-4 (hSL-A100) comprising derived and/or modified sequence from LASV(ISTH0009-NIG-2011;Clade II)__AIT17404__GPCmut4 (opt1)
aggagagucccgcagucggcguccagcggcucugcuuguucgugugugugucguugcaggccuuauucaagcuuaccaugggccagaucaucaccuucuuccaggaggugccccacgucaucgaggaggugaugaacaucgugcugaucgcccucagccugcuggccauccucaaggggaucuacaacgucgcgaccugcggccuguucgggcugguguccuuccuccugcugugcggccgcagcugcuccacgaccuacaaggggguguacgagcuccagacccuggagcuggacauggccagccucaacaugugcaugccgcuguccugcaccaagaacaacagccaccacuacaucauggucggcaacgagacgggccuggagcucacccugaccaacaccuccaucaucaaccacaaguucugcaaccugagcgacgcccacaagaagaaccucuacgaccacgcccugauguccaucaucagcacguuccaccuguccauccccaacuucaaccaguacgaggccaugagcugcgacuucaacgggggcaagaucuccgugcaguacaaccucagccacgcguacgccguggacgccgccaaccacugcgggaccaucgcgaacggcguccugcagaccuucaugcggauggccuggggcggguccuacaucgcccuggacagcggcaagggguccugggacugcaucaugaccagcuaccaguaccucaucauccagaacacgaccugggaggaccacugccaguucucccgccccagccccaucggcuaccuggggcugcucagccagcggacccgcgacaucuacaucucccggcgccggcgcggcaccuucacguggacccugagcgacuccgagggcaacgagacccccgggggcuacugccugacccgguggaugcucaucgaggccgagcugaagugcuucgggaacacggccguggcgaagugcaacgagaagcacgacgaggaguucugcgacaugcugcgccucuucgacuucugcaagcaggccauccggcgccugaagaccccggcccagaugagcauccagcugaucaacaaggccgugaacgcccucaucaacgaccagcugaucaugaagaaccaccuccgggacaucaugggcauccccuacugcaacuacuccaaguacugcuaccugaaccacaccgucaccgggaagacgagccugccccgcugcugccugguguccaacggcagcuaccucaacgagacccacuucuccgacgacaucgagcagcaggcggacaacaugaucaccgagcugcugcagaaggaguacauggaccggcagggcaagaccccgcucgggcugguggaccuguucgucuucagcacguccuucuaccugaucagcaucuuccuccaccugaucaagauccccacccaccgccacaucaccggcaagcccugccccaagccgcaccggcugaaccacauggggaucugcuccugcggccucuacaagcaccccggggugcccgugaaguggaagcgcugaggacuaguaauaaggaaacuguaugaaugucugugggcaggaagugaagagauccuucuguaaagguuuuuggaauuaugucugcugaauaauaaacuuuuuugaaauaauaaaucugguagaaaaaugagaucucaaaggcucuuuucagagccaccaaaaaaaaaaaaaaaaaaaaaaaaaaaaaaaaaaaaaaaaaaaaaaaaaaaaaaaaaaaaaaaaaaaaaaaaaaaaaaaaaaaaaaaaaaaaaaaaaaaaa

SEQ ID NO: 27438 - RNA, 1809 nt, Artificial Sequence
  mRNA product Design b-4 (hSL-A100) comprising derived and/or modified sequence from LASV(ISTH2010-NIG-2012;Clade II)__AIT17482__GPCmut4 (opt1)
aggagagucccgcagucggcguccagcggcucugcuuguucgugugugugucguugcaggccuuauucaagcuuaccaugggccagaucaucaccuucuuccaggaggugccccacgucaucgaggaggugaugaacaucgugcugaucgcccucagccugcuggccauccucaaggggaucuacaacgucgcgaccugcggccuguucgggcugguguccuuccuccugcugugcggccgcagcugcuccacgaccuacaaggggguguacgagcuccagacccuggagcuggacauggccagccucaacaugugcaugccgcuguccugcaccaagaacaacagccaccacuacaucauggucggcaacgagacgggccuggagcucacccugaccaacaccuccaucaucaaccacaaguucugcaaccugagcgacgcccacaagaagaaccucuacgaccacgcccugauguccaucaucagcacguuccaccuguccauccccaacuucaaccaguacgaggccaugagcugcgacuucaacgggggcaagaucuccgugcaguacaaccucagccacgcguacgccguggacgccgccaaccacugcgggaccaucgcgaacggcguccugcagaccuucaugcggauggccuggggcggguccuacaucgcccuggacagcggcaagggguccugggacugcaucaugaccagcuaccaguaccucaucauccagaacaucacgugggaggaccacugccaguucucccgccccagccccaucggcuaccuggggcugcucagccagcggacccgcgacaucuacaucucccggcgccggcgcggcaccuucaccuggacgcugagcgacuccgagggcaacgagacccccgggggcuacugccugacccgguggaugcucaucgaggccgagcugaagugcuucgggaacaccgccguggcgaagugcaacgagaagcacgacgaggaguucugcgacaugcugcgccucuucgacuucugcaagcaggccauccggcgccugaagacgccggcccagaugagcauccagcugaucaacaaggccgugaacgcccucaucaacgaccagcugaucaugaagaaccaccuccgggacaucaugggcauccccuacugcaacuacuccaaguacugcuaccugaaccacaccgucaccgggaagaccagccugccccgcugcugccugguguccaacggcagcuaccucaacgagacgcacuucuccgacgacaucgagcagcaggcggacaacaugaucaccgagcugcugcagaaggaguacaucgaccggcagggcaagaccccgcucgggcugguggaccuguucgucuucagcaccuccuucuaccugaucagcaucuuccuccaccuggugaagauccccacgcaccgccacguggucggcaagcccugccccaagccgcaccggcugaaccacauggggaucugcuccugcggccucuacaagcaccccggggugcccgugaaguggaagcgcugaggacuaguaauaaggaaacuguaugaaugucugugggcaggaagugaagagauccuucuguaaagguuuuuggaauuaugucugcugaauaauaaacuuuuuugaaauaauaaaucugguagaaaaaugagaucucaaaggcucuuuucagagccaccaaaaaaaaaaaaaaaaaaaaaaaaaaaaaaaaaaaaaaaaaaaaaaaaaaaaaaaaaaaaaaaaaaaaaaaaaaaaaaaaaaaaaaaaaaaaaaaaaaaaa

SEQ ID NO: 27439 - RNA, 1809 nt, Artificial Sequence
  mRNA product Design b-4 (hSL-A100) comprising derived and/or modified sequence from LASV(Lassa virus/H.sapiens-wt/NGA/2015/ISTH_0543;Clade II)__AVO03639__GPCmut4 (opt1)
aggagagucccgcagucggcguccagcggcucugcuuguucgugugugugucguugcaggccuuauucaagcuuaccaugggccagaucaucaccuucuuccaggaggugccccacgucaucgaggaggugaugaacaucgugcugaucgcccucagccugcuggccauccucaaggggaucuacaacgucgcgaccugcggccuguucgggcugguguccuuccuccugcugugcggccgcagcugcuccacgaccuacaaggggguguacgagcuccagacccuggagcuggacauggccaaccucaacaugugcaugccgcugagcugcaccaagaacaacucccaccacuacaucauggucggcaacgagacgggccuggagcucacccugaccaacaccagcaucaucaaccacaaguucugcaaccuguccgacgcccacaagaagaaccucuacgaccacgcccugaugagcaucaucuccacguuccaccugagcauccccaacuucaaccaguacgaggccauguccugcgacuucaacgggggcaagaucagcgugcaguacaaccucucccacaccuacgcgguggacgccgccaaccacugcgggaccaucgccaacggcguccugcagaccuucaugcggauggcguggggcgggagcuacaucgcccuggacuccggcaaggggagcugggacugcaucaugacguccuaccaguaccucgugauccagaacaccaccugggaggaccacugccaguucagccgccccucccccaucggcuaccuggggcugcucagccagcggacccgcgacaucuacaucagccggcgccggcgcggcacguucaccuggacccuguccgacagcgagggcaacgagacccccgggggcuacugccugacgcgguggaugcucaucgaggccgagcugaagugcuucgggaacaccgccguggccaagugcaacgagaagcacgacgaggaguucugcgacaugcugcgccucuucgacuucugcaagcaggcgauccggcgccugaagaccccggcccagauguccauccagcugaucaacaaggccgucaacgcccucaucaacgaccagcugaucaugaagaaccaccuccgggacaucaugggcauccccuacugcaacuacagcaaguacugcuaccugaaccacaccgugacggggaagaccucccugccccgcugcugccuggugagcaacggcuccuaccucaacgagacccacuucagcgacgacaucgagcagcaggccgacaacaugaucaccgagcugcugcagaaggaguacaucgaccggcagggcaagacgccgcucgggcuggucgaccuguucguguucuccaccagcuucuaccugaucuccaucuuccuccaccuggugaagauccccacccaccgccacaucaccggcaagcccugccccaagccgcaccggcugaaccacauggggaucugcagcugcggccucuacaagcaccccgggguccccgugaaguggaagcgcugaggacuaguaauaaggaaacuguaugaaugucugugggcaggaagugaagagauccuucuguaaagguuuuuggaauuaugucugcugaauaauaaacuuuuuugaaauaauaaaucugguagaaaaaugagaucucaaaggcucuuuucagagccaccaaaaaaaaaaaaaaaaaaaaaaaaaaaaaaaaaaaaaaaaaaaaaaaaaaaaaaaaaaaaaaaaaaaaaaaaaaaaaaaaaaaaaaaaaaaaaaaaaaaaa

SEQ ID NO: 27440 - RNA, 1809 nt, Artificial Sequence
  mRNA product Design b-4 (hSL-A100) comprising derived and/or modified sequence from LASV(Lassa virus/H.sapiens-wt/NGA/2016/ISTH_0009;Clade II)__AVO03571__GPCmut4 (opt1)
aggagagucccgcagucggcguccagcggcucugcuuguucgugugugugucguugcaggccuuauucaagcuuaccaugggccagaucaucaccuucuuccaggaggugccccacgucaucgaggaggugaugaacaucgugcugaucgcccucagccugcuggccauccucaaggggaucuacaacgucgcgaccugcggccugcuggggcucguguccuuccugcugcucugcggccgcagcugcuccacgaccuacaaggggguguacgagcugcagacccuggagcucgacauggccagccugaacaugugcaugccgcuguccugcaccaagaacaacagccaccacuacaucauggucggcaacgagacgggccucgagcugacccugaccaacaccuccaucaucaaccacaaguucugcaaccucagcgacgcccacaagaagaaccuguacgaccacgcccugauguccaucaucagcacguuccaccucuccauccccaacuucaaccaguacgaggccaugagcugcgacuucaacgggggccggaucuccgugcaguacaaccugagccacuccuacgcgguggacgccgccaaccacugcgggaccaucgccaacggcguccugcagaccuucaugcgcauggcguggggcgggagcuacaucgcccucgacuccggcaaggggagcugggacugcaucaugaccuccuaccaguaccugaucauccagaacacgaccugggaggaccacugccaguucagccggcccagccccaucggcuaccuggggcuccugucccagcgcacccgggacaucuacaucagccgccggcgccggggcaccuucacguggacccuguccgacagcgagggcaacgagacccccgggggcuacugccucacccgcuggaugcugaucgaggccgagcugaagugcuucgggaacacggccguggccaagugcaacgagaagcacgacgaggaguucugcgacaugcuccggcuguucgacuucugcaagcaggcgauccgccggcugaagaccccggcccagauguccauccagcucaucaacaaggccgugaacgcccugaucaacgaccagcugaucaugaagaaccaccuccgcgacaucaugggcauccccuacugcaacuacagcaaguacugcuaccugaaccacaccgucaccgggaagacgucccugccccggugcugccucgugagcaacggcuccuaccugaacgagacccacuucagcgacgacaucgagcagcaggccgacaacaugaucaccgagcugcuccagaaggaguacaucgaccgccagggcaagaccccgcuggggcugguggaccuguucgucuucuccacgagcuucuaccucaucuccaucuuccugcaccuggugaagauccccacccaccggcacaucaccggcaagcccugccccaagccgcaccgccucaaccacauggggaucugcagcugcggccuguacaaccaccccggggugcccgucaaguggaagcggugaggacuaguaauaaggaaacuguaugaaugucugugggcaggaagugaagagauccuucuguaaagguuuuuggaauuaugucugcugaauaauaaacuuuuuugaaauaauaaaucugguagaaaaaugagaucucaaaggcucuuuucagagccaccaaaaaaaaaaaaaaaaaaaaaaaaaaaaaaaaaaaaaaaaaaaaaaaaaaaaaaaaaaaaaaaaaaaaaaaaaaaaaaaaaaaaaaaaaaaaaaaaaaaaa

SEQ ID NO: 27441 - RNA, 1809 nt, Artificial Sequence
  mRNA product Design b-4 (hSL-A100) comprising derived and/or modified sequence from LASV(Lassa virus/H.sapiens-wt/NGA/2016/ISTH_0017;Clade II)__AVO03567__GPCmut4 (opt1)
aggagagucccgcagucggcguccagcggcucugcuuguucgugugugugucguugcaggccuuauucaagcuuaccaugggccagaucaucaccuucuuccaggaggugccccacgucaucgaggaggugaugaacaucgugcugaucgcccucagccugcuggccauccucaaggggaucuacaacgucgcgaccugcggccuguucgggcugguguccuuccuccugcugugcggccgcagcugcuccacgaccuacaaggggguguacgagcuccagacccuggagcuggacauggccagccucaacaugugcaugccgcuguccugcaccaagaacaacagccaccacuacaucauggucggcaacgagacgggccuggagcucacccugaccaacaccuccaucaucaaccacaaguucugcaaccugagcgacgcccacaagaagaaccucuacgaccacgcccugauguccaucaucagcacguuccaccuguccauccccaacuucaaccaguacgaggccaugagcugcgacuucaacgggggcaagaucuccgugcaguacaaccucagccacaccuacgcgaucgacgccgccaaccacugcgggaccaucgccaacggcgugcugcagaccuucaugcggauggcguggggcggguccuacaucgcccuggacagcggcaagggguccugggacugcaucaugacgagcuaccaguaccucaucauccagaacaccaccugggaggaccacugccaguucucccgccccagccccaucggcuaccuggggcugcucagccagcggacccgcgacaucuacaucucccggcgccggcgcggcacguucaccuggacccugagcgacuccgagggcaacgagacccccgggggcuacugccugacgcgguggaugcucaucgaggccgagcugaagugcuucgggaacaccgccgucgccaagugcaacgagaagcacgacgaggaguucugcgacaugcugcgccucuucgacuucugcaagcaggcgauccggcgccugaagaccccggcccagaugagcauccagcugaucaacaaggccgugaacgcccucaucaacgaccagcugaucaugaagaaccaccuccgggacaucaugggcauccccuacugcaacuacuccaaguacugcuaccugaaccacaccgugacggggaagaccagccugccccgcugcugccuggucuccaacggcagcuaccucaacgagacccacuucuccgacgacaucgagcagcaggccgacaacaugaucaccgagcugcugcagaaggaguacauggaccggcagggcaagacgccgcucgggcugguggaccuguucguguucagcaccuccuucuaccugaucagcaucuuccuccaccugguccgcauccccacccaccggcacgugaucggcaagcccugccccaagccgcaccgccugaaccacauggggaucugcuccugcggccucuacaagcaccccggggugcccgucaaguggaagcggugaggacuaguaauaaggaaacuguaugaaugucugugggcaggaagugaagagauccuucuguaaagguuuuuggaauuaugucugcugaauaauaaacuuuuuugaaauaauaaaucugguagaaaaaugagaucucaaaggcucuuuucagagccaccaaaaaaaaaaaaaaaaaaaaaaaaaaaaaaaaaaaaaaaaaaaaaaaaaaaaaaaaaaaaaaaaaaaaaaaaaaaaaaaaaaaaaaaaaaaaaaaaaaaaa

SEQ ID NO: 27442 - RNA, 1809 nt, Artificial Sequence
  mRNA product Design b-4 (hSL-A100) comprising derived and/or modified sequence from LASV(Lassa virus/H.sapiens-wt/NGA/2018/ISTH_0959;Clade II)__AVV65099__GPCmut4 (opt1)
aggagagucccgcagucggcguccagcggcucugcuuguucgugugugugucguugcaggccuuauucaagcuuaccaugggccagaucaucaccuucuuccaggaggugccccacgucaucgaggaggugaugaacaucgugcugaucgcccucagccugcuggccauccucaaggggaucuacaacgucgugaccugcggccuguucgggcugguguccuuccuccugcugugcggccgcagcugcuccacgaccuacaagggggucuacgagcuccagacccuggagcuggacauggcgagccucaacaugugcaugccgcuguccugcaccaagaacaacagccaccacuacaucauggugggcaacgagacgggccuggagcucacccugaccaacaccuccaucaucaaccacaaguucugcaaccugagcgacgcccacaagaagaaccucuacgaccacgcccugauguccaucaucagcacguuccaccuguccauccccaacuucaaccaguacgaggccaugagcugcgacuucaacgggggcaagaucuccgugcaguacaaccucagccacgccuacgcgaucgacgccgccaaccacugcgggaccaucgccaacggcguccugcagaccuucaugcggauggcguggggcggguccuacaucgcccuggacagcggcaagggguccugggacugcaucaugaccagcuaccaguaccucaucauccagaacacgaccugggaggaccacugccaguucucccgccccagccccaucggcuaccuggggcugcucagccagcggacccgcgacaucuacaucucccggcgccggcgcggcaccuucacguggacccugagcgacuccgagggcaacgagacccccgggggcuacugccugacccgguggaugcucaucgaggccgagcugaagugcuucgggaacacggccguggccaagugcaacgagaagcacgacgaggaguucugcgacaugcugcgccucuucgacuucugcaagcaggcgauccggcgccugaagaccccggcccagaugagcauccagcugaucaacaaggccgugaacgcccucaucaacgaccagcugaucaugaagaaccaccuccgggacaucaugggcauccccuacugcaacuacuccaaguacugcuaccugaaccacaccgucaccgggaagacgagccugccccgcugcugccugguguccaacggcagcuaccucaacgagacccacuucuccgacgacaucgagcagcaggccgacaacaugaucaccgagcugcugcagaaggaguacaucgaccggcagggcaagaccccgcucgggcugguggaccuguucgucuucagcacguccuucuaccugaucagcaucuuccuccaccuggugaagauccccacccaccgccacgugaucggcaagcccugccccaagccgcaccggcugaaccacauggggaucugcuccugcggccucuacaagcaccccgggguccccgugaaguggaagcgcugaggacuaguaauaaggaaacuguaugaaugucugugggcaggaagugaagagauccuucuguaaagguuuuuggaauuaugucugcugaauaauaaacuuuuuugaaauaauaaaucugguagaaaaaugagaucucaaaggcucuuuucagagccaccaaaaaaaaaaaaaaaaaaaaaaaaaaaaaaaaaaaaaaaaaaaaaaaaaaaaaaaaaaaaaaaaaaaaaaaaaaaaaaaaaaaaaaaaaaaaaaaaaaaaa

SEQ ID NO: 27443 - RNA, 1809 nt, Artificial Sequence
  mRNA product Design b-4 (hSL-A100) comprising derived and/or modified sequence from LASV(LASV003-NIG-2008;Clade II)__AIT17580__GPCmut4 (opt1)
aggagagucccgcagucggcguccagcggcucugcuuguucgugugugugucguugcaggccuuauucaagcuuaccaugggccagaucaucaccuucuuccaggaggugccccacgucaucgaggaggugaugaacaucgugcugaucgcccucagccugcuggccauccucaaggggaucuacaacgucgcgaccugcggccuguucgggcugguguccuuccuccugcugugcggccgcagcugcuccacgaccuacaaggggguguacgagcuccagacccuggagcuggacauggccagccucaacaugugcaugccgcuguccugcaccaagaacaacagccaccacuacaucauggucggcaacgagacgggccuggagcucacccugaccaacaccuccaucaucaaccacaaguucugcaaccugagcgacgcccacaagaagaaccucuacgaccacgcccugauguccaucaucagcacguuccaccuguccauccccaacuucaaccaguacgaggccaugagcugcgacuucaacgggggcaagaucuccgugcaguacaaccucagccacaccuacgcgguggacgccgccaaccacugcgggaccaucgccaacggcguccugcagaccuucaugcggauggcguggggcggguccuacaucgcccuggacagcggcaagggguccugggacugcaucaugacgagcuaccaguaccucaucauccagaacaccaccugggaggaccacugccaguucucccgccccagccccaucggcuaccuggggcugcucagccagcggacccgcgacaucuacaucucccggcgccggcgcggcacguucaccuggacccugagcgacuccgagagcaacgagaccccgggcggguacugccugacgcgguggaugcucaucgaggccgagcugaagugcuucggcaacaccgccguggccaagugcaacgagaagcacgacgaggaguucugcgacaugcugcgccucuucgacuucugcaagcaggcgauccggcgccugaaggcccccgcccagauguccauccagcugaucaacaaggccgugaacgcccucaucaacgaccagcugaucaugaagaaccaccuccgggacaucauggggauccccuacugcaacuacagcaaguacugcuaccugaaccacaccgucaccggccgcacgucccugccccggugcugccuggugagcaacggguccuaccucaacgagacccacuucagcgacgacaucgagcagcaggcggacaacaugaucaccgagcugcugcagaaggaguacauggaccgccagggcaagaccccgcucggccugguggaccuguucgucuucuccacgagcuucuaccugaucuccaucuuccuccaccuggugaagauccccacccaccggcacgugaucgggaagcccugccccaagccgcaccgccugaaccacaugggcaucugcagcugcgggcucuacaagcaccccggcguccccgugaaguggaagcggugaggacuaguaauaaggaaacuguaugaaugucugugggcaggaagugaagagauccuucuguaaagguuuuuggaauuaugucugcugaauaauaaacuuuuuugaaauaauaaaucugguagaaaaaugagaucucaaaggcucuuuucagagccaccaaaaaaaaaaaaaaaaaaaaaaaaaaaaaaaaaaaaaaaaaaaaaaaaaaaaaaaaaaaaaaaaaaaaaaaaaaaaaaaaaaaaaaaaaaaaaaaaaaaaa

SEQ ID NO: 27444 - RNA, 1809 nt, Artificial Sequence
  mRNA product Design b-4 (hSL-A100) comprising derived and/or modified sequence from LASV(LASV035-NIG-2009;Clade II)__AIT17588__GPCmut4 (opt1)
aggagagucccgcagucggcguccagcggcucugcuuguucgugugugugucguugcaggccuuauucaagcuuaccaugggccagaucaucaccuucuuccaggaggugccccacgucaucgaggaggugaugaacaucgugcugaucgcccucagccugcuggccauccucaaggggaucuacaacgucgcgaccugcggccuguucgggcugguguccuuccuccugcugugcggccgcagcugcuccacgaccuacaaggggguguacgagcuccagacccuggagcuggacauggccagccucaacaugugcaugccgcuguccugcaccaagaacaacagccaccacuacaucauggucggcaacgagacgggccuggagcucacccugaccaacaccuccaucaucaaccacaaguucugcaaccugagcgacgcccacaagaagaaccucuacgaccacgcccugauguccaucaucagcacguuccaccuguccauccccaacuucaaccaguacgaggccaugagcugcgacuucaacgggggcaagaucuccgugcaguacaaccucagccacgcguacgccguggacgccgccaaccacugcgggaccaucgcgaacggcguccugcagaccuucaugcggauggccuggggcggguccuacaucgcccuggacagcggcaagggguccugggacugcaucaugaccagcuaccaguaccucaucauccagaacacgaccugggaggaccacugccaguucucccgccccagccccaucggcuaccuggggcugcucagccagcggacccgcgacaucuacaucucccggcgccggcgcggcaccuucacguggacccugagcgacuccgagggcaacgagacccccgggggcuacugccugacccgguggaugcucaucgaggccgagcugaagugcuucgggaacacggccguggcgaagugcaacgagaagcacgacgaggaguucugcgacaugcugcgccucuucgacuucugcaagcaggccauccggcgccugaaggccccggcccagaugagcauccagcugaucaacaaggccgugaacgcgcucaucaacgaccagcugaucaugaagaaccaccuccgggacaucaugggcauccccuacugcaacuacuccaaguacugcuaccugaaccacaccgucaccgggaagaccagccugccccgcugcugccugguguccaacggcagcuaccucaacgagacgcacuucuccgacgacaucgagcagcaggccgacaacaugaucaccgagcugcugcagaaggaguacaucgaccggcagggcaagaccccgcucgggcugguggaccuguucgucuucagcaccuccuucuaccugaucagcaucuuccuccaccuggugaagauccccacgcaccgccacgugaucggcaagcccugccccaagccgcaccggcugaaccacauggggaucugcuccugcggccucuacaagcaccccgggguccccgugaaguggaagcgcugaggacuaguaauaaggaaacuguaugaaugucugugggcaggaagugaagagauccuucuguaaagguuuuuggaauuaugucugcugaauaauaaacuuuuuugaaauaauaaaucugguagaaaaaugagaucucaaaggcucuuuucagagccaccaaaaaaaaaaaaaaaaaaaaaaaaaaaaaaaaaaaaaaaaaaaaaaaaaaaaaaaaaaaaaaaaaaaaaaaaaaaaaaaaaaaaaaaaaaaaaaaaaaaaa

SEQ ID NO: 27445 - RNA, 1809 nt, Artificial Sequence
  mRNA product Design b-4 (hSL-A100) comprising derived and/or modified sequence from LASV(LASV1000-NIG-2009;Clade II)__AIT17782__GPCmut4 (opt1)
aggagagucccgcagucggcguccagcggcucugcuuguucgugugugugucguugcaggccuuauucaagcuuaccaugggccagaucaucaccuucuuccaggaggugccccacgucaucgaggaggugaugaacaucgugcugaucgcccucagccugcuggccauccucaaggggaucuacaacgucgcgaccugcggccuguucgggcugguguccuuccuccugcugugcggccgcagcugcuccacgaccuacaaggggguguacgagcuccagacccuggagcuggacauggccagccucaacaugugcaugccgcuguccugcaccaagaacaacagccaccacuacaucauggucggcaacgagacgggccuggagcucacccugaccaacaccuccaucaucaaccacaaguucugcaaccugagcgacgcccacaagaagaaccucuacgaccacgcccugauguccaucaucagcacguuccaccuguccauccccaacuucaaccaguacgaggccaugagcugcgacuucaacgggggcaagaucuccgugcaguacaaccucagccacaccuacgcgguggacgccgccaaccacugcgggaccaucgccaacggcguccugcagaccuucaugcggauggcguggggcggguccuacaucgcccuggacagcggcaagggguccugggacugcaucaugacgagcuaccaguaccucaucauccagaacaccaccugggaggaccacugccaguucucccgccccagccccaucggcuaccuggggcugcucagccagcggacccgcgacaucuacaucucccggcgccggcgcggcacguucaccuggacccugagcgacuccgagggcaacgagacccccgggggcuacugccugacgcgguggaugcucaucgaggccgagcugaagugcuucgggaacaccgccguggccaagugcaacgagaagcacgacgaggaguucugcgacaugcugcgccucuucgacuucugcaagcaggcgaucaagcggcugaagaccccggcccagaugagcauccagcugaucaacaaggccgugaacgcccucaucaacgaccagcugaucaugaagaaccaccuccgcgacaucaugggcauccccuacugcaacuacuccaaguacugcuaccugaaccacaccgucacggggaagaccagccugccccggugcugccugguguccaacggcagcuaccucaacgagacccacuucuccgacgacaucgagcagcaggccgacaacaugaucaccgagcugcugcagaaggaguacaucgaccgccagggcaagacgccgcucgggcugguggaccuguucgucuucagcaccuccuucuaccugaucagcaucuuccuccaccuggugaagauccccacccaccggcacguggucggcaagcccugccccaagccgcaccgccugaaccacauggggaucugcuccugcggccucuacaagcaccccggggugcccgugaaguggaagcggugaggacuaguaauaaggaaacuguaugaaugucugugggcaggaagugaagagauccuucuguaaagguuuuuggaauuaugucugcugaauaauaaacuuuuuugaaauaauaaaucugguagaaaaaugagaucucaaaggcucuuuucagagccaccaaaaaaaaaaaaaaaaaaaaaaaaaaaaaaaaaaaaaaaaaaaaaaaaaaaaaaaaaaaaaaaaaaaaaaaaaaaaaaaaaaaaaaaaaaaaaaaaaaaaa

SEQ ID NO: 27446 - RNA, 1809 nt, Artificial Sequence
  mRNA product Design b-4 (hSL-A100) comprising derived and/or modified sequence from LASV(LASV221-NIG-2010;Clade II)__AIT17624__GPCmut4 (opt1)
aggagagucccgcagucggcguccagcggcucugcuuguucgugugugugucguugcaggccuuauucaagcuuaccaugggccagaucaucaccuucuuccaggaggugccccacgucaucgaggaggugaugaacaucgugcugaucgcccucagccugcuggccauccucaaggggaucuacaacgucgcgaccugcggccuguucgggcugguguccuuccuccugcugugcggccgcagcugcuccacgaccuacaaggggguguacgagcuccagacccuggagcuggacauggccagccucaacaugugcaugccgcuguccugcaccaagaacaacagccaccacuacaucauggucggcaacgagacgggccuggagcucacccugaccaacaccuccaucaucaaccacaaguucugcaaccugagcgacgcccacaagaagaaccucuacgaccacgcccugauguccaucaucagcacguuccaccuguccauccccaacuucaaccaguacgaggccaugagcugcgacuucaacgggggcaagaucuccgugcaguacaaccucagccacaccuacgcgaucgacgccgccaaccacugcgggaccaucgccaacggcgugcugcagaccuucaugcggauggcguggggcggguccuacaucgcccuggacagcggcaagggguccugggacugcaucaugacgagcuaccaguaccucaucauccagaacaccaccugggaggaccacugccaguucucccgccccagccccaucggcuaccuggggcugcucagccagcggacccgcgacaucuacaucucccggcgccggcgcggcacguucaccuggacccugagcgacuccgagggcaacgagacccccgggggcuacugccugacgcgguggaugcucaucgaggccgagcugaagugcuucgggaacaccgccgucgccaagugcaacgagaagcacgacgaggaguucugcgacaugcugcgccucuucgacuucugcaagcaggcgauccggcgccugaagaccccggcccagaugagcauccagcugaucaacaaggccgugaacgcccucaucaacgaccagcugaucaugaagaaccaccuccgggacaucaugggcauccccuacugcaacuacuccaaguacugcuaccugaaccacaccgugacggggaagaccagccugccccgcugcugccuggucuccaacggcagcuaccucaacgagacccacuucuccgacgacaucgagcagcaggccgacaacaugaucaccgagaugcugcagaaggaguacauggaccggcagggcaagacgccgcuggggcucguggaccuguucguguucagcaccuccuucuaccugaucagcaucuuccugcaccucgucaagauccccacccaccgccacgugaucggcaagcccugccccaagccgcaccggcugaaccacauggggaucugcuccugcggccuguacaagcaccccggggugcccgucaaguggaagcgcugaggacuaguaauaaggaaacuguaugaaugucugugggcaggaagugaagagauccuucuguaaagguuuuuggaauuaugucugcugaauaauaaacuuuuuugaaauaauaaaucugguagaaaaaugagaucucaaaggcucuuuucagagccaccaaaaaaaaaaaaaaaaaaaaaaaaaaaaaaaaaaaaaaaaaaaaaaaaaaaaaaaaaaaaaaaaaaaaaaaaaaaaaaaaaaaaaaaaaaaaaaaaaaaaa

SEQ ID NO: 27447 - RNA, 1809 nt, Artificial Sequence
  mRNA product Design b-4 (hSL-A100) comprising derived and/or modified sequence from LASV(LASV237-NIG-2010;Clade II)__AIT17638__GPCmut4 (opt1)
aggagagucccgcagucggcguccagcggcucugcuuguucgugugugugucguugcaggccuuauucaagcuuaccaugggccagaucaucaccuucuuccaggaggugccccacgucaucgaggaggugaugaacaucgugcugaucgcccucagccugcuggccauccucaaggggaucuacaacgucgcgaccugcggccuguucgggcugguguccuuccuccugcugugcggccgcagcugcuccacgaccuacaaggggguguacgagcuccagacccuggagcuggacauggccagccucaacaugugcaugccgcuguccugcaccaagaacaacagccaccacuacaucauggucggcaacgagacgggccuggagcucacccugaccaacaccuccaucaucaaccacaaguucugcaaccugagcgacgcccacaagaaggaccucuacgaccacgcccugauguccaucaucagcacguuccaccuguccauccccaacuucaaccaguacgaggccaugagcugcgacuucaacgggggcaagaucuccgugcaguacaaccucagccacaccuacgcgguggacgccgccaaccacugcgggaccaucgccaacggcguccugcagaccuucaugcggauggcguggggcggguccuacaucgcccuggacagcggcaagggguccugggacugcaucaugacgagcuaccaguaccucaucauccagaacaccaccugggaggaccacugccaguucucccgccccagccccaucggcuaccuggggcugcucagccagcggacccgcgacaucuacaucucccggcgccggcgcggcacguucaccuggacccugagcgacuccgagggcaacgagacccccgggggcuacugccugacgcgguggaugcucaucgaggccgagcugaagugcuucgggaacaccgccguggccaagugcaacgagaagcacgacgaggaguucugcgacaugcugcgccucuucgacuucugcaagcaggcgauccggcgccugaagaccccggcccagaugagcauccagcugaucaacaaggccgugaacgcccucaucaacgaccagcugaucaugaagaaccaccuccgggacaucaugggcauccccuacugcaacuacuccaaguacugcuaccugaaccacaccgucacggggaagaccagccugccccgcugcugccugguguccaacggcagcuaccucaacgagacccacuucuccgacgacaucgagcagcaggccgacaacaugaucaccgagcugcugcagaaggaguacauggaccggcagggcaagacgccgcucgggcugguggaccuguucgucuucagcaccuccuucuaccugaucagcaucuuccuccaccugaucaagauccccacccaccgccacaucaccggcaagcccugccccaagccgcaccggcugaaccacauggggaucugcuccugcggccucuacaagcaccccggggugcccgugaaguggaagcgcugaggacuaguaauaaggaaacuguaugaaugucugugggcaggaagugaagagauccuucuguaaagguuuuuggaauuaugucugcugaauaauaaacuuuuuugaaauaauaaaucugguagaaaaaugagaucucaaaggcucuuuucagagccaccaaaaaaaaaaaaaaaaaaaaaaaaaaaaaaaaaaaaaaaaaaaaaaaaaaaaaaaaaaaaaaaaaaaaaaaaaaaaaaaaaaaaaaaaaaaaaaaaaaaaa

SEQ ID NO: 27448 - RNA, 1809 nt, Artificial Sequence
  mRNA product Design b-4 (hSL-A100) comprising derived and/or modified sequence from LASV(LASV253-NIG-2011;Clade II)__AIT17670__GPCmut4 (opt1)
aggagagucccgcagucggcguccagcggcucugcuuguucgugugugugucguugcaggccuuauucaagcuuaccaugggccagaucaucaccuucuuccaggaggugccccacgucaucgaggaggugaugaacaucgugcugaucgcccucagccugcuggccauccucaaggggaucuacaacgucgcgaccugcggccuguucgggcugguguccuuccuccugcugugcggccgcagcugcuccacgaccuacaaggggguguacgagcuccagacccuggagcuggacauggccagccucaacaugugcaugccgcuguccugcaccaagaacaacagccaccacuacaucauggucggcaacgagacgggccuggagcucacccugaccaacaccuccaucaucaaccacaaguucugcaaccugagcgacgcccacaagaagaaccucuacgaccacgcccugauguccaucaucagcacguuccaccuguccauccccaacuucaaccaguacgaggccaugagcugcgacuucaacgggggcaagaucuccgugcaguacaaccucagccacaccuacgcgguggacgccgccaaccacugcgggaccaucgccaacggcguccugcagaccuucaugcggauggcguggggcggguccuacaucgcccuggacagcggcaagggguccugggacugcaucaugacgagcuaccaguaccucaucauccagaacaccaccugggaggaccacugccaguucucccgccccagccccaucggcuaccuggggcugcucagccagcggacccgcgacaucuacaucucccggcgccggcgcggcacguucaccuggacccugagcgacuccgagggcaacgagacccccgggggcuacugccugacgcgguggaugcucaucgaggccgagcugaagugcuucgggaacaccgccguggccaagugcaacgagaagcacgacgaggaguucugcgacaugcugcgccucuucgacuucugcaagcaggcgauccggcgccugaaggccccggcccagaugagcauccagcugaucaacaaggccgugaacgcccucaucaacgaccagcugaucaugaagaaccaccuccgggacaucaugggcauccccuacugcaacuacuccaaguacugcuaccugaaccacaccgucaccgggcgcacgagccugccccggugcugccugguguccaacggcagcuaccucaacgagacccacuucuccgacgacaucgagcagcaggcggacaacaugaucaccgagcugcugcagaaggaguacaucgaccgccagggcaagaccccgcucgggcugguggaccuguucgucuucagcacguccuucuaccugaucagcaucuuccuccaccuggugaagauccccacccaccggcacaucaucggcaagcccugccccaagccgcaccgccugaaccacauggggaucugcuccugcggccucuacaagcaccccggggugcccgucaaguggaagcggugaggacuaguaauaaggaaacuguaugaaugucugugggcaggaagugaagagauccuucuguaaagguuuuuggaauuaugucugcugaauaauaaacuuuuuugaaauaauaaaucugguagaaaaaugagaucucaaaggcucuuuucagagccaccaaaaaaaaaaaaaaaaaaaaaaaaaaaaaaaaaaaaaaaaaaaaaaaaaaaaaaaaaaaaaaaaaaaaaaaaaaaaaaaaaaaaaaaaaaaaaaaaaaaaa

SEQ ID NO: 27449 - RNA, 1809 nt, Artificial Sequence
  mRNA product Design b-4 (hSL-A100) comprising derived and/or modified sequence from LASV(LASV254-NIG-2011;Clade II)__AIT17674__GPCmut4 (opt1)
aggagagucccgcagucggcguccagcggcucugcuuguucgugugugugucguugcaggccuuauucaagcuuaccaugggccagaucaucaccuucuuccaggaggugccccacgucaucgaggaggugaugaacaucgugcugaucgcccucagccugcuggccauccucaaggggaucuacaacgucgcgaccugcggccuguucgggcugguguccuuccuccugcugugcggccgcagcugcuccacgaccuacaaggggguguacgagcuccagacccuggagcuggacaugaccaaccucaacaugugcaugccgcugagcugcacgaagaacaacucccaccacuacaucauggucggcaacgagaccggccuggagcucacccugaccaacacgagcaucaucaaccacaaguucugcaaccuguccgacgcccacaagaagaaccucuacaaccacgcccugaugagcaucaucuccaccuuccaccugagcauccccaacuucaaccaguacgaggccauguccugcgacuucaacgggggcaagaucagcgugcaguacaaccucucccacagcuacgccguggacgcggccaaccacugcgggaccaucgccaacggcguccugcagaccuucaugcggauggccuggggcggguccuacaucgcgcuggacagcggcaaggggaacugggacugcaucaugacguccuaccaguaccucaucauccagaacaccaccugggaggaccacugccaguucagccgccccucccccaucggcuaccuggggcugcucagccagcggacccgcgacaucuacaucagccggcgccggcgcggcacguucaccuggacccuguccgacagcgagggcaacgagacccccgggggcuacugccugacgcgguggaugcucaucgaggccgagcugaagugcuucgggaacaccgccguggccaagugcaacgagaagcacgacgaggaguucugcgacaugcugcgccucuucgacuucugcaagcaggccauccggcgccugaagaccccggcgcaggccaacauccagcugaucaacaaggccgugaacgcccucaucaacgaccagcugaucaugaagaaccaccuccgggacaucaugggcauccccuacugcaacuacuccaaguacugcuaccugaaccacaccgucacggggaagaccagccugccccgcugcugccugguguccaacggcagcuaccucaacgagacccacuucuccgacgacaucgagcagcaggccgacaacaugaucaccgagcugcugcagaaggaguacauggaccggcagggcaagacgccgcucgggcugguggaccuguucgucuucagcaccuccuucuaccugaucagcaucuuccuccaccuggugaagauccccacccaccgccacgugaucggcaagcccugccccaagccgcaccggcugaaccacauggggaucugcuccugcggccucuacaagcaccccgggguccccgugaaguggaagcgcugaggacuaguaauaaggaaacuguaugaaugucugugggcaggaagugaagagauccuucuguaaagguuuuuggaauuaugucugcugaauaauaaacuuuuuugaaauaauaaaucugguagaaaaaugagaucucaaaggcucuuuucagagccaccaaaaaaaaaaaaaaaaaaaaaaaaaaaaaaaaaaaaaaaaaaaaaaaaaaaaaaaaaaaaaaaaaaaaaaaaaaaaaaaaaaaaaaaaaaaaaaaaaaaaa

SEQ ID NO: 27450 - RNA, 1809 nt, Artificial Sequence
  mRNA product Design b-4 (hSL-A100) comprising derived and/or modified sequence from LASV(Nig08-A19;Clade III)__ADU56618__GPCmut4 (opt1)
aggagagucccgcagucggcguccagcggcucugcuuguucgugugugugucguugcaggccuuauucaagcuuaccaugggccagaucgugaccuucuuccaggaggucccccacgugaucgaggaggugaugaacaucguccugaucgcccucagcauccuggccauccugaaggggcucuacaacaucgcgaccugcggccugaucgggcuggugacguuccuccugcuguccggccgcagcugcuccaugaccuacaaggggguguacgagcuccagacccuggagcugaacaugaacacccucaacaugugcaugccgcugagcugcacgaagaacaacucccaccacuacaucauggucggcaacgagaccggccuggagcucacccugaccaacacgagccugcuccaccacaaguucugcaaccuguccgacgcccacaagaagaaccuguacgaccacacccucaugagcaucaucuccaccuuccaccugagcauccccaacuucaaccaguacgaggccauguccugcgacuucaacgggggcaagaucaccgugcaguacaaccugagccacuccuacgccaucgacgccgcgaaccacugcgggacgguggccaacggcguccuccagaccuucaugcggauggccuggggcgggagcuacaucgcccuggacuccggccgcgggaagugggacugcaucaugaccagcuaccaguaccugaucauccagaacaccacgugggaggaccacugccaguucucccggcccagccccaucggcuaccucgggcugcugucccagcgcacccgggacaucuacaucagccgccggcgccggggcaccuucaccuggacgcucagcgacuccgagggcaacgagacccccgggggcuacugccugacccgcuggaugcugaucgaggcggagcucaagugcuucgggaacaccgccguggccaagugcaacgagaagcacgacgaggaguucugcgacaugcugcggcuguucgacuucugcaagcaggccauccgccggcucaaggccccggcgcagaugagcauccagcugaucaacaaggccgugaacgcccugaucaacgaccagcucaucaugaagaaccaccuccgcgacaucaugggcauccccuacugcaacuacuccaaguacugcuaccugaaccacacgagcaccgggcggaccucccugccccgcugcugccuggucagcaacggcuccuaccugaacgagacccacuucagcgacgacaucgagcagcaggccgacaacaugaucacggagaugcuccagaaggaguaccuggaccggcagggcaagaccccgcuggggcugguggaccucuucguguucuccaccagcuucuaccugaucuccaucuuccugcaccucgucaagauccccacccaccgccacaucgugggcaagcccugccccaagccgcaccggcugaaccacauggggaucugcagcugcggccuguacaagcagcccggggugcccguccgcuggaagcggugaggacuaguaauaaggaaacuguaugaaugucugugggcaggaagugaagagauccuucuguaaagguuuuuggaauuaugucugcugaauaauaaacuuuuuugaaauaauaaaucugguagaaaaaugagaucucaaaggcucuuuucagagccaccaaaaaaaaaaaaaaaaaaaaaaaaaaaaaaaaaaaaaaaaaaaaaaaaaaaaaaaaaaaaaaaaaaaaaaaaaaaaaaaaaaaaaaaaaaaaaaaaaaaaa

SEQ ID NO: 27451 - RNA, 1812 nt, Artificial Sequence
  mRNA product Design b-4 (hSL-A100) comprising derived and/or modified sequence from LASV(G1180-SLE-2010;Clade IV)__AIT17168__GPCmut4 (opt1)
aggagagucccgcagucggcguccagcggcucugcuuguucgugugugugucguugcaggccuuauucaagcuuaccaugggccagaucgugaccuucuuccaggaggucccccacgugaucgaggaggugaugaacaucguccugaucgcccucagcauccuggccgugcugaaggggcucuacaacuucgcgaccugcggccugguggggcugcucacguuccugcugcucugcggccgcuccugcaccgccagccgguacaagggggucuacgagcugcagacccuggagcucaacauggagacccugaacaugugcaugccgcuguccugcacgaagaacaacagccaccacuacaucauggugggcaacgagaccggccucgagcugacccugaccaacacguccaucaucaaccacaaguucugcaaccucagcgacgcccacaagaagaaccuguacgaccacgcccugauguccaucaucagcaccuuccaccucuccauccccaacuucaaccaguacgaggccaugagcugcgacuucaacgggggcaagaucuccgugcaguacaaccugagccacuccuacgcgggggacgccgccaaccacugcggcaccgucgccaacggggugcugcagaccuucaugcgcauggcguggggcggcagcuacaucgcccucgacuccgggcacggcagcugggacugcaucaugacguccuaccaguaccugaucauccagaacaccaccugggaggaccacugccaguucagccggcccucccccaucggguaccugggccuccugagccagcgcacccgggacaucuacaucagccgccggcgccggggcacguucaccuggacccuguccgacagcgaggggaaggacaccccgggcggguacugccucacgcgcuggaugcugaucgaggccgagcugaagugcuucggcaacaccgccguggccaagugcaacgagaagcacgacgaggaguucugcgacaugcuccggcuguucgacuucugcaagcaggcgauccagcgccugaaggcccccgcccagauguccauccagcucaucaacaaggccgucaacgcccugaucaacgaccagcugaucaugaagaaccaccuccgggacaucauggggauccccuacugcaacuacagcaaguacugcuaccugaaccacaccaccacgggcaagaccucccugcccaagugcugccucgugagcaacggcuccuaccugaacgagacccacuucagcgacgacaucgagcagcaggcggacaacaugaucaccgagaugcugcagaaggaguacauggagcgccaggggaagacgccgcucggccugguggaccuguucgucuucuccaccagcuucuaccugaucuccaucuuccuccaccuggugaagauccccacccaccggcacaucgugggcaagagcugccccaagccccaccgccugaaccacauggggaucugcuccugcgggcucuacaagcagccgggcguccccgugaaguggaagcggugaggacuaguaauaaggaaacuguaugaaugucugugggcaggaagugaagagauccuucuguaaagguuuuuggaauuaugucugcugaauaauaaacuuuuuugaaauaauaaaucugguagaaaaaugagaucucaaaggcucuuuucagagccaccaaaaaaaaaaaaaaaaaaaaaaaaaaaaaaaaaaaaaaaaaaaaaaaaaaaaaaaaaaaaaaaaaaaaaaaaaaaaaaaaaaaaaaaaaaaaaaaaaaaaa

SEQ ID NO: 27452 - RNA, 1812 nt, Artificial Sequence
  mRNA product Design b-4 (hSL-A100) comprising derived and/or modified sequence from LASV(G1442-SLE-2011;Clade IV)__AIT17180__GPCmut4 (opt1)
aggagagucccgcagucggcguccagcggcucugcuuguucgugugugugucguugcaggccuuauucaagcuuaccaugggccagaucgugaccuucuuccaggaggucccccacgugaucgaggaggugaugaacaucguccugaucgcccucagcauccuggccgugcugaaggggcucuacaacguggcgaccugcggccugaucgggcuggucacguuccuccugcugugcggccgcuccugcaccaccacccucuacaaggggguguacgagcugcagacgcuggagcucaacauggagacccugaacaugugcaugccgcugagcugcaccaagaacaacucccaccacuacauccgggugggcaacgagaccggccucgagcugacgcugaccaacaccagcaucaucaaccacaaguucugcaaccucuccgacgcccacaagaagaaccuguacgaccacgcccugaugagcaucaucuccaccuuccaccucagcauccccaacuucaaccaguacgaggccauguccugcgacuucaacgggggcaagaucagcguccaguacaaccugucccacagcuacgccggggacgcggccaaccacugcggcacgguggccaacggggugcugcagaccuucaugcgcauggccuggggcggcuccuacaucgcgcucgacagcgggcggggcaacugggacugcaucaugaccuccuaccaguaccugaucauccagaacaccacgugggacgaccacugccaguucagccgccccucccccaucggguaccugggccuccugagccagcggacccgcgacgucuacaucucccggcgccggcgcggcaccuucaccuggacgcugagcgacagcgaggggaaggacaccccgggcggguacugccucacccgguggaugcugaucgaggccgagcugaagugcuucggcaacaccgccguggccaagugcaacgagaagcacgacgaggaguucugcgacaugcuccgccuguucgacuucugcaagcaggccauccagcggcugaaggcgcccgcccagauguccauccagcucaucaacaaggccgugaacgcccugaucaacgaccagcugaucaugaagaaccaccuccgcgacaucauggggauccccuacugcaacuacagcaaguacugcuaccugaacaacacggccaccggcaagaccucccugcccaagugcugccucaucagcaacggcuccuaccugaacgagacccacuucagcgacgacaucgagcaggaggcggacaacaugaucacggagaugcugcagaaggaguacauggagcggcaggggaagaccccgcucggccuggucgaccuguucguguucuccaccagcuucuaccugaucuccaucuuccuccaccuggugaagauccccacccaccgccacaucgucggcaagagcugccccaagccccaccggcugaaccacauggggaucugcuccugcgggcucuacaagcagccgggcgugcccgugcgcuggaagcggugaggacuaguaauaaggaaacuguaugaaugucugugggcaggaagugaagagauccuucuguaaagguuuuuggaauuaugucugcugaauaauaaacuuuuuugaaauaauaaaucugguagaaaaaugagaucucaaaggcucuuuucagagccaccaaaaaaaaaaaaaaaaaaaaaaaaaaaaaaaaaaaaaaaaaaaaaaaaaaaaaaaaaaaaaaaaaaaaaaaaaaaaaaaaaaaaaaaaaaaaaaaaaaaaa

SEQ ID NO: 27453 - RNA, 1812 nt, Artificial Sequence
  mRNA product Design b-4 (hSL-A100) comprising derived and/or modified sequence from LASV(G3010-SLE-2013;Clade IV)__AIT17344__GPCmut4 (opt1)
aggagagucccgcagucggcguccagcggcucugcuuguucgugugugugucguugcaggccuuauucaagcuuaccaugggccagaucgugaccuucuuccaggaggucccccacgugaucgaggaggugaugaacaucguccugaucgcccucagcauccuggccgugcugaaggggcucuacaacuucgcgaccugcggccugguggggcuggucacguuccuccugcugugcggccgcuccugcaccaccagccucuacaaggggguguacgagcugcagacccuggagcucaacauggagacgcugaacaugugcaugccgcuguccugcaccaagaacaacagccaccacuacaucauggugggcaacgagaccggccucgagcugacccugacgaacaccuccaucaucaaccacaaguucugcaaccucagcgacgcccacaagaagaaccuguacaaccacgcccugauguccaucaucagcaccuuccaccucuccauccccaacuucaaccaguacgaggccaugagcugcgacuucaacgggggcaagaucuccguccaguacaaccugagccacuccuacgccggggacgcggccagccacugcggcaccguggccaacggggugcugcagacguucaugcggauggccuggggcggcuccuacaucgcgcucgacagcggguacggcaagugggacugcaucaugaccuccuaccaguaccugaucauccagaacaccaccugggaggaccacugccaguucagccgccccucccccaucggguaccugggccuccugagccagcggacgcgcgacaucuacaucagccggcgccggcgcggcaccuucaccuggacccuguccgacagcgaggggaaggacacgccgggcggguacugccucacccgguggaugcugaucgaggccgagcugaagugcuucggcaacaccgccgucgccaagugcaacgagaagcacgacgaggaguucugcgacaugcuccgccuguucgacuucugcaagcaggccauccagcggcugaagacccccgcgcagauguccauccagcucaucaacaaggccgugaacgcccugaucaacgaccagcugaucaugaagaaccaccuccgcgacaucauggggauccccuacugcaacuacagcaaguacugcuaccugaaccacacgaccaccggcaagaccucccugcccaagugcugccucgugagcaacggcuccuaccugaacgagacgcacuucagcgacgacaucgagcagcaggccgacaacaugaucaccgagaugcugcagaaggaguacauggagcggcaggggaagaccccgcucggccuggucgaccuguucguguucuccaccagcuucuaccugaucuccaucuuccuccaccuggugaagauccccacgcaccgccacaucgucggcaagagcugccccaagccccaccggcugaaccacauggggaucugcuccugcgggcucuacaagcagccgggcgugcccgugcgcuggaagcggugaggacuaguaauaaggaaacuguaugaaugucugugggcaggaagugaagagauccuucuguaaagguuuuuggaauuaugucugcugaauaauaaacuuuuuugaaauaauaaaucugguagaaaaaugagaucucaaaggcucuuuucagagccaccaaaaaaaaaaaaaaaaaaaaaaaaaaaaaaaaaaaaaaaaaaaaaaaaaaaaaaaaaaaaaaaaaaaaaaaaaaaaaaaaaaaaaaaaaaaaaaaaaaaaa

SEQ ID NO: 27454 - RNA, 1812 nt, Artificial Sequence
  mRNA product Design b-4 (hSL-A100) comprising derived and/or modified sequence from LASV(G502-SLE-2009;Clade IV)__AIT17126__GPCmut4 (opt1)
aggagagucccgcagucggcguccagcggcucugcuuguucgugugugugucguugcaggccuuauucaagcuuaccaugggccagaucgugaccuucuuccaggaggucccccacgugaucgaggaggugaugaacaucguccugaucgcccucagcauccuggccgugcugaaggggcucuacaacuucgcgaccugcggccugguggggcugcucacguuccugcugcucugcggccgcuccugcaccaccgggcuguacaagggcgucuacgagcugcagacccucgagcugaacauggagacgcugaacaugugcaugccgcucagcugcaccaagaacaacucccaccacuacaucauggugggcaacgagaccgggcuggagcugacccucacgaacaccagcaucaucaaccacaaguucugcaaccuguccgacgcccacaagaagaaccuguacgaccacgcccucaugagcaucaucuccaccuuccaccugagcauccccaacuucaaccaguacgaggccauguccugcgacuucaacggcgggaagaucagcgugcaguacaaccugucccacagcuacgccggcgacgcggccgaccacugcgggaccgucgccaacggcgugcuccagacguucaugcggauggccuggggcggguccuacaucgcgcuggacagcggccgcgggcggugggacugcaucaugaccuccuaccaguaccugaucauccagaacaccaccugggaggaccacugccaguucagccgccccucccccaucggcuaccucggccugcugagccagcggacgcgcgacaucuacaucucccggcgccggcgcgggaccuucaccuggacccucagcgacagcgagggcaaggacacgcccgggggcuacugccugacccgguggaugcugaucgaggccgagcucaagugcuucgggaacaccgccguggccaagugcaacgagaagcacgacgaggaguucugcgacaugcugcgccuguucgacuucugcaagcaggccauccagcggcucaaggcgccggcccagauguccauccagcugaucaacaaggccgucaacgcccugaucaacgaccagcucgugaugaagaaccaccuccgcgacaucaugggcauccccuacugcaacuacagccgguacugcuaccugaaccacaccacgaccggccgcaccucccugcccaagugcugccuggugagcaacggguccuaccugaacgagacccacuucagcgacgacaucgagcagcaggccgacaacaugaucacggagaugcuccagaaggaguacauggagcggcagggcaagaccccgcuggggcuggucgaccuguucguguucuccaccagcuucuaccucaucuccaucuuccugcaccuggugaagauccccacccaccgccacaucgucggcaagagcugccccaagccccaccggcucaaccacauggggaucugcuccugcggccuguacaagcagccgggcgugcccgugaaguggaagcgcugaggacuaguaauaaggaaacuguaugaaugucugugggcaggaagugaagagauccuucuguaaagguuuuuggaauuaugucugcugaauaauaaacuuuuuugaaauaauaaaucugguagaaaaaugagaucucaaaggcucuuuucagagccaccaaaaaaaaaaaaaaaaaaaaaaaaaaaaaaaaaaaaaaaaaaaaaaaaaaaaaaaaaaaaaaaaaaaaaaaaaaaaaaaaaaaaaaaaaaaaaaaaaaaaa

SEQ ID NO: 27455 - RNA, 1812 nt, Artificial Sequence
  mRNA product Design b-4 (hSL-A100) comprising derived and/or modified sequence from LASV(G733-SLE-2010;Clade IV)__AIT17154__GPCmut4 (opt1)
aggagagucccgcagucggcguccagcggcucugcuuguucgugugugugucguugcaggccuuauucaagcuuaccaugggccagaucgugaccuucuuccaggaggucccccacgugaucgaggaggugaugaacaucguccugaucgcccucagcauccuggccgugcugaaggggcucuacaacuucgcgaccugcggcaucguggggcuggucuccuuccugcuccugugcggccgcagcugcacgaccucccuguacaaggggguguacgagcuccagacccuggagcugaacauggagacccucaacaugugcaugccgcugagcugcacgaagaacaacucccaccacuacaucauggugggcaacgagaccggccuggagcucacccugaccaacacgagcaucaucaaccacaaguucugcaaccuguccgacgcccacaagaagaaccucuacgaccacgcccugaugagcaucaucuccaccuuccaccugagcauccccaacuucaaccaguacgaggccauguccugcgacuucaacgggggcaagaucagcguccaguacaaccucucccacagcuacgccggggacgcggccaaccacugcggcaccaucgccaacggggugcugcagaccuucaugcggauggccuggggcggcuccuacaucgcgcuggacagcgggcgcgaccggugggacugcaucaugacguccuaccaguaccucaucauccagaacaccaccugggaggaccacugccaguucagccgccccucccccaucggcuaccuggggcugcucagccagcggacccgcgacaucuacaucagccggcgccggcgcggcacguucaccuggacccuguccgacagcgagggcaaggacacccccgggggcuacugccugacgcgguggaugcucaucgaggccgagcugaagugcuucgggaacaccgccguggccaagugcaacgagaagcacgacgaggaguucugcgacaugcugcgccucuucgacuucugcaagcaggccauccagcggcugaaggcgccggcccagauguccauccagcugaucaacaaggccgucaacgcccucaucaacgaccagcugaucaugaagaaccaccuccgcgacaucaugggcauccccuacugcaacuacagcaaguacugcuaccugaaccacaccaccacggggaagaccucccugcccaagugcugccuggugagcaacggcuccuaccucaacgagacccacuucagcgacgacaucgagcagcaggccgacaacaugaucaccgagaugcugcagaaggaguacauggagcggcagggcaagacgccgcuggggcucguggaccuguucgucuucuccaccagcuucuaccugaucuccaucuuccugcaccucgugaagauccccacccaccgccacguggucggcaagagcugccccaagccccaccggcugaaccacauggggaucugcuccugcggccuguacgggcagccgggcgugcccgugaaguggaagcgcugaggacuaguaauaaggaaacuguaugaaugucugugggcaggaagugaagagauccuucuguaaagguuuuuggaauuaugucugcugaauaauaaacuuuuuugaaauaauaaaucugguagaaaaaugagaucucaaaggcucuuuucagagccaccaaaaaaaaaaaaaaaaaaaaaaaaaaaaaaaaaaaaaaaaaaaaaaaaaaaaaaaaaaaaaaaaaaaaaaaaaaaaaaaaaaaaaaaaaaaaaaaaaaaaa

SEQ ID NO: 27456 - RNA, 1812 nt, Artificial Sequence
  mRNA product Design b-4 (hSL-A100) comprising derived and/or modified sequence from MOPV/LASV reassortant(IGS-1;Clade IV)__AFY05576__GPCmut4 (opt1)
aggagagucccgcagucggcguccagcggcucugcuuguucgugugugugucguugcaggccuuauucaagcuuaccaugggccagaucgugaccuucuuccaggaggucccccacgugaucgaggaggugaugaacaucguccugaucgcccucagcgugcuggccgugcugaaggggcucuacaacuucgcgaccugcggccuggucgggcuggugacguuccuccugcugugcggccgcuccugcaccaccagccucuacaaggggguguacgagcugcagacccuggagcucaacauggagacgcugaacaugugcaugccgcuguccugcaccaagaacaacagccaccacuacaucauggucggcaacgagaccggccucgagcugacccugacgaacaccuccaucaucaaccacaaguucugcaaccucagcgacgcccacaagaagaaccuguacgaccacgcccugauguccaucaucagcaccuuccaccucuccauccccaacuucaaccaguacgaggccaugagcugcgacuucaacgggggcaagaucuccgugcaguacaaccugagccacuccuacgccggggacgcggccaaccacugcggcaccguggccaacgggguccugcagacguucaugcggauggccuggggcggcagcuacaucgcgcucgacuccgggcgcggcaacugggacugcaucaugaccagcuaccaguaccugaucauccagaacaccaccugggaggaccacugccaguucucccggcccagccccaucggguaccugggccuccugucccagcgcacgcgggacaucuacaucagccgccggcgccggggcaccuucaccuggacccugagcgacuccgagggggaggacacgccgggcggguacugccucacccgcuggaugcugaucgaggccgagcugaagugcuucggcaacaccgccguggccaagugcaacgagaagcacgacgaggaguucugcgacaugcuccggcuguucgacuucugcaagcaggccauccagcgccugaaggcgcccgcccagaugagcauccagcucaucaacaaggccgugaacgcccugaucaacgaccagcugaucaugaagaaccaccuccgggacaucauggggauccccuacugcaacuacuccaaguacugcuaccugaaccacaccacgaccggccgcaccagccugcccaagugcugccucgucuccaacggcagcuaccugaacgagacccacuucuccgacgacaucgagcagcaggccgacaacaugaucacggagaugcugcagaaggaguacauggagcggcaggggaagaccccgcucggccugguggaccuguucguguucagcaccuccuucuaccugaucagcaucuuccuccaccuggucaagauccccacccaccgccacaucguggggaaguccugccccaagccccaccggcugaaccacaugggcaucugcagcugcgggcucuacaagcagccgggcgugcccgucaaguggaagcgcugaggacuaguaauaaggaaacuguaugaaugucugugggcaggaagugaagagauccuucuguaaagguuuuuggaauuaugucugcugaauaauaaacuuuuuugaaauaauaaaucugguagaaaaaugagaucucaaaggcucuuuucagagccaccaaaaaaaaaaaaaaaaaaaaaaaaaaaaaaaaaaaaaaaaaaaaaaaaaaaaaaaaaaaaaaaaaaaaaaaaaaaaaaaaaaaaaaaaaaaaaaaaaaaaa

SEQ ID NO: 27457 - RNA, 1812 nt, Artificial Sequence
  mRNA product Design b-4 (hSL-A100) comprising derived and/or modified sequence from LASV(LM765-SLE-2012;Clade IV)__AIT17814__GPCmut4 (opt1)
aggagagucccgcagucggcguccagcggcucugcuuguucgugugugugucguugcaggccuuauucaagcuuaccaugggccagaucgugaccuucuuccaggaggucccccacgugaucgaggaggugaugaacaucguccugaucgcccucagcauccuggccgugcugaaggggcucuacaacuucgcgaccugcggccugguggggcuggucacguuccuccugcugugcggccgcuccugcaccaccagccucuacaaggggguguacgagcugcagacccuggagcucaacauggagacgcugaacaugugcaugccgcuguccugcaccaagaacaacagccaccacuacaucauggugggcaacgagaccggccucgagcugacccugacgaacaccuccaucaucgaccacaaguucugcaaccucagcgacgcccaccggaagaaccuguacgaccacgcccugauguccaucaucagcaccuuccaccucuccauccccaacuucaaccaguacgaggccaugagcugcgacuucaacgggggcaagaucuccguccaguacaaccugagccacuccuacgccaaggacgcggccgaccacugcgggaccguggccaacggcgugcugcagacguucaugcgcauggccuggggcgggagcuacaucgcgcucgacuccggccgggggcgcugggacugcaucaugaccagcuaccaguaccugaucauccagaacaccaccugggaggaccacugccaguucucccggcccagccccaucggcuaccuggggcuccugucccagcgcacgcgggacaucuacaucagccgccggcgccggggcaccuucaccuggacccugagcgacuccgagggcaaggacacgcccgggggcuacugccucacccgcuggaugcugaucgaggccgagcugaagugcuucgggaacaccgccgucgccaagugcaacgagaagcacgacgaggaguucugcgacaugcuccggcuguucgacuucugcaagcaggccauccagcgccugaaggcgccggcccagaugagcauccagcucaucaacaaggccgugaacgcccugaucaacgaccagcugaucaugaagaaccaccuccgggacaucaugggcauccccuacugcaacuacuccaaguacugcuaccugaaccacaccacgaccgggaagaccagccugcccaagugcugccucguguccaacggcagcuaccugaacgagacccacuucuccgacgacaucgagcagcaggccgacaacaugaucacggagaugcugcagaaggaguacauggagcgccagggcaagaccccgcucgggcuggucgaccuguucguguucagcaccuccuucuaccugaucagcaucuuccuccaccuggugaagauccccacccaccggcacaucgucggcaagcccugccccaagccgcaccgccugaaccacauggggaucugcuccugcggccucuacaagcagcccggggugcccgugaaguggaagcggugaggacuaguaauaaggaaacuguaugaaugucugugggcaggaagugaagagauccuucuguaaagguuuuuggaauuaugucugcugaauaauaaacuuuuuugaaauaauaaaucugguagaaaaaugagaucucaaaggcucuuuucagagccaccaaaaaaaaaaaaaaaaaaaaaaaaaaaaaaaaaaaaaaaaaaaaaaaaaaaaaaaaaaaaaaaaaaaaaaaaaaaaaaaaaaaaaaaaaaaaaaaaaaaaa

SEQ ID NO: 27458 - RNA, 1812 nt, Artificial Sequence
  mRNA product Design b-4 (hSL-A100) comprising derived and/or modified sequence from LASV(LM776-SLE-2012;Clade IV)__AIT17824__GPCmut4 (opt1)
aggagagucccgcagucggcguccagcggcucugcuuguucgugugugugucguugcaggccuuauucaagcuuaccaugggccagaucgugaccuucuuccaggaggucccccacgugaucgaggaggugaugaacaucguccugaucgcccucagcauccuggccgugcugaaggggcucuacaacuucgcgaccugcggccugguggggcuggucacguuccuccugcugugcggccgcuccugcaccaccagcguguacaaggggguguacgagcuccagacccuggagcugaacauggagacgcucaacaugugcaugccgcuguccugcaccaagaacaacagccaccacuacaucauggucggcaacgagaccggccuggagcucacccugacgaacaccuccaucaucaaccacaaguucugcaaccugagcgacgcccacaagaagaaccucuacgaccacgcccugauguccaucaucagcaccuuccaccuguccauccccaacuucaaccaguacgaggccaugagcugcgacuucaacgggggcaagaucuccgugcaguacaaccucagccacuccuacgccggggacgcggccaaccacugcggcaccguggccaacgggguccugcagacguucaugcggauggccuggggcggcagcuacaucgcgcuggacuccgggcacggcaagugggacugcaucaugaccagcuaccaguaccucaucauccagaacaccaccugggaggaccacugccaguucucccgccccagccccaucggguaccugggccugcucucccagcggacgcgcgacaucuacaucagccggcgccggcgcggcaccuucaccuggacccugagcgacuccgaggggaaggacacgccgggcggguacugccugacccgguggaugcucaucgaggccgagcugaagugcuucggcaacaccgccguggccaagugcaacgagaagcacgacgaggaguucugcgacaugcugcgccucuucgacuucugcaagcaggccauccagcggcugaaggcgcccgcccagaugagcauccagcugaucaacaaggccgugaacgcccucaucaacgaccagcugaucaugaagaaccaccuccgcgacaucauggggauccccuacugcaacuacuccaaguacugcuaccugaaccacaccacgaccggcaagaccagccugcccaagugcugccuggucuccaacggcagcuaccucaacgagacccacuucuccgacgacaucgagcagcaggccgacaacaugaucacggagaugcugcagaaggaguacauggagcggcaggggaagaccccgcugggccucguggaccuguucguguucagcaccuccuucuaccugaucagcaucuuccugcaccucgucaagauccccacccaccgccacaucguggggaaguccugccccaagccccaccggcugaaccacaugggcaucugcagcugcgggcuguacaagcagccgggcgugcccguccgcuggaagcggugaggacuaguaauaaggaaacuguaugaaugucugugggcaggaagugaagagauccuucuguaaagguuuuuggaauuaugucugcugaauaauaaacuuuuuugaaauaauaaaucugguagaaaaaugagaucucaaaggcucuuuucagagccaccaaaaaaaaaaaaaaaaaaaaaaaaaaaaaaaaaaaaaaaaaaaaaaaaaaaaaaaaaaaaaaaaaaaaaaaaaaaaaaaaaaaaaaaaaaaaaaaaaaaaa

SEQ ID NO: 27459 - RNA, 1812 nt, Artificial Sequence
  mRNA product Design b-4 (hSL-A100) comprising derived and/or modified sequence from LASV(Mad39;Clade IV)__ANH09722__GPCmut4 (opt1)
aggagagucccgcagucggcguccagcggcucugcuuguucgugugugugucguugcaggccuuauucaagcuuaccaugggccagaucgugaccuucuuccaggaggucccccacgugaucgaggaggugaugaacaucguccugaucgcccucagcauccuggccgugcugaaggggcucuacaacguggcgaccugcggccugaucgggcuggucacguuccuccugcugugcggccgcuccugcaccaccacccucuacaaggggguguacgagcugcaggcccuggagcucaacauggagacgcugaacaugugcaugccgcugagcugcaccaagaacaacucccaccacuacauccgggugggcaacgagaccggccucgagcugacccugacgaacaccagccucaucaaccacaaguucugcaaccuguccgacgcccacaagaagaaccuguacgaccacgcccucaugagcaucaucuccaccuuccaccugagcauccccaacuucaaccaguacgaggccauguccugcgacuucaacgacgggaagaucagcguccaguacaaccugucccacaccuacgcgggcgacacggccaaccacugcgggaccguggccaacggcgugcuccagaccuucaugcgcauggccuggggcgggagcuacaucgcgcuggacuccggccgcgggggcugggacugcaucaugaccagcuaccaguaccugaucauccagaacacgaccugggaggaccacugccaguucucccggcccagccccaucggguaccucggccugcugucccagcggacccgcgacaucuacaucagccggcgccggcgcggcaccuucacguggacccucuccgacagcgaggggaaggacaccccgggcggguacugccugacccgguggaugcugaucgaggccgagcucaagugcuucggcaacacggccgucgccaagugcaacgagaagcacgacgaggaguucugcgacaugcugcgccuguucgacuucugcaagcaggccauccagcggcucaaggcgcccgcccagaugagcauccagcugaucaacaaggccgugaacgcccugaucaacgaccagcucaucaugaagaaccaccuccgcgacaucauggggauccccuacugcaacuacuccaaguacugcuaccugaaccacaccgugaccggcaagaccagccugcccaagugcugccuggucuccaacggcagcuaccugaacgagacgcacuucuccgacgacaucgagcagcaggccgacaacaugaucaccgagaugcuccagaaggaguacauggagcggcaggggaagaccccgcugggccugguggaccuguucguguucagcaccuccuucuaccucaucagcaucuuccugcaccuggucaagauccccacgcaccgccacgugguggggaagcccugccccaagccgcaccggcucaaccacaugggcaucugcuccugcggguucuacaagcagcccggcguccccgugcgcuggaagcggugaggacuaguaauaaggaaacuguaugaaugucugugggcaggaagugaagagauccuucuguaaagguuuuuggaauuaugucugcugaauaauaaacuuuuuugaaauaauaaaucugguagaaaaaugagaucucaaaggcucuuuucagagccaccaaaaaaaaaaaaaaaaaaaaaaaaaaaaaaaaaaaaaaaaaaaaaaaaaaaaaaaaaaaaaaaaaaaaaaaaaaaaaaaaaaaaaaaaaaaaaaaaaaaaa

SEQ ID NO: 27460 - RNA, 1812 nt, Artificial Sequence
  mRNA product Design b-4 (hSL-A100) comprising derived and/or modified sequence from LASV(Z0947-SLE-2011;Clade IV)__AIT17840__GPCmut4 (opt1)
aggagagucccgcagucggcguccagcggcucugcuuguucgugugugugucguugcaggccuuauucaagcuuaccaugggccagaucgugaccuucuuccaggaggucccccacgugaucgaggaggugaugaacaucguccugaucgcccucagcauccuggccgugcugaaggggcucuacaacuucgcgaccugcggccugguggggcuggucacguuccuccugcugugcggccgcuccugcaccaucagccucuacaaggggguguacgagcugcagacccuggagcucaacauggagacccugaacaugugcaugccgcuguccugcacgaagaacaacagccaccacuacaucauggugggcaacgagaccggccucgagcugacccugaccaacacguccaucaucaaccacaaguucugcaaccucagcgacgcccacaagaagaaccuguacgaccacgcccugauguccaucaucagcaccuuccaccucuccauccccaacuucaaccaguacgaggccaugagcugcgacuucaacgggggcaagaucuccguccaguacaaccugagccacuccuacgccggggacgcggccaaccacugcggcaccguggccaacggggugcugcagaccuucaugcggauggccuggggcggcagcuacaucgcgcucgacuccgggcgcgaccggugggacugcaucaugacgagcuaccaguaccugaucauccagaacaccaccugggaggaccacugccaguucucccgccccagccccaucggcuaccuggggcuccugucccagcggacccgcgacaucuacaucagccggcgccggcgcggcacguucaccuggacccugagcgacuccgagggcaaggacacccccgggggcuacugccucacgcgguggaugcugaucgaggccgagcugaagugcuucgggaacaccgccgucgccaagugcaacgagaagcacgacgaggaguucugcgacaugcuccgccuguucgacuucugcaagcaggccauccagcggcugaaggcgccggcccagaugagcauccagcucaucaacaaggccgugaacgcccugaucaacgaccagcugaucaugaagaaccaccuccgcgacaucaugggcauccccuacugcaacuacuccaaguacugcuaccugaaccacaccaccacggggaagaccagccugcccaagugcugccucguguccaacggcagcuaccugaacgagacccacuucuccgacgacaucgagcagcaggccgacaacaugaucaccgagaugcugcagaaggaguacauggagcggcagggcaagacgccgcucgggcuggucgaccuguucguguucagcaccuccuucuaccugaucagcaucuuccuccaccuggugaagauccccacccaccgccacaucgucggcaagcccugccccaagccgcaccggcugaaccacauggggaucugcuccugcggccucuacaagcagcccggggugcccgugaaguggaagcgcugaggacuaguaauaaggaaacuguaugaaugucugugggcaggaagugaagagauccuucuguaaagguuuuuggaauuaugucugcugaauaauaaacuuuuuugaaauaauaaaucugguagaaaaaugagaucucaaaggcucuuuucagagccaccaaaaaaaaaaaaaaaaaaaaaaaaaaaaaaaaaaaaaaaaaaaaaaaaaaaaaaaaaaaaaaaaaaaaaaaaaaaaaaaaaaaaaaaaaaaaaaaaaaaaa

SEQ ID NO: 27461 - RNA, 1812 nt, Artificial Sequence
  mRNA product Design b-4 (hSL-A100) comprising derived and/or modified sequence from LASV(Josiah;Clade IV)__NP_694870__GPCmut4 (opt4)
aggagagucccgcagucggcguccagcggcucugcuuguucgugugugugucguugcaggccuuauucaagcuuaccaugggccagaucgugaccuucuuccaggaggugccccacgugaucgaggaggugaugaacaucgugcugaucgcccugagcgugcuggccgugcugaagggccuguacaacuucgccaccugcggccuggugggccuggugaccuuccugcugcugugcggcagaagcugcaccaccagccuguacaagggcguguacgagcugcagacccuggagcugaacauggagacccugaacaugugcaugccccugagcugcaccaagaacaacagccaccacuacaucauggugggcaacgagaccggccuggagcugacccugaccaacaccagcaucaucaaccacaaguucugcaaccugagcgacgcccacaagaagaaccuguacgaccacgcccugaugagcaucaucagcaccuuccaccugagcauccccaacuucaaccaguacgaggccaugagcugcgacuucaacggcggcaagaucagcgugcaguacaaccugagccacagcuacgccggcgacgccgccaaccacugcggcaccguggccaacggcgugcugcagaccuucaugagaauggccuggggcggcagcuacaucgcccuggacagcggcagaggcaacugggacugcaucaugaccagcuaccaguaccugaucauccagaacaccaccugggaggaccacugccaguucagcagacccagccccaucggcuaccugggccugcugagccagagaaccagagacaucuacaucagcagaagaagaagaggcaccuucaccuggacccugagcgacagcgagggcaaggacacccccggcggcuacugccugaccagauggaugcugaucgaggccgagcugaagugcuucggcaacaccgccguggccaagugcaacgagaagcacgacgaggaguucugcgacaugcugagacuguucgacuucugcaagcaggccauccagagacugaaggcccccgcccagaugagcauccagcugaucaacaaggccgugaacgcccugaucaacgaccagcugaucaugaagaaccaccugagagacaucaugggcauccccuacugcaacuacagcaaguacugcuaccugaaccacaccaccaccggcagaaccagccugcccaagugcugccuggugagcaacggcagcuaccugaacgagacccacuucagcgacgacaucgagcagcaggccgacaacaugaucaccgagaugcugcagaaggaguacauggagagacagggcaagaccccccugggccugguggaccuguucguguucagcaccagcuucuaccugaucagcaucuuccugcaccuggugaagauccccacccacagacacaucgugggcaagagcugccccaagccccacagacugaaccacaugggcaucugcagcugcggccuguacaagcagcccggcgugcccgugaaguggaagagaugaggacuaguaauaaggaaacuguaugaaugucugugggcaggaagugaagagauccuucuguaaagguuuuuggaauuaugucugcugaauaauaaacuuuuuugaaauaauaaaucugguagaaaaaugagaucucaaaggcucuuuucagagccaccaaaaaaaaaaaaaaaaaaaaaaaaaaaaaaaaaaaaaaaaaaaaaaaaaaaaaaaaaaaaaaaaaaaaaaaaaaaaaaaaaaaaaaaaaaaaaaaaaaaaa

SEQ ID NO: 27462 - RNA, 1809 nt, Artificial Sequence
  mRNA product Design b-4 (hSL-A100) comprising derived and/or modified sequence from LASV(LP;Clade I)__AAF86701__GPCmut4 (opt4)
aggagagucccgcagucggcguccagcggcucugcuuguucgugugugugucguugcaggccuuauucaagcuuaccaugggccagaucaucaccuucuuccaggaggugccccacgugaucgaggaggugaugaacaucgugcugaucgcccugagccugcuggccauccugaagggccuguacaacaucgccaccugcggcaucaucggccugguggccuuccuguuccugugcggcaagagcugcagccugacccugaagggcggcuacgagcugcagacccuggagcugaacauggagacccugaacaugugcaugccccugagcugcaccaagaacagcagccaccacuacaucagagugggcaacgagaccggccuggagcugacccugaccaacaccagcaucaucaaccacaaguucugcaaccugagcgacgcccacaagaagaaccuguacgaccacgcccugaugagcaucaucagcaccuuccaccugagcauccccaacuucaaccaguacgaggccaugagcugcgacuucaacggcggcaagaucagcgugcaguacaaccugagccacagcuacgccggcgacgccgccgagcacugcggcaccguggccaacggcgugcugcagaccuucaugagaauggccuggggcggcagauacaucgcccuggacagcggcaagggcaacugggacugcaucaugaccagcuaccaguaccugaucauccagaacaccaccugggaggaccacugccaguucagcagacccagccccaucggcuaccugggccugcugagccagagaaccagagacaucuacaucagcagaagaagaagaggcaccuucaccuggacccugagcgacagcgagggcaacgagacccccggcggcuacugccugaccagauggaugcugaucgaggccgagcugaagugcuucggcaacaccgccguggccaagugcaacgagaagcacgacgaggaguucugcgacaugcugagacuguucgacuucugcaagcaggccaucagaagacugaaggcccccgcccagaugagcauccagcugaucaacaaggccgugaacgcccugaucaacgaccagcugaucaugaagaaccaccugagagacaucaugggcauccccuacugcaacuacagcaaguacugcuaccugaaccacaccagcagcggcagaaccagccugcccaagugcugccugaucagcaacggcagcuaccugaacgagacccaguucagcgacgacaucgagcagcaggccgacaacaugaucaccgagaugcugcagaaggaguacaucgagagacagggcaagaccccccugggccugguggacaucuucaucuucagcaccagcuucuaccugaucagcaucuuccugcaccugaucaagauccccacccacagacacaucgugggcaagcccugccccaagccccacagacugaaccacaugggcgugugcagcugcggccuguacaagcaccccggcgugcccaccaaguggaagagaugaggacuaguaauaaggaaacuguaugaaugucugugggcaggaagugaagagauccuucuguaaagguuuuuggaauuaugucugcugaauaauaaacuuuuuugaaauaauaaaucugguagaaaaaugagaucucaaaggcucuuuucagagccaccaaaaaaaaaaaaaaaaaaaaaaaaaaaaaaaaaaaaaaaaaaaaaaaaaaaaaaaaaaaaaaaaaaaaaaaaaaaaaaaaaaaaaaaaaaaaaaaaaaaaa

SEQ ID NO: 27463 - RNA, 1809 nt, Artificial Sequence
  mRNA product Design b-4 (hSL-A100) comprising derived and/or modified sequence from LASV(803213;Clade II)__AAF86703__GPCmut4 (opt4)
aggagagucccgcagucggcguccagcggcucugcuuguucgugugugugucguugcaggccuuauucaagcuuaccaugggccagaucaucaccuucuuccaggaggugccccacgugaucgaggaggugaugaacaucgugcugaucgcccugagccugcuggccauccugaagggcaucuacaacguggccaccugcggccuguucggccugaucagcuuccugcugcugugcggcagaagcugcagcgugaccuacaagggcguguacgagcugcagacccuggagcugaacauggccaaccugaacaugugcaugccccugagcugcaccaagaacaacagccaccacuacaucauggugggcaacgagaccggccuggagcugacccugaccaacaccagcaucaucaaccacaaguucugcaaccugagcgacgcccacaagaagaaccuguacgaccacgcccugaugagcaucaucagcaccuuccaccugagcauccccaacuucaaccaguacgaggccaugagcugcgacuucaacggcggcaagaucagcgugcaguacaaccugagccacagcuucgccguggacgccgccaaccacugcggcaccaucgccaacggcgugcugcagaccuucaugagaauggccuggggcggcagcuacaucgcccuggacagcggcaagggcaacugggacugcaucaugaccagcuaccaguaccugaucauccagaacaccaccugggaggaccacugccaguucagcagacccagccccaucggcuaccugggccugcugagccagagaaccagagacaucuacaucagcagaagaagaagaggcaccuucaccuggacccugagcgacagcgagggcaacgaggcccccggcggcuacugccugaccagauggaugcugaucgaggccgagcugaagugcuucggcaacaccgccguggccaagugcaacgagaagcacgacgaggaguucugcgacaugcugagacuguucgacuucugcaagcaggccaucaagagacugaagacccccgcccagaugagcauccagcugaucaacaaggccgugaacgcccugaucaacgaccagcugaucaugaagaaccaccugagagacaucaugggcauccccuacugcaacuacagcagauacugcuaccugaaccacaccgugaccggcaagaccagccugcccagaugcugccuggugagcaacggcagcuaccugaacgagacccacuucagcgacgacaucgagcagcaggccgacaacaugaucaccgagaugcugcagaaggaguacauggacagacagggcaagaccccccugggccugguggaccuguucguguucagcaccagcuucuaccugaucagcaucuuccugcaccuggugaagauccccacccacagacacaucgugggcaagcccugccccaagccccacagacugaaccacaugggcaucugcagcugcggccuguacaagcaccccggcgugcccgugaaguggaagagaugaggacuaguaauaaggaaacuguaugaaugucugugggcaggaagugaagagauccuucuguaaagguuuuuggaauuaugucugcugaauaauaaacuuuuuugaaauaauaaaucugguagaaaaaugagaucucaaaggcucuuuucagagccaccaaaaaaaaaaaaaaaaaaaaaaaaaaaaaaaaaaaaaaaaaaaaaaaaaaaaaaaaaaaaaaaaaaaaaaaaaaaaaaaaaaaaaaaaaaaaaaaaaaaaa

SEQ ID NO: 27464 - RNA, 1809 nt, Artificial Sequence
  mRNA product Design b-4 (hSL-A100) comprising derived and/or modified sequence from LASV(GA391;Clade III)__CAA36645__GPCmut4 (opt4)
aggagagucccgcagucggcguccagcggcucugcuuguucgugugugugucguugcaggccuuauucaagcuuaccaugggccagaucgugaccuucuuccaggaggugccccacgugaucgaggaggugaugaacaucgugcugaucgcccugagcauccuggccauccugaagggccuguacaacguggccaccugcggccugaucggccuggugaccuuccugcugcugagcggcagaagcugcagccugaucuacaagggcaccuacgagcugcagacccuggagcugaacauggagacccugaacaugugcaugccccugagcugcaccaagaacaacagccaccacuacaucagagugggcaacgagaccggccuggagcugacccugaccaacaccagcauccugaaccacaaguucugcaaccugagcgacgcccacaagagaaaccuguacgaccacagccugaugagcaucaucagcaccuuccaccugagcauccccaacuucaaccaguacgaggccaugagcugcgacuucaacggcggcaagaucaccgugcaguacaaccugagccacagcuucgccguggacgccgccggccacugcggcacccuggccaacggcgugcugcagaccuucaugagaauggccuggggcggcagcuacaucgcccuggacagcggcagaggcaacugggacugcaucaugaccagcuaccaguaccugaucauccagaacaccaccugggacgaccacugccaguucagcagacccagccccaucggcuaccugggccugcugagccagagaaccagagacaucuacaucagcagaagaagaagaggcaccuucaccuggacccugagcgacagcgagggcaacgagacccccggcggcuacugccugaccagauggaugcugaucgaggccgagcugaagugcuucggcaacaccgccguggccaagugcaacgagaagcacgacgaggaguucugcgacaugcugagacuguucgacuucugcaagcaggccaucagaagacugaagacccccgcccagaugagcauccagcugaucaacaaggccgugaacgcccugaucaacgaccagcugaucaugaagaaccaccugagagacaucaugggcauccccuacugcaacuacagcagauacugcuaccugaaccacaccagcaccggcaagaccagccugcccagaugcugccugaucagcaacggcagcuaccugaacgagaccaaguucagcgacgacaucgagcagcaggccgacaacaugaucaccgagaugcugcagaaggaguacaucgacagacagggcaagaccccccugggccugguggaccuguucguguucagcaccagcuucuaccugaucagcaucuuccugcaccuggugaagauccccacccacagacacaucgugggcaagcccugccccaagccccacagacugaaccacaugggcaucugcagcugcggccuguacaagcagcccggcgugcccgugagauggaagagaugaggacuaguaauaaggaaacuguaugaaugucugugggcaggaagugaagagauccuucuguaaagguuuuuggaauuaugucugcugaauaauaaacuuuuuugaaauaauaaaucugguagaaaaaugagaucucaaaggcucuuuucagagccaccaaaaaaaaaaaaaaaaaaaaaaaaaaaaaaaaaaaaaaaaaaaaaaaaaaaaaaaaaaaaaaaaaaaaaaaaaaaaaaaaaaaaaaaaaaaaaaaaaaaaa

SEQ ID NO: 27465 - RNA, 1812 nt, Artificial Sequence
  mRNA product Design b-4 (hSL-A100) comprising derived and/or modified sequence from LASV(AV;Clade V)__CCA30314__GPCmut4 (opt4)
aggagagucccgcagucggcguccagcggcucugcuuguucgugugugugucguugcaggccuuauucaagcuuaccaugggccagaucgugaccuucuuccaggaggugccccacgugaucgaggaggugaugaacaucgugcugaucgcccugagcauccuggccgugcugaagggccuguacaacaucgccaccugcggccugaucggccugaucaccuuccugcugcugugcggcagaagcugcagcagcaaccuguacaagggcguguacgagcugcagagccuggaccugaacauggagacccugaacaugugcaugccccugagcugcaccaagaacaacagccaccacuacaucagagugggcaacgacaccggccuggagcugacccugaccaacaccagcauccugaaccacaaguucugcaaccugagcgacgcccacaagaaggaccuguacgaccacgcccugaugagcaucaucagcaccuuccaccugagcauccccaacuucaaccaguacgaggccaugagcugcgacuucaacggcggcaagaucagcgugcaguacaaccugagccacagcuacgccaucgacgccgccaaccacugcggcaccguggccaacggcauccugcagaccuucaugagaauggccuggggcggcagcuacaucgcccuggacagcggcagaggcaacugggacugcaucaugaccagcuaccaguaccugaucauccagaacaccaccugggagaaccacugccaguucagcagacccagccccaucggcuaccugggccugcugagccagagaaccagagacaucuacaucagcagaagaagaagaggcaccuucaccuggacccugagcgacagcgagggcaacgccacccccggcggcuacugccugaccagauggaugcugaucgaggccgagcugaagugcuucggcaacaccgccguggccaagugcaacgagaagcacgacgaggaguucugcgacaugcugagacuguucgacuucugcaagcaggccaucagcagacugaagagccccgcccagaugagcauccagcugaucaacaaggccgugaacgcccugaucaacgaccagcugaucaugaagaaccaccugagagacaucaugggcauccccuacugcaacuacagcaaguacugcuaccugaaccacaccaucaccggcaagaccagccugcccaagugcugccuggugagcaacggcagcuaccugaacgagacccacuucagcgacgacaucgagcagcaggccgacaacaugaucaccgagaugcugcagaaggaguacauggagagacagggcaagaccccccugggccugguggaccuguucguguucagcaccagcuucuaccugaucagcaucuuccugagacuggugaagauccccacccacagacacaucgugggcaagcccugccccaagccccacagacugaaccacaugggcaucugcagcugcggccuguacaagcagcccggcgugcccgugagauggaagagaugaggacuaguaauaaggaaacuguaugaaugucugugggcaggaagugaagagauccuucuguaaagguuuuuggaauuaugucugcugaauaauaaacuuuuuugaaauaauaaaucugguagaaaaaugagaucucaaaggcucuuuucagagccaccaaaaaaaaaaaaaaaaaaaaaaaaaaaaaaaaaaaaaaaaaaaaaaaaaaaaaaaaaaaaaaaaaaaaaaaaaaaaaaaaaaaaaaaaaaaaaaaaaaaaa

SEQ ID NO: 27466 - RNA, 1809 nt, Artificial Sequence
  mRNA product Design b-4 (hSL-A100) comprising derived and/or modified sequence from LASV(Togo/2016/7082;Clade VI)__AMR44577__GPCmut4 (opt4)
aggagagucccgcagucggcguccagcggcucugcuuguucgugugugugucguugcaggccuuauucaagcuuaccaugggccagaucaucaccuucuuccaggaggugccccacgugaucgaggaggugaugaacaucgugcugaucgcccugagccugcuggccauccugaagggcguguacaacguggccaccugcggcaucaucggccuggugaccuuccuguuccugugcggcagaagcugcagccugaucuacaagggcagcuacgagcugcagacccuggagcugaacauggagacccugaacaugugcaugccccugagcugcaccaagaacagcagccaccacuacaucagagugggcaacgagaccggccuggagcugacccugaccaacaccagcaucaucaaccacaaguucugcaaccugagcgacgcccacaagagaaaccuguacgaccacgcccugaugagcauccugagcaccuuccaccugagcauccccaacuucaaccaguacgaggccaugagcugcgacuucaacggcggcaagaucagcgugcaguacaaccugagccacgccuacgccguggacgccgccgagcacugcggcaccguggccaacggcgugcugcagaccuucaugagaauggccuggggcggcagcuacaucgcccuggacagcggcagaggcaacugggacugcaucaugaccagcuaccaguaccugaucauccagaacaccaccugggaggaccacugccaguucagcagacccagccccaucggcuaccugggccugcugagccagagaaccagagacaucuacaucagcagaagaagaagaggcaccuucaccuggacccugagcgacagcgagggcaacgagacccccggcggcuacugccugaccagauggaugcugaucgaggccgagcugaagugcuucggcaacaccgccguggccaagugcaacgagaagcacgacgaggaguucugcgacaugcugagacuguucgacuucugcaagcaggccauccagagacugaagagccccgcccagaugagcauccagcugaucaacaaggccgugaacgcccugaucaacgaccagcugaucaugaagaaccaccugagagacaugaugggcauccccuacugcaacuacagcaaguacugcuaccugaaccacaccagcagcggcagaaccagccugcccaagugcugccuggugagcaacggcagcuaccugaacgagacccacuucagcgacgacaucgagcagcaggccgacaacaugaucaccgagaugcugcagaaggaguacaucgacagacagggcaagaccccccugggccugguggaccuguucguguucagcaccagcuucuaccugaucagcaucuuccugcaccugaucaagauccccacccacagacacaucgugggcaagcccugccccaagccccacagacugaaccacaugggcaucugcagcugcggccuguacaagcagcccggcgugcccaccagauggaagagaugaggacuaguaauaaggaaacuguaugaaugucugugggcaggaagugaagagauccuucuguaaagguuuuuggaauuaugucugcugaauaauaaacuuuuuugaaauaauaaaucugguagaaaaaugagaucucaaaggcucuuuucagagccaccaaaaaaaaaaaaaaaaaaaaaaaaaaaaaaaaaaaaaaaaaaaaaaaaaaaaaaaaaaaaaaaaaaaaaaaaaaaaaaaaaaaaaaaaaaaaaaaaaaaaa

SEQ ID NO: 27467 - RNA, 1809 nt, Artificial Sequence
  mRNA product Design b-4 (hSL-A100) comprising derived and/or modified sequence from LASV(KAK-428;Clade n.d. (VII))__ANH09740__GPCmut4 (opt4)
aggagagucccgcagucggcguccagcggcucugcuuguucgugugugugucguugcaggccuuauucaagcuuaccaugggccagaucgugaccuucuuccaggaggugccccacgugaucgaggaggugaugaacaucgugcugaucgcccugagccugcuggccauccugaagggccuguacaacuucgccaccugcggcgugaucggccugaucaccuuccugcugcugugcggcagaagcugcagcgccaccuacaagggccaguacgagcugcagacccuggagcugaacauggagagccugaacaugugcaugccccugagcugcaccaagaacaacagccaccacuacaucagagccggcaacaacaccggccuggagcugacccugaccaacaccagcaucaucagccacaaguucugcaaccugagcgacgcccacaagaagaaccuguacgaccacacccugaugagcaucaucaccaccuuccaccugagcauccccaacuucaaccaguacgaggccaugagcugcgacuucaacggcggcaagaucagcauccaguacaaccugagccacagcuacgccggcgacgccgcccagcacugcggcaccguggccaacggcgugcugcagaccuucaugagaauggccuggggcggcagcuaccuggcccuggacagcggcagaagaggcugggacugcaucaucagcagcuaccaguaccugaucauccagaacaccaccugggacgaccacugccaguucagcagacccagccccaucggcuaccugggcuucgugagccagaagaccagagacaucuacaucagcagaagaagaagaggcaccuucaccuggacccugagcgacagcgagggccacgacaugcccggcggcuacugccugaccagauggaugcugaucgaggccgaccugaagugcuucggcaacaccgccguggccaagugcaacgagaagcacgacgaggaguucugcgacauguggagacuguucgacuucugcaagcaggccauccagagacugaaggcccccgcccagaugaacauccagcugaucaacaaggccgugaacgcccugaucaacgaccagcugaugaugaagaaccaccugagagacaucaugggcauccccuacugcaacuacagcaaguucugcuaccugaacaacaccaccaccggcagaaccagccugcccagaugcugccugaucagcaacggcagcuaccugaacgagacccacuucagcgacgacaucgagcagcaggccgacaacaugaucaccgagaugcugcagaaggaguacauggacagacagggcaagaccccccugggccugguggaccuguucguguucagcaccagcuucuaccugaucaccaucuuccugcaccuggugaagauccccacccacagacacaucgugggcaagcccugccccaagccccacagacugaaccacaugggcaucugcagcugcggccuguacaagcagcccggcgugcccgugagauggaagagaugaggacuaguaauaaggaaacuguaugaaugucugugggcaggaagugaagagauccuucuguaaagguuuuuggaauuaugucugcugaauaauaaacuuuuuugaaauaauaaaucugguagaaaaaugagaucucaaaggcucuuuucagagccaccaaaaaaaaaaaaaaaaaaaaaaaaaaaaaaaaaaaaaaaaaaaaaaaaaaaaaaaaaaaaaaaaaaaaaaaaaaaaaaaaaaaaaaaaaaaaaaaaaaaaa

SEQ ID NO: 27468 - RNA, 1809 nt, Artificial Sequence; identical to SEQ ID NO: 27462
  mRNA product Design b-4 (hSL-A100) comprising derived and/or modified sequence from LASV(Pinneo-NIG-1969;Clade I)__AIT17836__GPCmut4 (opt4)

SEQ ID NO: 27469 - RNA, 1809 nt, Artificial Sequence
  mRNA product Design b-4 (hSL-A100) comprising derived and/or modified sequence from LASV(ISTH0009-NIG-2011;Clade II)__AIT17404__GPCmut4 (opt4)
aggagagucccgcagucggcguccagcggcucugcuuguucgugugugugucguugcaggccuuauucaagcuuaccaugggccagaucaucaccuucuuccaggaggugccccacgugaucgaggaggugaugaacaucgugcugaucgcccugagccugcuggccauccugaagggcaucuacaacguggccaccugcggccuguucggccuggugagcuuccugcugcugugcggcagaagcugcagcaccaccuacaagggcguguacgagcugcagacccuggagcuggacauggccagccugaacaugugcaugccccugagcugcaccaagaacaacagccaccacuacaucauggugggcaacgagaccggccuggagcugacccugaccaacaccagcaucaucaaccacaaguucugcaaccugagcgacgcccacaagaagaaccuguacgaccacgcccugaugagcaucaucagcaccuuccaccugagcauccccaacuucaaccaguacgaggccaugagcugcgacuucaacggcggcaagaucagcgugcaguacaaccugagccacgccuacgccguggacgccgccaaccacugcggcaccaucgccaacggcgugcugcagaccuucaugagaauggccuggggcggcagcuacaucgcccuggacagcggcaagggcagcugggacugcaucaugaccagcuaccaguaccugaucauccagaacaccaccugggaggaccacugccaguucagcagacccagccccaucggcuaccugggccugcugagccagagaaccagagacaucuacaucagcagaagaagaagaggcaccuucaccuggacccugagcgacagcgagggcaacgagacccccggcggcuacugccugaccagauggaugcugaucgaggccgagcugaagugcuucggcaacaccgccguggccaagugcaacgagaagcacgacgaggaguucugcgacaugcugagacuguucgacuucugcaagcaggccaucagaagacugaagacccccgcccagaugagcauccagcugaucaacaaggccgugaacgcccugaucaacgaccagcugaucaugaagaaccaccugagagacaucaugggcauccccuacugcaacuacagcaaguacugcuaccugaaccacaccgugaccggcaagaccagccugcccagaugcugccuggugagcaacggcagcuaccugaacgagacccacuucagcgacgacaucgagcagcaggccgacaacaugaucaccgagcugcugcagaaggaguacauggacagacagggcaagaccccccugggccugguggaccuguucguguucagcaccagcuucuaccugaucagcaucuuccugcaccugaucaagauccccacccacagacacaucaccggcaagcccugccccaagccccacagacugaaccacaugggcaucugcagcugcggccuguacaagcaccccggcgugcccgugaaguggaagagaugaggacuaguaauaaggaaacuguaugaaugucugugggcaggaagugaagagauccuucuguaaagguuuuuggaauuaugucugcugaauaauaaacuuuuuugaaauaauaaaucugguagaaaaaugagaucucaaaggcucuuuucagagccaccaaaaaaaaaaaaaaaaaaaaaaaaaaaaaaaaaaaaaaaaaaaaaaaaaaaaaaaaaaaaaaaaaaaaaaaaaaaaaaaaaaaaaaaaaaaaaaaaaaaaa

SEQ ID NO: 27470 - RNA, 1809 nt, Artificial Sequence
  mRNA product Design b-4 (hSL-A100) comprising derived and/or modified sequence from LASV(ISTH2010-NIG-2012;Clade II)__AIT17482__GPCmut4 (opt4)
aggagagucccgcagucggcguccagcggcucugcuuguucgugugugugucguugcaggccuuauucaagcuuaccaugggccagaucaucaccuucuuccaggaggugccccacgugaucgaggaggugaugaacaucgugcugaucgcccugagccugcuggccauccugaagggcaucuacaacguggccaccugcggccuguucggccuggugagcuuccugcugcugugcggcagaagcugcagcaccaccuacaagggcguguacgagcugcagacccuggagcuggacauggccagccugaacaugugcaugccccugagcugcaccaagaacaacagccaccacuacaucauggugggcaacgagaccggccuggagcugacccugaccaacaccagcaucaucaaccacaaguucugcaaccugagcgacgcccacaagaagaaccuguacgaccacgcccugaugagcaucaucagcaccuuccaccugagcauccccaacuucaaccaguacgaggccaugagcugcgacuucaacggcggcaagaucagcgugcaguacaaccugagccacgccuacgccguggacgccgccaaccacugcggcaccaucgccaacggcgugcugcagaccuucaugagaauggccuggggcggcagcuacaucgcccuggacagcggcaagggcagcugggacugcaucaugaccagcuaccaguaccugaucauccagaacaucaccugggaggaccacugccaguucagcagacccagccccaucggcuaccugggccugcugagccagagaaccagagacaucuacaucagcagaagaagaagaggcaccuucaccuggacccugagcgacagcgagggcaacgagacccccggcggcuacugccugaccagauggaugcugaucgaggccgagcugaagugcuucggcaacaccgccguggccaagugcaacgagaagcacgacgaggaguucugcgacaugcugagacuguucgacuucugcaagcaggccaucagaagacugaagacccccgcccagaugagcauccagcugaucaacaaggccgugaacgcccugaucaacgaccagcugaucaugaagaaccaccugagagacaucaugggcauccccuacugcaacuacagcaaguacugcuaccugaaccacaccgugaccggcaagaccagccugcccagaugcugccuggugagcaacggcagcuaccugaacgagacccacuucagcgacgacaucgagcagcaggccgacaacaugaucaccgagcugcugcagaaggaguacaucgacagacagggcaagaccccccugggccugguggaccuguucguguucagcaccagcuucuaccugaucagcaucuuccugcaccuggugaagauccccacccacagacacguggugggcaagcccugccccaagccccacagacugaaccacaugggcaucugcagcugcggccuguacaagcaccccggcgugcccgugaaguggaagagaugaggacuaguaauaaggaaacuguaugaaugucugugggcaggaagugaagagauccuucuguaaagguuuuuggaauuaugucugcugaauaauaaacuuuuuugaaauaauaaaucugguagaaaaaugagaucucaaaggcucuuuucagagccaccaaaaaaaaaaaaaaaaaaaaaaaaaaaaaaaaaaaaaaaaaaaaaaaaaaaaaaaaaaaaaaaaaaaaaaaaaaaaaaaaaaaaaaaaaaaaaaaaaaaaa

SEQ ID NO: 27471 - RNA, 1809 nt, Artificial Sequence
  mRNA product Design b-4 (hSL-A100) comprising derived and/or modified sequence from LASV(Lassa virus/H.sapiens-wt/NGA/2015/ISTH_0543;Clade II)__AVO03639__GPCmut4 (opt4)
aggagagucccgcagucggcguccagcggcucugcuuguucgugugugugucguugcaggccuuauucaagcuuaccaugggccagaucaucaccuucuuccaggaggugccccacgugaucgaggaggugaugaacaucgugcugaucgcccugagccugcuggccauccugaagggcaucuacaacguggccaccugcggccuguucggccuggugagcuuccugcugcugugcggcagaagcugcagcaccaccuacaagggcguguacgagcugcagacccuggagcuggacauggccaaccugaacaugugcaugccccugagcugcaccaagaacaacagccaccacuacaucauggugggcaacgagaccggccuggagcugacccugaccaacaccagcaucaucaaccacaaguucugcaaccugagcgacgcccacaagaagaaccuguacgaccacgcccugaugagcaucaucagcaccuuccaccugagcauccccaacuucaaccaguacgaggccaugagcugcgacuucaacggcggcaagaucagcgugcaguacaaccugagccacaccuacgccguggacgccgccaaccacugcggcaccaucgccaacggcgugcugcagaccuucaugagaauggccuggggcggcagcuacaucgcccuggacagcggcaagggcagcugggacugcaucaugaccagcuaccaguaccuggugauccagaacaccaccugggaggaccacugccaguucagcagacccagccccaucggcuaccugggccugcugagccagagaaccagagacaucuacaucagcagaagaagaagaggcaccuucaccuggacccugagcgacagcgagggcaacgagacccccggcggcuacugccugaccagauggaugcugaucgaggccgagcugaagugcuucggcaacaccgccguggccaagugcaacgagaagcacgacgaggaguucugcgacaugcugagacuguucgacuucugcaagcaggccaucagaagacugaagacccccgcccagaugagcauccagcugaucaacaaggccgugaacgcccugaucaacgaccagcugaucaugaagaaccaccugagagacaucaugggcauccccuacugcaacuacagcaaguacugcuaccugaaccacaccgugaccggcaagaccagccugcccagaugcugccuggugagcaacggcagcuaccugaacgagacccacuucagcgacgacaucgagcagcaggccgacaacaugaucaccgagcugcugcagaaggaguacaucgacagacagggcaagaccccccugggccugguggaccuguucguguucagcaccagcuucuaccugaucagcaucuuccugcaccuggugaagauccccacccacagacacaucaccggcaagcccugccccaagccccacagacugaaccacaugggcaucugcagcugcggccuguacaagcaccccggcgugcccgugaaguggaagagaugaggacuaguaauaaggaaacuguaugaaugucugugggcaggaagugaagagauccuucuguaaagguuuuuggaauuaugucugcugaauaauaaacuuuuuugaaauaauaaaucugguagaaaaaugagaucucaaaggcucuuuucagagccaccaaaaaaaaaaaaaaaaaaaaaaaaaaaaaaaaaaaaaaaaaaaaaaaaaaaaaaaaaaaaaaaaaaaaaaaaaaaaaaaaaaaaaaaaaaaaaaaaaaaaa

SEQ ID NO: 27472 - RNA, 1809 nt, Artificial Sequence
  mRNA product Design b-4 (hSL-A100) comprising derived and/or modified sequence from LASV(Lassa virus/H.sapiens-wt/NGA/2016/ISTH_0009;Clade II)__AVO03571__GPCmut4 (opt4)
aggagagucccgcagucggcguccagcggcucugcuuguucgugugugugucguugcaggccuuauucaagcuuaccaugggccagaucaucaccuucuuccaggaggugccccacgugaucgaggaggugaugaacaucgugcugaucgcccugagccugcuggccauccugaagggcaucuacaacguggccaccugcggccugcugggccuggugagcuuccugcugcugugcggcagaagcugcagcaccaccuacaagggcguguacgagcugcagacccuggagcuggacauggccagccugaacaugugcaugccccugagcugcaccaagaacaacagccaccacuacaucauggugggcaacgagaccggccuggagcugacccugaccaacaccagcaucaucaaccacaaguucugcaaccugagcgacgcccacaagaagaaccuguacgaccacgcccugaugagcaucaucagcaccuuccaccugagcauccccaacuucaaccaguacgaggccaugagcugcgacuucaacggcggcagaaucagcgugcaguacaaccugagccacagcuacgccguggacgccgccaaccacugcggcaccaucgccaacggcgugcugcagaccuucaugagaauggccuggggcggcagcuacaucgcccuggacagcggcaagggcagcugggacugcaucaugaccagcuaccaguaccugaucauccagaacaccaccugggaggaccacugccaguucagcagacccagccccaucggcuaccugggccugcugagccagagaaccagagacaucuacaucagcagaagaagaagaggcaccuucaccuggacccugagcgacagcgagggcaacgagacccccggcggcuacugccugaccagauggaugcugaucgaggccgagcugaagugcuucggcaacaccgccguggccaagugcaacgagaagcacgacgaggaguucugcgacaugcugagacuguucgacuucugcaagcaggccaucagaagacugaagacccccgcccagaugagcauccagcugaucaacaaggccgugaacgcccugaucaacgaccagcugaucaugaagaaccaccugagagacaucaugggcauccccuacugcaacuacagcaaguacugcuaccugaaccacaccgugaccggcaagaccagccugcccagaugcugccuggugagcaacggcagcuaccugaacgagacccacuucagcgacgacaucgagcagcaggccgacaacaugaucaccgagcugcugcagaaggaguacaucgacagacagggcaagaccccccugggccugguggaccuguucguguucagcaccagcuucuaccugaucagcaucuuccugcaccuggugaagauccccacccacagacacaucaccggcaagcccugccccaagccccacagacugaaccacaugggcaucugcagcugcggccuguacaaccaccccggcgugcccgugaaguggaagagaugaggacuaguaauaaggaaacuguaugaaugucugugggcaggaagugaagagauccuucuguaaagguuuuuggaauuaugucugcugaauaauaaacuuuuuugaaauaauaaaucugguagaaaaaugagaucucaaaggcucuuuucagagccaccaaaaaaaaaaaaaaaaaaaaaaaaaaaaaaaaaaaaaaaaaaaaaaaaaaaaaaaaaaaaaaaaaaaaaaaaaaaaaaaaaaaaaaaaaaaaaaaaaaaaa

SEQ ID NO: 27473 - RNA, 1809 nt, Artificial Sequence
  mRNA product Design b-4 (hSL-A100) comprising derived and/or modified sequence from LASV(Lassa virus/H.sapiens-wt/NGA/2016/ISTH_0017;Clade II)__AVO03567__GPCmut4 (opt4)
aggagagucccgcagucggcguccagcggcucugcuuguucgugugugugucguugcaggccuuauucaagcuuaccaugggccagaucaucaccuucuuccaggaggugccccacgugaucgaggaggugaugaacaucgugcugaucgcccugagccugcuggccauccugaagggcaucuacaacguggccaccugcggccuguucggccuggugagcuuccugcugcugugcggcagaagcugcagcaccaccuacaagggcguguacgagcugcagacccuggagcuggacauggccagccugaacaugugcaugccccugagcugcaccaagaacaacagccaccacuacaucauggugggcaacgagaccggccuggagcugacccugaccaacaccagcaucaucaaccacaaguucugcaaccugagcgacgcccacaagaagaaccuguacgaccacgcccugaugagcaucaucagcaccuuccaccugagcauccccaacuucaaccaguacgaggccaugagcugcgacuucaacggcggcaagaucagcgugcaguacaaccugagccacaccuacgccaucgacgccgccaaccacugcggcaccaucgccaacggcgugcugcagaccuucaugagaauggccuggggcggcagcuacaucgcccuggacagcggcaagggcagcugggacugcaucaugaccagcuaccaguaccugaucauccagaacaccaccugggaggaccacugccaguucagcagacccagccccaucggcuaccugggccugcugagccagagaaccagagacaucuacaucagcagaagaagaagaggcaccuucaccuggacccugagcgacagcgagggcaacgagacccccggcggcuacugccugaccagauggaugcugaucgaggccgagcugaagugcuucggcaacaccgccguggccaagugcaacgagaagcacgacgaggaguucugcgacaugcugagacuguucgacuucugcaagcaggccaucagaagacugaagacccccgcccagaugagcauccagcugaucaacaaggccgugaacgcccugaucaacgaccagcugaucaugaagaaccaccugagagacaucaugggcauccccuacugcaacuacagcaaguacugcuaccugaaccacaccgugaccggcaagaccagccugcccagaugcugccuggugagcaacggcagcuaccugaacgagacccacuucagcgacgacaucgagcagcaggccgacaacaugaucaccgagcugcugcagaaggaguacauggacagacagggcaagaccccccugggccugguggaccuguucguguucagcaccagcuucuaccugaucagcaucuuccugcaccuggugagaauccccacccacagacacgugaucggcaagcccugccccaagccccacagacugaaccacaugggcaucugcagcugcggccuguacaagcaccccggcgugcccgugaaguggaagagaugaggacuaguaauaaggaaacuguaugaaugucugugggcaggaagugaagagauccuucuguaaagguuuuuggaauuaugucugcugaauaauaaacuuuuuugaaauaauaaaucugguagaaaaaugagaucucaaaggcucuuuucagagccaccaaaaaaaaaaaaaaaaaaaaaaaaaaaaaaaaaaaaaaaaaaaaaaaaaaaaaaaaaaaaaaaaaaaaaaaaaaaaaaaaaaaaaaaaaaaaaaaaaaaaa

SEQ ID NO: 27474 - RNA, 1809 nt, Artificial Sequence
  mRNA product Design b-4 (hSL-A100) comprising derived and/or modified sequence from LASV(Lassa virus/H.sapiens-wt/NGA/2018/ISTH_0959;Clade II)__AVV65099__GPCmut4 (opt4)
aggagagucccgcagucggcguccagcggcucugcuuguucgugugugugucguugcaggccuuauucaagcuuaccaugggccagaucaucaccuucuuccaggaggugccccacgugaucgaggaggugaugaacaucgugcugaucgcccugagccugcuggccauccugaagggcaucuacaacguggugaccugcggccuguucggccuggugagcuuccugcugcugugcggcagaagcugcagcaccaccuacaagggcguguacgagcugcagacccuggagcuggacauggccagccugaacaugugcaugccccugagcugcaccaagaacaacagccaccacuacaucauggugggcaacgagaccggccuggagcugacccugaccaacaccagcaucaucaaccacaaguucugcaaccugagcgacgcccacaagaagaaccuguacgaccacgcccugaugagcaucaucagcaccuuccaccugagcauccccaacuucaaccaguacgaggccaugagcugcgacuucaacggcggcaagaucagcgugcaguacaaccugagccacgccuacgccaucgacgccgccaaccacugcggcaccaucgccaacggcgugcugcagaccuucaugagaauggccuggggcggcagcuacaucgcccuggacagcggcaagggcagcugggacugcaucaugaccagcuaccaguaccugaucauccagaacaccaccugggaggaccacugccaguucagcagacccagccccaucggcuaccugggccugcugagccagagaaccagagacaucuacaucagcagaagaagaagaggcaccuucaccuggacccugagcgacagcgagggcaacgagacccccggcggcuacugccugaccagauggaugcugaucgaggccgagcugaagugcuucggcaacaccgccguggccaagugcaacgagaagcacgacgaggaguucugcgacaugcugagacuguucgacuucugcaagcaggccaucagaagacugaagacccccgcccagaugagcauccagcugaucaacaaggccgugaacgcccugaucaacgaccagcugaucaugaagaaccaccugagagacaucaugggcauccccuacugcaacuacagcaaguacugcuaccugaaccacaccgugaccggcaagaccagccugcccagaugcugccuggugagcaacggcagcuaccugaacgagacccacuucagcgacgacaucgagcagcaggccgacaacaugaucaccgagcugcugcagaaggaguacaucgacagacagggcaagaccccccugggccugguggaccuguucguguucagcaccagcuucuaccugaucagcaucuuccugcaccuggugaagauccccacccacagacacgugaucggcaagcccugccccaagccccacagacugaaccacaugggcaucugcagcugcggccuguacaagcaccccggcgugcccgugaaguggaagagaugaggacuaguaauaaggaaacuguaugaaugucugugggcaggaagugaagagauccuucuguaaagguuuuuggaauuaugucugcugaauaauaaacuuuuuugaaauaauaaaucugguagaaaaaugagaucucaaaggcucuuuucagagccaccaaaaaaaaaaaaaaaaaaaaaaaaaaaaaaaaaaaaaaaaaaaaaaaaaaaaaaaaaaaaaaaaaaaaaaaaaaaaaaaaaaaaaaaaaaaaaaaaaaaaa

SEQ ID NO: 27475 - RNA, 1809 nt, Artificial Sequence
  mRNA product Design b-4 (hSL-A100) comprising derived and/or modified sequence from LASV(LASV003-NIG-2008;Clade II)__AIT17580__GPCmut4 (opt4)
aggagagucccgcagucggcguccagcggcucugcuuguucgugugugugucguugcaggccuuauucaagcuuaccaugggccagaucaucaccuucuuccaggaggugccccacgugaucgaggaggugaugaacaucgugcugaucgcccugagccugcuggccauccugaagggcaucuacaacguggccaccugcggccuguucggccuggugagcuuccugcugcugugcggcagaagcugcagcaccaccuacaagggcguguacgagcugcagacccuggagcuggacauggccagccugaacaugugcaugccccugagcugcaccaagaacaacagccaccacuacaucauggugggcaacgagaccggccuggagcugacccugaccaacaccagcaucaucaaccacaaguucugcaaccugagcgacgcccacaagaagaaccuguacgaccacgcccugaugagcaucaucagcaccuuccaccugagcauccccaacuucaaccaguacgaggccaugagcugcgacuucaacggcggcaagaucagcgugcaguacaaccugagccacaccuacgccguggacgccgccaaccacugcggcaccaucgccaacggcgugcugcagaccuucaugagaauggccuggggcggcagcuacaucgcccuggacagcggcaagggcagcugggacugcaucaugaccagcuaccaguaccugaucauccagaacaccaccugggaggaccacugccaguucagcagacccagccccaucggcuaccugggccugcugagccagagaaccagagacaucuacaucagcagaagaagaagaggcaccuucaccuggacccugagcgacagcgagagcaacgagacccccggcggcuacugccugaccagauggaugcugaucgaggccgagcugaagugcuucggcaacaccgccguggccaagugcaacgagaagcacgacgaggaguucugcgacaugcugagacuguucgacuucugcaagcaggccaucagaagacugaaggcccccgcccagaugagcauccagcugaucaacaaggccgugaacgcccugaucaacgaccagcugaucaugaagaaccaccugagagacaucaugggcauccccuacugcaacuacagcaaguacugcuaccugaaccacaccgugaccggcagaaccagccugcccagaugcugccuggugagcaacggcagcuaccugaacgagacccacuucagcgacgacaucgagcagcaggccgacaacaugaucaccgagcugcugcagaaggaguacauggacagacagggcaagaccccccugggccugguggaccuguucguguucagcaccagcuucuaccugaucagcaucuuccugcaccuggugaagauccccacccacagacacgugaucggcaagcccugccccaagccccacagacugaaccacaugggcaucugcagcugcggccuguacaagcaccccggcgugcccgugaaguggaagagaugaggacuaguaauaaggaaacuguaugaaugucugugggcaggaagugaagagauccuucuguaaagguuuuuggaauuaugucugcugaauaauaaacuuuuuugaaauaauaaaucugguagaaaaaugagaucucaaaggcucuuuucagagccaccaaaaaaaaaaaaaaaaaaaaaaaaaaaaaaaaaaaaaaaaaaaaaaaaaaaaaaaaaaaaaaaaaaaaaaaaaaaaaaaaaaaaaaaaaaaaaaaaaaaaa

SEQ ID NO: 27476 - RNA, 1809 nt, Artificial Sequence
  mRNA product Design b-4 (hSL-A100) comprising derived and/or modified sequence from LASV(LASV035-NIG-2009;Clade II)__AIT17588__GPCmut4 (opt4)
aggagagucccgcagucggcguccagcggcucugcuuguucgugugugugucguugcaggccuuauucaagcuuaccaugggccagaucaucaccuucuuccaggaggugccccacgugaucgaggaggugaugaacaucgugcugaucgcccugagccugcuggccauccugaagggcaucuacaacguggccaccugcggccuguucggccuggugagcuuccugcugcugugcggcagaagcugcagcaccaccuacaagggcguguacgagcugcagacccuggagcuggacauggccagccugaacaugugcaugccccugagcugcaccaagaacaacagccaccacuacaucauggugggcaacgagaccggccuggagcugacccugaccaacaccagcaucaucaaccacaaguucugcaaccugagcgacgcccacaagaagaaccuguacgaccacgcccugaugagcaucaucagcaccuuccaccugagcauccccaacuucaaccaguacgaggccaugagcugcgacuucaacggcggcaagaucagcgugcaguacaaccugagccacgccuacgccguggacgccgccaaccacugcggcaccaucgccaacggcgugcugcagaccuucaugagaauggccuggggcggcagcuacaucgcccuggacagcggcaagggcagcugggacugcaucaugaccagcuaccaguaccugaucauccagaacaccaccugggaggaccacugccaguucagcagacccagccccaucggcuaccugggccugcugagccagagaaccagagacaucuacaucagcagaagaagaagaggcaccuucaccuggacccugagcgacagcgagggcaacgagacccccggcggcuacugccugaccagauggaugcugaucgaggccgagcugaagugcuucggcaacaccgccguggccaagugcaacgagaagcacgacgaggaguucugcgacaugcugagacuguucgacuucugcaagcaggccaucagaagacugaaggcccccgcccagaugagcauccagcugaucaacaaggccgugaacgcccugaucaacgaccagcugaucaugaagaaccaccugagagacaucaugggcauccccuacugcaacuacagcaaguacugcuaccugaaccacaccgugaccggcaagaccagccugcccagaugcugccuggugagcaacggcagcuaccugaacgagacccacuucagcgacgacaucgagcagcaggccgacaacaugaucaccgagcugcugcagaaggaguacaucgacagacagggcaagaccccccugggccugguggaccuguucguguucagcaccagcuucuaccugaucagcaucuuccugcaccuggugaagauccccacccacagacacgugaucggcaagcccugccccaagccccacagacugaaccacaugggcaucugcagcugcggccuguacaagcaccccggcgugcccgugaaguggaagagaugaggacuaguaauaaggaaacuguaugaaugucugugggcaggaagugaagagauccuucuguaaagguuuuuggaauuaugucugcugaauaauaaacuuuuuugaaauaauaaaucugguagaaaaaugagaucucaaaggcucuuuucagagccaccaaaaaaaaaaaaaaaaaaaaaaaaaaaaaaaaaaaaaaaaaaaaaaaaaaaaaaaaaaaaaaaaaaaaaaaaaaaaaaaaaaaaaaaaaaaaaaaaaaaaa

SEQ ID NO: 27477 - RNA, 1809 nt, Artificial Sequence
  mRNA product Design b-4 (hSL-A100) comprising derived and/or modified sequence from LASV(LASV1000-NIG-2009;Clade II)__AIT17782__GPCmut4 (opt4)
aggagagucccgcagucggcguccagcggcucugcuuguucgugugugugucguugcaggccuuauucaagcuuaccaugggccagaucaucaccuucuuccaggaggugccccacgugaucgaggaggugaugaacaucgugcugaucgcccugagccugcuggccauccugaagggcaucuacaacguggccaccugcggccuguucggccuggugagcuuccugcugcugugcggcagaagcugcagcaccaccuacaagggcguguacgagcugcagacccuggagcuggacauggccagccugaacaugugcaugccccugagcugcaccaagaacaacagccaccacuacaucauggugggcaacgagaccggccuggagcugacccugaccaacaccagcaucaucaaccacaaguucugcaaccugagcgacgcccacaagaagaaccuguacgaccacgcccugaugagcaucaucagcaccuuccaccugagcauccccaacuucaaccaguacgaggccaugagcugcgacuucaacggcggcaagaucagcgugcaguacaaccugagccacaccuacgccguggacgccgccaaccacugcggcaccaucgccaacggcgugcugcagaccuucaugagaauggccuggggcggcagcuacaucgcccuggacagcggcaagggcagcugggacugcaucaugaccagcuaccaguaccugaucauccagaacaccaccugggaggaccacugccaguucagcagacccagccccaucggcuaccugggccugcugagccagagaaccagagacaucuacaucagcagaagaagaagaggcaccuucaccuggacccugagcgacagcgagggcaacgagacccccggcggcuacugccugaccagauggaugcugaucgaggccgagcugaagugcuucggcaacaccgccguggccaagugcaacgagaagcacgacgaggaguucugcgacaugcugagacuguucgacuucugcaagcaggccaucaagagacugaagacccccgcccagaugagcauccagcugaucaacaaggccgugaacgcccugaucaacgaccagcugaucaugaagaaccaccugagagacaucaugggcauccccuacugcaacuacagcaaguacugcuaccugaaccacaccgugaccggcaagaccagccugcccagaugcugccuggugagcaacggcagcuaccugaacgagacccacuucagcgacgacaucgagcagcaggccgacaacaugaucaccgagcugcugcagaaggaguacaucgacagacagggcaagaccccccugggccugguggaccuguucguguucagcaccagcuucuaccugaucagcaucuuccugcaccuggugaagauccccacccacagacacguggugggcaagcccugccccaagccccacagacugaaccacaugggcaucugcagcugcggccuguacaagcaccccggcgugcccgugaaguggaagagaugaggacuaguaauaaggaaacuguaugaaugucugugggcaggaagugaagagauccuucuguaaagguuuuuggaauuaugucugcugaauaauaaacuuuuuugaaauaauaaaucugguagaaaaaugagaucucaaaggcucuuuucagagccaccaaaaaaaaaaaaaaaaaaaaaaaaaaaaaaaaaaaaaaaaaaaaaaaaaaaaaaaaaaaaaaaaaaaaaaaaaaaaaaaaaaaaaaaaaaaaaaaaaaaaa

SEQ ID NO: 27478 - RNA, 1809 nt, Artificial Sequence
  mRNA product Design b-4 (hSL-A100) comprising derived and/or modified sequence from LASV(LASV221-NIG-2010;Clade II)__AIT17624__GPCmut4 (opt4)
aggagagucccgcagucggcguccagcggcucugcuuguucgugugugugucguugcaggccuuauucaagcuuaccaugggccagaucaucaccuucuuccaggaggugccccacgugaucgaggaggugaugaacaucgugcugaucgcccugagccugcuggccauccugaagggcaucuacaacguggccaccugcggccuguucggccuggugagcuuccugcugcugugcggcagaagcugcagcaccaccuacaagggcguguacgagcugcagacccuggagcuggacauggccagccugaacaugugcaugccccugagcugcaccaagaacaacagccaccacuacaucauggugggcaacgagaccggccuggagcugacccugaccaacaccagcaucaucaaccacaaguucugcaaccugagcgacgcccacaagaagaaccuguacgaccacgcccugaugagcaucaucagcaccuuccaccugagcauccccaacuucaaccaguacgaggccaugagcugcgacuucaacggcggcaagaucagcgugcaguacaaccugagccacaccuacgccaucgacgccgccaaccacugcggcaccaucgccaacggcgugcugcagaccuucaugagaauggccuggggcggcagcuacaucgcccuggacagcggcaagggcagcugggacugcaucaugaccagcuaccaguaccugaucauccagaacaccaccugggaggaccacugccaguucagcagacccagccccaucggcuaccugggccugcugagccagagaaccagagacaucuacaucagcagaagaagaagaggcaccuucaccuggacccugagcgacagcgagggcaacgagacccccggcggcuacugccugaccagauggaugcugaucgaggccgagcugaagugcuucggcaacaccgccguggccaagugcaacgagaagcacgacgaggaguucugcgacaugcugagacuguucgacuucugcaagcaggccaucagaagacugaagacccccgcccagaugagcauccagcugaucaacaaggccgugaacgcccugaucaacgaccagcugaucaugaagaaccaccugagagacaucaugggcauccccuacugcaacuacagcaaguacugcuaccugaaccacaccgugaccggcaagaccagccugcccagaugcugccuggugagcaacggcagcuaccugaacgagacccacuucagcgacgacaucgagcagcaggccgacaacaugaucaccgagaugcugcagaaggaguacauggacagacagggcaagaccccccugggccugguggaccuguucguguucagcaccagcuucuaccugaucagcaucuuccugcaccuggugaagauccccacccacagacacgugaucggcaagcccugccccaagccccacagacugaaccacaugggcaucugcagcugcggccuguacaagcaccccggcgugcccgugaaguggaagagaugaggacuaguaauaaggaaacuguaugaaugucugugggcaggaagugaagagauccuucuguaaagguuuuuggaauuaugucugcugaauaauaaacuuuuuugaaauaauaaaucugguagaaaaaugagaucucaaaggcucuuuucagagccaccaaaaaaaaaaaaaaaaaaaaaaaaaaaaaaaaaaaaaaaaaaaaaaaaaaaaaaaaaaaaaaaaaaaaaaaaaaaaaaaaaaaaaaaaaaaaaaaaaaaaa

SEQ ID NO: 27479 - RNA, 1809 nt, Artificial Sequence
  mRNA product Design b-4 (hSL-A100) comprising derived and/or modified sequence from LASV(LASV237-NIG-2010;Clade II)__AIT17638__GPCmut4 (opt4)
aggagagucccgcagucggcguccagcggcucugcuuguucgugugugugucguugcaggccuuauucaagcuuaccaugggccagaucaucaccuucuuccaggaggugccccacgugaucgaggaggugaugaacaucgugcugaucgcccugagccugcuggccauccugaagggcaucuacaacguggccaccugcggccuguucggccuggugagcuuccugcugcugugcggcagaagcugcagcaccaccuacaagggcguguacgagcugcagacccuggagcuggacauggccagccugaacaugugcaugccccugagcugcaccaagaacaacagccaccacuacaucauggugggcaacgagaccggccuggagcugacccugaccaacaccagcaucaucaaccacaaguucugcaaccugagcgacgcccacaagaaggaccuguacgaccacgcccugaugagcaucaucagcaccuuccaccugagcauccccaacuucaaccaguacgaggccaugagcugcgacuucaacggcggcaagaucagcgugcaguacaaccugagccacaccuacgccguggacgccgccaaccacugcggcaccaucgccaacggcgugcugcagaccuucaugagaauggccuggggcggcagcuacaucgcccuggacagcggcaagggcagcugggacugcaucaugaccagcuaccaguaccugaucauccagaacaccaccugggaggaccacugccaguucagcagacccagccccaucggcuaccugggccugcugagccagagaaccagagacaucuacaucagcagaagaagaagaggcaccuucaccuggacccugagcgacagcgagggcaacgagacccccggcggcuacugccugaccagauggaugcugaucgaggccgagcugaagugcuucggcaacaccgccguggccaagugcaacgagaagcacgacgaggaguucugcgacaugcugagacuguucgacuucugcaagcaggccaucagaagacugaagacccccgcccagaugagcauccagcugaucaacaaggccgugaacgcccugaucaacgaccagcugaucaugaagaaccaccugagagacaucaugggcauccccuacugcaacuacagcaaguacugcuaccugaaccacaccgugaccggcaagaccagccugcccagaugcugccuggugagcaacggcagcuaccugaacgagacccacuucagcgacgacaucgagcagcaggccgacaacaugaucaccgagcugcugcagaaggaguacauggacagacagggcaagaccccccugggccugguggaccuguucguguucagcaccagcuucuaccugaucagcaucuuccugcaccugaucaagauccccacccacagacacaucaccggcaagcccugccccaagccccacagacugaaccacaugggcaucugcagcugcggccuguacaagcaccccggcgugcccgugaaguggaagagaugaggacuaguaauaaggaaacuguaugaaugucugugggcaggaagugaagagauccuucuguaaagguuuuuggaauuaugucugcugaauaauaaacuuuuuugaaauaauaaaucugguagaaaaaugagaucucaaaggcucuuuucagagccaccaaaaaaaaaaaaaaaaaaaaaaaaaaaaaaaaaaaaaaaaaaaaaaaaaaaaaaaaaaaaaaaaaaaaaaaaaaaaaaaaaaaaaaaaaaaaaaaaaaaaa

SEQ ID NO: 27480 - RNA, 1809 nt, Artificial Sequence
  mRNA product Design b-4 (hSL-A100) comprising derived and/or modified sequence from LASV(LASV253-NIG-2011;Clade II)__AIT17670__GPCmut4 (opt4)
aggagagucccgcagucggcguccagcggcucugcuuguucgugugugugucguugcaggccuuauucaagcuuaccaugggccagaucaucaccuucuuccaggaggugccccacgugaucgaggaggugaugaacaucgugcugaucgcccugagccugcuggccauccugaagggcaucuacaacguggccaccugcggccuguucggccuggugagcuuccugcugcugugcggcagaagcugcagcaccaccuacaagggcguguacgagcugcagacccuggagcuggacauggccagccugaacaugugcaugccccugagcugcaccaagaacaacagccaccacuacaucauggugggcaacgagaccggccuggagcugacccugaccaacaccagcaucaucaaccacaaguucugcaaccugagcgacgcccacaagaagaaccuguacgaccacgcccugaugagcaucaucagcaccuuccaccugagcauccccaacuucaaccaguacgaggccaugagcugcgacuucaacggcggcaagaucagcgugcaguacaaccugagccacaccuacgccguggacgccgccaaccacugcggcaccaucgccaacggcgugcugcagaccuucaugagaauggccuggggcggcagcuacaucgcccuggacagcggcaagggcagcugggacugcaucaugaccagcuaccaguaccugaucauccagaacaccaccugggaggaccacugccaguucagcagacccagccccaucggcuaccugggccugcugagccagagaaccagagacaucuacaucagcagaagaagaagaggcaccuucaccuggacccugagcgacagcgagggcaacgagacccccggcggcuacugccugaccagauggaugcugaucgaggccgagcugaagugcuucggcaacaccgccguggccaagugcaacgagaagcacgacgaggaguucugcgacaugcugagacuguucgacuucugcaagcaggccaucagaagacugaaggcccccgcccagaugagcauccagcugaucaacaaggccgugaacgcccugaucaacgaccagcugaucaugaagaaccaccugagagacaucaugggcauccccuacugcaacuacagcaaguacugcuaccugaaccacaccgugaccggcagaaccagccugcccagaugcugccuggugagcaacggcagcuaccugaacgagacccacuucagcgacgacaucgagcagcaggccgacaacaugaucaccgagcugcugcagaaggaguacaucgacagacagggcaagaccccccugggccugguggaccuguucguguucagcaccagcuucuaccugaucagcaucuuccugcaccuggugaagauccccacccacagacacaucaucggcaagcccugccccaagccccacagacugaaccacaugggcaucugcagcugcggccuguacaagcaccccggcgugcccgugaaguggaagagaugaggacuaguaauaaggaaacuguaugaaugucugugggcaggaagugaagagauccuucuguaaagguuuuuggaauuaugucugcugaauaauaaacuuuuuugaaauaauaaaucugguagaaaaaugagaucucaaaggcucuuuucagagccaccaaaaaaaaaaaaaaaaaaaaaaaaaaaaaaaaaaaaaaaaaaaaaaaaaaaaaaaaaaaaaaaaaaaaaaaaaaaaaaaaaaaaaaaaaaaaaaaaaaaaa

SEQ ID NO: 27481 - RNA, 1809 nt, Artificial Sequence
  mRNA product Design b-4 (hSL-A100) comprising derived and/or modified sequence from LASV(LASV254-NIG-2011;Clade II)__AIT17674__GPCmut4 (opt4)
aggagagucccgcagucggcguccagcggcucugcuuguucgugugugugucguugcaggccuuauucaagcuuaccaugggccagaucaucaccuucuuccaggaggugccccacgugaucgaggaggugaugaacaucgugcugaucgcccugagccugcuggccauccugaagggcaucuacaacguggccaccugcggccuguucggccuggugagcuuccugcugcugugcggcagaagcugcagcaccaccuacaagggcguguacgagcugcagacccuggagcuggacaugaccaaccugaacaugugcaugccccugagcugcaccaagaacaacagccaccacuacaucauggugggcaacgagaccggccuggagcugacccugaccaacaccagcaucaucaaccacaaguucugcaaccugagcgacgcccacaagaagaaccuguacaaccacgcccugaugagcaucaucagcaccuuccaccugagcauccccaacuucaaccaguacgaggccaugagcugcgacuucaacggcggcaagaucagcgugcaguacaaccugagccacagcuacgccguggacgccgccaaccacugcggcaccaucgccaacggcgugcugcagaccuucaugagaauggccuggggcggcagcuacaucgcccuggacagcggcaagggcaacugggacugcaucaugaccagcuaccaguaccugaucauccagaacaccaccugggaggaccacugccaguucagcagacccagccccaucggcuaccugggccugcugagccagagaaccagagacaucuacaucagcagaagaagaagaggcaccuucaccuggacccugagcgacagcgagggcaacgagacccccggcggcuacugccugaccagauggaugcugaucgaggccgagcugaagugcuucggcaacaccgccguggccaagugcaacgagaagcacgacgaggaguucugcgacaugcugagacuguucgacuucugcaagcaggccaucagaagacugaagacccccgcccaggccaacauccagcugaucaacaaggccgugaacgcccugaucaacgaccagcugaucaugaagaaccaccugagagacaucaugggcauccccuacugcaacuacagcaaguacugcuaccugaaccacaccgugaccggcaagaccagccugcccagaugcugccuggugagcaacggcagcuaccugaacgagacccacuucagcgacgacaucgagcagcaggccgacaacaugaucaccgagcugcugcagaaggaguacauggacagacagggcaagaccccccugggccugguggaccuguucguguucagcaccagcuucuaccugaucagcaucuuccugcaccuggugaagauccccacccacagacacgugaucggcaagcccugccccaagccccacagacugaaccacaugggcaucugcagcugcggccuguacaagcaccccggcgugcccgugaaguggaagagaugaggacuaguaauaaggaaacuguaugaaugucugugggcaggaagugaagagauccuucuguaaagguuuuuggaauuaugucugcugaauaauaaacuuuuuugaaauaauaaaucugguagaaaaaugagaucucaaaggcucuuuucagagccaccaaaaaaaaaaaaaaaaaaaaaaaaaaaaaaaaaaaaaaaaaaaaaaaaaaaaaaaaaaaaaaaaaaaaaaaaaaaaaaaaaaaaaaaaaaaaaaaaaaaaa

SEQ ID NO: 27482 - RNA, 1809 nt, Artificial Sequence
  mRNA product Design b-4 (hSL-A100) comprising derived and/or modified sequence from LASV(Nig08-A19;Clade III)__ADU56618__GPCmut4 (opt4)
aggagagucccgcagucggcguccagcggcucugcuuguucgugugugugucguugcaggccuuauucaagcuuaccaugggccagaucgugaccuucuuccaggaggugccccacgugaucgaggaggugaugaacaucgugcugaucgcccugagcauccuggccauccugaagggccuguacaacaucgccaccugcggccugaucggccuggugaccuuccugcugcugagcggcagaagcugcagcaugaccuacaagggcguguacgagcugcagacccuggagcugaacaugaacacccugaacaugugcaugccccugagcugcaccaagaacaacagccaccacuacaucauggugggcaacgagaccggccuggagcugacccugaccaacaccagccugcugcaccacaaguucugcaaccugagcgacgcccacaagaagaaccuguacgaccacacccugaugagcaucaucagcaccuuccaccugagcauccccaacuucaaccaguacgaggccaugagcugcgacuucaacggcggcaagaucaccgugcaguacaaccugagccacagcuacgccaucgacgccgccaaccacugcggcaccguggccaacggcgugcugcagaccuucaugagaauggccuggggcggcagcuacaucgcccuggacagcggcagaggcaagugggacugcaucaugaccagcuaccaguaccugaucauccagaacaccaccugggaggaccacugccaguucagcagacccagccccaucggcuaccugggccugcugagccagagaaccagagacaucuacaucagcagaagaagaagaggcaccuucaccuggacccugagcgacagcgagggcaacgagacccccggcggcuacugccugaccagauggaugcugaucgaggccgagcugaagugcuucggcaacaccgccguggccaagugcaacgagaagcacgacgaggaguucugcgacaugcugagacuguucgacuucugcaagcaggccaucagaagacugaaggcccccgcccagaugagcauccagcugaucaacaaggccgugaacgcccugaucaacgaccagcugaucaugaagaaccaccugagagacaucaugggcauccccuacugcaacuacagcaaguacugcuaccugaaccacaccagcaccggcagaaccagccugcccagaugcugccuggugagcaacggcagcuaccugaacgagacccacuucagcgacgacaucgagcagcaggccgacaacaugaucaccgagaugcugcagaaggaguaccuggacagacagggcaagaccccccugggccugguggaccuguucguguucagcaccagcuucuaccugaucagcaucuuccugcaccuggugaagauccccacccacagacacaucgugggcaagcccugccccaagccccacagacugaaccacaugggcaucugcagcugcggccuguacaagcagcccggcgugcccgugagauggaagagaugaggacuaguaauaaggaaacuguaugaaugucugugggcaggaagugaagagauccuucuguaaagguuuuuggaauuaugucugcugaauaauaaacuuuuuugaaauaauaaaucugguagaaaaaugagaucucaaaggcucuuuucagagccaccaaaaaaaaaaaaaaaaaaaaaaaaaaaaaaaaaaaaaaaaaaaaaaaaaaaaaaaaaaaaaaaaaaaaaaaaaaaaaaaaaaaaaaaaaaaaaaaaaaaaa

SEQ ID NO: 27483 - RNA, 1812 nt, Artificial Sequence
  mRNA product Design b-4 (hSL-A100) comprising derived and/or modified sequence from LASV(G1180-SLE-2010;Clade IV)__AIT17168__GPCmut4 (opt4)
aggagagucccgcagucggcguccagcggcucugcuuguucgugugugugucguugcaggccuuauucaagcuuaccaugggccagaucgugaccuucuuccaggaggugccccacgugaucgaggaggugaugaacaucgugcugaucgcccugagcauccuggccgugcugaagggccuguacaacuucgccaccugcggccuggugggccugcugaccuuccugcugcugugcggcagaagcugcaccgccagcagauacaagggcguguacgagcugcagacccuggagcugaacauggagacccugaacaugugcaugccccugagcugcaccaagaacaacagccaccacuacaucauggugggcaacgagaccggccuggagcugacccugaccaacaccagcaucaucaaccacaaguucugcaaccugagcgacgcccacaagaagaaccuguacgaccacgcccugaugagcaucaucagcaccuuccaccugagcauccccaacuucaaccaguacgaggccaugagcugcgacuucaacggcggcaagaucagcgugcaguacaaccugagccacagcuacgccggcgacgccgccaaccacugcggcaccguggccaacggcgugcugcagaccuucaugagaauggccuggggcggcagcuacaucgcccuggacagcggccacggcagcugggacugcaucaugaccagcuaccaguaccugaucauccagaacaccaccugggaggaccacugccaguucagcagacccagccccaucggcuaccugggccugcugagccagagaaccagagacaucuacaucagcagaagaagaagaggcaccuucaccuggacccugagcgacagcgagggcaaggacacccccggcggcuacugccugaccagauggaugcugaucgaggccgagcugaagugcuucggcaacaccgccguggccaagugcaacgagaagcacgacgaggaguucugcgacaugcugagacuguucgacuucugcaagcaggccauccagagacugaaggcccccgcccagaugagcauccagcugaucaacaaggccgugaacgcccugaucaacgaccagcugaucaugaagaaccaccugagagacaucaugggcauccccuacugcaacuacagcaaguacugcuaccugaaccacaccaccaccggcaagaccagccugcccaagugcugccuggugagcaacggcagcuaccugaacgagacccacuucagcgacgacaucgagcagcaggccgacaacaugaucaccgagaugcugcagaaggaguacauggagagacagggcaagaccccccugggccugguggaccuguucguguucagcaccagcuucuaccugaucagcaucuuccugcaccuggugaagauccccacccacagacacaucgugggcaagagcugccccaagccccacagacugaaccacaugggcaucugcagcugcggccuguacaagcagcccggcgugcccgugaaguggaagagaugaggacuaguaauaaggaaacuguaugaaugucugugggcaggaagugaagagauccuucuguaaagguuuuuggaauuaugucugcugaauaauaaacuuuuuugaaauaauaaaucugguagaaaaaugagaucucaaaggcucuuuucagagccaccaaaaaaaaaaaaaaaaaaaaaaaaaaaaaaaaaaaaaaaaaaaaaaaaaaaaaaaaaaaaaaaaaaaaaaaaaaaaaaaaaaaaaaaaaaaaaaaaaaaaa

SEQ ID NO: 27484 - RNA, 1812 nt, Artificial Sequence
  mRNA product Design b-4 (hSL-A100) comprising derived and/or modified sequence from LASV(G1442-SLE-2011;Clade IV)__AIT17180__GPCmut4 (opt4)
aggagagucccgcagucggcguccagcggcucugcuuguucgugugugugucguugcaggccuuauucaagcuuaccaugggccagaucgugaccuucuuccaggaggugccccacgugaucgaggaggugaugaacaucgugcugaucgcccugagcauccuggccgugcugaagggccuguacaacguggccaccugcggccugaucggccuggugaccuuccugcugcugugcggcagaagcugcaccaccacccuguacaagggcguguacgagcugcagacccuggagcugaacauggagacccugaacaugugcaugccccugagcugcaccaagaacaacagccaccacuacaucagagugggcaacgagaccggccuggagcugacccugaccaacaccagcaucaucaaccacaaguucugcaaccugagcgacgcccacaagaagaaccuguacgaccacgcccugaugagcaucaucagcaccuuccaccugagcauccccaacuucaaccaguacgaggccaugagcugcgacuucaacggcggcaagaucagcgugcaguacaaccugagccacagcuacgccggcgacgccgccaaccacugcggcaccguggccaacggcgugcugcagaccuucaugagaauggccuggggcggcagcuacaucgcccuggacagcggcagaggcaacugggacugcaucaugaccagcuaccaguaccugaucauccagaacaccaccugggacgaccacugccaguucagcagacccagccccaucggcuaccugggccugcugagccagagaaccagagacguguacaucagcagaagaagaagaggcaccuucaccuggacccugagcgacagcgagggcaaggacacccccggcggcuacugccugaccagauggaugcugaucgaggccgagcugaagugcuucggcaacaccgccguggccaagugcaacgagaagcacgacgaggaguucugcgacaugcugagacuguucgacuucugcaagcaggccauccagagacugaaggcccccgcccagaugagcauccagcugaucaacaaggccgugaacgcccugaucaacgaccagcugaucaugaagaaccaccugagagacaucaugggcauccccuacugcaacuacagcaaguacugcuaccugaacaacaccgccaccggcaagaccagccugcccaagugcugccugaucagcaacggcagcuaccugaacgagacccacuucagcgacgacaucgagcaggaggccgacaacaugaucaccgagaugcugcagaaggaguacauggagagacagggcaagaccccccugggccugguggaccuguucguguucagcaccagcuucuaccugaucagcaucuuccugcaccuggugaagauccccacccacagacacaucgugggcaagagcugccccaagccccacagacugaaccacaugggcaucugcagcugcggccuguacaagcagcccggcgugcccgugagauggaagagaugaggacuaguaauaaggaaacuguaugaaugucugugggcaggaagugaagagauccuucuguaaagguuuuuggaauuaugucugcugaauaauaaacuuuuuugaaauaauaaaucugguagaaaaaugagaucucaaaggcucuuuucagagccaccaaaaaaaaaaaaaaaaaaaaaaaaaaaaaaaaaaaaaaaaaaaaaaaaaaaaaaaaaaaaaaaaaaaaaaaaaaaaaaaaaaaaaaaaaaaaaaaaaaaaa

SEQ ID NO: 27485 - RNA, 1812 nt, Artificial Sequence
  mRNA product Design b-4 (hSL-A100) comprising derived and/or modified sequence from LASV(G3010-SLE-2013;Clade IV)__AIT17344__GPCmut4 (opt4)
aggagagucccgcagucggcguccagcggcucugcuuguucgugugugugucguugcaggccuuauucaagcuuaccaugggccagaucgugaccuucuuccaggaggugccccacgugaucgaggaggugaugaacaucgugcugaucgcccugagcauccuggccgugcugaagggccuguacaacuucgccaccugcggccuggugggccuggugaccuuccugcugcugugcggcagaagcugcaccaccagccuguacaagggcguguacgagcugcagacccuggagcugaacauggagacccugaacaugugcaugccccugagcugcaccaagaacaacagccaccacuacaucauggugggcaacgagaccggccuggagcugacccugaccaacaccagcaucaucaaccacaaguucugcaaccugagcgacgcccacaagaagaaccuguacaaccacgcccugaugagcaucaucagcaccuuccaccugagcauccccaacuucaaccaguacgaggccaugagcugcgacuucaacggcggcaagaucagcgugcaguacaaccugagccacagcuacgccggcgacgccgccagccacugcggcaccguggccaacggcgugcugcagaccuucaugagaauggccuggggcggcagcuacaucgcccuggacagcggcuacggcaagugggacugcaucaugaccagcuaccaguaccugaucauccagaacaccaccugggaggaccacugccaguucagcagacccagccccaucggcuaccugggccugcugagccagagaaccagagacaucuacaucagcagaagaagaagaggcaccuucaccuggacccugagcgacagcgagggcaaggacacccccggcggcuacugccugaccagauggaugcugaucgaggccgagcugaagugcuucggcaacaccgccguggccaagugcaacgagaagcacgacgaggaguucugcgacaugcugagacuguucgacuucugcaagcaggccauccagagacugaagacccccgcccagaugagcauccagcugaucaacaaggccgugaacgcccugaucaacgaccagcugaucaugaagaaccaccugagagacaucaugggcauccccuacugcaacuacagcaaguacugcuaccugaaccacaccaccaccggcaagaccagccugcccaagugcugccuggugagcaacggcagcuaccugaacgagacccacuucagcgacgacaucgagcagcaggccgacaacaugaucaccgagaugcugcagaaggaguacauggagagacagggcaagaccccccugggccugguggaccuguucguguucagcaccagcuucuaccugaucagcaucuuccugcaccuggugaagauccccacccacagacacaucgugggcaagagcugccccaagccccacagacugaaccacaugggcaucugcagcugcggccuguacaagcagcccggcgugcccgugagauggaagagaugaggacuaguaauaaggaaacuguaugaaugucugugggcaggaagugaagagauccuucuguaaagguuuuuggaauuaugucugcugaauaauaaacuuuuuugaaauaauaaaucugguagaaaaaugagaucucaaaggcucuuuucagagccaccaaaaaaaaaaaaaaaaaaaaaaaaaaaaaaaaaaaaaaaaaaaaaaaaaaaaaaaaaaaaaaaaaaaaaaaaaaaaaaaaaaaaaaaaaaaaaaaaaaaaa

SEQ ID NO: 27486 - RNA, 1812 nt, Artificial Sequence
  mRNA product Design b-4 (hSL-A100) comprising derived and/or modified sequence from LASV(G502-SLE-2009;Clade IV)__AIT17126__GPCmut4 (opt4)
aggagagucccgcagucggcguccagcggcucugcuuguucgugugugugucguugcaggccuuauucaagcuuaccaugggccagaucgugaccuucuuccaggaggugccccacgugaucgaggaggugaugaacaucgugcugaucgcccugagcauccuggccgugcugaagggccuguacaacuucgccaccugcggccuggugggccugcugaccuuccugcugcugugcggcagaagcugcaccaccggccuguacaagggcguguacgagcugcagacccuggagcugaacauggagacccugaacaugugcaugccccugagcugcaccaagaacaacagccaccacuacaucauggugggcaacgagaccggccuggagcugacccugaccaacaccagcaucaucaaccacaaguucugcaaccugagcgacgcccacaagaagaaccuguacgaccacgcccugaugagcaucaucagcaccuuccaccugagcauccccaacuucaaccaguacgaggccaugagcugcgacuucaacggcggcaagaucagcgugcaguacaaccugagccacagcuacgccggcgacgccgccgaccacugcggcaccguggccaacggcgugcugcagaccuucaugagaauggccuggggcggcagcuacaucgcccuggacagcggcagaggcagaugggacugcaucaugaccagcuaccaguaccugaucauccagaacaccaccugggaggaccacugccaguucagcagacccagccccaucggcuaccugggccugcugagccagagaaccagagacaucuacaucagcagaagaagaagaggcaccuucaccuggacccugagcgacagcgagggcaaggacacccccggcggcuacugccugaccagauggaugcugaucgaggccgagcugaagugcuucggcaacaccgccguggccaagugcaacgagaagcacgacgaggaguucugcgacaugcugagacuguucgacuucugcaagcaggccauccagagacugaaggcccccgcccagaugagcauccagcugaucaacaaggccgugaacgcccugaucaacgaccagcuggugaugaagaaccaccugagagacaucaugggcauccccuacugcaacuacagcagauacugcuaccugaaccacaccaccaccggcagaaccagccugcccaagugcugccuggugagcaacggcagcuaccugaacgagacccacuucagcgacgacaucgagcagcaggccgacaacaugaucaccgagaugcugcagaaggaguacauggagagacagggcaagaccccccugggccugguggaccuguucguguucagcaccagcuucuaccugaucagcaucuuccugcaccuggugaagauccccacccacagacacaucgugggcaagagcugccccaagccccacagacugaaccacaugggcaucugcagcugcggccuguacaagcagcccggcgugcccgugaaguggaagagaugaggacuaguaauaaggaaacuguaugaaugucugugggcaggaagugaagagauccuucuguaaagguuuuuggaauuaugucugcugaauaauaaacuuuuuugaaauaauaaaucugguagaaaaaugagaucucaaaggcucuuuucagagccaccaaaaaaaaaaaaaaaaaaaaaaaaaaaaaaaaaaaaaaaaaaaaaaaaaaaaaaaaaaaaaaaaaaaaaaaaaaaaaaaaaaaaaaaaaaaaaaaaaaaaa

SEQ ID NO: 27487 - RNA, 1812 nt, Artificial Sequence
  mRNA product Design b-4 (hSL-A100) comprising derived and/or modified sequence from LASV(G733-SLE-2010;Clade IV)__AIT17154__GPCmut4 (opt4)
aggagagucccgcagucggcguccagcggcucugcuuguucgugugugugucguugcaggccuuauucaagcuuaccaugggccagaucgugaccuucuuccaggaggugccccacgugaucgaggaggugaugaacaucgugcugaucgcccugagcauccuggccgugcugaagggccuguacaacuucgccaccugcggcaucgugggccuggugagcuuccugcugcugugcggcagaagcugcaccaccagccuguacaagggcguguacgagcugcagacccuggagcugaacauggagacccugaacaugugcaugccccugagcugcaccaagaacaacagccaccacuacaucauggugggcaacgagaccggccuggagcugacccugaccaacaccagcaucaucaaccacaaguucugcaaccugagcgacgcccacaagaagaaccuguacgaccacgcccugaugagcaucaucagcaccuuccaccugagcauccccaacuucaaccaguacgaggccaugagcugcgacuucaacggcggcaagaucagcgugcaguacaaccugagccacagcuacgccggcgacgccgccaaccacugcggcaccaucgccaacggcgugcugcagaccuucaugagaauggccuggggcggcagcuacaucgcccuggacagcggcagagacagaugggacugcaucaugaccagcuaccaguaccugaucauccagaacaccaccugggaggaccacugccaguucagcagacccagccccaucggcuaccugggccugcugagccagagaaccagagacaucuacaucagcagaagaagaagaggcaccuucaccuggacccugagcgacagcgagggcaaggacacccccggcggcuacugccugaccagauggaugcugaucgaggccgagcugaagugcuucggcaacaccgccguggccaagugcaacgagaagcacgacgaggaguucugcgacaugcugagacuguucgacuucugcaagcaggccauccagagacugaaggcccccgcccagaugagcauccagcugaucaacaaggccgugaacgcccugaucaacgaccagcugaucaugaagaaccaccugagagacaucaugggcauccccuacugcaacuacagcaaguacugcuaccugaaccacaccaccaccggcaagaccagccugcccaagugcugccuggugagcaacggcagcuaccugaacgagacccacuucagcgacgacaucgagcagcaggccgacaacaugaucaccgagaugcugcagaaggaguacauggagagacagggcaagaccccccugggccugguggaccuguucguguucagcaccagcuucuaccugaucagcaucuuccugcaccuggugaagauccccacccacagacacguggugggcaagagcugccccaagccccacagacugaaccacaugggcaucugcagcugcggccuguacggccagcccggcgugcccgugaaguggaagagaugaggacuaguaauaaggaaacuguaugaaugucugugggcaggaagugaagagauccuucuguaaagguuuuuggaauuaugucugcugaauaauaaacuuuuuugaaauaauaaaucugguagaaaaaugagaucucaaaggcucuuuucagagccaccaaaaaaaaaaaaaaaaaaaaaaaaaaaaaaaaaaaaaaaaaaaaaaaaaaaaaaaaaaaaaaaaaaaaaaaaaaaaaaaaaaaaaaaaaaaaaaaaaaaaa

SEQ ID NO: 27488 - RNA, 1812 nt, Artificial Sequence
  mRNA product Design b-4 (hSL-A100) comprising derived and/or modified sequence from MOPV/LASV reassortant(IGS-1;Clade IV)__AFY05576__GPCmut4 (opt4)
aggagagucccgcagucggcguccagcggcucugcuuguucgugugugugucguugcaggccuuauucaagcuuaccaugggccagaucgugaccuucuuccaggaggugccccacgugaucgaggaggugaugaacaucgugcugaucgcccugagcgugcuggccgugcugaagggccuguacaacuucgccaccugcggccuggugggccuggugaccuuccugcugcugugcggcagaagcugcaccaccagccuguacaagggcguguacgagcugcagacccuggagcugaacauggagacccugaacaugugcaugccccugagcugcaccaagaacaacagccaccacuacaucauggugggcaacgagaccggccuggagcugacccugaccaacaccagcaucaucaaccacaaguucugcaaccugagcgacgcccacaagaagaaccuguacgaccacgcccugaugagcaucaucagcaccuuccaccugagcauccccaacuucaaccaguacgaggccaugagcugcgacuucaacggcggcaagaucagcgugcaguacaaccugagccacagcuacgccggcgacgccgccaaccacugcggcaccguggccaacggcgugcugcagaccuucaugagaauggccuggggcggcagcuacaucgcccuggacagcggcagaggcaacugggacugcaucaugaccagcuaccaguaccugaucauccagaacaccaccugggaggaccacugccaguucagcagacccagccccaucggcuaccugggccugcugagccagagaaccagagacaucuacaucagcagaagaagaagaggcaccuucaccuggacccugagcgacagcgagggcgaggacacccccggcggcuacugccugaccagauggaugcugaucgaggccgagcugaagugcuucggcaacaccgccguggccaagugcaacgagaagcacgacgaggaguucugcgacaugcugagacuguucgacuucugcaagcaggccauccagagacugaaggcccccgcccagaugagcauccagcugaucaacaaggccgugaacgcccugaucaacgaccagcugaucaugaagaaccaccugagagacaucaugggcauccccuacugcaacuacagcaaguacugcuaccugaaccacaccaccaccggcagaaccagccugcccaagugcugccuggugagcaacggcagcuaccugaacgagacccacuucagcgacgacaucgagcagcaggccgacaacaugaucaccgagaugcugcagaaggaguacauggagagacagggcaagaccccccugggccugguggaccuguucguguucagcaccagcuucuaccugaucagcaucuuccugcaccuggugaagauccccacccacagacacaucgugggcaagagcugccccaagccccacagacugaaccacaugggcaucugcagcugcggccuguacaagcagcccggcgugcccgugaaguggaagagaugaggacuaguaauaaggaaacuguaugaaugucugugggcaggaagugaagagauccuucuguaaagguuuuuggaauuaugucugcugaauaauaaacuuuuuugaaauaauaaaucugguagaaaaaugagaucucaaaggcucuuuucagagccaccaaaaaaaaaaaaaaaaaaaaaaaaaaaaaaaaaaaaaaaaaaaaaaaaaaaaaaaaaaaaaaaaaaaaaaaaaaaaaaaaaaaaaaaaaaaaaaaaaaaaa

SEQ ID NO: 27489 - RNA, 1812 nt, Artificial Sequence
  mRNA product Design b-4 (hSL-A100) comprising derived and/or modified sequence from LASV(LM765-SLE-2012;Clade IV)__AIT17814__GPCmut4 (opt4)
aggagagucccgcagucggcguccagcggcucugcuuguucgugugugugucguugcaggccuuauucaagcuuaccaugggccagaucgugaccuucuuccaggaggugccccacgugaucgaggaggugaugaacaucgugcugaucgcccugagcauccuggccgugcugaagggccuguacaacuucgccaccugcggccuggugggccuggugaccuuccugcugcugugcggcagaagcugcaccaccagccuguacaagggcguguacgagcugcagacccuggagcugaacauggagacccugaacaugugcaugccccugagcugcaccaagaacaacagccaccacuacaucauggugggcaacgagaccggccuggagcugacccugaccaacaccagcaucaucgaccacaaguucugcaaccugagcgacgcccacagaaagaaccuguacgaccacgcccugaugagcaucaucagcaccuuccaccugagcauccccaacuucaaccaguacgaggccaugagcugcgacuucaacggcggcaagaucagcgugcaguacaaccugagccacagcuacgccaaggacgccgccgaccacugcggcaccguggccaacggcgugcugcagaccuucaugagaauggccuggggcggcagcuacaucgcccuggacagcggcagaggcagaugggacugcaucaugaccagcuaccaguaccugaucauccagaacaccaccugggaggaccacugccaguucagcagacccagccccaucggcuaccugggccugcugagccagagaaccagagacaucuacaucagcagaagaagaagaggcaccuucaccuggacccugagcgacagcgagggcaaggacacccccggcggcuacugccugaccagauggaugcugaucgaggccgagcugaagugcuucggcaacaccgccguggccaagugcaacgagaagcacgacgaggaguucugcgacaugcugagacuguucgacuucugcaagcaggccauccagagacugaaggcccccgcccagaugagcauccagcugaucaacaaggccgugaacgcccugaucaacgaccagcugaucaugaagaaccaccugagagacaucaugggcauccccuacugcaacuacagcaaguacugcuaccugaaccacaccaccaccggcaagaccagccugcccaagugcugccuggugagcaacggcagcuaccugaacgagacccacuucagcgacgacaucgagcagcaggccgacaacaugaucaccgagaugcugcagaaggaguacauggagagacagggcaagaccccccugggccugguggaccuguucguguucagcaccagcuucuaccugaucagcaucuuccugcaccuggugaagauccccacccacagacacaucgugggcaagcccugccccaagccccacagacugaaccacaugggcaucugcagcugcggccuguacaagcagcccggcgugcccgugaaguggaagagaugaggacuaguaauaaggaaacuguaugaaugucugugggcaggaagugaagagauccuucuguaaagguuuuuggaauuaugucugcugaauaauaaacuuuuuugaaauaauaaaucugguagaaaaaugagaucucaaaggcucuuuucagagccaccaaaaaaaaaaaaaaaaaaaaaaaaaaaaaaaaaaaaaaaaaaaaaaaaaaaaaaaaaaaaaaaaaaaaaaaaaaaaaaaaaaaaaaaaaaaaaaaaaaaaa

SEQ ID NO: 27490 - RNA, 1812 nt, Artificial Sequence
  mRNA product Design b-4 (hSL-A100) comprising derived and/or modified sequence from LASV(LM776-SLE-2012;Clade IV)__AIT17824__GPCmut4 (opt4)
aggagagucccgcagucggcguccagcggcucugcuuguucgugugugugucguugcaggccuuauucaagcuuaccaugggccagaucgugaccuucuuccaggaggugccccacgugaucgaggaggugaugaacaucgugcugaucgcccugagcauccuggccgugcugaagggccuguacaacuucgccaccugcggccuggugggccuggugaccuuccugcugcugugcggcagaagcugcaccaccagcguguacaagggcguguacgagcugcagacccuggagcugaacauggagacccugaacaugugcaugccccugagcugcaccaagaacaacagccaccacuacaucauggugggcaacgagaccggccuggagcugacccugaccaacaccagcaucaucaaccacaaguucugcaaccugagcgacgcccacaagaagaaccuguacgaccacgcccugaugagcaucaucagcaccuuccaccugagcauccccaacuucaaccaguacgaggccaugagcugcgacuucaacggcggcaagaucagcgugcaguacaaccugagccacagcuacgccggcgacgccgccaaccacugcggcaccguggccaacggcgugcugcagaccuucaugagaauggccuggggcggcagcuacaucgcccuggacagcggccacggcaagugggacugcaucaugaccagcuaccaguaccugaucauccagaacaccaccugggaggaccacugccaguucagcagacccagccccaucggcuaccugggccugcugagccagagaaccagagacaucuacaucagcagaagaagaagaggcaccuucaccuggacccugagcgacagcgagggcaaggacacccccggcggcuacugccugaccagauggaugcugaucgaggccgagcugaagugcuucggcaacaccgccguggccaagugcaacgagaagcacgacgaggaguucugcgacaugcugagacuguucgacuucugcaagcaggccauccagagacugaaggcccccgcccagaugagcauccagcugaucaacaaggccgugaacgcccugaucaacgaccagcugaucaugaagaaccaccugagagacaucaugggcauccccuacugcaacuacagcaaguacugcuaccugaaccacaccaccaccggcaagaccagccugcccaagugcugccuggugagcaacggcagcuaccugaacgagacccacuucagcgacgacaucgagcagcaggccgacaacaugaucaccgagaugcugcagaaggaguacauggagagacagggcaagaccccccugggccugguggaccuguucguguucagcaccagcuucuaccugaucagcaucuuccugcaccuggugaagauccccacccacagacacaucgugggcaagagcugccccaagccccacagacugaaccacaugggcaucugcagcugcggccuguacaagcagcccggcgugcccgugagauggaagagaugaggacuaguaauaaggaaacuguaugaaugucugugggcaggaagugaagagauccuucuguaaagguuuuuggaauuaugucugcugaauaauaaacuuuuuugaaauaauaaaucugguagaaaaaugagaucucaaaggcucuuuucagagccaccaaaaaaaaaaaaaaaaaaaaaaaaaaaaaaaaaaaaaaaaaaaaaaaaaaaaaaaaaaaaaaaaaaaaaaaaaaaaaaaaaaaaaaaaaaaaaaaaaaaaa

SEQ ID NO: 27491 - RNA, 1812 nt, Artificial Sequence
  mRNA product Design b-4 (hSL-A100) comprising derived and/or modified sequence from LASV(Mad39;Clade IV)__ANH09722__GPCmut4 (opt4)
aggagagucccgcagucggcguccagcggcucugcuuguucgugugugugucguugcaggccuuauucaagcuuaccaugggccagaucgugaccuucuuccaggaggugccccacgugaucgaggaggugaugaacaucgugcugaucgcccugagcauccuggccgugcugaagggccuguacaacguggccaccugcggccugaucggccuggugaccuuccugcugcugugcggcagaagcugcaccaccacccuguacaagggcguguacgagcugcaggcccuggagcugaacauggagacccugaacaugugcaugccccugagcugcaccaagaacaacagccaccacuacaucagagugggcaacgagaccggccuggagcugacccugaccaacaccagccugaucaaccacaaguucugcaaccugagcgacgcccacaagaagaaccuguacgaccacgcccugaugagcaucaucagcaccuuccaccugagcauccccaacuucaaccaguacgaggccaugagcugcgacuucaacgacggcaagaucagcgugcaguacaaccugagccacaccuacgccggcgacaccgccaaccacugcggcaccguggccaacggcgugcugcagaccuucaugagaauggccuggggcggcagcuacaucgcccuggacagcggcagaggcggcugggacugcaucaugaccagcuaccaguaccugaucauccagaacaccaccugggaggaccacugccaguucagcagacccagccccaucggcuaccugggccugcugagccagagaaccagagacaucuacaucagcagaagaagaagaggcaccuucaccuggacccugagcgacagcgagggcaaggacacccccggcggcuacugccugaccagauggaugcugaucgaggccgagcugaagugcuucggcaacaccgccguggccaagugcaacgagaagcacgacgaggaguucugcgacaugcugagacuguucgacuucugcaagcaggccauccagagacugaaggcccccgcccagaugagcauccagcugaucaacaaggccgugaacgcccugaucaacgaccagcugaucaugaagaaccaccugagagacaucaugggcauccccuacugcaacuacagcaaguacugcuaccugaaccacaccgugaccggcaagaccagccugcccaagugcugccuggugagcaacggcagcuaccugaacgagacccacuucagcgacgacaucgagcagcaggccgacaacaugaucaccgagaugcugcagaaggaguacauggagagacagggcaagaccccccugggccugguggaccuguucguguucagcaccagcuucuaccugaucagcaucuuccugcaccuggugaagauccccacccacagacacguggugggcaagcccugccccaagccccacagacugaaccacaugggcaucugcagcugcggcuucuacaagcagcccggcgugcccgugagauggaagagaugaggacuaguaauaaggaaacuguaugaaugucugugggcaggaagugaagagauccuucuguaaagguuuuuggaauuaugucugcugaauaauaaacuuuuuugaaauaauaaaucugguagaaaaaugagaucucaaaggcucuuuucagagccaccaaaaaaaaaaaaaaaaaaaaaaaaaaaaaaaaaaaaaaaaaaaaaaaaaaaaaaaaaaaaaaaaaaaaaaaaaaaaaaaaaaaaaaaaaaaaaaaaaaaaa

SEQ ID NO: 27492 - RNA, 1812 nt, Artificial Sequence
  mRNA product Design b-4 (hSL-A100) comprising derived and/or modified sequence from LASV(Z0947-SLE-2011;Clade IV)__AIT17840__GPCmut4 (opt4)
aggagagucccgcagucggcguccagcggcucugcuuguucgugugugugucguugcaggccuuauucaagcuuaccaugggccagaucgugaccuucuuccaggaggugccccacgugaucgaggaggugaugaacaucgugcugaucgcccugagcauccuggccgugcugaagggccuguacaacuucgccaccugcggccuggugggccuggugaccuuccugcugcugugcggcagaagcugcaccaucagccuguacaagggcguguacgagcugcagacccuggagcugaacauggagacccugaacaugugcaugccccugagcugcaccaagaacaacagccaccacuacaucauggugggcaacgagaccggccuggagcugacccugaccaacaccagcaucaucaaccacaaguucugcaaccugagcgacgcccacaagaagaaccuguacgaccacgcccugaugagcaucaucagcaccuuccaccugagcauccccaacuucaaccaguacgaggccaugagcugcgacuucaacggcggcaagaucagcgugcaguacaaccugagccacagcuacgccggcgacgccgccaaccacugcggcaccguggccaacggcgugcugcagaccuucaugagaauggccuggggcggcagcuacaucgcccuggacagcggcagagacagaugggacugcaucaugaccagcuaccaguaccugaucauccagaacaccaccugggaggaccacugccaguucagcagacccagccccaucggcuaccugggccugcugagccagagaaccagagacaucuacaucagcagaagaagaagaggcaccuucaccuggacccugagcgacagcgagggcaaggacacccccggcggcuacugccugaccagauggaugcugaucgaggccgagcugaagugcuucggcaacaccgccguggccaagugcaacgagaagcacgacgaggaguucugcgacaugcugagacuguucgacuucugcaagcaggccauccagagacugaaggcccccgcccagaugagcauccagcugaucaacaaggccgugaacgcccugaucaacgaccagcugaucaugaagaaccaccugagagacaucaugggcauccccuacugcaacuacagcaaguacugcuaccugaaccacaccaccaccggcaagaccagccugcccaagugcugccuggugagcaacggcagcuaccugaacgagacccacuucagcgacgacaucgagcagcaggccgacaacaugaucaccgagaugcugcagaaggaguacauggagagacagggcaagaccccccugggccugguggaccuguucguguucagcaccagcuucuaccugaucagcaucuuccugcaccuggugaagauccccacccacagacacaucgugggcaagcccugccccaagccccacagacugaaccacaugggcaucugcagcugcggccuguacaagcagcccggcgugcccgugaaguggaagagaugaggacuaguaauaaggaaacuguaugaaugucugugggcaggaagugaagagauccuucuguaaagguuuuuggaauuaugucugcugaauaauaaacuuuuuugaaauaauaaaucugguagaaaaaugagaucucaaaggcucuuuucagagccaccaaaaaaaaaaaaaaaaaaaaaaaaaaaaaaaaaaaaaaaaaaaaaaaaaaaaaaaaaaaaaaaaaaaaaaaaaaaaaaaaaaaaaaaaaaaaaaaaaaaaa

SEQ ID NO: 27493 - RNA, 1812 nt, Artificial Sequence
  mRNA product Design b-4 (hSL-A100) comprising derived and/or modified sequence from LASV(Josiah;Clade IV)__NP_694870__GPCmut4 (opt5)
aggagagucccgcagucggcguccagcggcucugcuuguucgugugugugucguugcaggccuuauucaagcuuaccaugggccagaucgugaccuucuuucaagaggucccccacguuauugaagaggugaugaacaucgugcugauugcccucagcguccuggcugugcuuaaggggcuguacaauuucgccacaugcggacucguuggccuggugacguuucuucugcucugugggagauccugcaccacaucucuguauaaaggagucuacgaacugcagacccucgagcugaacauggaaacacuuaauauguguaugccucugagcugcaccaagaacaauucccaucacuauaucauggugggcaacgagacagggcucgagcugacccuuacgaauaccucuauuaucaaccauaaauucuguaaucugagcgacgcgcacaagaaaaaccucuacgaucaugcucugauguccaucauuucuacauuucaccugagcaucccgaauuucaaccaguaugaagccauguccugcgacuuuaauggaggcaagauuagcguucaguacaaccucucucacuccuaugccggcgaugcugccaaucauugugggaccguggcuaacggaguccugcaaacauucaugcggauggccuggggcgggagcuacaucgcgcuugacucuggacgcggcaacugggauugcauuaugaccuccuaccaguaucugaucauucagaauacgacaugggaggaccacugucaguuuagcagacccucuccuaucggguaccucggacugcuuucccaacggacccgcgauaucuauauuagcagacggcgcagaggcacauucaccuggacccuguccgacucugaaggcaaggauacacccgggggauacugccucacgcgguggaugcugaucgaggccgagcugaaauguuuuggcaacaccgcuguggccaagugcaaugaaaaacaugacgaggaguucugcgauaugcuccgccuguuugacuucuguaagcaggcuauucagagacuuaaagccccugcgcagaugagcauccaacugauuaacaaggccgugaaugcucucaucaacgaucagcugaucaugaagaaucaccuucgggacauuauggggauccccuauugcaacuacuccaaauauuguuaccugaaucacacaaccacaggacgcaccagccucccuaagugcugucuggucucuaacggcuccuaccugaaugaaacgcauuucagcgacgauauugaacagcaagccgacaacaugaucacagagaugcuccagaaagaguauauggaaagacaggggaagaccccgcugggacuuguugaucuguuuguguucucuaccagcuuuuaccucauuuccaucuuccugcaccuggugaaaauccccacacaucggcacauugucggcaagucuugcccuaaaccccaucgccuuaaucacaugggcaucuguagcugcgggcucuauaagcagccuggagugcccguuaaguggaaaagaugaggacuaguaauaaggaaacuguaugaaugucugugggcaggaagugaagagauccuucuguaaagguuuuuggaauuaugucugcugaauaauaaacuuuuuugaaauaauaaaucugguagaaaaaugagaucucaaaggcucuuuucagagccaccaaaaaaaaaaaaaaaaaaaaaaaaaaaaaaaaaaaaaaaaaaaaaaaaaaaaaaaaaaaaaaaaaaaaaaaaaaaaaaaaaaaaaaaaaaaaaaaaaaaaa

SEQ ID NO: 27494 - RNA, 1809 nt, Artificial Sequence
  mRNA product Design b-4 (hSL-A100) comprising derived and/or modified sequence from LASV(LP;Clade I)__AAF86701__GPCmut4 (opt5)
aggagagucccgcagucggcguccagcggcucugcuuguucgugugugugucguugcaggccuuauucaagcuuaccaugggccagaucauuaccuucuuucaagaggugccccacgucaucgaagagguuaugaacauugugcugaucgcccucagccugcuugcuauucugaaggggcucuacaauaucgccacaugcggaaucauuggccugguggcguuccuuuuucugugugggaaauccugcucucucacgcugaagggaggcuaugaacugcagacccucgagcugaacauggaaacacuuaauauguguaugccucugagcugcaccaaaaacuccucucaucacuacaucagagucgggaaugagacaggacucgagcugacccuuacaaacaccagcauuaucaaucauaaguucuguaaccuguccgacgcucacaaaaagaaucucuaugaucaugcccugaugucuauuaucagcacguuucaccuguccauuccgaacuucaaucaguacgaagccaugagcugcgacuuuaacggcggcaagaucucugugcaguauaaucucucccacagcuacgcuggggaugccgcugagcauuguggaaccguugccaacggcgugcugcaaacauucaugcggauggcguggggagggcgcuauaucgcccuugacucuggcaaagggaauugggauugcauuaugaccuccuaccaguaccugaucauucagaacacaaccugggaagaccacugucaguuuagcagacccucuccuaucggauaucucggccugcuuucccaacggacgcgcgauauuuacaucagcagacggcgcagaggcacauucaccuggacacuguccgacucugaggggaacgagacccccggaggcuauugccucacccgguggaugcugaucgaagcugagcugaaguguuuugggaauacagccgucgcuaaaugcaacgaaaagcaugaugaggaguucugcgacaugcuccgccuguuugauuucuguaaacaggccauuagacggcuuaaggcgccugcccagaugagcauccagcugauuaauaaggcugugaacgcccucaucaaugaccaacugauuaugaaaaaccaccuucgcgauaucaugggaauccccuacugcaauuauuccaaguacuguuaucugaaccacacgagcucuggcagaaccucccucccuaaaugcugucugauuagcaaugggucuuaccugaacgaaacacaguucagcgacgacaucgagcagcaagcugauaauaugauuaccgaaaugcuccagaaggaguacaucgaacggcagggaaaaacaccgcugggccuuguugacauuuuuaucuucuccaccucuuuuuaucugauuagcaucuuccuccaucugaucaagauucccacgcaccgccauaucgugggcaaaccuugccccaagccucacagacugaaccauaugggggucuguuccugcggacuuuacaagcaccccggcgugccgacaaaauggaagcggugaggacuaguaauaaggaaacuguaugaaugucugugggcaggaagugaagagauccuucuguaaagguuuuuggaauuaugucugcugaauaauaaacuuuuuugaaauaauaaaucugguagaaaaaugagaucucaaaggcucuuuucagagccaccaaaaaaaaaaaaaaaaaaaaaaaaaaaaaaaaaaaaaaaaaaaaaaaaaaaaaaaaaaaaaaaaaaaaaaaaaaaaaaaaaaaaaaaaaaaaaaaaaaaaa

SEQ ID NO: 27495 - RNA, 1809 nt, Artificial Sequence
  mRNA product Design b-4 (hSL-A100) comprising derived and/or modified sequence from LASV(803213;Clade II)__AAF86703__GPCmut4 (opt5)
aggagagucccgcagucggcguccagcggcucugcuuguucgugugugugucguugcaggccuuauucaagcuuaccaugggccagaucauuaccuucuuucaagaggugccccacgucaucgaagagguuaugaacauugugcugaucgcccucagccugcuugcuauucugaaggggaucuacaauguggccacaugcggacucuucggccugaucuccuuucuucugcucugugggagaucuugcagcgucacguauaaaggaguguacgaacugcagacccuggagcucaacauggcgaaucugaacauguguaugccucuuuccugcacaaagaauaacucucaucacuauauuaugguuggcaaugaaaccgggcuggagcucacacugaccaacacaagcaucauuaaucauaaauucuguaaccuuuccgacgcucacaagaaaaaucuguacgaucaugcccucaugucuaucauuagcaccuuucaccuguccaucccgaacuucaaucaguaugaggccaugagcugcgacuuuaacggaggcaagauuucugugcaguacaaucugucccacagcuucgcugucgaugccgcuaaccauuguggcacgaucgccaacggggugcuccaaaccuuuaugcggauggcguggggaggcucuuauaucgcccuggacuccgggaagggaaauugggauugcauuaugacaagcuaccaguaccuuaucauucagaacaccacaugggaagaccacugucaguucucucgccccuccccuaucggcuaucuggggcuccugagccaaagaacccgggauauuuacaucucccgcagacggcgcggaacguuuacauggacccuuucugacagcgagggcaaugaagcucccggcggguauugccugacaagauggaugcucaucgaggccgagcugaaauguuucggaaacaccgcuguugccaagugcaaugaaaaacaugaugaggaauuuugcgacaugcugcgccucuucgauuucuguaagcaggcgauuaaacggcugaagaccccugcccagauguccauccagcuuauuaacaaggcugugaaugcccugaucaacgaccaacucauuaugaaaaaucaccugagagauaucaugggcauccccuacugcaacuauagccgguacuguuaucuuaaucacacagucacggggaagaccucucugccucgcugcugucucguguccaacggaagcuaccugaaugagacacauuuuucugacgacauugaacagcaggcugauaacaugaucaccgagaugcugcaaaaagaguacauggacagacagggcaagacaccgcucgggcugguggaucuuuucgucuuuagcaccuccuucuaucugauuucuaucuuucuccaccugguuaaaauucccacgcaucggcacaucgugggaaagccuugccccaaaccucaucgccugaaucacaugggcauuuguagcugcggccuuuacaagcaccccggggugccggucaaguggaaaagaugaggacuaguaauaaggaaacuguaugaaugucugugggcaggaagugaagagauccuucuguaaagguuuuuggaauuaugucugcugaauaauaaacuuuuuugaaauaauaaaucugguagaaaaaugagaucucaaaggcucuuuucagagccaccaaaaaaaaaaaaaaaaaaaaaaaaaaaaaaaaaaaaaaaaaaaaaaaaaaaaaaaaaaaaaaaaaaaaaaaaaaaaaaaaaaaaaaaaaaaaaaaaaaaaa

SEQ ID NO: 27496 - RNA, 1809 nt, Artificial Sequence
  mRNA product Design b-4 (hSL-A100) comprising derived and/or modified sequence from LASV(GA391;Clade III)__CAA36645__GPCmut4 (opt5)
aggagagucccgcagucggcguccagcggcucugcuuguucgugugugugucguugcaggccuuauucaagcuuaccaugggccagaucgugaccuucuuucaagaggucccccacguuauugaagaggugaugaacaucgugcugauugcccucagcauccuggcuauucuuaaggggcuguacaaugucgccacaugcggacucaucggccuggugacguuccuucugcucuccgggagaucuuguagccugaucuauaaaggaaccuacgaacugcagacacucgagcugaacauggaaacccuuaauaugugcaugccucuguccuguacaaagaacaauucucaucacuauauucggguuggcaacgagaccgggcucgagcugacacuuaccaauacgagcauccugaaccauaaauuuugcaaucucuccgacgcgcacaagcgcaaccuguacgaucauucucugaugagcauuaucuccaccuuccaccucagcauuccgaauuuuaaccaguaugaagcuaugucuugugacuucaauggaggcaaaaucacagugcaguacaaccugucccacagcuuugccgucgaugccgcuggccauugcgggacccuugccaauggagugcugcaaacauucaugagaauggcuuggggcgggucuuauauugcccucgacuccggacggggcaacugggauuguaucaugaccagcuaccaguaccugaucauucagaacacgacaugggacgaucacugccaguuuucucgccccuccccuaucggguaucuuggacugcucagccaaagaacccgggacauuuacaucucccgcagacggcgcggcacauucaccuggacccugucugauagcgagggcaaugaaacacccgggggauauugucugacgagauggaugcucauugaggcggagcugaagugcuuuggcaacaccgccguugcuaaguguaaugaaaaacaugacgaggaguucugcgauaugcuucggcuguuugacuucugcaagcaggccauccgcagacucaaaaccccugcucagauguccauccagcugauuaacaaggccgugaaugcgcuuaucaacgaucaacugauuaugaaaaaucaccuccgggacaucauggggauucccuacuguaacuauagccgcuacugcuaucugaaucacacaucuacaggaaagaccucccugccuagauguugccucaucagcaacggcucuuaccugaaugaaacgaaguucagcgacgauaucgaacagcaggccgacaacaugauuacagagaugcuucaaaaagaguacaucgaucggcaggggaagaccccgcugggacucgucgaccuguuuguguucuccaccucuuuuuaucugauuagcaucuuccuucaucucgugaaaauucccacacacagacauaucgucggcaagccuugucccaaaccucaccgccugaaucauaugggcauuugcuccugugggcuguacaagcagcccggaguuccggugcgguggaaaagaugaggacuaguaauaaggaaacuguaugaaugucugugggcaggaagugaagagauccuucuguaaagguuuuuggaauuaugucugcugaauaauaaacuuuuuugaaauaauaaaucugguagaaaaaugagaucucaaaggcucuuuucagagccaccaaaaaaaaaaaaaaaaaaaaaaaaaaaaaaaaaaaaaaaaaaaaaaaaaaaaaaaaaaaaaaaaaaaaaaaaaaaaaaaaaaaaaaaaaaaaaaaaaaaaa

SEQ ID NO: 27497 - RNA, 1812 nt, Artificial Sequence
  mRNA product Design b-4 (hSL-A100) comprising derived and/or modified sequence from LASV(AV;Clade V)__CCA30314__GPCmut4 (opt5)
aggagagucccgcagucggcguccagcggcucugcuuguucgugugugugucguugcaggccuuauucaagcuuaccaugggccagaucgugaccuucuuucaagaggucccccacguuauugaagaggugaugaacaucgugcugauugcccucagcauccuggcuguccuuaaggggcuguacaauauugccacaugcggacucaucggccugaucacguuccuucugcucugugggagauccugcucuagcaaccuguauaaaggaguguacgaacugcagucccucgaccugaauauggagacccuuaacauguguaugccucugucuugcacaaagaauaacagccaucacuauauucggguuggcaaugauaccgggcucgaacugacacuuaccaacacauccauccugaaucauaaauuuuguaaccucucugacgcgcacaagaaagaucuguacgaccaugcucugaugagcauuaucuccaccuuccaccucagcauuccgaauuuuaaccaguaugaggccaugucuugcgauuucaauggaggcaagaucuccgugcaguacaaccugagccacucuuaugccauugacgcugccaaucauuguggcacggucgcuaacgggauccuucaaaccuuuaugcgcauggccuggggaggcuccuacaucgcgcuggauagcgggagaggaaacugggacugcauuaugacaucuuaccaguaucucaucauucagaauaccacaugggagaaccacugucaguucucccggcccagcccuaucggcuaccuggggcuucugucccaacgcaccagagauauuuauaucucucggcgcagacggggaacguuuacauggacccucagcgacuccgaaggcaaugccacacccggcggguacugccugacccgcuggaugcugaucgaggcugaacucaaguguuucggaaacaccgccguggcuaaaugcaaugagaagcaugaugaggaauuuugcgacaugcugagacuuuucgauuuuuguaaacaggccauuagccggcugaagucuccugcgcagauguccauccagcucauuaacaaagccguuaaugcucugaucaacgaccaacuuauuaugaagaaucaucugcgcgacaucaugggcauccccuauugcaacuacagcaaguauuguuaccucaaucacacaauuacggggaaaaccucucugccuaagugcugucuggugagcaacggauccuaccucaaugagacacacuucucugaugacaucgaacagcaggccgauaacaugauuaccgagaugcugcaaaaagaauauauggagagacagggcaagacaccgcuugggcuggucgaccucuucguguuuagcaccuccuucuaccugaucagcauuuuucugcggcuugugaaaauccccacgcaccgccauauugucggaaagccuugccccaaaccucacagacucaaucauaugggcaucuguucuugcggccuguauaagcagcccgggguuccggugcgguggaagagaugaggacuaguaauaaggaaacuguaugaaugucugugggcaggaagugaagagauccuucuguaaagguuuuuggaauuaugucugcugaauaauaaacuuuuuugaaauaauaaaucugguagaaaaaugagaucucaaaggcucuuuucagagccaccaaaaaaaaaaaaaaaaaaaaaaaaaaaaaaaaaaaaaaaaaaaaaaaaaaaaaaaaaaaaaaaaaaaaaaaaaaaaaaaaaaaaaaaaaaaaaaaaaaaaa

SEQ ID NO: 27498 - RNA, 1809 nt, Artificial Sequence
  mRNA product Design b-4 (hSL-A100) comprising derived and/or modified sequence from LASV(Togo/2016/7082;Clade VI)__AMR44577__GPCmut4 (opt5)
aggagagucccgcagucggcguccagcggcucugcuuguucgugugugugucguugcaggccuuauucaagcuuaccaugggccagaucauuaccuucuuucaagaggugccccacgucaucgaagagguuaugaacauugugcugaucgcccucagccugcuugcuauucugaaggggguguacaaugucgccacaugcggaaucaucggccucgugacguuccuguuucuuugugggagauccugcucucugauuuauaaaggaagcuacgaacuccagacccuggagcugaacauggaaacacucaauauguguaugccucuguccugcaccaagaacucuagccaucacuauauccggguuggcaaugagacagggcuugagcugacccucacaaacaccuccauuaucaaucauaaauucuguaaccugucugacgcgcacaagcgcaaucuuuacgaucaugcucugaugagcauucucuccacguuucaccugagcaucccgaacuucaaucaguaugaagccaugucuugcgacuuuaacggaggcaaaauuuccgugcaguacaaucugagccacgccuaugcugucgaugccgcugagcauuguggcaccguggccaacgggguucuccaaacauucaugagaauggcguggggaggcucuuacaucgcccuggacuccgggcggggaaauugggauugcaucaugaccagcuaccaguaucuuauuauccagaacacaaccugggaagaccacugucaguuuucucgccccuccccuauuggcuaccuggggcuccugagccaaagaacgcgggauaucuauauuucccgcagacggcgcggaacauucaccuggacacuuucugacagcgagggcaacgagacccccggcggguacugccugaccagauggaugcucaucgaagcugagcugaaguguuuuggaaauacagccguggcuaagugcaacgaaaaacaugaugaggaguucugcgacaugcugcggcucuuugauuucuguaagcaggccauccagcgccugaaauccccugcgcagaugagcauucaacuuaucaauaaggccgucaacgcucugauuaaugaccagcucaucaugaaaaaccaccugagagauaugaugggcauucccuauugcaauuacucuaaguauuguuaccuuaaccacacguccagcgggcggaccucucugccuaagugcugucucgugagcaauggauccuaccugaacgaaacacauuucucugacgacaucgagcagcaagccgauaauaugaucaccgaaaugcugcagaaagaguauauugaccgccagggcaagacaccgcucgggcugguggaucuuuuugucuucagcaccuccuuuuaccugaucagcauuuuccuccaccugaucaaaauucccacgcauagacacaucguuggaaagccuugccccaaaccucaucggcugaaccacaugggcauuuguucuugcggccuuuauaagcagcccggggugccgacaagauggaaacgcugaggacuaguaauaaggaaacuguaugaaugucugugggcaggaagugaagagauccuucuguaaagguuuuuggaauuaugucugcugaauaauaaacuuuuuugaaauaauaaaucugguagaaaaaugagaucucaaaggcucuuuucagagccaccaaaaaaaaaaaaaaaaaaaaaaaaaaaaaaaaaaaaaaaaaaaaaaaaaaaaaaaaaaaaaaaaaaaaaaaaaaaaaaaaaaaaaaaaaaaaaaaaaaaaa

SEQ ID NO: 27499 - RNA, 1809 nt, Artificial Sequence
  mRNA product Design b-4 (hSL-A100) comprising derived and/or modified sequence from LASV(KAK-428;Clade n.d. (VII))__ANH09740__GPCmut4 (opt5)
aggagagucccgcagucggcguccagcggcucugcuuguucgugugugugucguugcaggccuuauucaagcuuaccaugggccagaucgugaccuucuuucaagaggucccccacguuauugaagaggugaugaacaucgugcugauugcccucagccugcuugcuauccugaaggggcucuacaauuucgccacaugcggagucauuggccugaucacguuucuucugcucugugggagauccugcucugcgaccuauaaaggacaguacgaacugcagacacuggagcucaacauggaaagccugaauauguguaugccucuuuccugcaccaagaacaauucucaucacuauauccgggcuggcaacaauacagggcuggagcucacccugacaaacaccagcauuaucucccauaaauucuguaaucuuucugacgcccacaagaaaaaccuguacgaucauacgcucaugagcauuaucaccacauuucaccuguccauuccgaauuucaaccaguaugaggccaugagcugcgacuuuaauggaggcaagaucucuauucaauacaaccugucccacagcuaugcuggcgaugccgcucagcauugugggaccguggccaauggaguucuccagacauucaugcgcauggcguggggcgggucuuaccuggcccuugacuccggaagacggggcugggauugcaucaucagcucuuaccaguaucugauuauccaaaacaccacgugggacgaucacugucaguuuucccgccccagcccuauuggguaccucggauucgugucccagaagacaagagacaucuauauuucucggcgcagacggggcaccuuuacauggacccugagcgauuccgaaggccaugacaugcccgggggauacugccuuacccgcuggaugcugaucgaggcugaucucaaauguuucggcaacacagccgucgcuaagugcaaugaaaaacacgacgaggaguuuugcgauauguggagacuguucgacuucuguaagcaggccauccaacggcugaaagcgccugcccagaugaacauucagcucaucaauaaggcugugaacgcccugauuaaugaccaacuuaugaugaagaaccaucugcgcgauaucauggggauucccuauugcaauuacagcaaauuuuguuaucucaacaauacgaccacaggaagaaccucucugccucggugcugucuuaucuccaacggcagcuaccugaaugaaacacacuucucugacgauaucgagcagcaggcugacaacaugauuaccgaaaugcuccagaaggaguacauggaucgccaagggaaaacgccgcugggacugguugaccucuuuguguucagcacauccuuuuaucugaucaccauuuuccuucaccuggucaagauccccacccauagacacauugugggcaaaccuugccccaagccucaucggcucaaucacaugggcaucuguucuugcgggcuguacaaacagcccggagugccggucagauggaagcgcugaggacuaguaauaaggaaacuguaugaaugucugugggcaggaagugaagagauccuucuguaaagguuuuuggaauuaugucugcugaauaauaaacuuuuuugaaauaauaaaucugguagaaaaaugagaucucaaaggcucuuuucagagccaccaaaaaaaaaaaaaaaaaaaaaaaaaaaaaaaaaaaaaaaaaaaaaaaaaaaaaaaaaaaaaaaaaaaaaaaaaaaaaaaaaaaaaaaaaaaaaaaaaaaaa

SEQ ID NO: 27500 - RNA, 1809 nt, Artificial Sequence; identical to SEQ ID NO: 27494
  mRNA product Design b-4 (hSL-A100) comprising derived and/or modified sequence from LASV(Pinneo-NIG-1969;Clade I)__AIT17836__GPCmut4 (opt5)

SEQ ID NO: 27501 - RNA, 1809 nt, Artificial Sequence
  mRNA product Design b-4 (hSL-A100) comprising derived and/or modified sequence from LASV(ISTH0009-NIG-2011;Clade II)__AIT17404__GPCmut4 (opt5)
aggagagucccgcagucggcguccagcggcucugcuuguucgugugugugucguugcaggccuuauucaagcuuaccaugggccagaucauuaccuucuuucaagaggugccccacgucaucgaagagguuaugaacauugugcugaucgcccucagccugcuugcuauucugaaggggaucuacaauguggccacaugcggacucuucggccuggucuccuuucuucugcucugugggagaucuugcagcacgaccuauaaaggaguguacgaacugcagacacuggagcucgacauggcgucccugaacauguguaugccucuuucuugcaccaagaauaacagccaucacuauaucaugguuggcaaugaaacagggcuggagcucacccugacaaacaccuccauuaucaaucauaaauucuguaaccuuucugaugcucacaagaaaaaucuguacgaccaugcccucaugagcauuaucuccacguuucaccugagcauuccgaacuucaaucaguaugaggccaugucuugcgauuuuaacggaggcaagaucuccgugcaguacaaucugagccacgcuuaugccgucgacgcugccaaccauuguggcaccauugcgaauggggugcuccaaacauucaugcggauggccuggggaggcucuuacaucgcucuggauuccgggaagggaagcugggacugcaucaugaccucuuaccaguaucuuauuauccagaacacaaccugggaagaucacugucaguuuucccgccccagcccuauuggcuaccuggggcuccugucccaaagaacgcgggacaucuauauuucucgcagacggcgcggaacauucaccuggacacuuagcgauuccgagggcaacgaaacccccggcggguacugccugaccagauggaugcucaucgaggccgagcugaaauguuuuggaaauacagcuguugccaagugcaacgaaaaacaugacgaggaguucugcgauaugcugcggcucuuugacuucuguaagcaggcgauccgcagacugaaaacgccugcccagaugagcauucagcuuaucaauaaggcugugaacgcccugauuaaugaucaacucaucaugaagaaccaucugcgggacauuaugggcauccccuauugcaauuacucuaaauauuguuaccuuaaccacaccgucacagggaagaccucccugccucgcugcugucucgugagcaauggaucuuaccugaacgaaacacacuucagcgacgauaucgaacagcaggcugacaauaugauuaccgagcugcuccaaaaagaguauauggauagacagggcaagacgccgcuggggcuuguggaccuguuugucuucuccacaucuuuuuaccucaucagcauuuuccugcaccugaucaaaauucccacccaucggcacaucaccggaaagccuugccccaaaccucaucgccuuaaccacaugggcauuuguuccugcggccucuauaagcaccccgggguuccggugaaguggaaaagaugaggacuaguaauaaggaaacuguaugaaugucugugggcaggaagugaagagauccuucuguaaagguuuuuggaauuaugucugcugaauaauaaacuuuuuugaaauaauaaaucugguagaaaaaugagaucucaaaggcucuuuucagagccaccaaaaaaaaaaaaaaaaaaaaaaaaaaaaaaaaaaaaaaaaaaaaaaaaaaaaaaaaaaaaaaaaaaaaaaaaaaaaaaaaaaaaaaaaaaaaaaaaaaaaa

SEQ ID NO: 27502 - RNA, 1809 nt, Artificial Sequence
  mRNA product Design b-4 (hSL-A100) comprising derived and/or modified sequence from LASV(ISTH2010-NIG-2012;Clade II)__AIT17482__GPCmut4 (opt5)
aggagagucccgcagucggcguccagcggcucugcuuguucgugugugugucguugcaggccuuauucaagcuuaccaugggccagaucauuaccuucuuucaagaggugccccacgucaucgaagagguuaugaacauugugcugaucgcccucagccugcuugcuauucugaaggggaucuacaauguggccacaugcggacucuucggccuggucuccuuucuucugcucugugggagaucuugcagcacgaccuauaaaggaguguacgaacugcagacacuggagcucgacauggcgucccugaacauguguaugccucuuucuugcaccaagaauaacagccaucacuauaucaugguuggcaaugaaacagggcuggagcucacccugacaaacaccuccauuaucaaucauaaauucuguaaccuuucugaugcucacaagaaaaaucuguacgaccaugcccucaugagcauuaucuccacguuucaccugagcauuccgaacuucaaucaguaugaggccaugucuugcgauuuuaacggaggcaagaucuccgugcaguacaaucugagccacgcuuaugccgucgacgcugccaaccauuguggcaccauugcgaauggggugcuccaaacauucaugcggauggccuggggaggcucuuacaucgcucuggauuccgggaagggaagcugggacugcaucaugaccucuuaccaguaucuuauuauccagaacauuacaugggaagaucacugucaguuuucccgccccagcccuaucggcuaccuggggcuccugucccaaagaacccgggacauuuauaucucucgcagacggcgcggaacguucacauggacccuuagcgauuccgagggcaacgaaacacccggcggguacugccugaccagauggaugcucaucgaggccgagcugaaauguuuuggaaauaccgcuguugccaagugcaacgaaaaacaugacgaggaguucugcgauaugcugcggcucuuugacuucuguaagcaggcgauucgcagacugaaaacgccugcccagaugagcauccagcuuauuaauaaggcugugaacgcccugaucaaugaucaacucauuaugaagaaccaucugcgggacaucaugggcauccccuauugcaauuacucuaaauauuguuaccuuaaccacacagucaccgggaagacaucccugccucgcugcugucucgugagcaauggaucuuaccugaacgaaacccacuucagcgacgauauugaacagcaggcugacaauaugaucacagagcugcuccaaaaagaguauauugauagacagggcaagaccccgcuggggcuuguggaccuguuugucuucuccacgucuuuuuaccucaucagcauuuuccugcaccugguuaaaauccccacacaucggcacguggugggaaagccuugccccaaaccucaucgccuuaaccacaugggcauuuguuccugcggccucuauaagcaccccggggucccggugaaguggaaaagaugaggacuaguaauaaggaaacuguaugaaugucugugggcaggaagugaagagauccuucuguaaagguuuuuggaauuaugucugcugaauaauaaacuuuuuugaaauaauaaaucugguagaaaaaugagaucucaaaggcucuuuucagagccaccaaaaaaaaaaaaaaaaaaaaaaaaaaaaaaaaaaaaaaaaaaaaaaaaaaaaaaaaaaaaaaaaaaaaaaaaaaaaaaaaaaaaaaaaaaaaaaaaaaaaa

SEQ ID NO: 27503 - RNA, 1809 nt, Artificial Sequence
  mRNA product Design b-4 (hSL-A100) comprising derived and/or modified sequence from LASV(Lassa virus/H.sapiens-wt/NGA/2015/ISTH_0543;Clade II)__AVO03639__GPCmut4 (opt5)
aggagagucccgcagucggcguccagcggcucugcuuguucgugugugugucguugcaggccuuauucaagcuuaccaugggccagaucauuaccuucuuucaagaggugccccacgucaucgaagagguuaugaacauugugcugaucgcccucagccugcuugcuauucugaaggggaucuacaauguggccacaugcggacucuucggccuggucuccuuucuucugcucugugggagaucuugcagcacgaccuauaaaggaguguacgaacugcagacacuggagcucgacauggcgaaccugaauauguguaugccucuuuccugcaccaagaacaauucucaucacuauaucaugguuggcaacgaaacagggcuggagcucacccugacaaauaccagcauuaucaaccauaaauucuguaaucuuuccgaugcucacaagaaaaaccuguacgaccaugcccucaugucuauuaucagcacguuucaccuguccauuccgaauuucaaccaguaugaggccaugagcugcgauuuuaauggaggcaagaucucugugcaguacaaccugucccacaccuaugcugucgacgccgcuaaucauuguggcacaauugccaacggggugcuccaaaccuucaugcggauggcguggggaggcagcuacaucgcccuggauucugggaagggauccugggacugcaucaugacaagcuaccaguaucuuguuauucagaacaccacgugggaagaucacugucaguuuucucgccccuccccuaucggcuaccuggggcuccugagccaaagaacacgggacauuuauaucucccgcagacggcgcggaaccuucacauggacccuuucugauagcgagggcaaugaaacccccggcggguacugccugacaagauggaugcucauugaggcugagcugaaauguuuuggaaacacggccguggcuaagugcaaugaaaaacaugacgaggaguucugcgauaugcugcggcucuuugacuucuguaagcaggccauccgcagacugaaaaccccugcgcagauguccauccagcuuauuaacaaggccgucaaugcucugaucaacgaucaacucauuaugaagaaucaucugcgggacaucaugggcauucccuauugcaacuacagcaaauauuguuaccuuaaucacacagugaccgggaagacaucucugccucgcugcugucucguguccaacggaagcuaccugaaugaaacccacuucucugacgauaucgaacagcaggccgacaacaugaucacggagcugcuccaaaaagaguauauugauagacagggcaagacaccgcuggggcuugucgaccuguuuguuuucagcaccuccuuuuaccucaucucuauuuuccugcaccuggugaaaauccccacccaucggcacauuacaggaaagccuugccccaaaccucaucgccuuaaucacaugggcaucuguagcugcggccucuauaagcaccccggggugccggucaaguggaaaagaugaggacuaguaauaaggaaacuguaugaaugucugugggcaggaagugaagagauccuucuguaaagguuuuuggaauuaugucugcugaauaauaaacuuuuuugaaauaauaaaucugguagaaaaaugagaucucaaaggcucuuuucagagccaccaaaaaaaaaaaaaaaaaaaaaaaaaaaaaaaaaaaaaaaaaaaaaaaaaaaaaaaaaaaaaaaaaaaaaaaaaaaaaaaaaaaaaaaaaaaaaaaaaaaaa

SEQ ID NO: 27504 - RNA, 1809 nt, Artificial Sequence
  mRNA product Design b-4 (hSL-A100) comprising derived and/or modified sequence from LASV(Lassa virus/H.sapiens-wt/NGA/2016/ISTH_0009;Clade II)__AVO03571__GPCmut4 (opt5)
aggagagucccgcagucggcguccagcggcucugcuuguucgugugugugucguugcaggccuuauucaagcuuaccaugggccagaucauuaccuucuuucaagaggugccccacgucaucgaagagguuaugaacauugugcugaucgcccucagccugcuugcuauucugaaggggaucuacaauguggccacaugcggacuccugggccuugucuccuuccugcuccugugugggagaucuugcagcacgaccuauaaaggaguguacgaacugcagacacucgagcuggacauggcgucccuuaacauguguaugccucugucuugcaccaagaauaacagccaucacuauaucaugguuggcaaugaaacagggcucgagcugacccuuacaaacaccuccauuaucaaucauaaauuuuguaaccugucugaugcucacaagaaaaaucucuacgaccaugcccugaugagcauuaucuccacguuccaccugagcauuccgaacuuuaaucaguaugaggccaugucuugcgauuucaacggaggccggaucuccgugcaguacaaucucagccacucuuaugcugucgacgccgcuaaccauuguggcaccauugccaauggggugcugcaaacauuuaugcgcauggcguggggaggcuccuacaucgcccuugauagcgggaagggaucuugggacugcaucaugaccuccuaccaguaucugauuauccagaacacaaccugggaagaucacugucaguucagcagacccuccccuauuggcuaccucgggcugcuuucucaacggacgcgcgacaucuauauuagcagacggcgcagaggaacauuuaccuggacacuguccgauagcgagggcaacgaaacccccggcggguacugccucacccgguggaugcugaucgaggcugagcugaaguguuucggaaauacagccguugcuaaaugcaacgaaaagcaugacgaggaauuuugcgauaugcuccgccuguucgacuuuuguaaacaggccaucagacggcuuaagacgccugcgcagaugucuauucagcugaucaauaaagccgugaacgcucucauuaaugaucaacugaucaugaagaaccaccuucgcgacauuaugggcauccccuauugcaauuacuccaaguauuguuaccugaaccacaccgucacagggaaaaccagccucccuagaugcugucuggugucuaauggaagcuaccugaacgagacacauuucuccgacgauaucgaacagcaggccgacaauaugauuaccgagcuccugcaaaaggaguauaucgaucggcagggcaaaacgccgcuugggcugguggaccucuucgucuuuucuaccagcuucuaccugauuuccaucuuucugcaccuuguuaagauucccacacaucgccacaucaccggaaaaccuugccccaagccucauagacucaaccacaugggcauuuguagcugcggccuguauaaucaccccggggugccggugaaauggaagcggugaggacuaguaauaaggaaacuguaugaaugucugugggcaggaagugaagagauccuucuguaaagguuuuuggaauuaugucugcugaauaauaaacuuuuuugaaauaauaaaucugguagaaaaaugagaucucaaaggcucuuuucagagccaccaaaaaaaaaaaaaaaaaaaaaaaaaaaaaaaaaaaaaaaaaaaaaaaaaaaaaaaaaaaaaaaaaaaaaaaaaaaaaaaaaaaaaaaaaaaaaaaaaaaaa

SEQ ID NO: 27505 - RNA, 1809 nt, Artificial Sequence
  mRNA product Design b-4 (hSL-A100) comprising derived and/or modified sequence from LASV(Lassa virus/H.sapiens-wt/NGA/2016/ISTH_0017;Clade II)__AVO03567__GPCmut4 (opt5)
aggagagucccgcagucggcguccagcggcucugcuuguucgugugugugucguugcaggccuuauucaagcuuaccaugggccagaucauuaccuucuuucaagaggugccccacgucaucgaagagguuaugaacauugugcugaucgcccucagccugcuugcuauucugaaggggaucuacaauguggccacaugcggacucuucggccuggucuccuuucuucugcucugugggagaucuugcagcacgaccuauaaaggaguguacgaacugcagacacuggagcucgacauggcgucccugaacauguguaugccucuuucuugcaccaagaauaacagccaucacuauaucaugguuggcaaugaaacagggcuggagcucacccugacaaacaccuccauuaucaaucauaaauucuguaaccuuucugaugcucacaagaaaaaucuguacgaccaugcccucaugagcauuaucuccacguuucaccugagcauuccgaacuucaaucaguaugaggccaugucuugcgauuuuaacggaggcaagaucuccgugcaguacaaucugagccacaccuaugcuauugacgccgcuaaccauuguggcacaaucgccaaugggguccuccaaaccuucaugcggauggcguggggaggcucuuacaucgcccuggauuccgggaagggaagcugggacugcauuaugacaucuuaccaguaucuuaucauucagaacaccacgugggaagaucacugucaguuuucccgccccagcccuaucggcuaccuggggcuccugucccaaagaacacgggacauuuauaucucucgcagacggcgcggaaccuucacauggacccuuagcgauuccgagggcaacgaaacccccggcggguacugccugacaagauggaugcucaucgaggcugagcugaaauguuuuggaaauacggccguggcuaagugcaacgaaaaacaugacgaggaguucugcgauaugcugcggcucuuugacuucuguaagcaggccauucgcagacugaaaaccccugcgcagaugagcauccagcuuauuaauaaggccguuaacgcucugaucaaugaucaacucauuaugaagaaccaucugcgggacaucaugggcauccccuauugcaauuacucuaaauauuguuaccuuaaccacacagugaccgggaagacaucccugccucgcugcugucucgucagcaauggaucuuaccugaacgaaacccacuucagcgacgauauugaacagcaggccgacaauaugaucacggagcugcuccaaaaagaguauauggauagacagggcaagacaccgcuggggcuuguggaccuguuuguguucuccaccucuuuuuaccucauuagcaucuuccugcaccugguccggauucccacccaucgccacguuaucggaaaaccuugccccaagccucauagacuuaaccacaugggcauuuguuccugcggccucuauaaacaccccggggugccggugaaguggaagcggugaggacuaguaauaaggaaacuguaugaaugucugugggcaggaagugaagagauccuucuguaaagguuuuuggaauuaugucugcugaauaauaaacuuuuuugaaauaauaaaucugguagaaaaaugagaucucaaaggcucuuuucagagccaccaaaaaaaaaaaaaaaaaaaaaaaaaaaaaaaaaaaaaaaaaaaaaaaaaaaaaaaaaaaaaaaaaaaaaaaaaaaaaaaaaaaaaaaaaaaaaaaaaaaaa

SEQ ID NO: 27506 - RNA, 1809 nt, Artificial Sequence
  mRNA product Design b-4 (hSL-A100) comprising derived and/or modified sequence from LASV(Lassa virus/H.sapiens-wt/NGA/2018/ISTH_0959;Clade II)__AVV65099__GPCmut4 (opt5)
aggagagucccgcagucggcguccagcggcucugcuuguucgugugugugucguugcaggccuuauucaagcuuaccaugggccagaucauuaccuucuuucaagaggugccccacgucaucgaagagguuaugaacauugugcugaucgcccucagccugcuugcuauucugaaggggaucuacaauguggucacaugcggacucuucggccugguguccuuucuucugcucugugggagaucuugcagcacgaccuauaaaggaguuuacgaacugcagacacuggagcucgacauggccucccugaacauguguaugccucuuucuugcaccaagaauaacagccaucacuauaucauggugggcaaugaaacagggcuggagcucacccugacaaacaccuccauuaucaaucauaaauucuguaaccuuucugaugcgcacaagaaaaaucuguacgaccaugcucucaugagcauuaucuccacguuucaccugagcauuccgaacuucaaucaguaugaggccaugucuugcgauuuuaacggaggcaagaucuccguccaguacaaucugagccacgccuaugcuauugacgccgcuaaccauuguggcaccaucgccaauggggugcuccaaacauucaugcggauggcguggggaggcucuuacaucgcccuggauuccgggaagggaagcugggacugcauuaugaccucuuaccaguaucuuaucauucagaacacaaccugggaagaucacugucaguuuucccgccccagcccuaucggcuaccuggggcuccugucccaaagaacgcgggacauuuauaucucucgcagacggcgcggaacauucaccuggacacuuagcgauuccgagggcaacgaaacccccggcggguacugccugaccagauggaugcucaucgaggcugagcugaaauguuuuggaaauacagccguugcuaagugcaacgaaaaacaugacgaggaguucugcgauaugcugcggcucuuugacuucuguaagcaggccauucgcagacugaaaacgccugcgcagaugagcauccagcuuauuaauaaggccgugaacgcucugaucaaugaucaacucauuaugaagaaccaucugcgggacaucaugggcauccccuauugcaauuacucuaaauauuguuaccuuaaccacaccgucacagggaagaccucccugccucgcugcugucucgugagcaauggaucuuaccugaacgaaacacacuucagcgacgauauugaacagcaggccgacaauaugaucaccgagcugcuccaaaaagaguauauugauagacagggcaagacgccgcuggggcuuguggaccuguuugucuucuccacaucuuuuuaccucaucagcauuuuccugcaccugguuaaaauccccacccaucggcacgugauuggaaagccuugccccaaaccucaucgccuuaaccacaugggcaucuguuccugcggccucuauaagcaccccggggugccggucaaguggaaaagaugaggacuaguaauaaggaaacuguaugaaugucugugggcaggaagugaagagauccuucuguaaagguuuuuggaauuaugucugcugaauaauaaacuuuuuugaaauaauaaaucugguagaaaaaugagaucucaaaggcucuuuucagagccaccaaaaaaaaaaaaaaaaaaaaaaaaaaaaaaaaaaaaaaaaaaaaaaaaaaaaaaaaaaaaaaaaaaaaaaaaaaaaaaaaaaaaaaaaaaaaaaaaaaaaa

SEQ ID NO: 27507 - RNA, 1809 nt, Artificial Sequence
  mRNA product Design b-4 (hSL-A100) comprising derived and/or modified sequence from LASV(LASV003-NIG-2008;Clade II)__AIT17580__GPCmut4 (opt5)
aggagagucccgcagucggcguccagcggcucugcuuguucgugugugugucguugcaggccuuauucaagcuuaccaugggccagaucauuaccuucuuucaagaggugccccacgucaucgaagagguuaugaacauugugcugaucgcccucagccugcuugcuauucugaaggggaucuacaauguggccacaugcggacucuucggccuggucuccuuucuucugcucugugggagaucuugcagcacgaccuauaaaggaguguacgaacugcagacacuggagcucgacauggcgucccugaacauguguaugccucuuucuugcaccaagaauaacagccaucacuauaucaugguuggcaaugaaacagggcuggagcucacccugacaaacaccuccauuaucaaucauaaauucuguaaccuuucugaugcucacaagaaaaaucuguacgaccaugcccucaugagcauuaucuccacguuucaccugagcauuccgaacuucaaucaguaugaggccaugucuugcgauuuuaacggaggcaagaucuccgugcaguacaaucugagccacaccuaugcugucgacgccgcuaaccauuguggcacaauugccaauggggugcuccaaaccuucaugcggauggcguggggaggcucuuacaucgcccuggauuccgggaagggaagcugggacugcaucaugacaucuuaccaguaucuuauuauccagaacaccacgugggaagaucacugucaguuuucccgccccagcccuauuggcuaccuggggcuccugucccaaagaacacgggacaucuauauuucucgcagacggcgcggaaccuucacauggacccuuagcgauuccgagagcaacgaaacccccggcggcuacugccugacaagauggaugcucaucgaggcugagcugaaauguuuugggaauacggccguugcuaagugcaacgaaaaacaugacgaggaguucugcgauaugcugcggcucuuugacuucuguaagcaggccauccgcagacugaaagcgccugcccagaugucuauucagcuuaucaauaaggcugugaacgcccugauuaaugaucaacucaucaugaagaaccaucugcgggacauuaugggaauccccuauugcaauuacuccaaauauuguuaccuuaaccacaccgucacaggccgcaccagccugccuagaugcugucucgugucuaaugggagcuaccugaacgaaacacacuucuccgacgauaucgaacagcaggcugacaauaugauuaccgagcugcuccaaaaggaguauauggaucggcagggaaaaacgccgcugggccuuguggaccuguuugucuucucuaccagcuuuuaccucaucuccauuuuccugcaccugguuaagauccccacacaucgccacgugauugggaaaccuugccccaagccucauagacuuaaccacaugggaaucuguagcugcggccucuauaaacaccccggcgugccggucaaguggaagcggugaggacuaguaauaaggaaacuguaugaaugucugugggcaggaagugaagagauccuucuguaaagguuuuuggaauuaugucugcugaauaauaaacuuuuuugaaauaauaaaucugguagaaaaaugagaucucaaaggcucuuuucagagccaccaaaaaaaaaaaaaaaaaaaaaaaaaaaaaaaaaaaaaaaaaaaaaaaaaaaaaaaaaaaaaaaaaaaaaaaaaaaaaaaaaaaaaaaaaaaaaaaaaaaaa

SEQ ID NO: 27508 - RNA, 1809 nt, Artificial Sequence
  mRNA product Design b-4 (hSL-A100) comprising derived and/or modified sequence from LASV(LASV035-NIG-2009;Clade II)__AIT17588__GPCmut4 (opt5)
aggagagucccgcagucggcguccagcggcucugcuuguucgugugugugucguugcaggccuuauucaagcuuaccaugggccagaucauuaccuucuuucaagaggugccccacgucaucgaagagguuaugaacauugugcugaucgcccucagccugcuugcuauucugaaggggaucuacaauguggccacaugcggacucuucggccuggucuccuuucuucugcucugugggagaucuugcagcacgaccuauaaaggaguguacgaacugcagacacuggagcucgacauggcgucccugaacauguguaugccucuuucuugcaccaagaauaacagccaucacuauaucaugguuggcaaugaaacagggcuggagcucacccugacaaacaccuccauuaucaaucauaaauucuguaaccuuucugaugcucacaagaaaaaucuguacgaccaugcccucaugagcauuaucuccacguuucaccugagcauuccgaacuucaaucaguaugaggccaugucuugcgauuuuaacggaggcaagaucuccgugcaguacaaucugagccacgcuuaugccgucgacgcugccaaccauuguggcaccauugcgaauggggugcuccaaacauucaugcggauggccuggggaggcucuuacaucgcucuggauuccgggaagggaagcugggacugcaucaugaccucuuaccaguaucuuauuauccagaacacaaccugggaagaucacugucaguuuucccgccccagcccuauuggcuaccuggggcuccugucccaaagaacgcgggacaucuauauuucucgcagacggcgcggaacauucaccuggacacuuagcgauuccgagggcaacgaaacccccggcggguacugccugaccagauggaugcucaucgaggccgagcugaaauguuuuggaaauacagcuguugccaagugcaacgaaaaacaugacgaggaguucugcgauaugcugcggcucuuugacuucuguaagcaggcgauccgcagacugaaagccccugcucagaugagcauucagcuuaucaauaaggccgugaacgcucugauuaaugaucaacucaucaugaagaaccaucugcgggacauuaugggcauccccuauugcaauuacucuaaauauuguuaccuuaaccacacggucaccgggaagacaucccugccucgcugcugucucgugagcaauggaucuuaccugaacgaaacccacuucagcgacgauaucgaacagcaggccgacaauaugauuacagagcugcuccaaaaagaguauaucgauagacagggcaagaccccgcuggggcuuguggaccuguuugucuucuccacgucuuuuuaccucauuagcaucuuccugcaccugguuaaaauucccacacaucggcacgugaucggaaagccuugccccaaaccucaucgccuuaaccacaugggcauuuguuccugcggccucuauaagcaccccggggugccggucaaguggaaaagaugaggacuaguaauaaggaaacuguaugaaugucugugggcaggaagugaagagauccuucuguaaagguuuuuggaauuaugucugcugaauaauaaacuuuuuugaaauaauaaaucugguagaaaaaugagaucucaaaggcucuuuucagagccaccaaaaaaaaaaaaaaaaaaaaaaaaaaaaaaaaaaaaaaaaaaaaaaaaaaaaaaaaaaaaaaaaaaaaaaaaaaaaaaaaaaaaaaaaaaaaaaaaaaaaa

SEQ ID NO: 27509 - RNA, 1809 nt, Artificial Sequence
  mRNA product Design b-4 (hSL-A100) comprising derived and/or modified sequence from LASV(LASV1000-NIG-2009;Clade II)__AIT17782__GPCmut4 (opt5)
aggagagucccgcagucggcguccagcggcucugcuuguucgugugugugucguugcaggccuuauucaagcuuaccaugggccagaucauuaccuucuuucaagaggugccccacgucaucgaagagguuaugaacauugugcugaucgcccucagccugcuugcuauucugaaggggaucuacaauguggccacaugcggacucuucggccuggucuccuuucuucugcucugugggagaucuugcagcacgaccuauaaaggaguguacgaacugcagacacuggagcucgacauggcgucccugaacauguguaugccucuuucuugcaccaagaauaacagccaucacuauaucaugguuggcaaugaaacagggcuggagcucacccugacaaacaccuccauuaucaaucauaaauucuguaaccuuucugaugcucacaagaaaaaucuguacgaccaugcccucaugagcauuaucuccacguuucaccugagcauuccgaacuucaaucaguaugaggccaugucuugcgauuuuaacggaggcaagaucuccgugcaguacaaucugagccacaccuaugcugucgacgccgcuaaccauuguggcacaauugccaauggggugcuccaaaccuucaugcggauggcguggggaggcucuuacaucgcccuggauuccgggaagggaagcugggacugcaucaugacaucuuaccaguaucuuauuauccagaacaccacgugggaagaucacugucaguuuucccgccccagcccuauuggcuaccuggggcuccugucccaaagaacacgggacaucuauauuucucgcagacggcgcggaaccuucacauggacccuuagcgauuccgagggcaacgaaacccccggcggguacugccugacaagauggaugcucaucgaggcugagcugaaauguuuuggaaauacggccguugcuaagugcaacgaaaaacaugacgaggaguucugcgauaugcugcggcucuuugacuucuguaagcaggccaucaaacgccugaagaccccugcgcagaugagcauucagcuuaucaauaaggccgugaacgcucugauuaaugaucaacucaucaugaaaaaccaccugagagacauuaugggcauccccuauugcaauuacucuaaguauuguuaccuuaaccacacagucaccgggaaaacaucccugccucggugcugucucgugagcaauggaucuuaccugaacgaaacccauuucagcgacgauaucgaacagcaggccgacaauaugauuacggagcugcuccaaaaggaguauaucgaucgccagggcaaaacaccgcuggggcuuguggaccuguuugucuucuccaccucuuuuuaccucauuagcaucuuccugcaccugguuaagauucccacccauagacacguggugggaaaaccuugccccaagccucaucggcuuaaccacaugggcaucuguuccugcggccucuauaagcaccccggggucccggugaaauggaagcgcugaggacuaguaauaaggaaacuguaugaaugucugugggcaggaagugaagagauccuucuguaaagguuuuuggaauuaugucugcugaauaauaaacuuuuuugaaauaauaaaucugguagaaaaaugagaucucaaaggcucuuuucagagccaccaaaaaaaaaaaaaaaaaaaaaaaaaaaaaaaaaaaaaaaaaaaaaaaaaaaaaaaaaaaaaaaaaaaaaaaaaaaaaaaaaaaaaaaaaaaaaaaaaaaaa

SEQ ID NO: 27510 - RNA, 1809 nt, Artificial Sequence
  mRNA product Design b-4 (hSL-A100) comprising derived and/or modified sequence from LASV(LASV221-NIG-2010;Clade II)__AIT17624__GPCmut4 (opt5)
aggagagucccgcagucggcguccagcggcucugcuuguucgugugugugucguugcaggccuuauucaagcuuaccaugggccagaucauuaccuucuuucaagaggugccccacgucaucgaagagguuaugaacauugugcugaucgcccucagccugcuugcuauucugaaggggaucuacaauguggccacaugcggacucuucggccuggucuccuuucuucugcucugugggagaucuugcagcacgaccuauaaaggaguguacgaacugcagacacuggagcucgacauggcgucccugaacauguguaugccucuuucuugcaccaagaauaacagccaucacuauaucaugguuggcaaugaaacagggcuggagcucacccugacaaacaccuccauuaucaaucauaaauucuguaaccuuucugaugcucacaagaaaaaucuguacgaccaugcccucaugagcauuaucuccacguuucaccugagcauuccgaacuucaaucaguaugaggccaugucuugcgauuuuaacggaggcaagaucuccgugcaguacaaucugagccacaccuaugcuauugacgccgcuaaccauuguggcacaaucgccaaugggguccuccaaaccuucaugcggauggcguggggaggcucuuacaucgcccuggauuccgggaagggaagcugggacugcauuaugacaucuuaccaguaucuuaucauucagaacaccacgugggaagaucacugucaguuuucccgccccagcccuaucggcuaccuggggcuccugucccaaagaacacgggacauuuauaucucucgcagacggcgcggaaccuucacauggacccuuagcgauuccgagggcaacgaaacccccggcggguacugccugacaagauggaugcucaucgaggcugagcugaaauguuuuggaaauacggccguggcuaagugcaacgaaaaacaugacgaggaguucugcgauaugcugcggcucuuugacuucuguaagcaggccauucgcagacugaaaaccccugcgcagaugagcauccagcuuauuaauaaggccguuaacgcucugaucaaugaucaacucauuaugaagaaccaucugcgggacaucaugggcauccccuauugcaauuacucuaaauauuguuaccuuaaccacacagugaccgggaagacaucccugccucgcugcugucucgucagcaauggaucuuaccugaacgaaacccacuucagcgacgauauugaacagcaggccgacaauaugaucacggagaugcugcaaaaagaguauauggauagacagggcaagacaccgcucgggcugguggaccuuuuuguguucuccaccucuuuuuaccugauuagcaucuuccuccaccuggucaaaauucccacccaucggcacguuaucggaaagccuugccccaaaccucaucgccugaaccacaugggcauuuguuccugcggccuuuauaagcaccccggggugccggugaaguggaaaagaugaggacuaguaauaaggaaacuguaugaaugucugugggcaggaagugaagagauccuucuguaaagguuuuuggaauuaugucugcugaauaauaaacuuuuuugaaauaauaaaucugguagaaaaaugagaucucaaaggcucuuuucagagccaccaaaaaaaaaaaaaaaaaaaaaaaaaaaaaaaaaaaaaaaaaaaaaaaaaaaaaaaaaaaaaaaaaaaaaaaaaaaaaaaaaaaaaaaaaaaaaaaaaaaaa

SEQ ID NO: 27511 - RNA, 1809 nt, Artificial Sequence
  mRNA product Design b-4 (hSL-A100) comprising derived and/or modified sequence from LASV(LASV237-NIG-2010;Clade II)__AIT17638__GPCmut4 (opt5)
aggagagucccgcagucggcguccagcggcucugcuuguucgugugugugucguugcaggccuuauucaagcuuaccaugggccagaucauuaccuucuuucaagaggugccccacgucaucgaagagguuaugaacauugugcugaucgcccucagccugcuugcuauucugaaggggaucuacaauguggccacaugcggacucuucggccuggucuccuuucuucugcucugugggagaucuugcagcacgaccuauaaaggaguguacgaacugcagacacuggagcucgacauggcgucccugaacauguguaugccucuuucuugcaccaagaauaacagccaucacuauaucaugguuggcaaugaaacagggcuggagcucacccugacaaacaccuccauuaucaaucauaaauucuguaaccuuucugaugcucacaagaaagaccuguacgaucaugcccucaugagcauuaucuccacguuucaccugagcauuccgaauuucaaccaguaugaggccaugucuugcgacuuuaauggaggcaagaucuccgugcaguacaaccugagccacaccuaugcugucgaugccgcuaaucauuguggcacaauugccaacggggugcuccaaaccuucaugcggauggcguggggaggcucuuacaucgcccuggacuccgggaagggaagcugggauugcaucaugacaucuuaccaguaucuuauuauccagaauaccacgugggaagaccacugucaguuuucccgccccagcccuauuggcuaccuggggcuccugucccaaagaacacgggauaucuauauuucucgcagacggcgcggaaccuucacauggacccuuagcgacuccgagggcaacgaaacccccggcggguacugccugacaagauggaugcucaucgaggcugagcugaaauguuuuggaaacacggccguugcuaagugcaaugaaaaacaugaugaggaguucugcgacaugcugcggcucuuugauuucuguaagcaggccauccgcagacugaaaaccccugcgcagaugagcauucagcuuaucaacaaggccgugaaugcucugauuaacgaccaacucaucaugaagaaucaucugcgggacauuaugggcauccccuauugcaacuacucuaaauauuguuaccuuaaucacacagucaccgggaagacaucccugccucgcugcugucucgugagcaacggaucuuaccugaaugaaacccacuucagcgaugacaucgaacagcaggccgauaacaugauuacggagcugcuccaaaaagaguauauggacagacagggcaagacaccgcuggggcuuguggaucuguuugucuucuccaccucuuuuuaccucaucagcauuuuccugcaccugaucaaaauucccacccaucggcacaucacaggaaagccuugccccaaaccucaucgccuuaaucacaugggcauuuguuccugcggccucuauaagcaccccgggguuccggugaaguggaaaagaugaggacuaguaauaaggaaacuguaugaaugucugugggcaggaagugaagagauccuucuguaaagguuuuuggaauuaugucugcugaauaauaaacuuuuuugaaauaauaaaucugguagaaaaaugagaucucaaaggcucuuuucagagccaccaaaaaaaaaaaaaaaaaaaaaaaaaaaaaaaaaaaaaaaaaaaaaaaaaaaaaaaaaaaaaaaaaaaaaaaaaaaaaaaaaaaaaaaaaaaaaaaaaaaaa

SEQ ID NO: 27512 - RNA, 1809 nt, Artificial Sequence
  mRNA product Design b-4 (hSL-A100) comprising derived and/or modified sequence from LASV(LASV253-NIG-2011;Clade II)__AIT17670__GPCmut4 (opt5)
aggagagucccgcagucggcguccagcggcucugcuuguucgugugugugucguugcaggccuuauucaagcuuaccaugggccagaucauuaccuucuuucaagaggugccccacgucaucgaagagguuaugaacauugugcugaucgcccucagccugcuugcuauucugaaggggaucuacaauguggccacaugcggacucuucggccuggucuccuuucuucugcucugugggagaucuugcagcacgaccuauaaaggaguguacgaacugcagacacuggagcucgacauggcgucccugaacauguguaugccucuuucuugcaccaagaauaacagccaucacuauaucaugguuggcaaugaaacagggcuggagcucacccugacaaacaccuccauuaucaaucauaaauucuguaaccuuucugaugcucacaagaaaaaucuguacgaccaugcccucaugagcauuaucuccacguuucaccugagcauuccgaacuucaaucaguaugaggccaugucuugcgauuuuaacggaggcaagaucuccgugcaguacaaucugagccacaccuaugcugucgacgccgcuaaccauuguggcacaauugccaauggggugcuccaaaccuucaugcggauggcguggggaggcucuuacaucgcccuggauuccgggaagggaagcugggacugcaucaugacaucuuaccaguaucuuauuauccagaacaccacgugggaagaucacugucaguuuucccgccccagcccuauuggcuaccuggggcuccugucccaaagaacacgggacaucuauauuucucgcagacggcgcggaaccuucacauggacccuuagcgauuccgagggcaacgaaacccccggcggguacugccugacaagauggaugcucaucgaggcugagcugaaauguuuuggaaauacggccguugcuaagugcaacgaaaaacaugacgaggaguucugcgauaugcugcggcucuuugacuucuguaagcaggccauccgcagacugaaagcgccugcccagaugagcauucagcuuaucaauaaggcugugaacgcccugauuaaugaucaacucaucaugaagaaccaucugcgggacauuaugggcauccccuauugcaauuacucuaaauauuguuaccuuaaccacaccgucacagggcgcaccucccugccuagaugcugucucgugagcaauggaucuuaccugaacgaaacacacuucagcgacgauaucgaacagcaggcugacaauaugauuaccgagcugcuccaaaaggaguauaucgaucggcagggcaaaacgccgcuggggcuuguggaccuguuugucuucuccacaucuuuuuaccucauuagcaucuuccugcaccugguuaagauucccacccaucgccacaucauuggaaaaccuugccccaagccucauagacuuaaccacaugggcaucuguuccugcggccucuauaaacaccccggggugccggugaaguggaagcggugaggacuaguaauaaggaaacuguaugaaugucugugggcaggaagugaagagauccuucuguaaagguuuuuggaauuaugucugcugaauaauaaacuuuuuugaaauaauaaaucugguagaaaaaugagaucucaaaggcucuuuucagagccaccaaaaaaaaaaaaaaaaaaaaaaaaaaaaaaaaaaaaaaaaaaaaaaaaaaaaaaaaaaaaaaaaaaaaaaaaaaaaaaaaaaaaaaaaaaaaaaaaaaaaa

SEQ ID NO: 27513 - RNA, 1809 nt, Artificial Sequence
  mRNA product Design b-4 (hSL-A100) comprising derived and/or modified sequence from LASV(LASV254-NIG-2011;Clade II)__AIT17674__GPCmut4 (opt5)
aggagagucccgcagucggcguccagcggcucugcuuguucgugugugugucguugcaggccuuauucaagcuuaccaugggccagaucauuaccuucuuucaagaggugccccacgucaucgaagagguuaugaacauugugcugaucgcccucagccugcuugcuauucugaaggggaucuacaauguggccacaugcggacucuucggccuggucuccuuucuucugcucugugggagaucuugcagcacgaccuauaaaggaguguacgaacugcagacacuggagcucgacaugaccaaccugaauauguguaugccucuuuccugcacaaagaacaauucucaucacuauaucaugguuggcaacgaaaccgggcuggagcucacacugaccaauacgagcauuaucaaccauaaauucuguaaucuuuccgaugcgcacaagaaaaaccuguacaaucaugcucucaugucuauuaucagcaccuuucaccuguccauuccgaacuucaaucaguaugaggccaugagcugcgacuuuaacggaggcaagaucucugugcaguacaaucugucccacagcuaugccgucgaugcugccaaccauuguggcacaauugcuaacggggugcuccaaaccuucaugcggauggccuggggaggcucuuacaucgcgcuggacuccgggaagggaaauugggauugcaucaugacaagcuaccaguaucuuauuauccagaacaccacgugggaagaccacugucaguuuucucgccccuccccuauuggcuaccuggggcuccugagccaaagaacacgggauaucuauauuucccgcagacggcgcggaaccuucacauggacccuuucugacagcgagggcaaugaaacccccggcggguacugccugacaagauggaugcucaucgaggccgagcugaaauguuuuggaaacacggcuguugccaagugcaaugaaaaacaugaugaggaguucugcgacaugcugcggcucuuugauuucuguaagcaggcuauccgcagacugaaaaccccugcccaggcgaacauucagcuuaucaauaaggccgugaacgcucugauuaaugaccaacucaucaugaagaaccaucugcgggauauuaugggcauccccuauugcaauuacuccaaauauuguuaccuuaaccacacagucaccgggaagacaagccugccucgcugcugucucgugucuaauggauccuaccugaacgaaacccacuucagcgacgacaucgaacagcaggccgauaauaugauuacggagcugcuccaaaaagaguauauggacagacagggcaagacaccgcuggggcuuguggaucuguuugucuucucuaccagcuuuuaccucaucuccauuuuccugcaccugguuaaaauccccacccaucggcacgugauuggaaagccuugccccaaaccucaucgccuuaaccacaugggcaucuguucuugcggccucuauaagcaccccggggugccggucaaguggaaaagaugaggacuaguaauaaggaaacuguaugaaugucugugggcaggaagugaagagauccuucuguaaagguuuuuggaauuaugucugcugaauaauaaacuuuuuugaaauaauaaaucugguagaaaaaugagaucucaaaggcucuuuucagagccaccaaaaaaaaaaaaaaaaaaaaaaaaaaaaaaaaaaaaaaaaaaaaaaaaaaaaaaaaaaaaaaaaaaaaaaaaaaaaaaaaaaaaaaaaaaaaaaaaaaaaa

SEQ ID NO: 27514 - RNA, 1809 nt, Artificial Sequence
  mRNA product Design b-4 (hSL-A100) comprising derived and/or modified sequence from LASV(Nig08-A19;Clade III)__ADU56618__GPCmut4 (opt5)
aggagagucccgcagucggcguccagcggcucugcuuguucgugugugugucguugcaggccuuauucaagcuuaccaugggccagaucgugaccuucuuucaagaggucccccacguuauugaagaggugaugaacaucgugcugauugcccucagcauccuggcuauucuuaaggggcuguacaauaucgccacaugcggacucaucggccuggucacguuccuucugcucuccgggagaucuuguagcaugaccuauaaaggaguguacgaacugcagacacuggagcucaacaugaauacccugaacaugugcaugccucuuuccuguacaaagaauaacucucaucacuauauuaugguuggcaaugaaaccgggcuggagcucacacugaccaacacgagccuucugcaucacaaauuuugcaaucucuccgacgcgcauaagaaaaaccuguacgaucacacccugaugucuaucauuagcacauuccaccucuccaucccgaauuuuaaccaguaugaggcuaugagcugugacuucaauggaggcaagauuaccgugcaguacaaccugucucauuccuaugccaucgaugccgcuaaucacugcggcacagucgccaacggggugcuucaaaccuuuaugcggauggcuuggggaggcagcuacauugcccuggacucugggcgcggaaagugggauuguaucaugacguccuaccaguaucucaucauucagaacacaaccugggaagaccauugccaguucagcagacccucuccuaucggcuaccuggggcuucugucccaacggacacgcgauauuuauaucagcagacggcgcagaggaaccuuuaccuggacacucuccgacucugagggcaaugaaacgcccggcggguacugucugacccgguggaugcugauugaggcggagcucaaaugcuucggaaacacagccguugcuaaguguaaugaaaaacacgaugaggaauuuugcgacaugcugcgccuuuucgauuuuugcaagcaggccaucagacggcugaaagcuccugcccagaugagcauccagcucauuaacaaggcggugaaugcccugaucaacgaccaacuuauuaugaagaaucaucugcgcgauaucaugggcauucccuauuguaacuacuccaaauauugcuaccucaaucacaccagcacagggagaaccucucugccucgguguugccuggucuccaacggaagcuaccucaaugagacgcacuucucugacgacaucgaacagcaggcugauaacaugaucacagagaugcugcaaaaggaguaucuugaccgccagggcaaaaccccgcuggggcucguggaucuguucguguuuagcaccuccuucuaccugauuucuaucuuucuucaucucgucaagauucccacacacagacauaucguuggaaaaccuugucccaagccucaccggcugaaucacaugggcauuugcagcuguggccuguauaaacagcccggggugccggugagauggaagcgcugaggacuaguaauaaggaaacuguaugaaugucugugggcaggaagugaagagauccuucuguaaagguuuuuggaauuaugucugcugaauaauaaacuuuuuugaaauaauaaaucugguagaaaaaugagaucucaaaggcucuuuucagagccaccaaaaaaaaaaaaaaaaaaaaaaaaaaaaaaaaaaaaaaaaaaaaaaaaaaaaaaaaaaaaaaaaaaaaaaaaaaaaaaaaaaaaaaaaaaaaaaaaaaaaa

SEQ ID NO: 27515 - RNA, 1812 nt, Artificial Sequence
  mRNA product Design b-4 (hSL-A100) comprising derived and/or modified sequence from LASV(G1180-SLE-2010;Clade IV)__AIT17168__GPCmut4 (opt5)
aggagagucccgcagucggcguccagcggcucugcuuguucgugugugugucguugcaggccuuauucaagcuuaccaugggccagaucgugaccuucuuucaagaggucccccacguuauugaagaggugaugaacaucgugcugauugcccucagcauccuggcuguccuuaaggggcuguacaauuucgccacaugcggacucgugggccugcuuacguuucugcuccugugugggagauccugcaccgcgucucgguauaaaggaguuuacgaacugcagacacucgagcugaacauggaaacccuuaauauguguaugccucugagcugcacaaagaacaauucccaucacuauauuauggugggcaacgagaccgggcucgagcugacacuuaccaauacgucuaucaucaaccauaaauucuguaaucugagcgacgcucacaagaaaaaccucuacgaucaugcccugauguccauuaucucuaccuuucaccugagcauuccgaauuucaaccaguaugaagccauguccugcgacuuuaauggaggcaagaucagcguccaguacaaccucucucacuccuaugcuggcgaugccgcuaaucauugugggacaguggccaacggaguucugcaaaccuucaugcgcauggcguggggcgggagcuacauugcccuugacucuggacacggcuccugggauugcaucaugacaagcuaccaguaucugauuauccagaacaccacgugggaggaccauugucaguuuucuagacccuccccuaucggguaccucggacugcuuagccaacggacacgcgauauuuauaucuccagacggcgcagaggcaccuucacauggacccugucugacagcgaaggcaaggauacccccgggggauacugccucacacgguggaugcugauugaggcugagcugaaauguuuuggcaauacggccguggcuaagugcaacgaaaaacacgacgaggaguucugcgauaugcuccgccuguuugacuucuguaagcaggccauccagagacuuaaagcgccugcccagauguccauucaacugaucaauaaggcugucaacgcccucaucaaugaucagcugauuaugaagaaccaccuucgggacaucauggggauucccuauugcaauuacagcaaauauuguuaccugaaccauaccacaaccggaaagacaucucucccuaaaugcugucugguguccaauggcagcuaccugaacgaaacccacuucucugacgauaucgaacagcaagcugacaauaugauuacggagaugcuccagaaggaguauauggaacgccaggggaaaacaccgcugggacuuguggaucuguuugucuucagcaccuccuuuuaccucaucucuaucuuccugcaucugguuaagauucccacccacagacauaucgugggcaaaagcugcccuaagccccaccggcuuaaccacaugggcauuuguuccugcgggcucuauaagcagccuggagugcccgucaaauggaagcgcugaggacuaguaauaaggaaacuguaugaaugucugugggcaggaagugaagagauccuucuguaaagguuuuuggaauuaugucugcugaauaauaaacuuuuuugaaauaauaaaucugguagaaaaaugagaucucaaaggcucuuuucagagccaccaaaaaaaaaaaaaaaaaaaaaaaaaaaaaaaaaaaaaaaaaaaaaaaaaaaaaaaaaaaaaaaaaaaaaaaaaaaaaaaaaaaaaaaaaaaaaaaaaaaaa

SEQ ID NO: 27516 - RNA, 1812 nt, Artificial Sequence
  mRNA product Design b-4 (hSL-A100) comprising derived and/or modified sequence from LASV(G1442-SLE-2011;Clade IV)__AIT17180__GPCmut4 (opt5)
aggagagucccgcagucggcguccagcggcucugcuuguucgugugugugucguugcaggccuuauucaagcuuaccaugggccagaucgugaccuucuuucaagaggucccccacguuauugaagaggugaugaacaucgugcugauugcccucagcauccuggcuguccuuaaggggcuguacaauguggccacaugcggacucauuggccugguuacguuccuucugcucugugggagauccugcaccacaacccuguauaaaggaguguacgaacugcagacacucgagcugaacauggaaacccuuaauauguguaugccucugucuugcacaaagaacaauagccaucacuauauccgggucggcaacgagaccgggcucgagcugacgcuuaccaauacauccaucauuaaccauaaauuuuguaaucugucugacgcgcacaagaaaaaccucuacgaucaugcucugaugagcaucauuuccaccuuccaccugucuaucccgaauuuuaaccaguaugaagccaugagcugcgacuucaauggaggcaagauuuccgugcaguacaaccucagccacucuuaugccggcgaugcugccaaucauugugggacaguugcuaacggagugcugcaaaccuuuaugcgcauggccuggggcggguccuacaucgcgcuugacagcggaagaggcaacugggauugcauuaugacgucuuaccaguaucugaucauccagaauacaaccugggacgaucacugucaguucucccggcccagcccuauuggguaccucggacugcuuucucaacgcacaagagacgucuauaucucccggcgcagacggggcaccuuuaccuggacacugagcgauuccgagggcaaggacacgcccgggggauacugccucacccgcuggaugcugauugaagccgagcugaaauguuucggcaacacagcuguggccaagugcaaugagaaacaugaugaagaguuuugcgacaugcucagacuguucgauuuuuguaagcaggcuauccagcggcuuaaagccccugcgcagaugucuauucaacugaucaacaaggccgugaaugcucucaucaacgaccagcugauuaugaagaaucaccuucgcgacaucauggggauucccuauugcaacuacagcaaauauuguuaccugaauaacaccgccacaggaaagaccucccucccuaaaugcugucugaucagcaauggcucuuaccugaacgaaacgcacuucuccgaugacauugagcaggaagcugauaauaugaucacagagaugcuccaaaaggaguauauggaaagacaggggaaaaccccgcugggacuugucgaccuguucguuuuuagcaccucuuucuaccucaucagcauuuuucugcaucuggugaagauccccacacaccggcauauugugggcaaauccugcccuaagccccaccgccuuaaccauaugggcaucuguucuugcgggcucuauaagcagccuggaguccccgugagauggaaacggugaggacuaguaauaaggaaacuguaugaaugucugugggcaggaagugaagagauccuucuguaaagguuuuuggaauuaugucugcugaauaauaaacuuuuuugaaauaauaaaucugguagaaaaaugagaucucaaaggcucuuuucagagccaccaaaaaaaaaaaaaaaaaaaaaaaaaaaaaaaaaaaaaaaaaaaaaaaaaaaaaaaaaaaaaaaaaaaaaaaaaaaaaaaaaaaaaaaaaaaaaaaaaaaaa

SEQ ID NO: 27517 - RNA, 1812 nt, Artificial Sequence
  mRNA product Design b-4 (hSL-A100) comprising derived and/or modified sequence from LASV(G3010-SLE-2013;Clade IV)__AIT17344__GPCmut4 (opt5)
aggagagucccgcagucggcguccagcggcucugcuuguucgugugugugucguugcaggccuuauucaagcuuaccaugggccagaucgugaccuucuuucaagaggucccccacguuauugaagaggugaugaacaucgugcugauugcccucagcauccuggcuguccuuaaggggcuguacaauuucgccacaugcggacucgugggccugguuacguuucuucugcucugugggagauccugcaccacaucucuguauaaaggaguguacgaacugcagacccucgagcugaacauggaaacacuuaauauguguaugccucugagcugcaccaagaacaauucccaucacuauauuauggucggcaacgagacagggcucgagcugacccuuacgaauaccucuaucaucaaccauaaauucuguaaucugagcgacgcgcacaagaaaaaccucuacaaucaugcucugauguccauuaucucuacauuucaccugagcauuccgaacuucaaucaguaugaagccauguccugcgauuuuaacggaggcaagaucagcgugcaguacaaucucucucacuccuaugccggcgacgcugccagccauugugggaccguugcuaacggagugcugcaaacauucaugcggauggccuggggcgggucuuacauugcgcuugauuccggauacggcaagugggacugcaucaugaccagcuaucaguaccugauuauccagaacacgacaugggaggaucacugucaguuuucucgccccuccccuaucggguaucucggacugcuuagccaaagaacccgggacauuuacaucucccgcagacggcgcggcacauucaccuggacccugucugauagcgaaggcaaagacacacccgggggauauugccucacgagauggaugcugauugaggccgagcugaaguguuuuggcaauaccgcugucgccaaaugcaacgaaaagcaugaugaggaguucugcgacaugcuccggcuguuugauuucuguaaacaggcuauccagcgccuuaagaccccugcccagauguccauucaacugaucaauaaggcggugaacgcccucaucaaugaccagcugauuaugaaaaaccaccuuagagauaucauggggauucccuacugcaauuauagcaaguacuguuaccugaaccacacaacaaccggaaaaacgucucucccuaagugcugucugguguccaauggcagcuaucugaacgaaacacauuucucugacgacaucgaacagcaagcugauaauaugauuaccgagaugcuccagaaagaguacauggaacggcaggggaagaccccgcugggacuugucgaccuguuuguuuucagcacauccuuuuaucucaucucuaucuuccugcaccuggugaaaauucccacccaucgccacaucgugggcaagagcugcccuaagccccauagacuuaaccacaugggcauuuguuccugcgggcucuacaaacagccuggaguccccgugcgguggaagcgcugaggacuaguaauaaggaaacuguaugaaugucugugggcaggaagugaagagauccuucuguaaagguuuuuggaauuaugucugcugaauaauaaacuuuuuugaaauaauaaaucugguagaaaaaugagaucucaaaggcucuuuucagagccaccaaaaaaaaaaaaaaaaaaaaaaaaaaaaaaaaaaaaaaaaaaaaaaaaaaaaaaaaaaaaaaaaaaaaaaaaaaaaaaaaaaaaaaaaaaaaaaaaaaaaa

SEQ ID NO: 27518 - RNA, 1812 nt, Artificial Sequence
  mRNA product Design b-4 (hSL-A100) comprising derived and/or modified sequence from LASV(G502-SLE-2009;Clade IV)__AIT17126__GPCmut4 (opt5)
aggagagucccgcagucggcguccagcggcucugcuuguucgugugugugucguugcaggccuuauucaagcuuaccaugggccagaucgugaccuucuuucaagaggucccccacguuauugaagaggugaugaacaucgugcugauugcccucagcauccuggcuguccuuaaggggcuguacaauuucgccacaugcggacucgugggccugcuuacguuucugcuccugugugggagauccugcaccacaggacuguauaaaggcguuuacgaacuccagacccuggagcuuaacauggaaacacugaauauguguaugccucucucuugcaccaagaacaauagccaucacuauauuaugguggggaacgagacaggacuggagcuuacccugacgaauaccuccaucaucaaccauaaauucuguaaucucucugacgcgcacaagaaaaaccuguacgaucaugcucugaugagcauuaucuccacauuucaccucucuauuccgaauuucaaccaguaugaagccaugagcugcgacuuuaauggcggcaagaucuccguccaguacaaccugagccacucuuaugccggggaugcugccgaccauuguggaaccguggcuaauggcguucuucaaacauucaugcggauggccuggggaggguccuacauugcgcuggauagcggccgcgggagaugggacugcaucaugaccucuuaccaguaucucauuauccagaacacgacaugggaggaucacugucaguuuucccggcccagcccuaucggauaccugggccuucugucucaacgcaccagagacauuuauaucucccggcgcagacggggcacauucaccuggacccucagcgauuccgaagggaaggacacacccggaggcuacugccugacgcgcuggaugcugauugaggccgagcucaaauguuuugggaacaccgcuguggccaagugcaaugaaaaacaugaugaggaguucugcgacaugcugagacuuuuugauuucuguaagcaggcuauccagcggcugaaagccccugcgcagaugucuauucaacucaucaacaaggccgucaaugcucugaucaacgaccagcuugugaugaagaaucaucugcgcgacauuaugggaauccccuauugcaacuacagcagauauuguuaccucaaucacacaaccacaggccggaccucccugccuaaaugcugucuggugagcaacgggucuuaccucaaugaaacgcacuucuccgaugacauugaacagcaagccgauaacaugaucacagagaugcugcagaaggaguauauggaacgccagggaaaaaccccgcuuggccuggucgaccucuuuguuuucagcaccucuuuuuaccugauuagcaucuuccugcaccuugugaagauccccacacauagacacauugugggcaaauccugcccuaagccccaucggcucaaucacauggggaucuguucuugcggacuguauaaacagccuggcguccccgugaaguggaagagaugaggacuaguaauaaggaaacuguaugaaugucugugggcaggaagugaagagauccuucuguaaagguuuuuggaauuaugucugcugaauaauaaacuuuuuugaaauaauaaaucugguagaaaaaugagaucucaaaggcucuuuucagagccaccaaaaaaaaaaaaaaaaaaaaaaaaaaaaaaaaaaaaaaaaaaaaaaaaaaaaaaaaaaaaaaaaaaaaaaaaaaaaaaaaaaaaaaaaaaaaaaaaaaaaa

SEQ ID NO: 27519 - RNA, 1812 nt, Artificial Sequence
  mRNA product Design b-4 (hSL-A100) comprising derived and/or modified sequence from LASV(G733-SLE-2010;Clade IV)__AIT17154__GPCmut4 (opt5)
aggagagucccgcagucggcguccagcggcucugcuuguucgugugugugucguugcaggccuuauucaagcuuaccaugggccagaucgugaccuucuuucaagaggucccccacguuauugaagaggugaugaacaucgugcugauugcccucagcauccuggcuguccuuaaggggcuguacaauuucgccacaugcggaauugugggccucguuuccuuucugcuucugugugggagaucuugcacgaccagccucuauaaaggaguguacgaacugcagacacuggagcucaacauggaaacccugaauauguguaugccucuuuccugcacaaagaacaauucucaucacuauaucauggucggcaacgagaccgggcuggagcucacacugaccaauacgagcaucauuaaccauaaauucuguaaucuuuccgacgcgcacaagaaaaaccuguacgaucaugcucucaugucuaucauuagcaccuuucaccuguccaucccgaauuucaaccaguaugaagccaugagcugcgacuuuaauggaggcaagauuucugugcaguacaaccugucccacagcuaugccggcgaugcugccaaucauugugggacaaucgcuaacggaguucuccaaaccuucaugcggauggccuggggcgggucuuacauugcgcuggacuccggacgcgauagaugggacugcaucaugacaagcuaccaguaucuuaucauucagaacaccacgugggaggaucacugucaguuuucucggcccuccccuaucggcuaccuggggcuccugagccaacgcacaagagacauuuauaucucccggcgcagacggggaaccuucacauggacccuuucugauagcgaaggcaaggacacccccggcggguacugccugacacgcuggaugcucauugaggccgagcugaaauguuuuggaaauacggcuguggccaagugcaacgaaaaacaugaugaggaguucugcgacaugcugagacucuuugauuucuguaagcaggcuauccagcggcugaaagccccugcgcagauguccauccaacuuauuaauaaggccgucaacgcucugaucaaugaccagcucauuaugaagaaccaucugcgcgacaucaugggcauucccuauugcaauuacagcaaauauuguuaccuuaaccacaccacaaccgggaagacaucucugccuaaaugcugucucguguccaauggaagcuaccugaacgaaacccacuucucugaugacaucgaacagcaagccgauaauaugaucacggagaugcugcagaaggaguauauggaaagacagggcaaaacaccgcucgggcugguggaccuuuuugucuucagcaccuccuuuuaccugauuucuaucuuccuccaccugguuaagauucccacccaucggcacguggugggaaaaagcugcccuaagccccaucgccugaaccacaugggcaucuguuccugcggccuuuaugggcagccuggaguccccgugaaguggaaaagaugaggacuaguaauaaggaaacuguaugaaugucugugggcaggaagugaagagauccuucuguaaagguuuuuggaauuaugucugcugaauaauaaacuuuuuugaaauaauaaaucugguagaaaaaugagaucucaaaggcucuuuucagagccaccaaaaaaaaaaaaaaaaaaaaaaaaaaaaaaaaaaaaaaaaaaaaaaaaaaaaaaaaaaaaaaaaaaaaaaaaaaaaaaaaaaaaaaaaaaaaaaaaaaaaa

SEQ ID NO: 27520 - RNA, 1812 nt, Artificial Sequence
  mRNA product Design b-4 (hSL-A100) comprising derived and/or modified sequence from MOPV/LASV reassortant(IGS-1;Clade IV)__AFY05576__GPCmut4 (opt5)
aggagagucccgcagucggcguccagcggcucugcuuguucgugugugugucguugcaggccuuauucaagcuuaccaugggccagaucgugaccuucuuucaagaggucccccacguuauugaagaggugaugaacaucgugcugauugcccucagcguccuggcugugcuuaaggggcuguacaauuucgccacaugcggacucguuggccuggugacguuucuucugcucugugggagauccugcaccacaucucuguauaaaggagucuacgaacugcagacccucgagcugaacauggaaacacuuaauauguguaugccucugagcugcaccaagaacaauucccaucacuauaucauggugggcaacgagacagggcucgagcugacccuuacgaauaccucuauuaucaaccauaaauucuguaaucugagcgacgcgcacaagaaaaaccucuacgaucaugcucugauguccaucauuucuacauuucaccugagcaucccgaauuucaaccaguaugaagccauguccugcgacuuuaauggaggcaagauuagcguucaguacaaccucucucacuccuaugccggcgaugcugccaaucauugugggaccguggcuaacggaguccugcaaacauucaugcggauggccuggggcgggagcuacaucgcgcuugacucuggacgcggcaacugggauugcauuaugaccuccuaccaguaucugaucauucagaauacgacaugggaggaccacugucaguuuagcagacccucuccuaucggguaccucggacugcuuucccaacggacccgcgauaucuauauuagcagacggcgcagaggcacauucaccuggacccuguccgacucugaaggcgaggauacacccgggggauacugccucacgcgguggaugcugaucgaggccgaacugaaguguuuuggcaacaccgcuguggccaaaugcaaugagaagcaugacgaagaguucugcgauaugcuccgccuguuugacuucuguaaacaggcuauucagagacuuaaggccccugcgcagaugagcauccaacugauuaacaaagccgugaaugcucucaucaacgaucagcugaucaugaagaaucaccuucgggacauuauggggauccccuauugcaacuacuccaaguauuguuaccugaaucacacaaccacaggacgcaccagccucccuaaaugcugucuggucucuaacggcuccuaccugaaugaaacgcauuucagcgacgauauugagcagcaagccgacaacaugaucacagagaugcuccagaaggaauauauggagagacaggggaaaaccccgcugggacuuguugaucuguuuguguucucuaccagcuuuuaccucauuuccaucuuccugcaccuggugaagauccccacacaucggcacauugucggcaaaucuugcccuaagccccaucgccuuaaucacaugggcaucuguagcugcgggcucuauaaacagccuggagugcccguuaaguggaagagaugaggacuaguaauaaggaaacuguaugaaugucugugggcaggaagugaagagauccuucuguaaagguuuuuggaauuaugucugcugaauaauaaacuuuuuugaaauaauaaaucugguagaaaaaugagaucucaaaggcucuuuucagagccaccaaaaaaaaaaaaaaaaaaaaaaaaaaaaaaaaaaaaaaaaaaaaaaaaaaaaaaaaaaaaaaaaaaaaaaaaaaaaaaaaaaaaaaaaaaaaaaaaaaaaa

SEQ ID NO: 27521 - RNA, 1812 nt, Artificial Sequence
  mRNA product Design b-4 (hSL-A100) comprising derived and/or modified sequence from LASV(LM765-SLE-2012;Clade IV)__AIT17814__GPCmut4 (opt5)
aggagagucccgcagucggcguccagcggcucugcuuguucgugugugugucguugcaggccuuauucaagcuuaccaugggccagaucgugaccuucuuucaagaggucccccacguuauugaagaggugaugaacaucgugcugauugcccucagcauccuggcuguccuuaaggggcuguacaauuucgccacaugcggacucgugggccugguuacguuucuucugcucugugggagauccugcaccacaucucuguauaaaggaguguacgaacugcagacccucgagcugaacauggaaacacuuaauauguguaugccucugagcugcaccaagaacaauucccaucacuauauuauggucggcaacgagacagggcucgagcugacccuuacgaauaccucuaucaucgaccauaaauucuguaaccugagcgaugcgcaccggaagaaucucuacgaccaugcucugauguccauuaucucuacauuucaccugagcauuccgaacuucaaucaguaugaagccauguccugcgauuuuaacggaggcaaaaucagcgugcaguacaaucucucucacuccuaugccaaggacgcugccgaucauuguggcaccguugcuaacggggugcugcaaacauucaugcgcauggccuggggaggcagcuacauugcgcuugacucugggagaggacggugggauugcaucaugaccuccuaccaguaucugauuauccagaauacgacaugggaggaccacugucaguuuagccgccccucuccuaucggcuaccucgggcugcuuucccaaagaacccgggauauuuauaucagccgcagacggcgcggaacauucaccuggacccuguccgacucugaaggcaaggauacacccggcggguacugccucacgagauggaugcugauugaggccgagcugaaauguuuuggaaacaccgcugucgccaagugcaacgaaaaacaugacgaggaguucugcgauaugcuccggcuguuugacuucuguaagcaggcuauccagcgccuuaaagccccugcgcagaugagcauucaacugaucaauaaggccgugaacgcucucaucaaugaccagcugauuaugaagaaccaccuuagagauaucaugggcauucccuauugcaauuacuccaaauauuguuaccugaaccacacaaccacagggaagaccagccucccuaaaugcugucuggugucuaauggauccuaccugaacgaaacgcauuucagcgacgauaucgaacagcaagccgacaauaugauuacagagaugcuccagaaggaguauauggaacggcagggcaaaaccccgcuggggcuugucgaucuguuuguuuucucuaccagcuuuuaccucaucuccaucuuccugcaccuggugaagauucccacacaucgccacaucgugggaaaaccuugccccaagccucauagacuuaaccacaugggcauuuguucuugcggccucuauaagcagcccggggucccggugaaauggaagcggugaggacuaguaauaaggaaacuguaugaaugucugugggcaggaagugaagagauccuucuguaaagguuuuuggaauuaugucugcugaauaauaaacuuuuuugaaauaauaaaucugguagaaaaaugagaucucaaaggcucuuuucagagccaccaaaaaaaaaaaaaaaaaaaaaaaaaaaaaaaaaaaaaaaaaaaaaaaaaaaaaaaaaaaaaaaaaaaaaaaaaaaaaaaaaaaaaaaaaaaaaaaaaaaaa

SEQ ID NO: 27522 - RNA, 1812 nt, Artificial Sequence
  mRNA product Design b-4 (hSL-A100) comprising derived and/or modified sequence from LASV(LM776-SLE-2012;Clade IV)__AIT17824__GPCmut4 (opt5)
aggagagucccgcagucggcguccagcggcucugcuuguucgugugugugucguugcaggccuuauucaagcuuaccaugggccagaucgugaccuucuuucaagaggucccccacguuauugaagaggugaugaacaucgugcugauugcccucagcauccuggcuguccuuaaggggcuguacaauuucgccacaugcggacucgugggccugguuacguuucuucugcucugugggagauccugcaccacaucuguguauaaaggagucuacgaacugcagacccuggagcucaacauggaaacacugaauauguguaugccucuuagcugcaccaagaacaauucccaucacuauauuauggugggcaacgagacagggcuggagcucacccugacgaauaccucuaucaucaaccauaaauucuguaaucuuagcgacgcgcacaagaaaaaccuguacgaucaugcucucauguccauuaucucuacauuucaccugagcauuccgaauuucaaccaguaugaagccauguccugcgacuuuaauggaggcaagaucagcguucaguacaaccugucucacuccuaugccggcgaugcugccaaucauugugggaccguggcuaacggaguccuccaaacauucaugcggauggccuggggcgggagcuacauugcgcuggacucuggacacggcaagugggauugcaucaugaccuccuaccaguaucuuauuauccagaacacgacaugggaggaccauugucaguuuagccgccccucuccuaucggguaccugggacuccugucccaaagaacccgggauauuuauaucagccgcagacggcgcggcacauucaccuggacccuuuccgacucugaaggcaaagauacacccgggggauacugccugacgagauggaugcucauugaggccgagcugaaguguuuuggcaauaccgcuguggccaaaugcaacgaaaagcacgacgaggaguucugcgauaugcugcggcucuuugacuucuguaaacaggcuauccagcgccugaaggccccugcgcagaugagcauucaacuuaucaauaaggccgugaacgcucugaucaaugaucagcucauuaugaaaaaccaccugagagacaucauggggauucccuauugcaauuacuccaaguauuguuaccuuaaccauacaaccacaggaaaaaccagccugccuaagugcugucucgucucuaauggcuccuaccugaacgaaacgcacuucagcgacgauaucgaacagcaagccgacaauaugauuacagagaugcugcagaaagaguauauggaacggcaggggaagaccccgcucggacugguugaucuuuuuguguucucuaccagcuuuuaccugaucuccaucuuccuccaucuggugaaaauucccacacaccgccauaucgucggcaagucuugcccuaagccccacagacugaaccacaugggcauuuguagcugcgggcuuuauaaacagccuggagugcccguucgguggaagcgcugaggacuaguaauaaggaaacuguaugaaugucugugggcaggaagugaagagauccuucuguaaagguuuuuggaauuaugucugcugaauaauaaacuuuuuugaaauaauaaaucugguagaaaaaugagaucucaaaggcucuuuucagagccaccaaaaaaaaaaaaaaaaaaaaaaaaaaaaaaaaaaaaaaaaaaaaaaaaaaaaaaaaaaaaaaaaaaaaaaaaaaaaaaaaaaaaaaaaaaaaaaaaaaaaa

SEQ ID NO: 27523 - RNA, 1812 nt, Artificial Sequence
  mRNA product Design b-4 (hSL-A100) comprising derived and/or modified sequence from LASV(Mad39;Clade IV)__ANH09722__GPCmut4 (opt5)
aggagagucccgcagucggcguccagcggcucugcuuguucgugugugugucguugcaggccuuauucaagcuuaccaugggccagaucgugaccuucuuucaagaggucccccacguuauugaagaggugaugaacaucgugcugauugcccucagcauccuggcuguccuuaaggggcuguacaauguggccacaugcggacucauuggccugguuacguuccuucugcucugugggagauccugcaccacaacccuguauaaaggaguguacgaacugcaggcgcucgagcugaacauggaaacacuuaauauguguaugccucugucuugcaccaagaacaauagccaucacuauauccgggucggcaacgagacagggcucgagcugacccuuacgaauaccucccugaucaaccauaaauuuuguaaucucucugacgcucacaagaaaaaccuguacgaucaugcccugaugagcauuaucuccacauuccaccucucuauuccgaauuuuaaccaguaugaagccaugagcugcgacuucaaugauggaaagaucuccgugcaguacaaccugagccacaccuaugcuggcgacacagccaaucauuguggcaccguugcuaacggggugcuucaaacguuuaugcgcauggccuggggaggcucuuacauugcgcuggauuccgggagaggaggcugggacugcaucaugacaagcuaccaguaucucauuauccagaacaccacaugggaggaucacugucaguucucucggcccuccccuaucggguaccugggacuucugagccaacgcaccagagacauuuauaucucucggcgcagacggggcaccuuuacauggacgcucuccgauagcgaaggcaaggacacccccgggggauacugccugacacgcuggaugcugauugaggccgagcucaaauguuucggcaauaccgcugucgccaagugcaacgaaaaacaugaugaggaauuuugcgacaugcugagacuuuucgauuuuuguaagcaggcuauccagcggcugaaagccccugcgcagauguccauucaacucaucaauaaggccgugaacgcucugaucaaugaccagcuuauuaugaagaaccaucugcgcgacaucauggggauucccuauugcaauuacucuaaauauuguuaccucaaccacacagugaccggaaagacgagccugccuaaaugcugucuggucuccaauggcagcuaccucaacgagacacacuucucugaugacaucgaacagcaagccgauaauaugauuaccgagaugcugcagaaggaguauauggaaagacaggggaaaaccccgcuuggacugguugaccucuucguguuuuccaccagcuucuaccugaucucuaucuuucugcaccuugugaagauucccacacaucggcacgucgugggcaaaccuugccccaagccucaucgccucaaccacaugggcaucuguagcugcggguucuauaagcagcccggaguuccggugagauggaaacggugaggacuaguaauaaggaaacuguaugaaugucugugggcaggaagugaagagauccuucuguaaagguuuuuggaauuaugucugcugaauaauaaacuuuuuugaaauaauaaaucugguagaaaaaugagaucucaaaggcucuuuucagagccaccaaaaaaaaaaaaaaaaaaaaaaaaaaaaaaaaaaaaaaaaaaaaaaaaaaaaaaaaaaaaaaaaaaaaaaaaaaaaaaaaaaaaaaaaaaaaaaaaaaaaa

SEQ ID NO: 27524 - RNA, 1812 nt, Artificial Sequence
  mRNA product Design b-4 (hSL-A100) comprising derived and/or modified sequence from LASV(Z0947-SLE-2011;Clade IV)__AIT17840__GPCmut4 (opt5)
aggagagucccgcagucggcguccagcggcucugcuuguucgugugugugucguugcaggccuuauucaagcuuaccaugggccagaucgugaccuucuuucaagaggucccccacguuauugaagaggugaugaacaucgugcugauugcccucagcauccuggcuguccuuaaggggcuguacaauuucgccacaugcggacucgugggccugguuacguuucuucugcucugugggagauccugcaccauuucucuguauaaaggaguguacgaacugcagacacucgagcugaacauggaaacccuuaauauguguaugccucugagcugcacaaagaacaauucccaucacuauaucauggucggcaacgagaccgggcucgagcugacacuuaccaauacgucuaucauuaaccauaaauucuguaaucugagcgacgcgcacaagaaaaaccucuacgaucaugcucugauguccaucauuucuaccuuucaccugagcaucccgaauuucaaccaguaugaagccauguccugcgacuuuaauggaggcaagauuagcgugcaguacaaccucucucacuccuaugccggcgaugcugccaaucauugugggacaguugcuaacggagugcugcaaaccuucaugcggauggccuggggcgggagcuacaucgcgcuugacucuggacgcgauagaugggacugcauuaugacauccuaccaguaucugaucauccagaacaccacgugggaggaucacugucaguuuagccggcccucuccuauuggcuaccucgggcugcuuucccaacgcacaagagacaucuauauuagccggcgcagacggggaaccuucacauggacccuguccgauucugaaggcaaggacacccccggcggguacugccucacacgcuggaugcugaucgaggccgagcugaaauguuuuggaaauacggcugucgccaagugcaacgaaaaacaugaugaggaguucugcgacaugcucagacuguuugauuucuguaagcaggcuauucagcggcuuaaagccccugcgcagaugagcauccaacugaucaauaaggccgugaacgcucucauuaaugaccagcugaucaugaagaaccaccuucgcgacauuaugggcauccccuauugcaauuacuccaaauauuguuaccugaaccacaccacaaccgggaagacaagccucccuaaaugcugucuggugucuaauggauccuaccugaacgaaacccauuucagcgaugacauugaacagcaagccgauaauaugaucacggagaugcuccagaaggaguauauggaaagacagggcaaaacaccgcuggggcuugucgaccuguuuguuuucucuaccagcuuuuaccucaucuccauuuuccugcaccuggugaagauccccacccaucggcacauugugggaaaaccuugccccaagccucaucgccuuaaccacaugggcaucuguucuugcggccucuauaagcagcccggggucccggugaaauggaagagaugaggacuaguaauaaggaaacuguaugaaugucugugggcaggaagugaagagauccuucuguaaagguuuuuggaauuaugucugcugaauaauaaacuuuuuugaaauaauaaaucugguagaaaaaugagaucucaaaggcucuuuucagagccaccaaaaaaaaaaaaaaaaaaaaaaaaaaaaaaaaaaaaaaaaaaaaaaaaaaaaaaaaaaaaaaaaaaaaaaaaaaaaaaaaaaaaaaaaaaaaaaaaaaaaa

SEQ ID NO: 27525 - RNA, 1788 nt, Artificial Sequence
  mRNA product Design b-4 (A100) comprising derived and/or modified sequence from LASV(Josiah;Clade IV)__NP_694870__GPCmut4 (opt1)
aggagagucccgcagucggcguccagcggcucugcuuguucgugugugugucguugcaggccuuauucaagcuuaccaugggccagaucgugaccuucuuccaggaggucccccacgugaucgaggaggugaugaacaucguccugaucgcccucagcgugcuggccgugcugaaggggcucuacaacuucgcgaccugcggccuggucgggcuggugacguuccuccugcugugcggccgcuccugcaccaccagccucuacaaggggguguacgagcugcagacccuggagcucaacauggagacgcugaacaugugcaugccgcuguccugcaccaagaacaacagccaccacuacaucauggucggcaacgagaccggccucgagcugacgcugaccaacaccuccaucaucaaccacaaguucugcaaccucagcgacgcccacaagaagaaccuguacgaccacgcccugauguccaucaucagcaccuuccaccucuccauccccaacuucaaccaguacgaggccaugagcugcgacuucaacgggggcaagaucuccgugcaguacaaccugagccacuccuacgccggggacgcggccaaccacugcggcacgguggccaacgggguccugcagaccuucaugcggauggccuggggcggcagcuacaucgcgcucgacuccgggcgcggcaacugggacugcaucaugaccagcuaccaguaccugaucauccagaacaccacgugggaggaccacugccaguucucccggcccagccccaucggguaccugggccuccugucccagcgcacccgggacaucuacaucagccgccggcgccggggcaccuucaccuggacgcugagcgacuccgaggggaaggacaccccgggcggguacugccugacccgcuggaugcucaucgaggccgagcugaagugcuucggcaacaccgccguggccaagugcaacgagaagcacgacgaggaguucugcgacaugcugcggcuguucgacuucugcaagcaggccauccagcgccugaaggcgcccgcccagaugagcauccagcugaucaacaaggccgugaacgcccucaucaacgaccagcugaucaugaagaaccaccuccgggacaucauggggauccccuacugcaacuacuccaaguacugcuaccucaaccacacgaccaccggccgcaccagccugcccaagugcugccuggucuccaacggcagcuaccucaacgagacgcacuucuccgacgacaucgagcagcaggccgacaacaugaucaccgagaugcugcagaaggaguacauggagcggcaggggaagacgccccugggccucguggaccuguucguguucagcaccuccuucuaccugaucagcaucuuccugcaccucgucaagaucccgacccaccgccacaucguggggaaguccugccccaagccccaccggcugaaccacaugggcaucugcagcugcgggcuguacaagcagcccggcgugccggucaaguggaagcgcugaggacuaguaauaaggaaacuguaugaaugucugugggcaggaagugaagagauccuucuguaaagguuuuuggaauuaugucugcugaauaauaaacuuuuuugaaauaauaaaucugguagaaaaaugagaucuaaaaaaaaaaaaaaaaaaaaaaaaaaaaaaaaaaaaaaaaaaaaaaaaaaaaaaaaaaaaaaaaaaaaaaaaaaaaaaaaaaaaaaaaaaaaaaaaaaaa

SEQ ID NO: 27526 - RNA, 1785 nt, Artificial Sequence
  mRNA product Design b-4 (A100) comprising derived and/or modified sequence from LASV(LP;Clade I)__AAF86701__GPCmut4 (opt1)
aggagagucccgcagucggcguccagcggcucugcuuguucgugugugugucguugcaggccuuauucaagcuuaccaugggccagaucaucaccuucuuccaggaggugccccacgucaucgaggaggugaugaacaucgugcugaucgcccucagccugcuggccauccucaaggggcuguacaacaucgcgaccugcggcaucaucgggcuggucgccuuccucuuccugugcggcaaguccugcagccugacgcucaagggcggguacgagcugcagacccuggagcucaacauggagacccugaacaugugcaugccgcuguccugcacgaagaacagcucccaccacuacauccgcgugggcaacgagaccgggcucgagcugacccugaccaacacgagcaucaucaaccacaaguucugcaaccucuccgacgcccacaagaagaaccuguacgaccacgcccugaugagcaucaucuccaccuuccaccucagcauccccaacuucaaccaguacgaggccauguccugcgacuucaacggcgggaagaucagcgugcaguacaaccugucccacagcuacgcgggcgacgccgccgagcacugcgggaccgucgccaacggcgugcugcagaccuucaugcggauggcguggggcgggcgcuacaucgcccucgacuccggcaaggggaacugggacugcaucaugacgagcuaccaguaccugaucauccagaacaccaccugggaggaccacugccaguucucccggcccagccccaucggcuaccugggccuccugucccagcgcacccgggacaucuacaucagccgccggcgccgggggacguucaccuggacccugagcgacuccgagggcaacgagacccccgggggcuacugccugacgcgcuggaugcucaucgaggccgagcugaagugcuucgggaacaccgccguggccaagugcaacgagaagcacgacgaggaguucugcgacaugcugcggcuguucgacuucugcaagcaggcgauccgccggcugaaggcccccgcccagaugagcauccagcugaucaacaaggccgucaacgcccucaucaacgaccagcugaucaugaagaaccaccuccgcgacaucaugggcauccccuacugcaacuacuccaaguacugcuaccucaaccacaccagcuccggccggaccagccugcccaagugcugccugaucuccaacgggagcuaccucaacgagacgcaguucuccgacgacaucgagcagcaggcggacaacaugaucaccgagaugcugcagaaggaguacaucgagcgccagggcaagaccccgcuggggcucguggacaucuucaucuucagcaccuccuucuaccugaucagcaucuuccugcaccugaucaagaucccgacgcaccggcacaucgugggcaagcccugccccaagccccaccgccucaaccacaugggggucugcuccugcggccuguacaagcacccgggcgugcccaccaaguggaagcggugaggacuaguaauaaggaaacuguaugaaugucugugggcaggaagugaagagauccuucuguaaagguuuuuggaauuaugucugcugaauaauaaacuuuuuugaaauaauaaaucugguagaaaaaugagaucuaaaaaaaaaaaaaaaaaaaaaaaaaaaaaaaaaaaaaaaaaaaaaaaaaaaaaaaaaaaaaaaaaaaaaaaaaaaaaaaaaaaaaaaaaaaaaaaaaaaa

SEQ ID NO: 27527 - RNA, 1785 nt, Artificial Sequence
  mRNA product Design b-4 (A100) comprising derived and/or modified sequence from LASV(803213;Clade II)__AAF86703__GPCmut4 (opt1)
aggagagucccgcagucggcguccagcggcucugcuuguucgugugugugucguugcaggccuuauucaagcuuaccaugggccagaucaucaccuucuuccaggaggugccccacgucaucgaggaggugaugaacaucgugcugaucgcccucagccugcuggccauccucaaggggaucuacaacgucgcgaccugcggccuguucgggcugaucuccuuccuccugcugugcggccgcagcugcuccgugacguacaaggggguguacgagcuccagacccuggagcugaacauggccaaccucaacaugugcaugccgcugagcugcaccaagaacaacucccaccacuacaucauggucggcaacgagacgggccuggagcucacccugaccaacaccagcaucaucaaccacaaguucugcaaccuguccgacgcccacaagaagaaccucuacgaccacgcccugaugagcaucaucuccacguuccaccugagcauccccaacuucaaccaguacgaggccauguccugcgacuucaacgggggcaagaucagcgugcaguacaaccucucccacagcuucgcgguggacgccgccaaccacugcgggaccaucgccaacggcguccugcagaccuucaugcggauggcguggggcggguccuacaucgcccuggacagcggcaaggggaacugggacugcaucaugaccuccuaccaguaccucaucauccagaacacgaccugggaggaccacugccaguucagccgccccucccccaucggcuaccuggggcugcucagccagcggacccgcgacaucuacaucagccggcgccgccggggcaccuucacguggacccucuccgacagcgagggcaacgaggcccccgggggcuacugccugacccgguggaugcugaucgaggccgagcucaagugcuucgggaacaccgccguggcgaagugcaacgagaagcacgacgaggaguucugcgacaugcugcgccuguucgacuucugcaagcaggccaucaagcggcucaagacgcccgcccagauguccauccagcugaucaacaaggccgugaacgcccugaucaacgaccagcucaucaugaagaaccaccuccgcgacaucaugggcauccccuacugcaacuacagccgguacugcuaccugaaccacaccgucaccgggaagaccucccugccccgcugcugccuggugagcaacggcuccuaccugaacgagacgcacuucagcgacgacaucgagcagcaggcggacaacaugaucaccgagaugcuccagaaggaguacauggaccggcagggcaagaccccgcuggggcugguggaccucuucgucuucuccaccagcuucuaccugaucuccaucuuccugcaccuggugaagaucccgacgcaccgccacaucgugggcaagcccugccccaagccccaccggcucaaccacauggggaucugcagcugcggccuguacaagcacccggggguccccgugaaguggaagcgcugaggacuaguaauaaggaaacuguaugaaugucugugggcaggaagugaagagauccuucuguaaagguuuuuggaauuaugucugcugaauaauaaacuuuuuugaaauaauaaaucugguagaaaaaugagaucuaaaaaaaaaaaaaaaaaaaaaaaaaaaaaaaaaaaaaaaaaaaaaaaaaaaaaaaaaaaaaaaaaaaaaaaaaaaaaaaaaaaaaaaaaaaaaaaaaaaa

SEQ ID NO: 27528 - RNA, 1785 nt, Artificial Sequence
  mRNA product Design b-4 (A100) comprising derived and/or modified sequence from LASV(GA391;Clade III)__CAA36645__GPCmut4 (opt1)
aggagagucccgcagucggcguccagcggcucugcuuguucgugugugugucguugcaggccuuauucaagcuuaccaugggccagaucgugaccuucuuccaggaggucccccacgugaucgaggaggugaugaacaucguccugaucgcccucagcauccuggccauccugaaggggcucuacaacguggcgaccugcggccugaucgggcuggugacguuccuccugcuguccggccgcagcugcucccucaucuacaaggggaccuacgagcugcagacccuggagcucaacauggagacccugaacaugugcaugccgcugagcugcaccaagaacaacucccaccacuacauccgggucggcaacgagaccggccucgagcugacccugacgaacaccagcauccucaaccacaaguucugcaaccuguccgacgcccacaagcgcaaccuguacgaccacagccucauguccaucaucagcaccuuccaccuguccauccccaacuucaaccaguacgaggccaugagcugcgacuucaacgggggcaagaucaccgugcaguacaaccugucccacagcuucgccguggacgccgcggggcacugcggcacgcucgccaacgggguccugcagaccuucaugcggauggccuggggcggcuccuacaucgcccuggacagcgggcgcggcaacugggacugcaucaugaccuccuaccaguaccucaucauccagaacaccacgugggacgaccacugccaguucagccggcccucccccaucggguaccugggccugcucagccagcgcacccgggacaucuacaucagccgccggcgccggggcaccuucaccuggacgcucuccgacagcgaggggaacgagaccccgggcggguacugccugacccgcuggaugcugaucgaggcggagcucaagugcuucggcaacaccgccguggccaagugcaacgagaagcacgacgaggaguucugcgacaugcugcggcuguucgacuucugcaagcaggccauccgccggcucaagacgcccgcccagauguccauccagcugaucaacaaggcggugaacgcccugaucaacgaccagcucaucaugaagaaccaccuccgcgacaucauggggauccccuacugcaacuacagccgguacugcuaccugaaccacaccuccaccggcaagaccagccugccccgcugcugccugaucuccaacggcagcuaccugaacgagacgaaguucuccgacgacaucgagcagcaggccgacaacaugaucaccgagaugcuccagaaggaguacaucgaccggcaggggaagacgccccugggccuggucgaccuguucguguucagcaccuccuucuaccucaucagcaucuuccugcaccuggugaagaucccgacccaccgccacaucgucgggaagcccugccccaagccccaccggcucaaccacaugggcaucugcuccugcgggcuguacaagcagccgggcgugcccgugcgcuggaagcggugaggacuaguaauaaggaaacuguaugaaugucugugggcaggaagugaagagauccuucuguaaagguuuuuggaauuaugucugcugaauaauaaacuuuuuugaaauaauaaaucugguagaaaaaugagaucuaaaaaaaaaaaaaaaaaaaaaaaaaaaaaaaaaaaaaaaaaaaaaaaaaaaaaaaaaaaaaaaaaaaaaaaaaaaaaaaaaaaaaaaaaaaaaaaaaaaa

SEQ ID NO: 27529 - RNA, 1788 nt, Artificial Sequence
  mRNA product Design b-4 (A100) comprising derived and/or modified sequence from LASV(AV;Clade V)__CCA30314__GPCmut4 (opt1)
aggagagucccgcagucggcguccagcggcucugcuuguucgugugugugucguugcaggccuuauucaagcuuaccaugggccagaucgugaccuucuuccaggaggucccccacgugaucgaggaggugaugaacaucguccugaucgcccucagcauccuggccgugcugaaggggcucuacaacaucgcgaccugcggccugaucgggcugaucacguuccuccugcugugcggccgcuccugcagcuccaaccucuacaaggggguguacgagcugcagagccuggaccucaacauggagacccugaacaugugcaugccgcuguccugcaccaagaacaacagccaccacuacauccgggucggcaacgacacgggccucgagcugacccugaccaacaccuccauccucaaccacaaguucugcaaccugagcgacgcccacaagaaggaccuguacgaccacgcccucauguccaucaucagcacguuccaccuguccauccccaacuucaaccaguacgaggccaugagcugcgacuucaacgggggcaagaucuccgugcaguacaaccugagccacuccuacgccaucgacgcggccaaccacugcgggaccguggccaacggcauccuccagaccuucaugcgcauggccuggggcgggagcuacaucgcgcuggacuccggccgggggaacugggacugcaucaugaccagcuaccaguaccugaucauccagaacacgaccugggagaaccacugccaguucucccgccccagccccaucggcuaccucgggcugcugagccagcggacccgcgacaucuacaucucccggcgccgccggggcaccuucacguggacccugagcgacuccgagggcaacgccacccccgggggcuacugccucacccgguggaugcugaucgaggccgagcugaagugcuucgggaacacggccgucgccaagugcaacgagaagcacgacgaggaguucugcgacaugcuccgccuguucgacuucugcaagcaggcgaucagccggcugaagucccccgcccagaugagcauccagcucaucaacaaggccgugaacgcccugaucaacgaccagcugaucaugaagaaccaccuccgcgacaucaugggcauccccuacugcaacuacuccaaguacugcuaccugaaccacaccaucaccgggaagaccagccugcccaagugcugccucguguccaacggcagcuaccugaacgagacgcacuucuccgacgacaucgagcagcaggccgacaacaugaucaccgagaugcugcagaaggaguacauggagcggcagggcaagaccccgcucgggcuggucgaccuguucguguucagcaccuccuucuaccugaucagcaucuuccuccgccuggugaagaucccgacgcaccggcacaucgucggcaagcccugccccaagccccaccgccugaaccacauggggaucugcuccugcggccucuacaagcagccgggggugcccgugcgguggaagcgcugaggacuaguaauaaggaaacuguaugaaugucugugggcaggaagugaagagauccuucuguaaagguuuuuggaauuaugucugcugaauaauaaacuuuuuugaaauaauaaaucugguagaaaaaugagaucuaaaaaaaaaaaaaaaaaaaaaaaaaaaaaaaaaaaaaaaaaaaaaaaaaaaaaaaaaaaaaaaaaaaaaaaaaaaaaaaaaaaaaaaaaaaaaaaaaaaa

SEQ ID NO: 27530 - RNA, 1785 nt, Artificial Sequence
  mRNA product Design b-4 (A100) comprising derived and/or modified sequence from LASV(Togo/2016/7082;Clade VI)__AMR44577__GPCmut4 (opt1)
aggagagucccgcagucggcguccagcggcucugcuuguucgugugugugucguugcaggccuuauucaagcuuaccaugggccagaucaucaccuucuuccaggaggugccccacgucaucgaggaggugaugaacaucgugcugaucgcccucagccugcuggccauccucaagggggucuacaacguggcgaccugcggcaucaucgggcuggugacguuccuguuccucugcggccgcuccugcagccugaucuacaagggguccuacgagcugcagacccucgagcugaacauggagacccugaacaugugcaugccgcucagcugcacgaagaacuccagccaccacuacauccgggucggcaacgagaccggccuggagcugacccucaccaacacguccaucaucaaccacaaguucugcaaccugagcgacgcccacaagcgcaaccuguacgaccacgcccucauguccauccugagcaccuuccaccuguccauccccaacuucaaccaguacgaggccaugagcugcgacuucaacgggggcaagaucuccgugcaguacaaccucagccacgccuacgcgguggacgccgccgagcacugcgggaccgucgccaacggcgugcugcagaccuucaugcggauggcguggggcggguccuacaucgcccuggacagcggccgcgggaacugggacugcaucaugacguccuaccaguaccucaucauccagaacaccaccugggaggaccacugccaguucagccggcccucccccaucggcuaccuggggcugcucagccagcgcacccgggacaucuacaucagccgccggcgccggggcacguucaccuggacccucuccgacagcgagggcaacgagacccccgggggcuacugccugacgcgcuggaugcugaucgaggccgagcucaagugcuucgggaacaccgccguggccaagugcaacgagaagcacgacgaggaguucugcgacaugcugcggcuguucgacuucugcaagcaggcgauccagcgccucaagucccccgcccagaugagcauccagcugaucaacaaggccgucaacgcccugaucaacgaccagcucaucaugaagaaccaccuccgggacaugaugggcauccccuacugcaacuacuccaaguacugcuaccugaaccacaccagcuccgggcgcaccagccugcccaagugcugccugguguccaacggcagcuaccugaacgagacgcacuucuccgacgacaucgagcagcaggccgacaacaugaucaccgagaugcuccagaaggaguacaucgaccggcagggcaagaccccgcuggggcugguggaccucuucgucuucagcaccuccuucuaccugaucagcaucuuccugcaccugaucaagaucccgacgcaccgccacaucgugggcaagcccugccccaagccccaccggcucaaccacauggggaucugcuccugcggccuguacaagcagccgggggugcccacccgcuggaagcggugaggacuaguaauaaggaaacuguaugaaugucugugggcaggaagugaagagauccuucuguaaagguuuuuggaauuaugucugcugaauaauaaacuuuuuugaaauaauaaaucugguagaaaaaugagaucuaaaaaaaaaaaaaaaaaaaaaaaaaaaaaaaaaaaaaaaaaaaaaaaaaaaaaaaaaaaaaaaaaaaaaaaaaaaaaaaaaaaaaaaaaaaaaaaaaaaa

SEQ ID NO: 27531 - RNA, 1785 nt, Artificial Sequence
  mRNA product Design b-4 (A100) comprising derived and/or modified sequence from LASV(KAK-428;Clade n.d. (VII))__ANH09740__GPCmut4 (opt1)
aggagagucccgcagucggcguccagcggcucugcuuguucgugugugugucguugcaggccuuauucaagcuuaccaugggccagaucgugaccuucuuccaggaggucccccacgugaucgaggaggugaugaacaucguccugaucgcccucagccugcuggccauccucaaggggcuguacaacuucgcgaccugcggcgugaucgggcugaucacguuccuccugcugugcggccgcuccugcagcgccaccuacaaggggcaguacgagcuccagacccuggagcugaacauggagucccucaacaugugcaugccgcugagcugcacgaagaacaacucccaccacuacauccgggccggcaacaacaccggccuggagcucacccugaccaacacgagcaucaucucccacaaguucugcaaccugagcgacgcccacaagaagaaccucuacgaccacacccugauguccaucaucaccaccuuccaccugagcauccccaacuucaaccaguacgaggccauguccugcgacuucaacgggggcaagaucagcauccaguacaaccucucccacagcuacgcgggggacgccgcccagcacugcggcacgguggccaacgggguccugcagaccuucaugcgcauggcguggggcggcuccuaccuggcccucgacagcgggcggcgcggcugggacugcaucaucuccagcuaccaguaccugaucauccagaacaccaccugggacgaccacugccaguucucccggcccagccccaucggguaccugggcuucgugagccagaagacgcgcgacaucuacaucucccggcgccgccggggcaccuucaccuggacccugagcgacuccgaggggcacgacaugccgggcggguacugccucacgcgguggaugcugaucgaggccgaccugaagugcuucggcaacaccgccguggccaagugcaacgagaagcacgacgaggaguucugcgacauguggcgccucuucgacuucugcaagcaggcgauccagcggcugaaggcccccgcccagaugaacauccagcugaucaacaaggccgucaacgcccucaucaacgaccagcugaugaugaagaaccaccuccgcgacaucauggggauccccuacugcaacuacagcaaguucugcuaccugaacaacaccaccacgggccggaccucccugccccgcugcugccugaucagcaacggcuccuaccucaacgagacccacuucagcgacgacaucgagcagcaggcggacaacaugaucaccgagaugcugcagaaggaguacauggaccggcaggggaagacgccccugggccucguggaccuguucguguucuccaccagcuucuaccugaucaccaucuuccuccaccuggucaagaucccgacccaccgccacaucguggggaagcccugccccaagccccaccggcugaaccacaugggcaucugcuccugcgggcuguacaagcagccgggcgugcccguccgcuggaagcggugaggacuaguaauaaggaaacuguaugaaugucugugggcaggaagugaagagauccuucuguaaagguuuuuggaauuaugucugcugaauaauaaacuuuuuugaaauaauaaaucugguagaaaaaugagaucuaaaaaaaaaaaaaaaaaaaaaaaaaaaaaaaaaaaaaaaaaaaaaaaaaaaaaaaaaaaaaaaaaaaaaaaaaaaaaaaaaaaaaaaaaaaaaaaaaaaa

SEQ ID NO: 27532 - RNA, 1785 nt, Artificial Sequence; identical to SEQ ID NO: 27526
  mRNA product Design b-4 (A100) comprising derived and/or modified sequence from LASV(Pinneo-NIG-1969;Clade I)__AIT17836__GPCmut4 (opt1)

SEQ ID NO: 27533 - RNA, 1785 nt, Artificial Sequence
  mRNA product Design b-4 (A100) comprising derived and/or modified sequence from LASV(ISTH0009-NIG-2011;Clade II)__AIT17404__GPCmut4 (opt1)
aggagagucccgcagucggcguccagcggcucugcuuguucgugugugugucguugcaggccuuauucaagcuuaccaugggccagaucaucaccuucuuccaggaggugccccacgucaucgaggaggugaugaacaucgugcugaucgcccucagccugcuggccauccucaaggggaucuacaacgucgcgaccugcggccuguucgggcugguguccuuccuccugcugugcggccgcagcugcuccacgaccuacaaggggguguacgagcuccagacccuggagcuggacauggccagccucaacaugugcaugccgcuguccugcacgaagaacaacagccaccacuacaucauggucggcaacgagaccggccuggagcucacccugaccaacacguccaucaucaaccacaaguucugcaaccugagcgacgcccacaagaagaaccucuacgaccacgcccugauguccaucaucagcaccuuccaccuguccauccccaacuucaaccaguacgaggccaugagcugcgacuucaacgggggcaagaucuccgugcaguacaaccucagccacgcguacgccguggacgccgccaaccacugcgggaccaucgcgaacggcguccugcagaccuucaugcggauggccuggggcggguccuacaucgcccuggacagcggcaagggguccugggacugcaucaugacgagcuaccaguaccucaucauccagaacaccaccugggaggaccacugccaguucucccgccccagccccaucggcuaccuggggcugcucagccagcggacccgcgacaucuacaucucccggcgccgccggggcacguucaccuggacccucagcgacuccgagggcaacgagacccccgggggcuacugccugacgcgguggaugcugaucgaggccgagcucaagugcuucgggaacaccgccguggcgaagugcaacgagaagcacgacgaggaguucugcgacaugcugcgccuguucgacuucugcaagcaggccauccggcgccucaagacccccgcccagaugagcauccagcugaucaacaaggccgugaacgcccugaucaacgaccagcucaucaugaagaaccaccuccgggacaucaugggcaucccguacugcaacuacuccaaguacugcuaccugaaccacaccgucacggggaagaccagccugccccgcugcugccugguguccaacggcagcuaccugaacgagacccacuucuccgacgacaucgagcagcaggcggacaacaugaucaccgagcuccugcagaaggaguacauggaccggcagggcaagacgccccuggggcucguggaccuguucgucuucagcaccuccuucuaccugaucagcaucuuccugcaccucaucaagaucccgacccaccgccacaucaccggcaagcccugccccaagccccaccggcugaaccacauggggaucugcuccugcggccuguacaagcacccgggggugcccgugaaguggaagcgcugaggacuaguaauaaggaaacuguaugaaugucugugggcaggaagugaagagauccuucuguaaagguuuuuggaauuaugucugcugaauaauaaacuuuuuugaaauaauaaaucugguagaaaaaugagaucuaaaaaaaaaaaaaaaaaaaaaaaaaaaaaaaaaaaaaaaaaaaaaaaaaaaaaaaaaaaaaaaaaaaaaaaaaaaaaaaaaaaaaaaaaaaaaaaaaaaa

SEQ ID NO: 27534 - RNA, 1785 nt, Artificial Sequence
  mRNA product Design b-4 (A100) comprising derived and/or modified sequence from LASV(ISTH2010-NIG-2012;Clade II)__AIT17482__GPCmut4 (opt1)
aggagagucccgcagucggcguccagcggcucugcuuguucgugugugugucguugcaggccuuauucaagcuuaccaugggccagaucaucaccuucuuccaggaggugccccacgucaucgaggaggugaugaacaucgugcugaucgcccucagccugcuggccauccucaaggggaucuacaacgucgcgaccugcggccuguucgggcugguguccuuccuccugcugugcggccgcagcugcuccacgaccuacaaggggguguacgagcuccagacccuggagcuggacauggccagccucaacaugugcaugccgcuguccugcacgaagaacaacagccaccacuacaucauggucggcaacgagaccggccuggagcucacccugaccaacacguccaucaucaaccacaaguucugcaaccugagcgacgcccacaagaagaaccucuacgaccacgcccugauguccaucaucagcaccuuccaccuguccauccccaacuucaaccaguacgaggccaugagcugcgacuucaacgggggcaagaucuccgugcaguacaaccucagccacgcguacgccguggacgccgccaaccacugcgggaccaucgcgaacggcguccugcagaccuucaugcggauggccuggggcggguccuacaucgcccuggacagcggcaagggguccugggacugcaucaugacgagcuaccaguaccucaucauccagaacaucaccugggaggaccacugccaguucucccgccccagccccaucggcuaccuggggcugcucagccagcggacccgcgacaucuacaucucccggcgccgccggggcaccuucacguggacccucagcgacuccgagggcaacgagacccccgggggcuacugccugacccgguggaugcugaucgaggccgagcucaagugcuucgggaacacggccguggcgaagugcaacgagaagcacgacgaggaguucugcgacaugcugcgccuguucgacuucugcaagcaggccauccggcgccucaagacccccgcccagaugagcauccagcugaucaacaaggccgugaacgcccugaucaacgaccagcucaucaugaagaaccaccuccgggacaucaugggcauccccuacugcaacuacuccaaguacugcuaccugaaccacaccgucaccgggaagacgagccugccccgcugcugccugguguccaacggcagcuaccugaacgagacccacuucuccgacgacaucgagcagcaggcggacaacaugaucaccgagcuccugcagaaggaguacaucgaccggcagggcaagaccccgcuggggcucguggaccuguucgucuucagcacguccuucuaccugaucagcaucuuccugcaccucgugaagaucccgacccaccgccacguggucggcaagcccugccccaagccccaccggcugaaccacauggggaucugcuccugcggccuguacaagcacccgggggugcccgugaaguggaagcgcugaggacuaguaauaaggaaacuguaugaaugucugugggcaggaagugaagagauccuucuguaaagguuuuuggaauuaugucugcugaauaauaaacuuuuuugaaauaauaaaucugguagaaaaaugagaucuaaaaaaaaaaaaaaaaaaaaaaaaaaaaaaaaaaaaaaaaaaaaaaaaaaaaaaaaaaaaaaaaaaaaaaaaaaaaaaaaaaaaaaaaaaaaaaaaaaaa

SEQ ID NO: 27535 - RNA, 1785 nt, Artificial Sequence
  mRNA product Design b-4 (A100) comprising derived and/or modified sequence from LASV(Lassa virus/H.sapiens-wt/NGA/2015/ISTH_0543;Clade II)__AVO03639__GPCmut4 (opt1)
aggagagucccgcagucggcguccagcggcucugcuuguucgugugugugucguugcaggccuuauucaagcuuaccaugggccagaucaucaccuucuuccaggaggugccccacgucaucgaggaggugaugaacaucgugcugaucgcccucagccugcuggccauccucaaggggaucuacaacgucgcgaccugcggccuguucgggcugguguccuuccuccugcugugcggccgcagcugcuccacgaccuacaaggggguguacgagcuccagacccuggagcuggacauggccaaccucaacaugugcaugccgcugagcugcacgaagaacaacucccaccacuacaucauggucggcaacgagaccggccuggagcucacccugaccaacacgagcaucaucaaccacaaguucugcaaccuguccgacgcccacaagaagaaccucuacgaccacgcccugaugagcaucaucuccaccuuccaccugagcauccccaacuucaaccaguacgaggccauguccugcgacuucaacgggggcaagaucagcgugcaguacaaccucucccacaccuacgcgguggacgccgccaaccacugcgggaccaucgccaacggcguccugcagacguucaugcggauggcguggggcgggagcuacaucgcccuggacuccggcaaggggagcugggacugcaucaugaccuccuaccaguaccucgugauccagaacaccaccugggaggaccacugccaguucagccgccccucccccaucggcuaccuggggcugcucagccagcggacgcgcgacaucuacaucagccggcgccgccggggcaccuucaccuggacccucuccgacagcgagggcaacgagacgcccgggggcuacugccugacccgguggaugcugaucgaggccgagcucaagugcuucgggaacaccgccguggccaagugcaacgagaagcacgacgaggaguucugcgacaugcugcgccuguucgacuucugcaagcaggcgauccggcgccucaagacccccgcccagauguccauccagcugaucaacaaggccgucaacgcccugaucaacgaccagcucaucaugaagaaccaccuccgggacaucaugggcauccccuacugcaacuacagcaaguacugcuaccugaaccacacggugaccgggaagaccucccugccccgcugcugccuggugagcaacggcuccuaccugaacgagacccacuucagcgacgacaucgagcagcaggccgacaacaugaucacggagcuccugcagaaggaguacaucgaccggcagggcaagaccccgcuggggcucgucgaccuguucguguucuccaccagcuucuaccugaucuccaucuuccugcaccucgugaagaucccgacccaccgccacaucacgggcaagcccugccccaagccccaccggcugaaccacauggggaucugcagcugcggccuguacaagcacccggggguccccgugaaguggaagcgcugaggacuaguaauaaggaaacuguaugaaugucugugggcaggaagugaagagauccuucuguaaagguuuuuggaauuaugucugcugaauaauaaacuuuuuugaaauaauaaaucugguagaaaaaugagaucuaaaaaaaaaaaaaaaaaaaaaaaaaaaaaaaaaaaaaaaaaaaaaaaaaaaaaaaaaaaaaaaaaaaaaaaaaaaaaaaaaaaaaaaaaaaaaaaaaaaa

SEQ ID NO: 27536 - RNA, 1785 nt, Artificial Sequence
  mRNA product Design b-4 (A100) comprising derived and/or modified sequence from LASV(Lassa virus/H.sapiens-wt/NGA/2016/ISTH_0009;Clade II)__AVO03571__GPCmut4 (opt1)
aggagagucccgcagucggcguccagcggcucugcuuguucgugugugugucguugcaggccuuauucaagcuuaccaugggccagaucaucaccuucuuccaggaggugccccacgucaucgaggaggugaugaacaucgugcugaucgcccucagccugcuggccauccucaaggggaucuacaacgucgcgaccugcggccugcuggggcucguguccuuccugcugcucugcggccgcagcugcuccacgaccuacaaggggguguacgagcugcagacccuggagcucgacauggccagccugaacaugugcaugccgcuguccugcacgaagaacaacagccaccacuacaucauggucggcaacgagaccggccucgagcugacccugaccaacacguccaucaucaaccacaaguucugcaaccucagcgacgcccacaagaagaaccuguacgaccacgcccugauguccaucaucagcaccuuccaccucuccauccccaacuucaaccaguacgaggccaugagcugcgacuucaacgggggccggaucuccgugcaguacaaccugagccacuccuacgcgguggacgccgccaaccacugcgggaccaucgccaacggcguccugcagaccuucaugcgcauggcguggggcgggagcuacaucgcccucgacuccggcaaggggagcugggacugcaucaugacguccuaccaguaccugaucauccagaacaccaccugggaggaccacugccaguucagccggcccagccccaucggcuaccuggggcuccugucccagcgcacccgggacaucuacaucagccgccggcgccggggcacguucaccuggacccuguccgacagcgagggcaacgagacccccgggggcuacugccugacgcgcuggaugcucaucgaggccgagcugaagugcuucgggaacaccgccguggccaagugcaacgagaagcacgacgaggaguucugcgacaugcugcggcuguucgacuucugcaagcaggcgauccgccggcugaagacccccgcccagauguccauccagcugaucaacaaggccgugaacgcccucaucaacgaccagcugaucaugaagaaccaccuccgcgacaucaugggcaucccguacugcaacuacagcaaguacugcuaccucaaccacaccgucacggggaagaccucccugccccggugcugccuggugagcaacggcuccuaccucaacgagacccacuucagcgacgacaucgagcagcaggccgacaacaugaucaccgagcugcugcagaaggaguacaucgaccgccagggcaagacgccccucgggcugguggaccuguucgucuucuccaccagcuucuaccugaucuccaucuuccuccaccuggugaagaucccgacccaccggcacaucaccggcaagcccugccccaagccccaccgccugaaccacauggggaucugcagcugcggccucuacaaccacccgggggugcccgucaaguggaagcggugaggacuaguaauaaggaaacuguaugaaugucugugggcaggaagugaagagauccuucuguaaagguuuuuggaauuaugucugcugaauaauaaacuuuuuugaaauaauaaaucugguagaaaaaugagaucuaaaaaaaaaaaaaaaaaaaaaaaaaaaaaaaaaaaaaaaaaaaaaaaaaaaaaaaaaaaaaaaaaaaaaaaaaaaaaaaaaaaaaaaaaaaaaaaaaaaa

SEQ ID NO: 27537 - RNA, 1785 nt, Artificial Sequence
  mRNA product Design b-4 (A100) comprising derived and/or modified sequence from LASV(Lassa virus/H.sapiens-wt/NGA/2016/ISTH_0017;Clade II)__AVO03567__GPCmut4 (opt1)
aggagagucccgcagucggcguccagcggcucugcuuguucgugugugugucguugcaggccuuauucaagcuuaccaugggccagaucaucaccuucuuccaggaggugccccacgucaucgaggaggugaugaacaucgugcugaucgcccucagccugcuggccauccucaaggggaucuacaacgucgcgaccugcggccuguucgggcugguguccuuccuccugcugugcggccgcagcugcuccacgaccuacaaggggguguacgagcuccagacccuggagcuggacauggccagccucaacaugugcaugccgcuguccugcacgaagaacaacagccaccacuacaucauggucggcaacgagaccggccuggagcucacccugaccaacacguccaucaucaaccacaaguucugcaaccugagcgacgcccacaagaagaaccucuacgaccacgcccugauguccaucaucagcaccuuccaccuguccauccccaacuucaaccaguacgaggccaugagcugcgacuucaacgggggcaagaucuccgugcaguacaaccucagccacaccuacgcgaucgacgccgccaaccacugcgggaccaucgccaacggcgugcugcagacguucaugcggauggcguggggcggguccuacaucgcccuggacagcggcaagggguccugggacugcaucaugaccagcuaccaguaccucaucauccagaacaccaccugggaggaccacugccaguucucccgccccagccccaucggcuaccuggggcugcucagccagcggacgcgcgacaucuacaucucccggcgccgccggggcaccuucaccuggacccucagcgacuccgagggcaacgagacgcccgggggcuacugccugacccgguggaugcugaucgaggccgagcucaagugcuucgggaacaccgccgucgccaagugcaacgagaagcacgacgaggaguucugcgacaugcugcgccuguucgacuucugcaagcaggcgauccggcgccucaagacccccgcccagaugagcauccagcugaucaacaaggccgugaacgcccugaucaacgaccagcucaucaugaagaaccaccuccgggacaucaugggcauccccuacugcaacuacuccaaguacugcuaccugaaccacacggugaccgggaagaccagccugccccgcugcugccuggucuccaacggcagcuaccugaacgagacccacuucuccgacgacaucgagcagcaggccgacaacaugaucacggagcuccugcagaaggaguacauggaccggcagggcaagaccccgcuggggcucguggaccuguucguguucagcaccuccuucuaccugaucagcaucuuccugcaccucguccgcaucccgacccaccggcacgugaucggcaagcccugccccaagccccaccgccugaaccacauggggaucugcuccugcggccuguacaagcacccgggggugcccgucaaguggaagcggugaggacuaguaauaaggaaacuguaugaaugucugugggcaggaagugaagagauccuucuguaaagguuuuuggaauuaugucugcugaauaauaaacuuuuuugaaauaauaaaucugguagaaaaaugagaucuaaaaaaaaaaaaaaaaaaaaaaaaaaaaaaaaaaaaaaaaaaaaaaaaaaaaaaaaaaaaaaaaaaaaaaaaaaaaaaaaaaaaaaaaaaaaaaaaaaaa

SEQ ID NO: 27538 - RNA, 1785 nt, Artificial Sequence
  mRNA product Design b-4 (A100) comprising derived and/or modified sequence from LASV(Lassa virus/H.sapiens-wt/NGA/2018/ISTH_0959;Clade II)__AVV65099__GPCmut4 (opt1)
aggagagucccgcagucggcguccagcggcucugcuuguucgugugugugucguugcaggccuuauucaagcuuaccaugggccagaucaucaccuucuuccaggaggugccccacgucaucgaggaggugaugaacaucgugcugaucgcccucagccugcuggccauccucaaggggaucuacaacgucgugaccugcggccuguucgggcugguguccuuccuccugcugugcggccgcagcugcuccacgaccuacaagggggucuacgagcuccagacccuggagcuggacauggcgagccucaacaugugcaugccgcuguccugcacgaagaacaacagccaccacuacaucauggugggcaacgagaccggccuggagcucacccugaccaacacguccaucaucaaccacaaguucugcaaccugagcgacgcccacaagaagaaccucuacgaccacgcccugauguccaucaucagcaccuuccaccuguccauccccaacuucaaccaguacgaggccaugagcugcgacuucaacgggggcaagaucuccgugcaguacaaccucagccacgccuacgcgaucgacgccgccaaccacugcgggaccaucgccaacggcguccugcagaccuucaugcggauggcguggggcggguccuacaucgcccuggacagcggcaagggguccugggacugcaucaugacgagcuaccaguaccucaucauccagaacaccaccugggaggaccacugccaguucucccgccccagccccaucggcuaccuggggcugcucagccagcggacccgcgacaucuacaucucccggcgccgccggggcacguucaccuggacccucagcgacuccgagggcaacgagacccccgggggcuacugccugacgcgguggaugcugaucgaggccgagcucaagugcuucgggaacaccgccguggccaagugcaacgagaagcacgacgaggaguucugcgacaugcugcgccuguucgacuucugcaagcaggcgauccggcgccucaagacccccgcccagaugagcauccagcugaucaacaaggccgugaacgcccugaucaacgaccagcucaucaugaagaaccaccuccgggacaucaugggcaucccguacugcaacuacuccaaguacugcuaccugaaccacaccgucacggggaagaccagccugccccgcugcugccugguguccaacggcagcuaccugaacgagacccacuucuccgacgacaucgagcagcaggccgacaacaugaucaccgagcuccugcagaaggaguacaucgaccggcagggcaagacgccccuggggcucguggaccuguucgucuucagcaccuccuucuaccugaucagcaucuuccugcaccucgugaagaucccgacccaccgccacgugaucggcaagcccugccccaagccccaccggcugaaccacauggggaucugcuccugcggccuguacaagcacccggggguccccgugaaguggaagcgcugaggacuaguaauaaggaaacuguaugaaugucugugggcaggaagugaagagauccuucuguaaagguuuuuggaauuaugucugcugaauaauaaacuuuuuugaaauaauaaaucugguagaaaaaugagaucuaaaaaaaaaaaaaaaaaaaaaaaaaaaaaaaaaaaaaaaaaaaaaaaaaaaaaaaaaaaaaaaaaaaaaaaaaaaaaaaaaaaaaaaaaaaaaaaaaaaa

SEQ ID NO: 27539 - RNA, 1785 nt, Artificial Sequence
  mRNA product Design b-4 (A100) comprising derived and/or modified sequence from LASV(LASV003-NIG-2008;Clade II)__AIT17580__GPCmut4 (opt1)
aggagagucccgcagucggcguccagcggcucugcuuguucgugugugugucguugcaggccuuauucaagcuuaccaugggccagaucaucaccuucuuccaggaggugccccacgucaucgaggaggugaugaacaucgugcugaucgcccucagccugcuggccauccucaaggggaucuacaacgucgcgaccugcggccuguucgggcugguguccuuccuccugcugugcggccgcagcugcuccacgaccuacaaggggguguacgagcuccagacccuggagcuggacauggccagccucaacaugugcaugccgcuguccugcacgaagaacaacagccaccacuacaucauggucggcaacgagaccggccuggagcucacccugaccaacacguccaucaucaaccacaaguucugcaaccugagcgacgcccacaagaagaaccucuacgaccacgcccugauguccaucaucagcaccuuccaccuguccauccccaacuucaaccaguacgaggccaugagcugcgacuucaacgggggcaagaucuccgugcaguacaaccucagccacaccuacgcgguggacgccgccaaccacugcgggaccaucgccaacggcguccugcagacguucaugcggauggcguggggcggguccuacaucgcccuggacagcggcaagggguccugggacugcaucaugaccagcuaccaguaccucaucauccagaacaccaccugggaggaccacugccaguucucccgccccagccccaucggcuaccuggggcugcucagccagcggacgcgcgacaucuacaucucccggcgccgccggggcaccuucaccuggacccucagcgacuccgagagcaacgagacgccgggcggguacugccugacccgguggaugcugaucgaggccgagcucaagugcuucggcaacaccgccguggccaagugcaacgagaagcacgacgaggaguucugcgacaugcugcgccuguucgacuucugcaagcaggcgauccggcgccucaaggcccccgcccagauguccauccagcugaucaacaaggccgugaacgcccugaucaacgaccagcucaucaugaagaaccaccuccgggacaucauggggauccccuacugcaacuacagcaaguacugcuaccugaaccacaccgucacgggccgcaccucccugccccggugcugccuggugagcaacggguccuaccugaacgagacccacuucagcgacgacaucgagcagcaggcggacaacaugaucaccgagcuccugcagaaggaguacauggaccgccagggcaagacgccccugggccucguggaccuguucgucuucuccaccagcuucuaccugaucuccaucuuccugcaccucgugaagaucccgacccaccggcacgugaucgggaagcccugccccaagccccaccgccugaaccacaugggcaucugcagcugcgggcuguacaagcacccgggcguccccgugaaguggaagcggugaggacuaguaauaaggaaacuguaugaaugucugugggcaggaagugaagagauccuucuguaaagguuuuuggaauuaugucugcugaauaauaaacuuuuuugaaauaauaaaucugguagaaaaaugagaucuaaaaaaaaaaaaaaaaaaaaaaaaaaaaaaaaaaaaaaaaaaaaaaaaaaaaaaaaaaaaaaaaaaaaaaaaaaaaaaaaaaaaaaaaaaaaaaaaaaaa

SEQ ID NO: 27540 - RNA, 1785 nt, Artificial Sequence
  mRNA product Design b-4 (A100) comprising derived and/or modified sequence from LASV(LASV035-NIG-2009;Clade II)__AIT17588__GPCmut4 (opt1)
aggagagucccgcagucggcguccagcggcucugcuuguucgugugugugucguugcaggccuuauucaagcuuaccaugggccagaucaucaccuucuuccaggaggugccccacgucaucgaggaggugaugaacaucgugcugaucgcccucagccugcuggccauccucaaggggaucuacaacgucgcgaccugcggccuguucgggcugguguccuuccuccugcugugcggccgcagcugcuccacgaccuacaaggggguguacgagcuccagacccuggagcuggacauggccagccucaacaugugcaugccgcuguccugcacgaagaacaacagccaccacuacaucauggucggcaacgagaccggccuggagcucacccugaccaacacguccaucaucaaccacaaguucugcaaccugagcgacgcccacaagaagaaccucuacgaccacgcccugauguccaucaucagcaccuuccaccuguccauccccaacuucaaccaguacgaggccaugagcugcgacuucaacgggggcaagaucuccgugcaguacaaccucagccacgcguacgccguggacgccgccaaccacugcgggaccaucgcgaacggcguccugcagaccuucaugcggauggccuggggcggguccuacaucgcccuggacagcggcaagggguccugggacugcaucaugacgagcuaccaguaccucaucauccagaacaccaccugggaggaccacugccaguucucccgccccagccccaucggcuaccuggggcugcucagccagcggacccgcgacaucuacaucucccggcgccgccggggcacguucaccuggacccucagcgacuccgagggcaacgagacccccgggggcuacugccugacgcgguggaugcugaucgaggccgagcucaagugcuucgggaacaccgccguggcgaagugcaacgagaagcacgacgaggaguucugcgacaugcugcgccuguucgacuucugcaagcaggccauccggcgccucaaggcccccgcccagaugagcauccagcugaucaacaaggccgugaacgcgcugaucaacgaccagcucaucaugaagaaccaccuccgggacaucaugggcauccccuacugcaacuacuccaaguacugcuaccugaaccacaccgucaccgggaagacgagccugccccgcugcugccugguguccaacggcagcuaccugaacgagacccacuucuccgacgacaucgagcagcaggccgacaacaugaucaccgagcuccugcagaaggaguacaucgaccggcagggcaagaccccgcuggggcucguggaccuguucgucuucagcacguccuucuaccugaucagcaucuuccugcaccucgugaagaucccgacccaccgccacgugaucggcaagcccugccccaagccccaccggcugaaccacauggggaucugcuccugcggccuguacaagcacccggggguccccgugaaguggaagcgcugaggacuaguaauaaggaaacuguaugaaugucugugggcaggaagugaagagauccuucuguaaagguuuuuggaauuaugucugcugaauaauaaacuuuuuugaaauaauaaaucugguagaaaaaugagaucuaaaaaaaaaaaaaaaaaaaaaaaaaaaaaaaaaaaaaaaaaaaaaaaaaaaaaaaaaaaaaaaaaaaaaaaaaaaaaaaaaaaaaaaaaaaaaaaaaaaa

SEQ ID NO: 27541 - RNA, 1785 nt, Artificial Sequence
  mRNA product Design b-4 (A100) comprising derived and/or modified sequence from LASV(LASV1000-NIG-2009;Clade II)__AIT17782__GPCmut4 (opt1)
aggagagucccgcagucggcguccagcggcucugcuuguucgugugugugucguugcaggccuuauucaagcuuaccaugggccagaucaucaccuucuuccaggaggugccccacgucaucgaggaggugaugaacaucgugcugaucgcccucagccugcuggccauccucaaggggaucuacaacgucgcgaccugcggccuguucgggcugguguccuuccuccugcugugcggccgcagcugcuccacgaccuacaaggggguguacgagcuccagacccuggagcuggacauggccagccucaacaugugcaugccgcuguccugcacgaagaacaacagccaccacuacaucauggucggcaacgagaccggccuggagcucacccugaccaacacguccaucaucaaccacaaguucugcaaccugagcgacgcccacaagaagaaccucuacgaccacgcccugauguccaucaucagcaccuuccaccuguccauccccaacuucaaccaguacgaggccaugagcugcgacuucaacgggggcaagaucuccgugcaguacaaccucagccacaccuacgcgguggacgccgccaaccacugcgggaccaucgccaacggcguccugcagacguucaugcggauggcguggggcggguccuacaucgcccuggacagcggcaagggguccugggacugcaucaugaccagcuaccaguaccucaucauccagaacaccaccugggaggaccacugccaguucucccgccccagccccaucggcuaccuggggcugcucagccagcggacgcgcgacaucuacaucucccggcgccgccggggcaccuucaccuggacccucagcgacuccgagggcaacgagacgcccgggggcuacugccugacccgguggaugcugaucgaggccgagcucaagugcuucgggaacaccgccguggccaagugcaacgagaagcacgacgaggaguucugcgacaugcugcgccuguucgacuucugcaagcaggcgaucaagcggcucaagacccccgcccagaugagcauccagcugaucaacaaggccgugaacgcccugaucaacgaccagcucaucaugaagaaccaccuccgcgacaucaugggcauccccuacugcaacuacuccaaguacugcuaccugaaccacacggucaccgggaagaccagccugccccggugcugccugguguccaacggcagcuaccugaacgagacccacuucuccgacgacaucgagcagcaggccgacaacaugaucacggagcuccugcagaaggaguacaucgaccgccagggcaagaccccgcuggggcucguggaccuguucgucuucagcaccuccuucuaccugaucagcaucuuccugcaccucgugaagaucccgacccaccggcacguggucggcaagcccugccccaagccccaccgccugaaccacauggggaucugcuccugcggccuguacaagcacccgggggugcccgugaaguggaagcggugaggacuaguaauaaggaaacuguaugaaugucugugggcaggaagugaagagauccuucuguaaagguuuuuggaauuaugucugcugaauaauaaacuuuuuugaaauaauaaaucugguagaaaaaugagaucuaaaaaaaaaaaaaaaaaaaaaaaaaaaaaaaaaaaaaaaaaaaaaaaaaaaaaaaaaaaaaaaaaaaaaaaaaaaaaaaaaaaaaaaaaaaaaaaaaaaa

SEQ ID NO: 27542 - RNA, 1785 nt, Artificial Sequence
  mRNA product Design b-4 (A100) comprising derived and/or modified sequence from LASV(LASV221-NIG-2010;Clade II)__AIT17624__GPCmut4 (opt1)
aggagagucccgcagucggcguccagcggcucugcuuguucgugugugugucguugcaggccuuauucaagcuuaccaugggccagaucaucaccuucuuccaggaggugccccacgucaucgaggaggugaugaacaucgugcugaucgcccucagccugcuggccauccucaaggggaucuacaacgucgcgaccugcggccuguucgggcugguguccuuccuccugcugugcggccgcagcugcuccacgaccuacaaggggguguacgagcuccagacccuggagcuggacauggccagccucaacaugugcaugccgcuguccugcacgaagaacaacagccaccacuacaucauggucggcaacgagaccggccuggagcucacccugaccaacacguccaucaucaaccacaaguucugcaaccugagcgacgcccacaagaagaaccucuacgaccacgcccugauguccaucaucagcaccuuccaccuguccauccccaacuucaaccaguacgaggccaugagcugcgacuucaacgggggcaagaucuccgugcaguacaaccucagccacaccuacgcgaucgacgccgccaaccacugcgggaccaucgccaacggcgugcugcagacguucaugcggauggcguggggcggguccuacaucgcccuggacagcggcaagggguccugggacugcaucaugaccagcuaccaguaccucaucauccagaacaccaccugggaggaccacugccaguucucccgccccagccccaucggcuaccuggggcugcucagccagcggacgcgcgacaucuacaucucccggcgccgccggggcaccuucaccuggacccucagcgacuccgagggcaacgagacgcccgggggcuacugccugacccgguggaugcugaucgaggccgagcucaagugcuucgggaacaccgccgucgccaagugcaacgagaagcacgacgaggaguucugcgacaugcugcgccuguucgacuucugcaagcaggcgauccggcgccucaagacccccgcccagaugagcauccagcugaucaacaaggccgugaacgcccugaucaacgaccagcucaucaugaagaaccaccuccgggacaucaugggcauccccuacugcaacuacuccaaguacugcuaccugaaccacacggugaccgggaagaccagccugccccgcugcugccuggucuccaacggcagcuaccugaacgagacccacuucuccgacgacaucgagcagcaggccgacaacaugaucacggagaugcuccagaaggaguacauggaccggcagggcaagaccccgcuggggcugguggaccucuucguguucagcaccuccuucuaccugaucagcaucuuccugcaccuggucaagaucccgacccaccgccacgugaucggcaagcccugccccaagccccaccggcucaaccacauggggaucugcuccugcggccuguacaagcacccgggggugcccgucaaguggaagcgcugaggacuaguaauaaggaaacuguaugaaugucugugggcaggaagugaagagauccuucuguaaagguuuuuggaauuaugucugcugaauaauaaacuuuuuugaaauaauaaaucugguagaaaaaugagaucuaaaaaaaaaaaaaaaaaaaaaaaaaaaaaaaaaaaaaaaaaaaaaaaaaaaaaaaaaaaaaaaaaaaaaaaaaaaaaaaaaaaaaaaaaaaaaaaaaaaa

SEQ ID NO: 27543 - RNA, 1785 nt, Artificial Sequence
  mRNA product Design b-4 (A100) comprising derived and/or modified sequence from LASV(LASV237-NIG-2010;Clade II)__AIT17638__GPCmut4 (opt1)
aggagagucccgcagucggcguccagcggcucugcuuguucgugugugugucguugcaggccuuauucaagcuuaccaugggccagaucaucaccuucuuccaggaggugccccacgucaucgaggaggugaugaacaucgugcugaucgcccucagccugcuggccauccucaaggggaucuacaacgucgcgaccugcggccuguucgggcugguguccuuccuccugcugugcggccgcagcugcuccacgaccuacaaggggguguacgagcuccagacccuggagcuggacauggccagccucaacaugugcaugccgcuguccugcacgaagaacaacagccaccacuacaucauggucggcaacgagaccggccuggagcucacccugaccaacacguccaucaucaaccacaaguucugcaaccugagcgacgcccacaagaaggaccucuacgaccacgcccugauguccaucaucagcaccuuccaccuguccauccccaacuucaaccaguacgaggccaugagcugcgacuucaacgggggcaagaucuccgugcaguacaaccucagccacaccuacgcgguggacgccgccaaccacugcgggaccaucgccaacggcguccugcagacguucaugcggauggcguggggcggguccuacaucgcccuggacagcggcaagggguccugggacugcaucaugaccagcuaccaguaccucaucauccagaacaccaccugggaggaccacugccaguucucccgccccagccccaucggcuaccuggggcugcucagccagcggacgcgcgacaucuacaucucccggcgccgccggggcaccuucaccuggacccucagcgacuccgagggcaacgagacgcccgggggcuacugccugacccgguggaugcugaucgaggccgagcucaagugcuucgggaacaccgccguggccaagugcaacgagaagcacgacgaggaguucugcgacaugcugcgccuguucgacuucugcaagcaggcgauccggcgccucaagacccccgcccagaugagcauccagcugaucaacaaggccgugaacgcccugaucaacgaccagcucaucaugaagaaccaccuccgggacaucaugggcauccccuacugcaacuacuccaaguacugcuaccugaaccacacggucaccgggaagaccagccugccccgcugcugccugguguccaacggcagcuaccugaacgagacccacuucuccgacgacaucgagcagcaggccgacaacaugaucacggagcuccugcagaaggaguacauggaccggcagggcaagaccccgcuggggcucguggaccuguucgucuucagcaccuccuucuaccugaucagcaucuuccugcaccucaucaagaucccgacccaccgccacaucacgggcaagcccugccccaagccccaccggcugaaccacauggggaucugcuccugcggccuguacaagcacccgggggugcccgugaaguggaagcgcugaggacuaguaauaaggaaacuguaugaaugucugugggcaggaagugaagagauccuucuguaaagguuuuuggaauuaugucugcugaauaauaaacuuuuuugaaauaauaaaucugguagaaaaaugagaucuaaaaaaaaaaaaaaaaaaaaaaaaaaaaaaaaaaaaaaaaaaaaaaaaaaaaaaaaaaaaaaaaaaaaaaaaaaaaaaaaaaaaaaaaaaaaaaaaaaaa

SEQ ID NO: 27544 - RNA, 1785 nt, Artificial Sequence
  mRNA product Design b-4 (A100) comprising derived and/or modified sequence from LASV(LASV253-NIG-2011;Clade II)__AIT17670__GPCmut4 (opt1)
aggagagucccgcagucggcguccagcggcucugcuuguucgugugugugucguugcaggccuuauucaagcuuaccaugggccagaucaucaccuucuuccaggaggugccccacgucaucgaggaggugaugaacaucgugcugaucgcccucagccugcuggccauccucaaggggaucuacaacgucgcgaccugcggccuguucgggcugguguccuuccuccugcugugcggccgcagcugcuccacgaccuacaaggggguguacgagcuccagacccuggagcuggacauggccagccucaacaugugcaugccgcuguccugcacgaagaacaacagccaccacuacaucauggucggcaacgagaccggccuggagcucacccugaccaacacguccaucaucaaccacaaguucugcaaccugagcgacgcccacaagaagaaccucuacgaccacgcccugauguccaucaucagcaccuuccaccuguccauccccaacuucaaccaguacgaggccaugagcugcgacuucaacgggggcaagaucuccgugcaguacaaccucagccacaccuacgcgguggacgccgccaaccacugcgggaccaucgccaacggcguccugcagacguucaugcggauggcguggggcggguccuacaucgcccuggacagcggcaagggguccugggacugcaucaugaccagcuaccaguaccucaucauccagaacaccaccugggaggaccacugccaguucucccgccccagccccaucggcuaccuggggcugcucagccagcggacgcgcgacaucuacaucucccggcgccgccggggcaccuucaccuggacccucagcgacuccgagggcaacgagacgcccgggggcuacugccugacccgguggaugcugaucgaggccgagcucaagugcuucgggaacaccgccguggccaagugcaacgagaagcacgacgaggaguucugcgacaugcugcgccuguucgacuucugcaagcaggcgauccggcgccucaaggcccccgcccagaugagcauccagcugaucaacaaggccgugaacgcccugaucaacgaccagcucaucaugaagaaccaccuccgggacaucaugggcaucccguacugcaacuacuccaaguacugcuaccugaaccacaccgucacggggcgcaccagccugccccggugcugccugguguccaacggcagcuaccugaacgagacccacuucuccgacgacaucgagcagcaggcggacaacaugaucaccgagcuccugcagaaggaguacaucgaccgccagggcaagacgccccuggggcucguggaccuguucgucuucagcaccuccuucuaccugaucagcaucuuccugcaccucgugaagaucccgacccaccggcacaucaucggcaagcccugccccaagccccaccgccugaaccacauggggaucugcuccugcggccuguacaagcacccgggggugcccgucaaguggaagcggugaggacuaguaauaaggaaacuguaugaaugucugugggcaggaagugaagagauccuucuguaaagguuuuuggaauuaugucugcugaauaauaaacuuuuuugaaauaauaaaucugguagaaaaaugagaucuaaaaaaaaaaaaaaaaaaaaaaaaaaaaaaaaaaaaaaaaaaaaaaaaaaaaaaaaaaaaaaaaaaaaaaaaaaaaaaaaaaaaaaaaaaaaaaaaaaaa

SEQ ID NO: 27545 - RNA, 1785 nt, Artificial Sequence
  mRNA product Design b-4 (A100) comprising derived and/or modified sequence from LASV(LASV254-NIG-2011;Clade II)__AIT17674__GPCmut4 (opt1)
aggagagucccgcagucggcguccagcggcucugcuuguucgugugugugucguugcaggccuuauucaagcuuaccaugggccagaucaucaccuucuuccaggaggugccccacgucaucgaggaggugaugaacaucgugcugaucgcccucagccugcuggccauccucaaggggaucuacaacgucgcgaccugcggccuguucgggcugguguccuuccuccugcugugcggccgcagcugcuccacgaccuacaaggggguguacgagcuccagacccuggagcuggacaugaccaaccucaacaugugcaugccgcugagcugcaccaagaacaacucccaccacuacaucauggucggcaacgagaccggccuggagcucacccugacgaacaccagcaucaucaaccacaaguucugcaaccuguccgacgcccacaagaagaaccucuacaaccacgcccugaugagcaucaucuccaccuuccaccugagcauccccaacuucaaccaguacgaggccauguccugcgacuucaacgggggcaagaucagcgugcaguacaaccucucccacagcuacgccguggacgcggccaaccacugcgggaccaucgccaacggcguccugcagacguucaugcggauggccuggggcggguccuacaucgcgcuggacagcggcaaggggaacugggacugcaucaugaccuccuaccaguaccucaucauccagaacaccaccugggaggaccacugccaguucagccgccccucccccaucggcuaccuggggcugcucagccagcggacgcgcgacaucuacaucagccggcgccgccggggcaccuucaccuggacccucuccgacagcgagggcaacgagacgcccgggggcuacugccugacccgguggaugcugaucgaggccgagcucaagugcuucgggaacaccgccguggccaagugcaacgagaagcacgacgaggaguucugcgacaugcugcgccuguucgacuucugcaagcaggccauccggcgccucaagacccccgcgcaggccaacauccagcugaucaacaaggccgugaacgcccugaucaacgaccagcucaucaugaagaaccaccuccgggacaucaugggcauccccuacugcaacuacuccaaguacugcuaccugaaccacacggucaccgggaagaccagccugccccgcugcugccugguguccaacggcagcuaccugaacgagacccacuucuccgacgacaucgagcagcaggccgacaacaugaucacggagcuccugcagaaggaguacauggaccggcagggcaagaccccgcuggggcucguggaccuguucgucuucagcaccuccuucuaccugaucagcaucuuccugcaccucgugaagaucccgacccaccgccacgugaucggcaagcccugccccaagccccaccggcugaaccacauggggaucugcuccugcggccuguacaagcacccggggguccccgugaaguggaagcgcugaggacuaguaauaaggaaacuguaugaaugucugugggcaggaagugaagagauccuucuguaaagguuuuuggaauuaugucugcugaauaauaaacuuuuuugaaauaauaaaucugguagaaaaaugagaucuaaaaaaaaaaaaaaaaaaaaaaaaaaaaaaaaaaaaaaaaaaaaaaaaaaaaaaaaaaaaaaaaaaaaaaaaaaaaaaaaaaaaaaaaaaaaaaaaaaaa

SEQ ID NO: 27546 - RNA, 1785 nt, Artificial Sequence
  mRNA product Design b-4 (A100) comprising derived and/or modified sequence from LASV(Nig08-A19;Clade III)__ADU56618__GPCmut4 (opt1)
aggagagucccgcagucggcguccagcggcucugcuuguucgugugugugucguugcaggccuuauucaagcuuaccaugggccagaucgugaccuucuuccaggaggucccccacgugaucgaggaggugaugaacaucguccugaucgcccucagcauccuggccauccugaaggggcucuacaacaucgcgaccugcggccugaucgggcuggugacguuccuccugcuguccggccgcagcugcuccaugaccuacaaggggguguacgagcuccagacccuggagcugaacaugaacacccucaacaugugcaugccgcugagcugcaccaagaacaacucccaccacuacaucauggucggcaacgagaccggccuggagcucacccugacgaacaccagccugcuccaccacaaguucugcaaccuguccgacgcccacaagaagaaccuguacgaccacacccucaugagcaucaucuccaccuuccaccugagcauccccaacuucaaccaguacgaggccauguccugcgacuucaacgggggcaagaucacggugcaguacaaccugagccacuccuacgccaucgacgccgcgaaccacugcgggaccguggccaacggcguccuccagaccuucaugcggauggccuggggcgggagcuacaucgcccuggacuccggccgcgggaagugggacugcaucaugaccagcuaccaguaccugaucauccagaacacgaccugggaggaccacugccaguucucccggcccagccccaucggcuaccucgggcugcugucccagcgcacccgggacaucuacaucagccgccggcgccggggcaccuucacguggacccugagcgacuccgagggcaacgagacccccgggggcuacugccucacccgcuggaugcugaucgaggcggagcugaagugcuucgggaacacggccguggccaagugcaacgagaagcacgacgaggaguucugcgacaugcuccggcuguucgacuucugcaagcaggccauccgccggcugaaggcccccgcgcagaugagcauccagcucaucaacaaggccgugaacgcccugaucaacgaccagcugaucaugaagaaccaccuccgcgacaucaugggcauccccuacugcaacuacuccaaguacugcuaccugaaccacaccagcaccgggcggaccucccugccccgcugcugccucgucagcaacggcuccuaccugaacgagacgcacuucagcgacgacaucgagcagcaggccgacaacaugaucaccgagaugcugcagaaggaguaccucgaccggcagggcaagaccccgcuggggcugguggaccuguucguguucuccaccagcuucuaccucaucuccaucuuccugcaccuggucaagaucccgacgcaccgccacaucgugggcaagcccugccccaagccccaccggcucaaccacauggggaucugcagcugcggccuguacaagcagccgggggugcccguccgcuggaagcggugaggacuaguaauaaggaaacuguaugaaugucugugggcaggaagugaagagauccuucuguaaagguuuuuggaauuaugucugcugaauaauaaacuuuuuugaaauaauaaaucugguagaaaaaugagaucuaaaaaaaaaaaaaaaaaaaaaaaaaaaaaaaaaaaaaaaaaaaaaaaaaaaaaaaaaaaaaaaaaaaaaaaaaaaaaaaaaaaaaaaaaaaaaaaaaaaa

SEQ ID NO: 27547 - RNA, 1788 nt, Artificial Sequence
  mRNA product Design b-4 (A100) comprising derived and/or modified sequence from LASV(G1180-SLE-2010;Clade IV)__AIT17168__GPCmut4 (opt1)
aggagagucccgcagucggcguccagcggcucugcuuguucgugugugugucguugcaggccuuauucaagcuuaccaugggccagaucgugaccuucuuccaggaggucccccacgugaucgaggaggugaugaacaucguccugaucgcccucagcauccuggccgugcugaaggggcucuacaacuucgcgaccugcggccugguggggcugcucaccuuccugcugcucugcggccgcuccugcaccgccagccgguacaagggggucuacgagcugcagacccuggagcucaacauggagacccugaacaugugcaugccgcuguccugcaccaagaacaacagccaccacuacaucauggugggcaacgagaccggccucgagcugacccugacgaacaccuccaucaucaaccacaaguucugcaaccucagcgacgcccacaagaagaaccuguacgaccacgcccugauguccaucaucagcaccuuccaccucuccauccccaacuucaaccaguacgaggccaugagcugcgacuucaacgggggcaagaucuccgugcaguacaaccugagccacuccuacgcgggggacgccgccaaccacugcggcaccgucgccaacggggugcugcagacguucaugcgcauggcguggggcggcagcuacaucgcccucgacuccgggcacggcagcugggacugcaucaugaccuccuaccaguaccugaucauccagaacaccaccugggaggaccacugccaguucagccggcccucccccaucggguaccugggccuccugagccagcgcacgcgggacaucuacaucagccgccggcgccggggcaccuucaccuggacccuguccgacagcgaggggaaggacacgccgggcggguacugccugacccgcuggaugcucaucgaggccgagcugaagugcuucggcaacaccgccguggccaagugcaacgagaagcacgacgaggaguucugcgacaugcugcggcuguucgacuucugcaagcaggcgauccagcgccugaaggcccccgcccagauguccauccagcugaucaacaaggccgucaacgcccucaucaacgaccagcugaucaugaagaaccaccuccgggacaucauggggauccccuacugcaacuacagcaaguacugcuaccucaaccacaccacgaccggcaagaccucccugcccaagugcugccuggugagcaacggcuccuaccucaacgagacccacuucagcgacgacaucgagcagcaggcggacaacaugaucacggagaugcugcagaaggaguacauggagcgccaggggaagacgccccugggccucguggaccuguucgucuucuccaccagcuucuaccugaucuccaucuuccugcaccucgugaagaucccgacccaccggcacaucgugggcaagagcugccccaagccccaccgccugaaccacauggggaucugcuccugcgggcuguacaagcagcccggcgucccggugaaguggaagcggugaggacuaguaauaaggaaacuguaugaaugucugugggcaggaagugaagagauccuucuguaaagguuuuuggaauuaugucugcugaauaauaaacuuuuuugaaauaauaaaucugguagaaaaaugagaucuaaaaaaaaaaaaaaaaaaaaaaaaaaaaaaaaaaaaaaaaaaaaaaaaaaaaaaaaaaaaaaaaaaaaaaaaaaaaaaaaaaaaaaaaaaaaaaaaaaaa

SEQ ID NO: 27548 - RNA, 1788 nt, Artificial Sequence
  mRNA product Design b-4 (A100) comprising derived and/or modified sequence from LASV(G1442-SLE-2011;Clade IV)__AIT17180__GPCmut4 (opt1)
aggagagucccgcagucggcguccagcggcucugcuuguucgugugugugucguugcaggccuuauucaagcuuaccaugggccagaucgugaccuucuuccaggaggucccccacgugaucgaggaggugaugaacaucguccugaucgcccucagcauccuggccgugcugaaggggcucuacaacguggcgaccugcggccugaucgggcuggucacguuccuccugcugugcggccgcuccugcaccaccacccucuacaaggggguguacgagcugcagacgcuggagcucaacauggagacccugaacaugugcaugccgcugagcugcaccaagaacaacucccaccacuacauccgggugggcaacgagacgggccucgagcugacccugaccaacaccagcaucaucaaccacaaguucugcaaccucuccgacgcccacaagaagaaccuguacgaccacgcccugaugagcaucaucuccacguuccaccucagcauccccaacuucaaccaguacgaggccauguccugcgacuucaacgggggcaagaucagcguccaguacaaccugucccacagcuacgccggggacgcggccaaccacugcggcaccguggccaacggggugcugcagaccuucaugcgcauggccuggggcggcuccuacaucgcgcucgacagcgggcggggcaacugggacugcaucaugaccuccuaccaguaccugaucauccagaacacgaccugggacgaccacugccaguucagccgccccucccccaucggguaccugggccuccugagccagcggacccgcgacgucuacaucucccggcgccgccggggcaccuucacguggacccugagcgacagcgaggggaaggacaccccgggcggguacugccugacccgguggaugcucaucgaggccgagcugaagugcuucggcaacacggccguggccaagugcaacgagaagcacgacgaggaguucugcgacaugcugcgccucuucgacuucugcaagcaggccauccagcggcugaaggcgcccgcccagauguccauccagcugaucaacaaggccgugaacgcccucaucaacgaccagcugaucaugaagaaccaccuccgcgacaucauggggauccccuacugcaacuacagcaaguacugcuaccugaacaacaccgccaccggcaagaccucccugcccaagugcugccugaucagcaacggcuccuaccucaacgagacgcacuucagcgacgacaucgagcaggaggcggacaacaugaucaccgagaugcugcagaaggaguacauggagcggcaggggaagacgccccugggccucgucgaccuguucguguucuccaccagcuucuaccugaucuccaucuuccugcaccucgugaagaucccgacccaccgccacaucgucggcaagagcugccccaagccccaccggcugaaccacauggggaucugcuccugcgggcuguacaagcagcccggcgugccggugcgcuggaagcggugaggacuaguaauaaggaaacuguaugaaugucugugggcaggaagugaagagauccuucuguaaagguuuuuggaauuaugucugcugaauaauaaacuuuuuugaaauaauaaaucugguagaaaaaugagaucuaaaaaaaaaaaaaaaaaaaaaaaaaaaaaaaaaaaaaaaaaaaaaaaaaaaaaaaaaaaaaaaaaaaaaaaaaaaaaaaaaaaaaaaaaaaaaaaaaaaa

SEQ ID NO: 27549 - RNA, 1788 nt, Artificial Sequence
  mRNA product Design b-4 (A100) comprising derived and/or modified sequence from LASV(G3010-SLE-2013;Clade IV)__AIT17344__GPCmut4 (opt1)
aggagagucccgcagucggcguccagcggcucugcuuguucgugugugugucguugcaggccuuauucaagcuuaccaugggccagaucgugaccuucuuccaggaggucccccacgugaucgaggaggugaugaacaucguccugaucgcccucagcauccuggccgugcugaaggggcucuacaacuucgcgaccugcggccugguggggcuggucacguuccuccugcugugcggccgcuccugcaccaccagccucuacaaggggguguacgagcugcagacccuggagcucaacauggagacgcugaacaugugcaugccgcuguccugcaccaagaacaacagccaccacuacaucauggugggcaacgagaccggccucgagcugacgcugaccaacaccuccaucaucaaccacaaguucugcaaccucagcgacgcccacaagaagaaccuguacaaccacgcccugauguccaucaucagcaccuuccaccucuccauccccaacuucaaccaguacgaggccaugagcugcgacuucaacgggggcaagaucuccguccaguacaaccugagccacuccuacgccggggacgcggccagccacugcggcacgguggccaacggggugcugcagaccuucaugcggauggccuggggcggcuccuacaucgcgcucgacagcggguacggcaagugggacugcaucaugaccuccuaccaguaccugaucauccagaacaccacgugggaggaccacugccaguucagccgccccucccccaucggguaccugggccuccugagccagcggacccgcgacaucuacaucagccggcgccgccggggcaccuucaccuggacgcuguccgacagcgaggggaaggacaccccgggcggguacugccugacccgguggaugcucaucgaggccgagcugaagugcuucggcaacaccgccgucgccaagugcaacgagaagcacgacgaggaguucugcgacaugcugcgccucuucgacuucugcaagcaggccauccagcggcugaagacgcccgcgcagauguccauccagcugaucaacaaggccgugaacgcccucaucaacgaccagcugaucaugaagaaccaccuccgcgacaucauggggauccccuacugcaacuacagcaaguacugcuaccugaaccacaccaccaccggcaagacgucccugcccaagugcugccuggugagcaacggcuccuaccucaacgagacccacuucagcgacgacaucgagcagcaggccgacaacaugaucaccgagaugcugcagaaggaguacauggagcggcaggggaagacgccccugggccucgucgaccuguucguguucuccaccagcuucuaccugaucuccaucuuccugcaccucgugaagaucccgacccaccgccacaucgucggcaagagcugccccaagccccaccggcugaaccacauggggaucugcuccugcgggcuguacaagcagcccggcgugccggugcgcuggaagcggugaggacuaguaauaaggaaacuguaugaaugucugugggcaggaagugaagagauccuucuguaaagguuuuuggaauuaugucugcugaauaauaaacuuuuuugaaauaauaaaucugguagaaaaaugagaucuaaaaaaaaaaaaaaaaaaaaaaaaaaaaaaaaaaaaaaaaaaaaaaaaaaaaaaaaaaaaaaaaaaaaaaaaaaaaaaaaaaaaaaaaaaaaaaaaaaaa

SEQ ID NO: 27550 - RNA, 1788 nt, Artificial Sequence
  mRNA product Design b-4 (A100) comprising derived and/or modified sequence from LASV(G502-SLE-2009;Clade IV)__AIT17126__GPCmut4 (opt1)
aggagagucccgcagucggcguccagcggcucugcuuguucgugugugugucguugcaggccuuauucaagcuuaccaugggccagaucgugaccuucuuccaggaggucccccacgugaucgaggaggugaugaacaucguccugaucgcccucagcauccuggccgugcugaaggggcucuacaacuucgcgaccugcggccugguggggcugcucacguuccugcugcucugcggccgcuccugcaccaccgggcuguacaagggcgucuacgagcugcagacccucgagcugaacauggagacgcugaacaugugcaugccgcucagcugcaccaagaacaacucccaccacuacaucauggugggcaacgagaccgggcuggagcugacgcucaccaacaccagcaucaucaaccacaaguucugcaaccuguccgacgcccacaagaagaaccuguacgaccacgcccucaugagcaucaucuccaccuuccaccugagcauccccaacuucaaccaguacgaggccauguccugcgacuucaacggcgggaagaucagcgugcaguacaaccugucccacagcuacgccggcgacgcggccgaccacugcgggacggucgccaacggcgugcuccagaccuucaugcggauggccuggggcggguccuacaucgcgcuggacagcggccgcgggcggugggacugcaucaugaccuccuaccaguaccugaucauccagaacaccacgugggaggaccacugccaguucagccgccccucccccaucggcuaccucggccugcugagccagcggacccgcgacaucuacaucucccggcgccgccgggggaccuucaccuggacgcugagcgacagcgagggcaaggacacccccgggggcuacugccucacccgguggaugcugaucgaggccgagcugaagugcuucgggaacaccgccguggccaagugcaacgagaagcacgacgaggaguucugcgacaugcuccgccuguucgacuucugcaagcaggccauccagcggcugaaggcgcccgcccagauguccauccagcucaucaacaaggccgucaacgcccugaucaacgaccagcuggugaugaagaaccaccuccgcgacaucaugggcauccccuacugcaacuacagccgguacugcuaccugaaccacacgaccaccggccgcaccucccugcccaagugcugccucgugagcaacggguccuaccugaacgagacgcacuucagcgacgacaucgagcagcaggccgacaacaugaucaccgagaugcugcagaaggaguacauggagcggcagggcaagaccccgcucgggcuggucgaccuguucguguucuccaccagcuucuaccugaucuccaucuuccuccaccuggugaagaucccgacgcaccgccacaucgucggcaagagcugccccaagccccaccggcugaaccacauggggaucugcuccugcggccucuacaagcagcccggcgugccggugaaguggaagcgcugaggacuaguaauaaggaaacuguaugaaugucugugggcaggaagugaagagauccuucuguaaagguuuuuggaauuaugucugcugaauaauaaacuuuuuugaaauaauaaaucugguagaaaaaugagaucuaaaaaaaaaaaaaaaaaaaaaaaaaaaaaaaaaaaaaaaaaaaaaaaaaaaaaaaaaaaaaaaaaaaaaaaaaaaaaaaaaaaaaaaaaaaaaaaaaaaa

SEQ ID NO: 27551 - RNA, 1788 nt, Artificial Sequence
  mRNA product Design b-4 (A100) comprising derived and/or modified sequence from LASV(G733-SLE-2010;Clade IV)__AIT17154__GPCmut4 (opt1)
aggagagucccgcagucggcguccagcggcucugcuuguucgugugugugucguugcaggccuuauucaagcuuaccaugggccagaucgugaccuucuuccaggaggucccccacgugaucgaggaggugaugaacaucguccugaucgcccucagcauccuggccgugcugaaggggcucuacaacuucgcgaccugcggcaucguggggcuggucuccuuccugcuccugugcggccgcagcugcacgaccucccuguacaaggggguguacgagcuccagacccuggagcugaacauggagacccucaacaugugcaugccgcugagcugcaccaagaacaacucccaccacuacaucauggugggcaacgagaccggccuggagcucacccugacgaacaccagcaucaucaaccacaaguucugcaaccuguccgacgcccacaagaagaaccucuacgaccacgcccugaugagcaucaucuccaccuuccaccugagcauccccaacuucaaccaguacgaggccauguccugcgacuucaacgggggcaagaucagcguccaguacaaccucucccacagcuacgccggggacgcggccaaccacugcggcaccaucgccaacggggugcugcagacguucaugcggauggccuggggcggcuccuacaucgcgcuggacagcgggcgcgaccggugggacugcaucaugaccuccuaccaguaccucaucauccagaacaccaccugggaggaccacugccaguucagccgccccucccccaucggcuaccuggggcugcucagccagcggacgcgcgacaucuacaucagccggcgccgccggggcaccuucaccuggacccucuccgacagcgagggcaaggacacgcccgggggcuacugccugacccgguggaugcugaucgaggccgagcucaagugcuucgggaacaccgccguggccaagugcaacgagaagcacgacgaggaguucugcgacaugcugcgccuguucgacuucugcaagcaggccauccagcggcucaaggcgcccgcccagauguccauccagcugaucaacaaggccgucaacgcccugaucaacgaccagcucaucaugaagaaccaccuccgcgacaucaugggcauccccuacugcaacuacagcaaguacugcuaccugaaccacaccacgaccgggaagaccucccugcccaagugcugccuggugagcaacggcuccuaccugaacgagacccacuucagcgacgacaucgagcagcaggccgacaacaugaucacggagaugcuccagaaggaguacauggagcggcagggcaagaccccgcuggggcugguggaccucuucgucuucuccaccagcuucuaccugaucuccaucuuccugcaccuggugaagaucccgacccaccgccacguggucggcaagagcugccccaagccccaccggcucaaccacauggggaucugcuccugcggccuguacgggcagcccggcgugccggugaaguggaagcgcugaggacuaguaauaaggaaacuguaugaaugucugugggcaggaagugaagagauccuucuguaaagguuuuuggaauuaugucugcugaauaauaaacuuuuuugaaauaauaaaucugguagaaaaaugagaucuaaaaaaaaaaaaaaaaaaaaaaaaaaaaaaaaaaaaaaaaaaaaaaaaaaaaaaaaaaaaaaaaaaaaaaaaaaaaaaaaaaaaaaaaaaaaaaaaaaaa

SEQ ID NO: 27552 - RNA, 1788 nt, Artificial Sequence
  mRNA product Design b-4 (A100) comprising derived and/or modified sequence from MOPV/LASV reassortant(IGS-1;Clade IV)__AFY05576__GPCmut4 (opt1)
aggagagucccgcagucggcguccagcggcucugcuuguucgugugugugucguugcaggccuuauucaagcuuaccaugggccagaucgugaccuucuuccaggaggucccccacgugaucgaggaggugaugaacaucguccugaucgcccucagcgugcuggccgugcugaaggggcucuacaacuucgcgaccugcggccuggucgggcuggugacguuccuccugcugugcggccgcuccugcaccaccagccucuacaaggggguguacgagcugcagacccuggagcucaacauggagacgcugaacaugugcaugccgcuguccugcaccaagaacaacagccaccacuacaucauggucggcaacgagaccggccucgagcugacgcugaccaacaccuccaucaucaaccacaaguucugcaaccucagcgacgcccacaagaagaaccuguacgaccacgcccugauguccaucaucagcaccuuccaccucuccauccccaacuucaaccaguacgaggccaugagcugcgacuucaacgggggcaagaucuccgugcaguacaaccugagccacuccuacgccggggacgcggccaaccacugcggcacgguggccaacgggguccugcagaccuucaugcggauggccuggggcggcagcuacaucgcgcucgacuccgggcgcggcaacugggacugcaucaugaccagcuaccaguaccugaucauccagaacaccacgugggaggaccacugccaguucucccggcccagccccaucggguaccugggccuccugucccagcgcacccgggacaucuacaucagccgccggcgccggggcaccuucaccuggacgcugagcgacuccgagggggaggacaccccgggcggguacugccugacccgcuggaugcucaucgaggccgagcugaagugcuucggcaacaccgccguggccaagugcaacgagaagcacgacgaggaguucugcgacaugcugcggcuguucgacuucugcaagcaggccauccagcgccugaaggcgcccgcccagaugagcauccagcugaucaacaaggccgugaacgcccucaucaacgaccagcugaucaugaagaaccaccuccgggacaucauggggauccccuacugcaacuacuccaaguacugcuaccucaaccacacgaccaccggccgcaccagccugcccaagugcugccuggucuccaacggcagcuaccucaacgagacgcacuucuccgacgacaucgagcagcaggccgacaacaugaucaccgagaugcugcagaaggaguacauggagcggcaggggaagacgccccugggccucguggaccuguucguguucagcaccuccuucuaccugaucagcaucuuccugcaccucgucaagaucccgacccaccgccacaucguggggaaguccugccccaagccccaccggcugaaccacaugggcaucugcagcugcgggcuguacaagcagcccggcgugccggucaaguggaagcgcugaggacuaguaauaaggaaacuguaugaaugucugugggcaggaagugaagagauccuucuguaaagguuuuuggaauuaugucugcugaauaauaaacuuuuuugaaauaauaaaucugguagaaaaaugagaucuaaaaaaaaaaaaaaaaaaaaaaaaaaaaaaaaaaaaaaaaaaaaaaaaaaaaaaaaaaaaaaaaaaaaaaaaaaaaaaaaaaaaaaaaaaaaaaaaaaaa

SEQ ID NO: 27553 - RNA, 1788 nt, Artificial Sequence
  mRNA product Design b-4 (A100) comprising derived and/or modified sequence from LASV(LM765-SLE-2012;Clade IV)__AIT17814__GPCmut4 (opt1)
aggagagucccgcagucggcguccagcggcucugcuuguucgugugugugucguugcaggccuuauucaagcuuaccaugggccagaucgugaccuucuuccaggaggucccccacgugaucgaggaggugaugaacaucguccugaucgcccucagcauccuggccgugcugaaggggcucuacaacuucgcgaccugcggccugguggggcuggucacguuccuccugcugugcggccgcuccugcaccaccagccucuacaaggggguguacgagcugcagacccuggagcucaacauggagacgcugaacaugugcaugccgcuguccugcaccaagaacaacagccaccacuacaucauggugggcaacgagaccggccucgagcugacgcugaccaacaccuccaucaucgaccacaaguucugcaaccucagcgacgcccaccggaagaaccuguacgaccacgcccugauguccaucaucagcaccuuccaccucuccauccccaacuucaaccaguacgaggccaugagcugcgacuucaacgggggcaagaucuccguccaguacaaccugagccacuccuacgccaaggacgcggccgaccacugcgggacgguggccaacggcgugcugcagaccuucaugcgcauggccuggggcgggagcuacaucgcgcucgacuccggccgggggcgcugggacugcaucaugaccagcuaccaguaccugaucauccagaacaccacgugggaggaccacugccaguucucccggcccagccccaucggcuaccuggggcuccugucccagcgcacccgggacaucuacaucagccgccggcgccggggcaccuucaccuggacgcugagcgacuccgagggcaaggacacccccgggggcuacugccugacccgcuggaugcucaucgaggccgagcugaagugcuucgggaacaccgccgucgccaagugcaacgagaagcacgacgaggaguucugcgacaugcugcggcuguucgacuucugcaagcaggccauccagcgccugaaggcgcccgcccagaugagcauccagcugaucaacaaggccgugaacgcccucaucaacgaccagcugaucaugaagaaccaccuccgggacaucaugggcauccccuacugcaacuacuccaaguacugcuaccucaaccacacgaccaccgggaagaccagccugcccaagugcugccugguguccaacggcagcuaccucaacgagacgcacuucuccgacgacaucgagcagcaggccgacaacaugaucaccgagaugcugcagaaggaguacauggagcgccagggcaagaccccgcuggggcucgucgaccuguucguguucagcaccuccuucuaccugaucagcaucuuccugcaccucgugaagaucccgacgcaccggcacaucgucggcaagcccugccccaagccccaccgccugaaccacauggggaucugcuccugcggccuguacaagcagccgggggugcccgugaaguggaagcggugaggacuaguaauaaggaaacuguaugaaugucugugggcaggaagugaagagauccuucuguaaagguuuuuggaauuaugucugcugaauaauaaacuuuuuugaaauaauaaaucugguagaaaaaugagaucuaaaaaaaaaaaaaaaaaaaaaaaaaaaaaaaaaaaaaaaaaaaaaaaaaaaaaaaaaaaaaaaaaaaaaaaaaaaaaaaaaaaaaaaaaaaaaaaaaaaa

SEQ ID NO: 27554 - RNA, 1788 nt, Artificial Sequence
  mRNA product Design b-4 (A100) comprising derived and/or modified sequence from LASV(LM776-SLE-2012;Clade IV)__AIT17824__GPCmut4 (opt1)
aggagagucccgcagucggcguccagcggcucugcuuguucgugugugugucguugcaggccuuauucaagcuuaccaugggccagaucgugaccuucuuccaggaggucccccacgugaucgaggaggugaugaacaucguccugaucgcccucagcauccuggccgugcugaaggggcucuacaacuucgcgaccugcggccugguggggcuggucacguuccuccugcugugcggccgcuccugcaccaccagcguguacaaggggguguacgagcuccagacccuggagcugaacauggagacgcucaacaugugcaugccgcuguccugcaccaagaacaacagccaccacuacaucauggucggcaacgagaccggccuggagcucacgcugaccaacaccuccaucaucaaccacaaguucugcaaccugagcgacgcccacaagaagaaccucuacgaccacgcccugauguccaucaucagcaccuuccaccuguccauccccaacuucaaccaguacgaggccaugagcugcgacuucaacgggggcaagaucuccgugcaguacaaccucagccacuccuacgccggggacgcggccaaccacugcggcacgguggccaacgggguccugcagaccuucaugcggauggccuggggcggcagcuacaucgcgcuggacuccgggcacggcaagugggacugcaucaugaccagcuaccaguaccucaucauccagaacaccacgugggaggaccacugccaguucucccgccccagccccaucggguaccugggccugcucucccagcggacccgcgacaucuacaucagccggcgccgccggggcaccuucaccuggacgcucagcgacuccgaggggaaggacaccccgggcggguacugccugacccgguggaugcugaucgaggccgagcucaagugcuucggcaacaccgccguggccaagugcaacgagaagcacgacgaggaguucugcgacaugcugcgccuguucgacuucugcaagcaggccauccagcggcucaaggcgcccgcccagaugagcauccagcugaucaacaaggccgugaacgcccugaucaacgaccagcucaucaugaagaaccaccuccgcgacaucauggggauccccuacugcaacuacuccaaguacugcuaccugaaccacacgaccaccggcaagaccagccugcccaagugcugccuggucuccaacggcagcuaccugaacgagacgcacuucuccgacgacaucgagcagcaggccgacaacaugaucaccgagaugcuccagaaggaguacauggagcggcaggggaagacgccccugggccugguggaccucuucguguucagcaccuccuucuaccugaucagcaucuuccugcaccuggucaagaucccgacccaccgccacaucguggggaaguccugccccaagccccaccggcucaaccacaugggcaucugcagcugcgggcuguacaagcagcccggcgugccgguccgcuggaagcggugaggacuaguaauaaggaaacuguaugaaugucugugggcaggaagugaagagauccuucuguaaagguuuuuggaauuaugucugcugaauaauaaacuuuuuugaaauaauaaaucugguagaaaaaugagaucuaaaaaaaaaaaaaaaaaaaaaaaaaaaaaaaaaaaaaaaaaaaaaaaaaaaaaaaaaaaaaaaaaaaaaaaaaaaaaaaaaaaaaaaaaaaaaaaaaaaa

SEQ ID NO: 27555 - RNA, 1788 nt, Artificial Sequence
  mRNA product Design b-4 (A100) comprising derived and/or modified sequence from LASV(Mad39;Clade IV)__ANH09722__GPCmut4 (opt1)
aggagagucccgcagucggcguccagcggcucugcuuguucgugugugugucguugcaggccuuauucaagcuuaccaugggccagaucgugaccuucuuccaggaggucccccacgugaucgaggaggugaugaacaucguccugaucgcccucagcauccuggccgugcugaaggggcucuacaacguggcgaccugcggccugaucgggcuggucacguuccuccugcugugcggccgcuccugcaccaccacccucuacaaggggguguacgagcugcaggcccuggagcucaacauggagacgcugaacaugugcaugccgcugagcugcaccaagaacaacucccaccacuacauccgggugggcaacgagaccggccucgagcugacgcugaccaacaccagccucaucaaccacaaguucugcaaccuguccgacgcccacaagaagaaccuguacgaccacgcccucaugagcaucaucuccaccuuccaccugagcauccccaacuucaaccaguacgaggccauguccugcgacuucaacgacgggaagaucagcguccaguacaaccugucccacacguacgcgggcgacaccgccaaccacugcgggaccguggccaacggcgugcuccagaccuucaugcgcauggccuggggcgggagcuacaucgcgcuggacuccggccgcgggggcugggacugcaucaugacgagcuaccaguaccugaucauccagaacaccaccugggaggaccacugccaguucucccggcccagccccaucggguaccucggccugcugucccagcggacccgcgacaucuacaucagccggcgccgccggggcacguucaccuggacccuguccgacagcgaggggaaggacaccccgggcggguacugccucacgcgguggaugcugaucgaggccgagcugaagugcuucggcaacaccgccgucgccaagugcaacgagaagcacgacgaggaguucugcgacaugcuccgccuguucgacuucugcaagcaggccauccagcggcugaaggcgcccgcccagaugagcauccagcucaucaacaaggccgugaacgcccugaucaacgaccagcugaucaugaagaaccaccuccgcgacaucauggggauccccuacugcaacuacuccaaguacugcuaccugaaccacaccgugaccggcaagacgagccugcccaagugcugccucgucuccaacggcagcuaccugaacgagacccacuucuccgacgacaucgagcagcaggccgacaacaugaucaccgagaugcugcagaaggaguacauggagcggcaggggaagacgccccucggccugguggaccuguucguguucagcaccuccuucuaccugaucagcaucuuccuccaccuggucaagaucccgacccaccgccacgugguggggaagcccugccccaagccccaccggcugaaccacaugggcaucugcuccugcggguucuacaagcagccgggcguccccgugcgcuggaagcggugaggacuaguaauaaggaaacuguaugaaugucugugggcaggaagugaagagauccuucuguaaagguuuuuggaauuaugucugcugaauaauaaacuuuuuugaaauaauaaaucugguagaaaaaugagaucuaaaaaaaaaaaaaaaaaaaaaaaaaaaaaaaaaaaaaaaaaaaaaaaaaaaaaaaaaaaaaaaaaaaaaaaaaaaaaaaaaaaaaaaaaaaaaaaaaaaa

SEQ ID NO: 27556 - RNA, 1788 nt, Artificial Sequence
  mRNA product Design b-4 (A100) comprising derived and/or modified sequence from LASV(Z0947-SLE-2011;Clade IV)__AIT17840__GPCmut4 (opt1)
aggagagucccgcagucggcguccagcggcucugcuuguucgugugugugucguugcaggccuuauucaagcuuaccaugggccagaucgugaccuucuuccaggaggucccccacgugaucgaggaggugaugaacaucguccugaucgcccucagcauccuggccgugcugaaggggcucuacaacuucgcgaccugcggccugguggggcuggucacguuccuccugcugugcggccgcuccugcaccaucagccucuacaaggggguguacgagcugcagacccuggagcucaacauggagacccugaacaugugcaugccgcuguccugcaccaagaacaacagccaccacuacaucauggugggcaacgagaccggccucgagcugacccugacgaacaccuccaucaucaaccacaaguucugcaaccucagcgacgcccacaagaagaaccuguacgaccacgcccugauguccaucaucagcaccuuccaccucuccauccccaacuucaaccaguacgaggccaugagcugcgacuucaacgggggcaagaucuccguccaguacaaccugagccacuccuacgccggggacgcggccaaccacugcggcaccguggccaacggggugcugcagacguucaugcggauggccuggggcggcagcuacaucgcgcucgacuccgggcgcgaccggugggacugcaucaugaccagcuaccaguaccugaucauccagaacaccaccugggaggaccacugccaguucucccgccccagccccaucggcuaccuggggcuccugucccagcggacgcgcgacaucuacaucagccggcgccgccggggcaccuucaccuggacccugagcgacuccgagggcaaggacacgcccgggggcuacugccugacccgguggaugcucaucgaggccgagcugaagugcuucgggaacaccgccgucgccaagugcaacgagaagcacgacgaggaguucugcgacaugcugcgccucuucgacuucugcaagcaggccauccagcggcugaaggcgcccgcccagaugagcauccagcugaucaacaaggccgugaacgcccucaucaacgaccagcugaucaugaagaaccaccuccgcgacaucaugggcauccccuacugcaacuacuccaaguacugcuaccugaaccacaccacgaccgggaagaccagccugcccaagugcugccugguguccaacggcagcuaccucaacgagacccacuucuccgacgacaucgagcagcaggccgacaacaugaucacggagaugcugcagaaggaguacauggagcggcagggcaagaccccgcuggggcucgucgaccuguucguguucagcaccuccuucuaccugaucagcaucuuccugcaccucgugaagaucccgacccaccgccacaucgucggcaagcccugccccaagccccaccggcugaaccacauggggaucugcuccugcggccuguacaagcagccgggggugcccgugaaguggaagcgcugaggacuaguaauaaggaaacuguaugaaugucugugggcaggaagugaagagauccuucuguaaagguuuuuggaauuaugucugcugaauaauaaacuuuuuugaaauaauaaaucugguagaaaaaugagaucuaaaaaaaaaaaaaaaaaaaaaaaaaaaaaaaaaaaaaaaaaaaaaaaaaaaaaaaaaaaaaaaaaaaaaaaaaaaaaaaaaaaaaaaaaaaaaaaaaaaa

SEQ ID NO: 27557 - RNA, 1788 nt, Artificial Sequence
  mRNA product Design b-4 (A100) comprising derived and/or modified sequence from LASV(Josiah;Clade IV)__NP_694870__GPCmut4 (opt1)
aggagagucccgcagucggcguccagcggcucugcuuguucgugugugugucguugcaggccuuauucaagcuuaccaugggccagaucgugaccuucuuccaggaggucccccacgugaucgaggaggugaugaacaucguccugaucgcccucagcgugcuggccgugcugaaggggcucuacaacuucgcgaccugcggccuggucgggcuggugacguuccuccugcugugcggccgcuccugcaccaccagccucuacaaggggguguacgagcugcagacccuggagcucaacauggagacgcugaacaugugcaugccgcuguccugcaccaagaacaacagccaccacuacaucauggucggcaacgagaccggccucgagcugacccugacgaacaccuccaucaucaaccacaaguucugcaaccucagcgacgcccacaagaagaaccuguacgaccacgcccugauguccaucaucagcaccuuccaccucuccauccccaacuucaaccaguacgaggccaugagcugcgacuucaacgggggcaagaucuccgugcaguacaaccugagccacuccuacgccggggacgcggccaaccacugcggcaccguggccaacgggguccugcagacguucaugcggauggccuggggcggcagcuacaucgcgcucgacuccgggcgcggcaacugggacugcaucaugaccagcuaccaguaccugaucauccagaacaccaccugggaggaccacugccaguucucccggcccagccccaucggguaccugggccuccugucccagcgcacgcgggacaucuacaucagccgccggcgccggggcaccuucaccuggacccugagcgacuccgaggggaaggacacgccgggcggguacugccucacccgcuggaugcugaucgaggccgagcugaagugcuucggcaacaccgccguggccaagugcaacgagaagcacgacgaggaguucugcgacaugcuccggcuguucgacuucugcaagcaggccauccagcgccugaaggcgcccgcccagaugagcauccagcucaucaacaaggccgugaacgcccugaucaacgaccagcugaucaugaagaaccaccuccgggacaucauggggauccccuacugcaacuacuccaaguacugcuaccugaaccacaccacgaccggccgcaccagccugcccaagugcugccucgucuccaacggcagcuaccugaacgagacccacuucuccgacgacaucgagcagcaggccgacaacaugaucacggagaugcugcagaaggaguacauggagcggcaggggaagaccccgcucggccugguggaccuguucguguucagcaccuccuucuaccugaucagcaucuuccuccaccuggucaagauccccacccaccgccacaucguggggaaguccugccccaagccccaccggcugaaccacaugggcaucugcagcugcgggcucuacaagcagccgggcgugcccgucaaguggaagcgcugaggacuaguaauaaggaaacuguaugaaugucugugggcaggaagugaagagauccuucuguaaagguuuuuggaauuaugucugcugaauaauaaacuuuuuugaaauaauaaaucugguagaaaaaugagaucuaaaaaaaaaaaaaaaaaaaaaaaaaaaaaaaaaaaaaaaaaaaaaaaaaaaaaaaaaaaaaaaaaaaaaaaaaaaaaaaaaaaaaaaaaaaaaaaaaaaa

SEQ ID NO: 27558 - RNA, 1785 nt, Artificial Sequence
  mRNA product Design b-4 (A100) comprising derived and/or modified sequence from LASV(LP;Clade I)__AAF86701__GPCmut4 (opt1)
aggagagucccgcagucggcguccagcggcucugcuuguucgugugugugucguugcaggccuuauucaagcuuaccaugggccagaucaucaccuucuuccaggaggugccccacgucaucgaggaggugaugaacaucgugcugaucgcccucagccugcuggccauccucaaggggcuguacaacaucgcgaccugcggcaucaucgggcuggucgccuuccucuuccugugcggcaaguccugcagccugacgcucaagggcggguacgagcugcagacccuggagcucaacauggagacccugaacaugugcaugccgcuguccugcaccaagaacagcucccaccacuacauccgcgugggcaacgagacggggcucgagcugacccugaccaacaccagcaucaucaaccacaaguucugcaaccucuccgacgcccacaagaagaaccuguacgaccacgcccugaugagcaucaucuccacguuccaccucagcauccccaacuucaaccaguacgaggccauguccugcgacuucaacggcgggaagaucagcgugcaguacaaccugucccacagcuacgcgggcgacgccgccgagcacugcgggaccgucgccaacggcgugcugcagaccuucaugcggauggcguggggcgggcgcuacaucgcccucgacuccggcaaggggaacugggacugcaucaugaccagcuaccaguaccugaucauccagaacacgaccugggaggaccacugccaguucucccggcccagccccaucggcuaccugggccuccugucccagcgcacccgggacaucuacaucagccgccggcgccgggggaccuucacguggacccugagcgacuccgagggcaacgagacccccgggggcuacugccucacccgcuggaugcugaucgaggccgagcugaagugcuucgggaacacggccguggccaagugcaacgagaagcacgacgaggaguucugcgacaugcuccggcuguucgacuucugcaagcaggcgauccgccggcugaaggccccggcccagaugagcauccagcucaucaacaaggccgucaacgcccugaucaacgaccagcugaucaugaagaaccaccuccgcgacaucaugggcauccccuacugcaacuacuccaaguacugcuaccugaaccacaccagcuccggccggaccagccugcccaagugcugccucaucuccaacgggagcuaccugaacgagacccaguucuccgacgacaucgagcagcaggcggacaacaugaucacggagaugcugcagaaggaguacaucgagcgccagggcaagaccccgcucgggcugguggacaucuucaucuucagcaccuccuucuaccugaucagcaucuuccugcaccucaucaagauccccacccaccggcacaucgugggcaagcccugccccaagccgcaccgccugaaccacaugggggucugcuccugcggccuguacaagcaccccggcgugcccacgaaguggaagcggugaggacuaguaauaaggaaacuguaugaaugucugugggcaggaagugaagagauccuucuguaaagguuuuuggaauuaugucugcugaauaauaaacuuuuuugaaauaauaaaucugguagaaaaaugagaucuaaaaaaaaaaaaaaaaaaaaaaaaaaaaaaaaaaaaaaaaaaaaaaaaaaaaaaaaaaaaaaaaaaaaaaaaaaaaaaaaaaaaaaaaaaaaaaaaaaaa

SEQ ID NO: 27559 - RNA, 1785 nt, Artificial Sequence
  mRNA product Design b-4 (A100) comprising derived and/or modified sequence from LASV(803213;Clade II)__AAF86703__GPCmut4 (opt1)
aggagagucccgcagucggcguccagcggcucugcuuguucgugugugugucguugcaggccuuauucaagcuuaccaugggccagaucaucaccuucuuccaggaggugccccacgucaucgaggaggugaugaacaucgugcugaucgcccucagccugcuggccauccucaaggggaucuacaacgucgcgaccugcggccuguucgggcugaucuccuuccuccugcugugcggccgcagcugcuccgugacguacaaggggguguacgagcuccagacccuggagcugaacauggccaaccucaacaugugcaugccgcugagcugcaccaagaacaacucccaccacuacaucauggucggcaacgagaccggccuggagcucacgcugaccaacaccagcaucaucaaccacaaguucugcaaccuguccgacgcccacaagaagaaccucuacgaccacgcccugaugagcaucaucuccaccuuccaccugagcauccccaacuucaaccaguacgaggccauguccugcgacuucaacgggggcaagaucagcgugcaguacaaccucucccacagcuucgcgguggacgccgccaaccacugcgggacgaucgccaacggcguccugcagaccuucaugcggauggcguggggcggguccuacaucgcccuggacagcggcaaggggaacugggacugcaucaugaccuccuaccaguaccucaucauccagaacaccacgugggaggaccacugccaguucagccgccccucccccaucggcuaccuggggcugcucagccagcggacccgcgacaucuacaucagccggcgccggcgcggcaccuucaccuggacgcuguccgacagcgagggcaacgaggcccccgggggcuacugccugacccgguggaugcucaucgaggccgagcugaagugcuucgggaacaccgccguggcgaagugcaacgagaagcacgacgaggaguucugcgacaugcugcgccucuucgacuucugcaagcaggccaucaagcggcugaagaccccggcccagauguccauccagcugaucaacaaggccgugaacgcccucaucaacgaccagcugaucaugaagaaccaccuccgcgacaucaugggcauccccuacugcaacuacagccgguacugcuaccugaaccacacggucaccgggaagaccucccugccccgcugcugccuggugagcaacggcuccuaccucaacgagacccacuucagcgacgacaucgagcagcaggcggacaacaugaucacggagaugcugcagaaggaguacauggaccggcagggcaagaccccgcuggggcucguggaccuguucgucuucuccaccagcuucuaccugaucuccaucuuccugcaccucgugaagauccccacccaccgccacaucgugggcaagcccugccccaagccgcaccggcugaaccacauggggaucugcagcugcggccuguacaagcaccccgggguccccgugaaguggaagcgcugaggacuaguaauaaggaaacuguaugaaugucugugggcaggaagugaagagauccuucuguaaagguuuuuggaauuaugucugcugaauaauaaacuuuuuugaaauaauaaaucugguagaaaaaugagaucuaaaaaaaaaaaaaaaaaaaaaaaaaaaaaaaaaaaaaaaaaaaaaaaaaaaaaaaaaaaaaaaaaaaaaaaaaaaaaaaaaaaaaaaaaaaaaaaaaaaa

SEQ ID NO: 27560 - RNA, 1785 nt, Artificial Sequence
  mRNA product Design b-4 (A100) comprising derived and/or modified sequence from LASV(GA391;Clade III)__CAA36645__GPCmut4 (opt1)
aggagagucccgcagucggcguccagcggcucugcuuguucgugugugugucguugcaggccuuauucaagcuuaccaugggccagaucgugaccuucuuccaggaggucccccacgugaucgaggaggugaugaacaucguccugaucgcccucagcauccuggccauccugaaggggcucuacaacguggcgaccugcggccugaucgggcuggugacguuccuccugcuguccggccgcagcugcucccucaucuacaaggggaccuacgagcugcagacccuggagcucaacauggagacccugaacaugugcaugccgcugagcugcacgaagaacaacucccaccacuacauccgggucggcaacgagaccggccucgagcugacccugaccaacacgagcauccucaaccacaaguucugcaaccuguccgacgcccacaagcgcaaccuguacgaccacagccucauguccaucaucagcaccuuccaccuguccauccccaacuucaaccaguacgaggccaugagcugcgacuucaacgggggcaagaucaccgugcaguacaaccugucccacagcuucgccguggacgccgcggggcacugcggcacccucgccaacgggguccugcagacguucaugcggauggccuggggcggcuccuacaucgcccuggacagcgggcgcggcaacugggacugcaucaugaccuccuaccaguaccucaucauccagaacaccaccugggacgaccacugccaguucagccggcccucccccaucggguaccugggccugcucagccagcgcacgcgggacaucuacaucagccgccggcgccggggcaccuucaccuggacccuguccgacagcgaggggaacgagacgccgggcggguacugccugacccgcuggaugcucaucgaggcggagcugaagugcuucggcaacaccgccguggccaagugcaacgagaagcacgacgaggaguucugcgacaugcugcggcuguucgacuucugcaagcaggccauccgccggcugaagacccccgcccagauguccauccagcugaucaacaaggcggugaacgcccucaucaacgaccagcugaucaugaagaaccaccuccgcgacaucauggggauccccuacugcaacuacagccgguacugcuaccucaaccacacguccaccggcaagaccagccugccccgcugcugccugaucuccaacggcagcuaccucaacgagaccaaguucuccgacgacaucgagcagcaggccgacaacaugaucacggagaugcugcagaaggaguacaucgaccggcaggggaagaccccgcugggccuggucgaccucuucguguucagcaccuccuucuaccugaucagcaucuuccugcaccucgugaagauccccacccaccgccacaucgucgggaagcccugccccaagccgcaccggcugaaccacaugggcaucugcuccugcgggcuguacaagcagcccggcgugcccgugcgcuggaagcgcugaggacuaguaauaaggaaacuguaugaaugucugugggcaggaagugaagagauccuucuguaaagguuuuuggaauuaugucugcugaauaauaaacuuuuuugaaauaauaaaucugguagaaaaaugagaucuaaaaaaaaaaaaaaaaaaaaaaaaaaaaaaaaaaaaaaaaaaaaaaaaaaaaaaaaaaaaaaaaaaaaaaaaaaaaaaaaaaaaaaaaaaaaaaaaaaaa

SEQ ID NO: 27561 - RNA, 1788 nt, Artificial Sequence
  mRNA product Design b-4 (A100) comprising derived and/or modified sequence from LASV(AV;Clade V)__CCA30314__GPCmut4 (opt1)
aggagagucccgcagucggcguccagcggcucugcuuguucgugugugugucguugcaggccuuauucaagcuuaccaugggccagaucgugaccuucuuccaggaggucccccacgugaucgaggaggugaugaacaucguccugaucgcccucagcauccuggccgugcugaaggggcucuacaacaucgcgaccugcggccugaucgggcugaucacguuccuccugcugugcggccgcuccugcagcuccaaccucuacaaggggguguacgagcugcagagccuggaccucaacauggagacccugaacaugugcaugccgcuguccugcaccaagaacaacagccaccacuacauccgggucggcaacgacaccggccucgagcugacgcugaccaacaccuccauccucaaccacaaguucugcaaccugagcgacgcccacaagaaggaccuguacgaccacgcccucauguccaucaucagcaccuuccaccuguccauccccaacuucaaccaguacgaggccaugagcugcgacuucaacgggggcaagaucuccgugcaguacaaccugagccacuccuacgccaucgacgcggccaaccacugcgggacgguggccaacggcauccuccagaccuucaugcgcauggccuggggcgggagcuacaucgcgcuggacuccggccgggggaacugggacugcaucaugaccagcuaccaguaccugaucauccagaacaccacgugggagaaccacugccaguucucccgccccagccccaucggcuaccucgggcugcugagccagcggacccgcgacaucuacaucucccggcgccggcgcggcaccuucaccuggacgcucagcgacuccgagggcaacgccacccccgggggcuacugccugacccgguggaugcugaucgaggccgagcucaagugcuucgggaacaccgccgucgccaagugcaacgagaagcacgacgaggaguucugcgacaugcugcgccuguucgacuucugcaagcaggcgaucagccggcucaaguccccggcccagaugagcauccagcugaucaacaaggccgugaacgcccugaucaacgaccagcucaucaugaagaaccaccuccgcgacaucaugggcauccccuacugcaacuacuccaaguacugcuaccugaaccacacgaucaccgggaagaccagccugcccaagugcugccugguguccaacggcagcuaccugaacgagacccacuucuccgacgacaucgagcagcaggccgacaacaugaucacggagaugcuccagaaggaguacauggagcggcagggcaagaccccgcuggggcuggucgaccuguucguguucagcaccuccuucuaccucaucagcaucuuccugcgccuggugaagauccccacccaccggcacaucgucggcaagcccugccccaagccgcaccgccucaaccacauggggaucugcuccugcggccuguacaagcagcccggggugcccgugcgguggaagcgcugaggacuaguaauaaggaaacuguaugaaugucugugggcaggaagugaagagauccuucuguaaagguuuuuggaauuaugucugcugaauaauaaacuuuuuugaaauaauaaaucugguagaaaaaugagaucuaaaaaaaaaaaaaaaaaaaaaaaaaaaaaaaaaaaaaaaaaaaaaaaaaaaaaaaaaaaaaaaaaaaaaaaaaaaaaaaaaaaaaaaaaaaaaaaaaaaa

SEQ ID NO: 27562 - RNA, 1785 nt, Artificial Sequence
  mRNA product Design b-4 (A100) comprising derived and/or modified sequence from LASV(Togo/2016/7082;Clade VI)__AMR44577__GPCmut4 (opt1)
aggagagucccgcagucggcguccagcggcucugcuuguucgugugugugucguugcaggccuuauucaagcuuaccaugggccagaucaucaccuucuuccaggaggugccccacgucaucgaggaggugaugaacaucgugcugaucgcccucagccugcuggccauccucaagggggucuacaacguggcgaccugcggcaucaucgggcuggugacguuccuguuccucugcggccgcuccugcagccugaucuacaagggguccuacgagcugcagacccucgagcugaacauggagacccugaacaugugcaugccgcucagcugcaccaagaacuccagccaccacuacauccgggucggcaacgagacgggccuggagcugacccucaccaacaccuccaucaucaaccacaaguucugcaaccugagcgacgcccacaagcgcaaccuguacgaccacgcccucauguccauccugagcacguuccaccuguccauccccaacuucaaccaguacgaggccaugagcugcgacuucaacgggggcaagaucuccgugcaguacaaccucagccacgccuacgcgguggacgccgccgagcacugcgggaccgucgccaacggcgugcugcagaccuucaugcggauggcguggggcggguccuacaucgcccuggacagcggccgcgggaacugggacugcaucaugaccuccuaccaguaccucaucauccagaacacgaccugggaggaccacugccaguucagccggcccucccccaucggcuaccuggggcugcucagccagcgcacccgggacaucuacaucagccgccggcgccggggcaccuucacguggacccuguccgacagcgagggcaacgagacccccgggggcuacugccugacccgcuggaugcucaucgaggccgagcugaagugcuucgggaacacggccguggccaagugcaacgagaagcacgacgaggaguucugcgacaugcugcggcuguucgacuucugcaagcaggcgauccagcgccugaaguccccggcccagaugagcauccagcugaucaacaaggccgucaacgcccucaucaacgaccagcugaucaugaagaaccaccuccgggacaugaugggcauccccuacugcaacuacuccaaguacugcuaccucaaccacaccagcuccgggcgcaccagccugcccaagugcugccugguguccaacggcagcuaccucaacgagacccacuucuccgacgacaucgagcagcaggccgacaacaugaucacggagaugcugcagaaggaguacaucgaccggcagggcaagaccccgcuggggcucguggaccuguucgucuucagcaccuccuucuaccugaucagcaucuuccugcaccucaucaagauccccacccaccgccacaucgugggcaagcccugccccaagccgcaccggcugaaccacauggggaucugcuccugcggccuguacaagcagcccggggugcccacgcgcuggaagcggugaggacuaguaauaaggaaacuguaugaaugucugugggcaggaagugaagagauccuucuguaaagguuuuuggaauuaugucugcugaauaauaaacuuuuuugaaauaauaaaucugguagaaaaaugagaucuaaaaaaaaaaaaaaaaaaaaaaaaaaaaaaaaaaaaaaaaaaaaaaaaaaaaaaaaaaaaaaaaaaaaaaaaaaaaaaaaaaaaaaaaaaaaaaaaaaaa

SEQ ID NO: 27563 - RNA, 1785 nt, Artificial Sequence
  mRNA product Design b-4 (A100) comprising derived and/or modified sequence from LASV(KAK-428;Clade n.d. (VII))__ANH09740__GPCmut4 (opt1)
aggagagucccgcagucggcguccagcggcucugcuuguucgugugugugucguugcaggccuuauucaagcuuaccaugggccagaucgugaccuucuuccaggaggucccccacgugaucgaggaggugaugaacaucguccugaucgcccucagccugcuggccauccucaaggggcuguacaacuucgcgaccugcggcgugaucgggcugaucacguuccuccugcugugcggccgcuccugcagcgccaccuacaaggggcaguacgagcuccagacccuggagcugaacauggagucccucaacaugugcaugccgcugagcugcaccaagaacaacucccaccacuacauccgggccggcaacaacacgggccuggagcucacccugaccaacaccagcaucaucucccacaaguucugcaaccugagcgacgcccacaagaagaaccucuacgaccacacgcugauguccaucaucaccaccuuccaccugagcauccccaacuucaaccaguacgaggccauguccugcgacuucaacgggggcaagaucagcauccaguacaaccucucccacagcuacgcgggggacgccgcccagcacugcggcaccguggccaacgggguccugcagacguucaugcgcauggcguggggcggcuccuaccuggcccucgacagcgggcggcgcggcugggacugcaucaucuccagcuaccaguaccugaucauccagaacaccaccugggacgaccacugccaguucucccggcccagccccaucggguaccugggcuucgugagccagaagacccgcgacaucuacaucucccggcgccggcgcggcacguucaccuggacccucagcgacuccgaggggcacgacaugccgggcggguacugccugacccgguggaugcugaucgaggccgaccucaagugcuucggcaacacggccguggccaagugcaacgagaagcacgacgaggaguucugcgacauguggcgccuguucgacuucugcaagcaggcgauccagcggcugaaggcccccgcccagaugaacauccagcucaucaacaaggccgucaacgcccugaucaacgaccagcugaugaugaagaaccaccuccgcgacaucauggggauccccuacugcaacuacagcaaguucugcuaccugaacaacaccaccaccggccggacgucccugccccgcugcugccucaucagcaacggcuccuaccugaacgagacccacuucagcgacgacaucgagcagcaggcggacaacaugaucaccgagaugcugcagaaggaguacauggaccggcaggggaagaccccgcucggccugguggaccuguucguguucuccacgagcuucuaccucaucaccaucuuccugcaccuggucaagauccccacccaccgccacaucguggggaagcccugccccaagccgcaccggcugaaccacaugggcaucugcuccugcgggcucuacaagcagcccggcgugcccguccgcuggaagcggugaggacuaguaauaaggaaacuguaugaaugucugugggcaggaagugaagagauccuucuguaaagguuuuuggaauuaugucugcugaauaauaaacuuuuuugaaauaauaaaucugguagaaaaaugagaucuaaaaaaaaaaaaaaaaaaaaaaaaaaaaaaaaaaaaaaaaaaaaaaaaaaaaaaaaaaaaaaaaaaaaaaaaaaaaaaaaaaaaaaaaaaaaaaaaaaaa

SEQ ID NO: 27564 - RNA, 1785 nt, Artificial Sequence; identical to SEQ ID NO: 27558
  mRNA product Design b-4 (A100) comprising derived and/or modified sequence from LASV(Pinneo-NIG-1969;Clade I)__AIT17836__GPCmut4 (opt1)

SEQ ID NO: 27565 - RNA, 1785 nt, Artificial Sequence
  mRNA product Design b-4 (A100) comprising derived and/or modified sequence from LASV(ISTH0009-NIG-2011;Clade II)__AIT17404__GPCmut4 (opt1)
aggagagucccgcagucggcguccagcggcucugcuuguucgugugugugucguugcaggccuuauucaagcuuaccaugggccagaucaucaccuucuuccaggaggugccccacgucaucgaggaggugaugaacaucgugcugaucgcccucagccugcuggccauccucaaggggaucuacaacgucgcgaccugcggccuguucgggcugguguccuuccuccugcugugcggccgcagcugcuccacgaccuacaaggggguguacgagcuccagacccuggagcuggacauggccagccucaacaugugcaugccgcuguccugcaccaagaacaacagccaccacuacaucauggucggcaacgagacgggccuggagcucacccugaccaacaccuccaucaucaaccacaaguucugcaaccugagcgacgcccacaagaagaaccucuacgaccacgcccugauguccaucaucagcacguuccaccuguccauccccaacuucaaccaguacgaggccaugagcugcgacuucaacgggggcaagaucuccgugcaguacaaccucagccacgcguacgccguggacgccgccaaccacugcgggaccaucgcgaacggcguccugcagaccuucaugcggauggccuggggcggguccuacaucgcccuggacagcggcaagggguccugggacugcaucaugaccagcuaccaguaccucaucauccagaacacgaccugggaggaccacugccaguucucccgccccagccccaucggcuaccuggggcugcucagccagcggacccgcgacaucuacaucucccggcgccggcgcggcaccuucacguggacccugagcgacuccgagggcaacgagacccccgggggcuacugccugacccgguggaugcucaucgaggccgagcugaagugcuucgggaacacggccguggcgaagugcaacgagaagcacgacgaggaguucugcgacaugcugcgccucuucgacuucugcaagcaggccauccggcgccugaagaccccggcccagaugagcauccagcugaucaacaaggccgugaacgcccucaucaacgaccagcugaucaugaagaaccaccuccgggacaucaugggcauccccuacugcaacuacuccaaguacugcuaccugaaccacaccgucaccgggaagacgagccugccccgcugcugccugguguccaacggcagcuaccucaacgagacccacuucuccgacgacaucgagcagcaggcggacaacaugaucaccgagcugcugcagaaggaguacauggaccggcagggcaagaccccgcucgggcugguggaccuguucgucuucagcacguccuucuaccugaucagcaucuuccuccaccugaucaagauccccacccaccgccacaucaccggcaagcccugccccaagccgcaccggcugaaccacauggggaucugcuccugcggccucuacaagcaccccggggugcccgugaaguggaagcgcugaggacuaguaauaaggaaacuguaugaaugucugugggcaggaagugaagagauccuucuguaaagguuuuuggaauuaugucugcugaauaauaaacuuuuuugaaauaauaaaucugguagaaaaaugagaucuaaaaaaaaaaaaaaaaaaaaaaaaaaaaaaaaaaaaaaaaaaaaaaaaaaaaaaaaaaaaaaaaaaaaaaaaaaaaaaaaaaaaaaaaaaaaaaaaaaaa

SEQ ID NO: 27566 - RNA, 1785 nt, Artificial Sequence
  mRNA product Design b-4 (A100) comprising derived and/or modified sequence from LASV(ISTH2010-NIG-2012;Clade II)__AIT17482__GPCmut4 (opt1)
aggagagucccgcagucggcguccagcggcucugcuuguucgugugugugucguugcaggccuuauucaagcuuaccaugggccagaucaucaccuucuuccaggaggugccccacgucaucgaggaggugaugaacaucgugcugaucgcccucagccugcuggccauccucaaggggaucuacaacgucgcgaccugcggccuguucgggcugguguccuuccuccugcugugcggccgcagcugcuccacgaccuacaaggggguguacgagcuccagacccuggagcuggacauggccagccucaacaugugcaugccgcuguccugcaccaagaacaacagccaccacuacaucauggucggcaacgagacgggccuggagcucacccugaccaacaccuccaucaucaaccacaaguucugcaaccugagcgacgcccacaagaagaaccucuacgaccacgcccugauguccaucaucagcacguuccaccuguccauccccaacuucaaccaguacgaggccaugagcugcgacuucaacgggggcaagaucuccgugcaguacaaccucagccacgcguacgccguggacgccgccaaccacugcgggaccaucgcgaacggcguccugcagaccuucaugcggauggccuggggcggguccuacaucgcccuggacagcggcaagggguccugggacugcaucaugaccagcuaccaguaccucaucauccagaacaucacgugggaggaccacugccaguucucccgccccagccccaucggcuaccuggggcugcucagccagcggacccgcgacaucuacaucucccggcgccggcgcggcaccuucaccuggacgcugagcgacuccgagggcaacgagacccccgggggcuacugccugacccgguggaugcucaucgaggccgagcugaagugcuucgggaacaccgccguggcgaagugcaacgagaagcacgacgaggaguucugcgacaugcugcgccucuucgacuucugcaagcaggccauccggcgccugaagacgccggcccagaugagcauccagcugaucaacaaggccgugaacgcccucaucaacgaccagcugaucaugaagaaccaccuccgggacaucaugggcauccccuacugcaacuacuccaaguacugcuaccugaaccacaccgucaccgggaagaccagccugccccgcugcugccugguguccaacggcagcuaccucaacgagacgcacuucuccgacgacaucgagcagcaggcggacaacaugaucaccgagcugcugcagaaggaguacaucgaccggcagggcaagaccccgcucgggcugguggaccuguucgucuucagcaccuccuucuaccugaucagcaucuuccuccaccuggugaagauccccacgcaccgccacguggucggcaagcccugccccaagccgcaccggcugaaccacauggggaucugcuccugcggccucuacaagcaccccggggugcccgugaaguggaagcgcugaggacuaguaauaaggaaacuguaugaaugucugugggcaggaagugaagagauccuucuguaaagguuuuuggaauuaugucugcugaauaauaaacuuuuuugaaauaauaaaucugguagaaaaaugagaucuaaaaaaaaaaaaaaaaaaaaaaaaaaaaaaaaaaaaaaaaaaaaaaaaaaaaaaaaaaaaaaaaaaaaaaaaaaaaaaaaaaaaaaaaaaaaaaaaaaaa

SEQ ID NO: 27567 - RNA, 1785 nt, Artificial Sequence
  mRNA product Design b-4 (A100) comprising derived and/or modified sequence from LASV(Lassa virus/H.sapiens-wt/NGA/2015/ISTH_0543;Clade II)__AVO03639__GPCmut4 (opt1)
aggagagucccgcagucggcguccagcggcucugcuuguucgugugugugucguugcaggccuuauucaagcuuaccaugggccagaucaucaccuucuuccaggaggugccccacgucaucgaggaggugaugaacaucgugcugaucgcccucagccugcuggccauccucaaggggaucuacaacgucgcgaccugcggccuguucgggcugguguccuuccuccugcugugcggccgcagcugcuccacgaccuacaaggggguguacgagcuccagacccuggagcuggacauggccaaccucaacaugugcaugccgcugagcugcaccaagaacaacucccaccacuacaucauggucggcaacgagacgggccuggagcucacccugaccaacaccagcaucaucaaccacaaguucugcaaccuguccgacgcccacaagaagaaccucuacgaccacgcccugaugagcaucaucuccacguuccaccugagcauccccaacuucaaccaguacgaggccauguccugcgacuucaacgggggcaagaucagcgugcaguacaaccucucccacaccuacgcgguggacgccgccaaccacugcgggaccaucgccaacggcguccugcagaccuucaugcggauggcguggggcgggagcuacaucgcccuggacuccggcaaggggagcugggacugcaucaugacguccuaccaguaccucgugauccagaacaccaccugggaggaccacugccaguucagccgccccucccccaucggcuaccuggggcugcucagccagcggacccgcgacaucuacaucagccggcgccggcgcggcacguucaccuggacccuguccgacagcgagggcaacgagacccccgggggcuacugccugacgcgguggaugcucaucgaggccgagcugaagugcuucgggaacaccgccguggccaagugcaacgagaagcacgacgaggaguucugcgacaugcugcgccucuucgacuucugcaagcaggcgauccggcgccugaagaccccggcccagauguccauccagcugaucaacaaggccgucaacgcccucaucaacgaccagcugaucaugaagaaccaccuccgggacaucaugggcauccccuacugcaacuacagcaaguacugcuaccugaaccacaccgugacggggaagaccucccugccccgcugcugccuggugagcaacggcuccuaccucaacgagacccacuucagcgacgacaucgagcagcaggccgacaacaugaucaccgagcugcugcagaaggaguacaucgaccggcagggcaagacgccgcucgggcuggucgaccuguucguguucuccaccagcuucuaccugaucuccaucuuccuccaccuggugaagauccccacccaccgccacaucaccggcaagcccugccccaagccgcaccggcugaaccacauggggaucugcagcugcggccucuacaagcaccccgggguccccgugaaguggaagcgcugaggacuaguaauaaggaaacuguaugaaugucugugggcaggaagugaagagauccuucuguaaagguuuuuggaauuaugucugcugaauaauaaacuuuuuugaaauaauaaaucugguagaaaaaugagaucuaaaaaaaaaaaaaaaaaaaaaaaaaaaaaaaaaaaaaaaaaaaaaaaaaaaaaaaaaaaaaaaaaaaaaaaaaaaaaaaaaaaaaaaaaaaaaaaaaaaa

SEQ ID NO: 27568 - RNA, 1785 nt, Artificial Sequence
  mRNA product Design b-4 (A100) comprising derived and/or modified sequence from LASV(Lassa virus/H.sapiens-wt/NGA/2016/ISTH_0009;Clade II)__AVO03571__GPCmut4 (opt1)
aggagagucccgcagucggcguccagcggcucugcuuguucgugugugugucguugcaggccuuauucaagcuuaccaugggccagaucaucaccuucuuccaggaggugccccacgucaucgaggaggugaugaacaucgugcugaucgcccucagccugcuggccauccucaaggggaucuacaacgucgcgaccugcggccugcuggggcucguguccuuccugcugcucugcggccgcagcugcuccacgaccuacaaggggguguacgagcugcagacccuggagcucgacauggccagccugaacaugugcaugccgcuguccugcaccaagaacaacagccaccacuacaucauggucggcaacgagacgggccucgagcugacccugaccaacaccuccaucaucaaccacaaguucugcaaccucagcgacgcccacaagaagaaccuguacgaccacgcccugauguccaucaucagcacguuccaccucuccauccccaacuucaaccaguacgaggccaugagcugcgacuucaacgggggccggaucuccgugcaguacaaccugagccacuccuacgcgguggacgccgccaaccacugcgggaccaucgccaacggcguccugcagaccuucaugcgcauggcguggggcgggagcuacaucgcccucgacuccggcaaggggagcugggacugcaucaugaccuccuaccaguaccugaucauccagaacacgaccugggaggaccacugccaguucagccggcccagccccaucggcuaccuggggcuccugucccagcgcacccgggacaucuacaucagccgccggcgccggggcaccuucacguggacccuguccgacagcgagggcaacgagacccccgggggcuacugccucacccgcuggaugcugaucgaggccgagcugaagugcuucgggaacacggccguggccaagugcaacgagaagcacgacgaggaguucugcgacaugcuccggcuguucgacuucugcaagcaggcgauccgccggcugaagaccccggcccagauguccauccagcucaucaacaaggccgugaacgcccugaucaacgaccagcugaucaugaagaaccaccuccgcgacaucaugggcauccccuacugcaacuacagcaaguacugcuaccugaaccacaccgucaccgggaagacgucccugccccggugcugccucgugagcaacggcuccuaccugaacgagacccacuucagcgacgacaucgagcagcaggccgacaacaugaucaccgagcugcuccagaaggaguacaucgaccgccagggcaagaccccgcuggggcugguggaccuguucgucuucuccacgagcuucuaccucaucuccaucuuccugcaccuggugaagauccccacccaccggcacaucaccggcaagcccugccccaagccgcaccgccucaaccacauggggaucugcagcugcggccuguacaaccaccccggggugcccgucaaguggaagcggugaggacuaguaauaaggaaacuguaugaaugucugugggcaggaagugaagagauccuucuguaaagguuuuuggaauuaugucugcugaauaauaaacuuuuuugaaauaauaaaucugguagaaaaaugagaucuaaaaaaaaaaaaaaaaaaaaaaaaaaaaaaaaaaaaaaaaaaaaaaaaaaaaaaaaaaaaaaaaaaaaaaaaaaaaaaaaaaaaaaaaaaaaaaaaaaaa

SEQ ID NO: 27569 - RNA, 1785 nt, Artificial Sequence
  mRNA product Design b-4 (A100) comprising derived and/or modified sequence from LASV(Lassa virus/H.sapiens-wt/NGA/2016/ISTH_0017;Clade II)__AVO03567__GPCmut4 (opt1)
aggagagucccgcagucggcguccagcggcucugcuuguucgugugugugucguugcaggccuuauucaagcuuaccaugggccagaucaucaccuucuuccaggaggugccccacgucaucgaggaggugaugaacaucgugcugaucgcccucagccugcuggccauccucaaggggaucuacaacgucgcgaccugcggccuguucgggcugguguccuuccuccugcugugcggccgcagcugcuccacgaccuacaaggggguguacgagcuccagacccuggagcuggacauggccagccucaacaugugcaugccgcuguccugcaccaagaacaacagccaccacuacaucauggucggcaacgagacgggccuggagcucacccugaccaacaccuccaucaucaaccacaaguucugcaaccugagcgacgcccacaagaagaaccucuacgaccacgcccugauguccaucaucagcacguuccaccuguccauccccaacuucaaccaguacgaggccaugagcugcgacuucaacgggggcaagaucuccgugcaguacaaccucagccacaccuacgcgaucgacgccgccaaccacugcgggaccaucgccaacggcgugcugcagaccuucaugcggauggcguggggcggguccuacaucgcccuggacagcggcaagggguccugggacugcaucaugacgagcuaccaguaccucaucauccagaacaccaccugggaggaccacugccaguucucccgccccagccccaucggcuaccuggggcugcucagccagcggacccgcgacaucuacaucucccggcgccggcgcggcacguucaccuggacccugagcgacuccgagggcaacgagacccccgggggcuacugccugacgcgguggaugcucaucgaggccgagcugaagugcuucgggaacaccgccgucgccaagugcaacgagaagcacgacgaggaguucugcgacaugcugcgccucuucgacuucugcaagcaggcgauccggcgccugaagaccccggcccagaugagcauccagcugaucaacaaggccgugaacgcccucaucaacgaccagcugaucaugaagaaccaccuccgggacaucaugggcauccccuacugcaacuacuccaaguacugcuaccugaaccacaccgugacggggaagaccagccugccccgcugcugccuggucuccaacggcagcuaccucaacgagacccacuucuccgacgacaucgagcagcaggccgacaacaugaucaccgagcugcugcagaaggaguacauggaccggcagggcaagacgccgcucgggcugguggaccuguucguguucagcaccuccuucuaccugaucagcaucuuccuccaccugguccgcauccccacccaccggcacgugaucggcaagcccugccccaagccgcaccgccugaaccacauggggaucugcuccugcggccucuacaagcaccccggggugcccgucaaguggaagcggugaggacuaguaauaaggaaacuguaugaaugucugugggcaggaagugaagagauccuucuguaaagguuuuuggaauuaugucugcugaauaauaaacuuuuuugaaauaauaaaucugguagaaaaaugagaucuaaaaaaaaaaaaaaaaaaaaaaaaaaaaaaaaaaaaaaaaaaaaaaaaaaaaaaaaaaaaaaaaaaaaaaaaaaaaaaaaaaaaaaaaaaaaaaaaaaaa

SEQ ID NO: 27570 - RNA, 1785 nt, Artificial Sequence
  mRNA product Design b-4 (A100) comprising derived and/or modified sequence from LASV(Lassa virus/H.sapiens-wt/NGA/2018/ISTH_0959;Clade II)__AVV65099__GPCmut4 (opt1)
aggagagucccgcagucggcguccagcggcucugcuuguucgugugugugucguugcaggccuuauucaagcuuaccaugggccagaucaucaccuucuuccaggaggugccccacgucaucgaggaggugaugaacaucgugcugaucgcccucagccugcuggccauccucaaggggaucuacaacgucgugaccugcggccuguucgggcugguguccuuccuccugcugugcggccgcagcugcuccacgaccuacaagggggucuacgagcuccagacccuggagcuggacauggcgagccucaacaugugcaugccgcuguccugcaccaagaacaacagccaccacuacaucauggugggcaacgagacgggccuggagcucacccugaccaacaccuccaucaucaaccacaaguucugcaaccugagcgacgcccacaagaagaaccucuacgaccacgcccugauguccaucaucagcacguuccaccuguccauccccaacuucaaccaguacgaggccaugagcugcgacuucaacgggggcaagaucuccgugcaguacaaccucagccacgccuacgcgaucgacgccgccaaccacugcgggaccaucgccaacggcguccugcagaccuucaugcggauggcguggggcggguccuacaucgcccuggacagcggcaagggguccugggacugcaucaugaccagcuaccaguaccucaucauccagaacacgaccugggaggaccacugccaguucucccgccccagccccaucggcuaccuggggcugcucagccagcggacccgcgacaucuacaucucccggcgccggcgcggcaccuucacguggacccugagcgacuccgagggcaacgagacccccgggggcuacugccugacccgguggaugcucaucgaggccgagcugaagugcuucgggaacacggccguggccaagugcaacgagaagcacgacgaggaguucugcgacaugcugcgccucuucgacuucugcaagcaggcgauccggcgccugaagaccccggcccagaugagcauccagcugaucaacaaggccgugaacgcccucaucaacgaccagcugaucaugaagaaccaccuccgggacaucaugggcauccccuacugcaacuacuccaaguacugcuaccugaaccacaccgucaccgggaagacgagccugccccgcugcugccugguguccaacggcagcuaccucaacgagacccacuucuccgacgacaucgagcagcaggccgacaacaugaucaccgagcugcugcagaaggaguacaucgaccggcagggcaagaccccgcucgggcugguggaccuguucgucuucagcacguccuucuaccugaucagcaucuuccuccaccuggugaagauccccacccaccgccacgugaucggcaagcccugccccaagccgcaccggcugaaccacauggggaucugcuccugcggccucuacaagcaccccgggguccccgugaaguggaagcgcugaggacuaguaauaaggaaacuguaugaaugucugugggcaggaagugaagagauccuucuguaaagguuuuuggaauuaugucugcugaauaauaaacuuuuuugaaauaauaaaucugguagaaaaaugagaucuaaaaaaaaaaaaaaaaaaaaaaaaaaaaaaaaaaaaaaaaaaaaaaaaaaaaaaaaaaaaaaaaaaaaaaaaaaaaaaaaaaaaaaaaaaaaaaaaaaaa

SEQ ID NO: 27571 - RNA, 1785 nt, Artificial Sequence
  mRNA product Design b-4 (A100) comprising derived and/or modified sequence from LASV(LASV003-NIG-2008;Clade II)__AIT17580__GPCmut4 (opt1)
aggagagucccgcagucggcguccagcggcucugcuuguucgugugugugucguugcaggccuuauucaagcuuaccaugggccagaucaucaccuucuuccaggaggugccccacgucaucgaggaggugaugaacaucgugcugaucgcccucagccugcuggccauccucaaggggaucuacaacgucgcgaccugcggccuguucgggcugguguccuuccuccugcugugcggccgcagcugcuccacgaccuacaaggggguguacgagcuccagacccuggagcuggacauggccagccucaacaugugcaugccgcuguccugcaccaagaacaacagccaccacuacaucauggucggcaacgagacgggccuggagcucacccugaccaacaccuccaucaucaaccacaaguucugcaaccugagcgacgcccacaagaagaaccucuacgaccacgcccugauguccaucaucagcacguuccaccuguccauccccaacuucaaccaguacgaggccaugagcugcgacuucaacgggggcaagaucuccgugcaguacaaccucagccacaccuacgcgguggacgccgccaaccacugcgggaccaucgccaacggcguccugcagaccuucaugcggauggcguggggcggguccuacaucgcccuggacagcggcaagggguccugggacugcaucaugacgagcuaccaguaccucaucauccagaacaccaccugggaggaccacugccaguucucccgccccagccccaucggcuaccuggggcugcucagccagcggacccgcgacaucuacaucucccggcgccggcgcggcacguucaccuggacccugagcgacuccgagagcaacgagaccccgggcggguacugccugacgcgguggaugcucaucgaggccgagcugaagugcuucggcaacaccgccguggccaagugcaacgagaagcacgacgaggaguucugcgacaugcugcgccucuucgacuucugcaagcaggcgauccggcgccugaaggcccccgcccagauguccauccagcugaucaacaaggccgugaacgcccucaucaacgaccagcugaucaugaagaaccaccuccgggacaucauggggauccccuacugcaacuacagcaaguacugcuaccugaaccacaccgucaccggccgcacgucccugccccggugcugccuggugagcaacggguccuaccucaacgagacccacuucagcgacgacaucgagcagcaggcggacaacaugaucaccgagcugcugcagaaggaguacauggaccgccagggcaagaccccgcucggccugguggaccuguucgucuucuccacgagcuucuaccugaucuccaucuuccuccaccuggugaagauccccacccaccggcacgugaucgggaagcccugccccaagccgcaccgccugaaccacaugggcaucugcagcugcgggcucuacaagcaccccggcguccccgugaaguggaagcggugaggacuaguaauaaggaaacuguaugaaugucugugggcaggaagugaagagauccuucuguaaagguuuuuggaauuaugucugcugaauaauaaacuuuuuugaaauaauaaaucugguagaaaaaugagaucuaaaaaaaaaaaaaaaaaaaaaaaaaaaaaaaaaaaaaaaaaaaaaaaaaaaaaaaaaaaaaaaaaaaaaaaaaaaaaaaaaaaaaaaaaaaaaaaaaaaa

SEQ ID NO: 27572 - RNA, 1785 nt, Artificial Sequence
  mRNA product Design b-4 (A100) comprising derived and/or modified sequence from LASV(LASV035-NIG-2009;Clade II)__AIT17588__GPCmut4 (opt1)
aggagagucccgcagucggcguccagcggcucugcuuguucgugugugugucguugcaggccuuauucaagcuuaccaugggccagaucaucaccuucuuccaggaggugccccacgucaucgaggaggugaugaacaucgugcugaucgcccucagccugcuggccauccucaaggggaucuacaacgucgcgaccugcggccuguucgggcugguguccuuccuccugcugugcggccgcagcugcuccacgaccuacaaggggguguacgagcuccagacccuggagcuggacauggccagccucaacaugugcaugccgcuguccugcaccaagaacaacagccaccacuacaucauggucggcaacgagacgggccuggagcucacccugaccaacaccuccaucaucaaccacaaguucugcaaccugagcgacgcccacaagaagaaccucuacgaccacgcccugauguccaucaucagcacguuccaccuguccauccccaacuucaaccaguacgaggccaugagcugcgacuucaacgggggcaagaucuccgugcaguacaaccucagccacgcguacgccguggacgccgccaaccacugcgggaccaucgcgaacggcguccugcagaccuucaugcggauggccuggggcggguccuacaucgcccuggacagcggcaagggguccugggacugcaucaugaccagcuaccaguaccucaucauccagaacacgaccugggaggaccacugccaguucucccgccccagccccaucggcuaccuggggcugcucagccagcggacccgcgacaucuacaucucccggcgccggcgcggcaccuucacguggacccugagcgacuccgagggcaacgagacccccgggggcuacugccugacccgguggaugcucaucgaggccgagcugaagugcuucgggaacacggccguggcgaagugcaacgagaagcacgacgaggaguucugcgacaugcugcgccucuucgacuucugcaagcaggccauccggcgccugaaggccccggcccagaugagcauccagcugaucaacaaggccgugaacgcgcucaucaacgaccagcugaucaugaagaaccaccuccgggacaucaugggcauccccuacugcaacuacuccaaguacugcuaccugaaccacaccgucaccgggaagaccagccugccccgcugcugccugguguccaacggcagcuaccucaacgagacgcacuucuccgacgacaucgagcagcaggccgacaacaugaucaccgagcugcugcagaaggaguacaucgaccggcagggcaagaccccgcucgggcugguggaccuguucgucuucagcaccuccuucuaccugaucagcaucuuccuccaccuggugaagauccccacgcaccgccacgugaucggcaagcccugccccaagccgcaccggcugaaccacauggggaucugcuccugcggccucuacaagcaccccgggguccccgugaaguggaagcgcugaggacuaguaauaaggaaacuguaugaaugucugugggcaggaagugaagagauccuucuguaaagguuuuuggaauuaugucugcugaauaauaaacuuuuuugaaauaauaaaucugguagaaaaaugagaucuaaaaaaaaaaaaaaaaaaaaaaaaaaaaaaaaaaaaaaaaaaaaaaaaaaaaaaaaaaaaaaaaaaaaaaaaaaaaaaaaaaaaaaaaaaaaaaaaaaaa

SEQ ID NO: 27573 - RNA, 1785 nt, Artificial Sequence
  mRNA product Design b-4 (A100) comprising derived and/or modified sequence from LASV(LASV1000-NIG-2009;Clade II)__AIT17782__GPCmut4 (opt1)
aggagagucccgcagucggcguccagcggcucugcuuguucgugugugugucguugcaggccuuauucaagcuuaccaugggccagaucaucaccuucuuccaggaggugccccacgucaucgaggaggugaugaacaucgugcugaucgcccucagccugcuggccauccucaaggggaucuacaacgucgcgaccugcggccuguucgggcugguguccuuccuccugcugugcggccgcagcugcuccacgaccuacaaggggguguacgagcuccagacccuggagcuggacauggccagccucaacaugugcaugccgcuguccugcaccaagaacaacagccaccacuacaucauggucggcaacgagacgggccuggagcucacccugaccaacaccuccaucaucaaccacaaguucugcaaccugagcgacgcccacaagaagaaccucuacgaccacgcccugauguccaucaucagcacguuccaccuguccauccccaacuucaaccaguacgaggccaugagcugcgacuucaacgggggcaagaucuccgugcaguacaaccucagccacaccuacgcgguggacgccgccaaccacugcgggaccaucgccaacggcguccugcagaccuucaugcggauggcguggggcggguccuacaucgcccuggacagcggcaagggguccugggacugcaucaugacgagcuaccaguaccucaucauccagaacaccaccugggaggaccacugccaguucucccgccccagccccaucggcuaccuggggcugcucagccagcggacccgcgacaucuacaucucccggcgccggcgcggcacguucaccuggacccugagcgacuccgagggcaacgagacccccgggggcuacugccugacgcgguggaugcucaucgaggccgagcugaagugcuucgggaacaccgccguggccaagugcaacgagaagcacgacgaggaguucugcgacaugcugcgccucuucgacuucugcaagcaggcgaucaagcggcugaagaccccggcccagaugagcauccagcugaucaacaaggccgugaacgcccucaucaacgaccagcugaucaugaagaaccaccuccgcgacaucaugggcauccccuacugcaacuacuccaaguacugcuaccugaaccacaccgucacggggaagaccagccugccccggugcugccugguguccaacggcagcuaccucaacgagacccacuucuccgacgacaucgagcagcaggccgacaacaugaucaccgagcugcugcagaaggaguacaucgaccgccagggcaagacgccgcucgggcugguggaccuguucgucuucagcaccuccuucuaccugaucagcaucuuccuccaccuggugaagauccccacccaccggcacguggucggcaagcccugccccaagccgcaccgccugaaccacauggggaucugcuccugcggccucuacaagcaccccggggugcccgugaaguggaagcggugaggacuaguaauaaggaaacuguaugaaugucugugggcaggaagugaagagauccuucuguaaagguuuuuggaauuaugucugcugaauaauaaacuuuuuugaaauaauaaaucugguagaaaaaugagaucuaaaaaaaaaaaaaaaaaaaaaaaaaaaaaaaaaaaaaaaaaaaaaaaaaaaaaaaaaaaaaaaaaaaaaaaaaaaaaaaaaaaaaaaaaaaaaaaaaaaa

SEQ ID NO: 27574 - RNA, 1785 nt, Artificial Sequence
  mRNA product Design b-4 (A100) comprising derived and/or modified sequence from LASV(LASV221-NIG-2010;Clade II)__AIT17624__GPCmut4 (opt1)
aggagagucccgcagucggcguccagcggcucugcuuguucgugugugugucguugcaggccuuauucaagcuuaccaugggccagaucaucaccuucuuccaggaggugccccacgucaucgaggaggugaugaacaucgugcugaucgcccucagccugcuggccauccucaaggggaucuacaacgucgcgaccugcggccuguucgggcugguguccuuccuccugcugugcggccgcagcugcuccacgaccuacaaggggguguacgagcuccagacccuggagcuggacauggccagccucaacaugugcaugccgcuguccugcaccaagaacaacagccaccacuacaucauggucggcaacgagacgggccuggagcucacccugaccaacaccuccaucaucaaccacaaguucugcaaccugagcgacgcccacaagaagaaccucuacgaccacgcccugauguccaucaucagcacguuccaccuguccauccccaacuucaaccaguacgaggccaugagcugcgacuucaacgggggcaagaucuccgugcaguacaaccucagccacaccuacgcgaucgacgccgccaaccacugcgggaccaucgccaacggcgugcugcagaccuucaugcggauggcguggggcggguccuacaucgcccuggacagcggcaagggguccugggacugcaucaugacgagcuaccaguaccucaucauccagaacaccaccugggaggaccacugccaguucucccgccccagccccaucggcuaccuggggcugcucagccagcggacccgcgacaucuacaucucccggcgccggcgcggcacguucaccuggacccugagcgacuccgagggcaacgagacccccgggggcuacugccugacgcgguggaugcucaucgaggccgagcugaagugcuucgggaacaccgccgucgccaagugcaacgagaagcacgacgaggaguucugcgacaugcugcgccucuucgacuucugcaagcaggcgauccggcgccugaagaccccggcccagaugagcauccagcugaucaacaaggccgugaacgcccucaucaacgaccagcugaucaugaagaaccaccuccgggacaucaugggcauccccuacugcaacuacuccaaguacugcuaccugaaccacaccgugacggggaagaccagccugccccgcugcugccuggucuccaacggcagcuaccucaacgagacccacuucuccgacgacaucgagcagcaggccgacaacaugaucaccgagaugcugcagaaggaguacauggaccggcagggcaagacgccgcuggggcucguggaccuguucguguucagcaccuccuucuaccugaucagcaucuuccugcaccucgucaagauccccacccaccgccacgugaucggcaagcccugccccaagccgcaccggcugaaccacauggggaucugcuccugcggccuguacaagcaccccggggugcccgucaaguggaagcgcugaggacuaguaauaaggaaacuguaugaaugucugugggcaggaagugaagagauccuucuguaaagguuuuuggaauuaugucugcugaauaauaaacuuuuuugaaauaauaaaucugguagaaaaaugagaucuaaaaaaaaaaaaaaaaaaaaaaaaaaaaaaaaaaaaaaaaaaaaaaaaaaaaaaaaaaaaaaaaaaaaaaaaaaaaaaaaaaaaaaaaaaaaaaaaaaaa

SEQ ID NO: 27575 - RNA, 1785 nt, Artificial Sequence
  mRNA product Design b-4 (A100) comprising derived and/or modified sequence from LASV(LASV237-NIG-2010;Clade II)__AIT17638__GPCmut4 (opt1)
aggagagucccgcagucggcguccagcggcucugcuuguucgugugugugucguugcaggccuuauucaagcuuaccaugggccagaucaucaccuucuuccaggaggugccccacgucaucgaggaggugaugaacaucgugcugaucgcccucagccugcuggccauccucaaggggaucuacaacgucgcgaccugcggccuguucgggcugguguccuuccuccugcugugcggccgcagcugcuccacgaccuacaaggggguguacgagcuccagacccuggagcuggacauggccagccucaacaugugcaugccgcuguccugcaccaagaacaacagccaccacuacaucauggucggcaacgagacgggccuggagcucacccugaccaacaccuccaucaucaaccacaaguucugcaaccugagcgacgcccacaagaaggaccucuacgaccacgcccugauguccaucaucagcacguuccaccuguccauccccaacuucaaccaguacgaggccaugagcugcgacuucaacgggggcaagaucuccgugcaguacaaccucagccacaccuacgcgguggacgccgccaaccacugcgggaccaucgccaacggcguccugcagaccuucaugcggauggcguggggcggguccuacaucgcccuggacagcggcaagggguccugggacugcaucaugacgagcuaccaguaccucaucauccagaacaccaccugggaggaccacugccaguucucccgccccagccccaucggcuaccuggggcugcucagccagcggacccgcgacaucuacaucucccggcgccggcgcggcacguucaccuggacccugagcgacuccgagggcaacgagacccccgggggcuacugccugacgcgguggaugcucaucgaggccgagcugaagugcuucgggaacaccgccguggccaagugcaacgagaagcacgacgaggaguucugcgacaugcugcgccucuucgacuucugcaagcaggcgauccggcgccugaagaccccggcccagaugagcauccagcugaucaacaaggccgugaacgcccucaucaacgaccagcugaucaugaagaaccaccuccgggacaucaugggcauccccuacugcaacuacuccaaguacugcuaccugaaccacaccgucacggggaagaccagccugccccgcugcugccugguguccaacggcagcuaccucaacgagacccacuucuccgacgacaucgagcagcaggccgacaacaugaucaccgagcugcugcagaaggaguacauggaccggcagggcaagacgccgcucgggcugguggaccuguucgucuucagcaccuccuucuaccugaucagcaucuuccuccaccugaucaagauccccacccaccgccacaucaccggcaagcccugccccaagccgcaccggcugaaccacauggggaucugcuccugcggccucuacaagcaccccggggugcccgugaaguggaagcgcugaggacuaguaauaaggaaacuguaugaaugucugugggcaggaagugaagagauccuucuguaaagguuuuuggaauuaugucugcugaauaauaaacuuuuuugaaauaauaaaucugguagaaaaaugagaucuaaaaaaaaaaaaaaaaaaaaaaaaaaaaaaaaaaaaaaaaaaaaaaaaaaaaaaaaaaaaaaaaaaaaaaaaaaaaaaaaaaaaaaaaaaaaaaaaaaaa

SEQ ID NO: 27576 - RNA, 1785 nt, Artificial Sequence
  mRNA product Design b-4 (A100) comprising derived and/or modified sequence from LASV(LASV253-NIG-2011;Clade II)__AIT17670__GPCmut4 (opt1)
aggagagucccgcagucggcguccagcggcucugcuuguucgugugugugucguugcaggccuuauucaagcuuaccaugggccagaucaucaccuucuuccaggaggugccccacgucaucgaggaggugaugaacaucgugcugaucgcccucagccugcuggccauccucaaggggaucuacaacgucgcgaccugcggccuguucgggcugguguccuuccuccugcugugcggccgcagcugcuccacgaccuacaaggggguguacgagcuccagacccuggagcuggacauggccagccucaacaugugcaugccgcuguccugcaccaagaacaacagccaccacuacaucauggucggcaacgagacgggccuggagcucacccugaccaacaccuccaucaucaaccacaaguucugcaaccugagcgacgcccacaagaagaaccucuacgaccacgcccugauguccaucaucagcacguuccaccuguccauccccaacuucaaccaguacgaggccaugagcugcgacuucaacgggggcaagaucuccgugcaguacaaccucagccacaccuacgcgguggacgccgccaaccacugcgggaccaucgccaacggcguccugcagaccuucaugcggauggcguggggcggguccuacaucgcccuggacagcggcaagggguccugggacugcaucaugacgagcuaccaguaccucaucauccagaacaccaccugggaggaccacugccaguucucccgccccagccccaucggcuaccuggggcugcucagccagcggacccgcgacaucuacaucucccggcgccggcgcggcacguucaccuggacccugagcgacuccgagggcaacgagacccccgggggcuacugccugacgcgguggaugcucaucgaggccgagcugaagugcuucgggaacaccgccguggccaagugcaacgagaagcacgacgaggaguucugcgacaugcugcgccucuucgacuucugcaagcaggcgauccggcgccugaaggccccggcccagaugagcauccagcugaucaacaaggccgugaacgcccucaucaacgaccagcugaucaugaagaaccaccuccgggacaucaugggcauccccuacugcaacuacuccaaguacugcuaccugaaccacaccgucaccgggcgcacgagccugccccggugcugccugguguccaacggcagcuaccucaacgagacccacuucuccgacgacaucgagcagcaggcggacaacaugaucaccgagcugcugcagaaggaguacaucgaccgccagggcaagaccccgcucgggcugguggaccuguucgucuucagcacguccuucuaccugaucagcaucuuccuccaccuggugaagauccccacccaccggcacaucaucggcaagcccugccccaagccgcaccgccugaaccacauggggaucugcuccugcggccucuacaagcaccccggggugcccgucaaguggaagcggugaggacuaguaauaaggaaacuguaugaaugucugugggcaggaagugaagagauccuucuguaaagguuuuuggaauuaugucugcugaauaauaaacuuuuuugaaauaauaaaucugguagaaaaaugagaucuaaaaaaaaaaaaaaaaaaaaaaaaaaaaaaaaaaaaaaaaaaaaaaaaaaaaaaaaaaaaaaaaaaaaaaaaaaaaaaaaaaaaaaaaaaaaaaaaaaaa

SEQ ID NO: 27577 - RNA, 1785 nt, Artificial Sequence
  mRNA product Design b-4 (A100) comprising derived and/or modified sequence from LASV(LASV254-NIG-2011;Clade II)__AIT17674__GPCmut4 (opt1)
aggagagucccgcagucggcguccagcggcucugcuuguucgugugugugucguugcaggccuuauucaagcuuaccaugggccagaucaucaccuucuuccaggaggugccccacgucaucgaggaggugaugaacaucgugcugaucgcccucagccugcuggccauccucaaggggaucuacaacgucgcgaccugcggccuguucgggcugguguccuuccuccugcugugcggccgcagcugcuccacgaccuacaaggggguguacgagcuccagacccuggagcuggacaugaccaaccucaacaugugcaugccgcugagcugcacgaagaacaacucccaccacuacaucauggucggcaacgagaccggccuggagcucacccugaccaacacgagcaucaucaaccacaaguucugcaaccuguccgacgcccacaagaagaaccucuacaaccacgcccugaugagcaucaucuccaccuuccaccugagcauccccaacuucaaccaguacgaggccauguccugcgacuucaacgggggcaagaucagcgugcaguacaaccucucccacagcuacgccguggacgcggccaaccacugcgggaccaucgccaacggcguccugcagaccuucaugcggauggccuggggcggguccuacaucgcgcuggacagcggcaaggggaacugggacugcaucaugacguccuaccaguaccucaucauccagaacaccaccugggaggaccacugccaguucagccgccccucccccaucggcuaccuggggcugcucagccagcggacccgcgacaucuacaucagccggcgccggcgcggcacguucaccuggacccuguccgacagcgagggcaacgagacccccgggggcuacugccugacgcgguggaugcucaucgaggccgagcugaagugcuucgggaacaccgccguggccaagugcaacgagaagcacgacgaggaguucugcgacaugcugcgccucuucgacuucugcaagcaggccauccggcgccugaagaccccggcgcaggccaacauccagcugaucaacaaggccgugaacgcccucaucaacgaccagcugaucaugaagaaccaccuccgggacaucaugggcauccccuacugcaacuacuccaaguacugcuaccugaaccacaccgucacggggaagaccagccugccccgcugcugccugguguccaacggcagcuaccucaacgagacccacuucuccgacgacaucgagcagcaggccgacaacaugaucaccgagcugcugcagaaggaguacauggaccggcagggcaagacgccgcucgggcugguggaccuguucgucuucagcaccuccuucuaccugaucagcaucuuccuccaccuggugaagauccccacccaccgccacgugaucggcaagcccugccccaagccgcaccggcugaaccacauggggaucugcuccugcggccucuacaagcaccccgggguccccgugaaguggaagcgcugaggacuaguaauaaggaaacuguaugaaugucugugggcaggaagugaagagauccuucuguaaagguuuuuggaauuaugucugcugaauaauaaacuuuuuugaaauaauaaaucugguagaaaaaugagaucuaaaaaaaaaaaaaaaaaaaaaaaaaaaaaaaaaaaaaaaaaaaaaaaaaaaaaaaaaaaaaaaaaaaaaaaaaaaaaaaaaaaaaaaaaaaaaaaaaaaa

SEQ ID NO: 27578 - RNA, 1785 nt, Artificial Sequence
  mRNA product Design b-4 (A100) comprising derived and/or modified sequence from LASV(Nig08-A19;Clade III)__ADU56618__GPCmut4 (opt1)
aggagagucccgcagucggcguccagcggcucugcuuguucgugugugugucguugcaggccuuauucaagcuuaccaugggccagaucgugaccuucuuccaggaggucccccacgugaucgaggaggugaugaacaucguccugaucgcccucagcauccuggccauccugaaggggcucuacaacaucgcgaccugcggccugaucgggcuggugacguuccuccugcuguccggccgcagcugcuccaugaccuacaaggggguguacgagcuccagacccuggagcugaacaugaacacccucaacaugugcaugccgcugagcugcacgaagaacaacucccaccacuacaucauggucggcaacgagaccggccuggagcucacccugaccaacacgagccugcuccaccacaaguucugcaaccuguccgacgcccacaagaagaaccuguacgaccacacccucaugagcaucaucuccaccuuccaccugagcauccccaacuucaaccaguacgaggccauguccugcgacuucaacgggggcaagaucaccgugcaguacaaccugagccacuccuacgccaucgacgccgcgaaccacugcgggacgguggccaacggcguccuccagaccuucaugcggauggccuggggcgggagcuacaucgcccuggacuccggccgcgggaagugggacugcaucaugaccagcuaccaguaccugaucauccagaacaccacgugggaggaccacugccaguucucccggcccagccccaucggcuaccucgggcugcugucccagcgcacccgggacaucuacaucagccgccggcgccggggcaccuucaccuggacgcucagcgacuccgagggcaacgagacccccgggggcuacugccugacccgcuggaugcugaucgaggcggagcucaagugcuucgggaacaccgccguggccaagugcaacgagaagcacgacgaggaguucugcgacaugcugcggcuguucgacuucugcaagcaggccauccgccggcucaaggccccggcgcagaugagcauccagcugaucaacaaggccgugaacgcccugaucaacgaccagcucaucaugaagaaccaccuccgcgacaucaugggcauccccuacugcaacuacuccaaguacugcuaccugaaccacacgagcaccgggcggaccucccugccccgcugcugccuggucagcaacggcuccuaccugaacgagacccacuucagcgacgacaucgagcagcaggccgacaacaugaucacggagaugcuccagaaggaguaccuggaccggcagggcaagaccccgcuggggcugguggaccucuucguguucuccaccagcuucuaccugaucuccaucuuccugcaccucgucaagauccccacccaccgccacaucgugggcaagcccugccccaagccgcaccggcugaaccacauggggaucugcagcugcggccuguacaagcagcccggggugcccguccgcuggaagcggugaggacuaguaauaaggaaacuguaugaaugucugugggcaggaagugaagagauccuucuguaaagguuuuuggaauuaugucugcugaauaauaaacuuuuuugaaauaauaaaucugguagaaaaaugagaucuaaaaaaaaaaaaaaaaaaaaaaaaaaaaaaaaaaaaaaaaaaaaaaaaaaaaaaaaaaaaaaaaaaaaaaaaaaaaaaaaaaaaaaaaaaaaaaaaaaaa

SEQ ID NO: 27579 - RNA, 1788 nt, Artificial Sequence
  mRNA product Design b-4 (A100) comprising derived and/or modified sequence from LASV(G1180-SLE-2010;Clade IV)__AIT17168__GPCmut4 (opt1)
aggagagucccgcagucggcguccagcggcucugcuuguucgugugugugucguugcaggccuuauucaagcuuaccaugggccagaucgugaccuucuuccaggaggucccccacgugaucgaggaggugaugaacaucguccugaucgcccucagcauccuggccgugcugaaggggcucuacaacuucgcgaccugcggccugguggggcugcucacguuccugcugcucugcggccgcuccugcaccgccagccgguacaagggggucuacgagcugcagacccuggagcucaacauggagacccugaacaugugcaugccgcuguccugcacgaagaacaacagccaccacuacaucauggugggcaacgagaccggccucgagcugacccugaccaacacguccaucaucaaccacaaguucugcaaccucagcgacgcccacaagaagaaccuguacgaccacgcccugauguccaucaucagcaccuuccaccucuccauccccaacuucaaccaguacgaggccaugagcugcgacuucaacgggggcaagaucuccgugcaguacaaccugagccacuccuacgcgggggacgccgccaaccacugcggcaccgucgccaacggggugcugcagaccuucaugcgcauggcguggggcggcagcuacaucgcccucgacuccgggcacggcagcugggacugcaucaugacguccuaccaguaccugaucauccagaacaccaccugggaggaccacugccaguucagccggcccucccccaucggguaccugggccuccugagccagcgcacccgggacaucuacaucagccgccggcgccggggcacguucaccuggacccuguccgacagcgaggggaaggacaccccgggcggguacugccucacgcgcuggaugcugaucgaggccgagcugaagugcuucggcaacaccgccguggccaagugcaacgagaagcacgacgaggaguucugcgacaugcuccggcuguucgacuucugcaagcaggcgauccagcgccugaaggcccccgcccagauguccauccagcucaucaacaaggccgucaacgcccugaucaacgaccagcugaucaugaagaaccaccuccgggacaucauggggauccccuacugcaacuacagcaaguacugcuaccugaaccacaccaccacgggcaagaccucccugcccaagugcugccucgugagcaacggcuccuaccugaacgagacccacuucagcgacgacaucgagcagcaggcggacaacaugaucaccgagaugcugcagaaggaguacauggagcgccaggggaagacgccgcucggccugguggaccuguucgucuucuccaccagcuucuaccugaucuccaucuuccuccaccuggugaagauccccacccaccggcacaucgugggcaagagcugccccaagccccaccgccugaaccacauggggaucugcuccugcgggcucuacaagcagccgggcguccccgugaaguggaagcggugaggacuaguaauaaggaaacuguaugaaugucugugggcaggaagugaagagauccuucuguaaagguuuuuggaauuaugucugcugaauaauaaacuuuuuugaaauaauaaaucugguagaaaaaugagaucuaaaaaaaaaaaaaaaaaaaaaaaaaaaaaaaaaaaaaaaaaaaaaaaaaaaaaaaaaaaaaaaaaaaaaaaaaaaaaaaaaaaaaaaaaaaaaaaaaaaa

SEQ ID NO: 27580 - RNA, 1788 nt, Artificial Sequence
  mRNA product Design b-4 (A100) comprising derived and/or modified sequence from LASV(G1442-SLE-2011;Clade IV)__AIT17180__GPCmut4 (opt1)
aggagagucccgcagucggcguccagcggcucugcuuguucgugugugugucguugcaggccuuauucaagcuuaccaugggccagaucgugaccuucuuccaggaggucccccacgugaucgaggaggugaugaacaucguccugaucgcccucagcauccuggccgugcugaaggggcucuacaacguggcgaccugcggccugaucgggcuggucacguuccuccugcugugcggccgcuccugcaccaccacccucuacaaggggguguacgagcugcagacgcuggagcucaacauggagacccugaacaugugcaugccgcugagcugcaccaagaacaacucccaccacuacauccgggugggcaacgagaccggccucgagcugacgcugaccaacaccagcaucaucaaccacaaguucugcaaccucuccgacgcccacaagaagaaccuguacgaccacgcccugaugagcaucaucuccaccuuccaccucagcauccccaacuucaaccaguacgaggccauguccugcgacuucaacgggggcaagaucagcguccaguacaaccugucccacagcuacgccggggacgcggccaaccacugcggcacgguggccaacggggugcugcagaccuucaugcgcauggccuggggcggcuccuacaucgcgcucgacagcgggcggggcaacugggacugcaucaugaccuccuaccaguaccugaucauccagaacaccacgugggacgaccacugccaguucagccgccccucccccaucggguaccugggccuccugagccagcggacccgcgacgucuacaucucccggcgccggcgcggcaccuucaccuggacgcugagcgacagcgaggggaaggacaccccgggcggguacugccucacccgguggaugcugaucgaggccgagcugaagugcuucggcaacaccgccguggccaagugcaacgagaagcacgacgaggaguucugcgacaugcuccgccuguucgacuucugcaagcaggccauccagcggcugaaggcgcccgcccagauguccauccagcucaucaacaaggccgugaacgcccugaucaacgaccagcugaucaugaagaaccaccuccgcgacaucauggggauccccuacugcaacuacagcaaguacugcuaccugaacaacacggccaccggcaagaccucccugcccaagugcugccucaucagcaacggcuccuaccugaacgagacccacuucagcgacgacaucgagcaggaggcggacaacaugaucacggagaugcugcagaaggaguacauggagcggcaggggaagaccccgcucggccuggucgaccuguucguguucuccaccagcuucuaccugaucuccaucuuccuccaccuggugaagauccccacccaccgccacaucgucggcaagagcugccccaagccccaccggcugaaccacauggggaucugcuccugcgggcucuacaagcagccgggcgugcccgugcgcuggaagcggugaggacuaguaauaaggaaacuguaugaaugucugugggcaggaagugaagagauccuucuguaaagguuuuuggaauuaugucugcugaauaauaaacuuuuuugaaauaauaaaucugguagaaaaaugagaucuaaaaaaaaaaaaaaaaaaaaaaaaaaaaaaaaaaaaaaaaaaaaaaaaaaaaaaaaaaaaaaaaaaaaaaaaaaaaaaaaaaaaaaaaaaaaaaaaaaaa

SEQ ID NO: 27581 - RNA, 1788 nt, Artificial Sequence
  mRNA product Design b-4 (A100) comprising derived and/or modified sequence from LASV(G3010-SLE-2013;Clade IV)__AIT17344__GPCmut4 (opt1)
aggagagucccgcagucggcguccagcggcucugcuuguucgugugugugucguugcaggccuuauucaagcuuaccaugggccagaucgugaccuucuuccaggaggucccccacgugaucgaggaggugaugaacaucguccugaucgcccucagcauccuggccgugcugaaggggcucuacaacuucgcgaccugcggccugguggggcuggucacguuccuccugcugugcggccgcuccugcaccaccagccucuacaaggggguguacgagcugcagacccuggagcucaacauggagacgcugaacaugugcaugccgcuguccugcaccaagaacaacagccaccacuacaucauggugggcaacgagaccggccucgagcugacccugacgaacaccuccaucaucaaccacaaguucugcaaccucagcgacgcccacaagaagaaccuguacaaccacgcccugauguccaucaucagcaccuuccaccucuccauccccaacuucaaccaguacgaggccaugagcugcgacuucaacgggggcaagaucuccguccaguacaaccugagccacuccuacgccggggacgcggccagccacugcggcaccguggccaacggggugcugcagacguucaugcggauggccuggggcggcuccuacaucgcgcucgacagcggguacggcaagugggacugcaucaugaccuccuaccaguaccugaucauccagaacaccaccugggaggaccacugccaguucagccgccccucccccaucggguaccugggccuccugagccagcggacgcgcgacaucuacaucagccggcgccggcgcggcaccuucaccuggacccuguccgacagcgaggggaaggacacgccgggcggguacugccucacccgguggaugcugaucgaggccgagcugaagugcuucggcaacaccgccgucgccaagugcaacgagaagcacgacgaggaguucugcgacaugcuccgccuguucgacuucugcaagcaggccauccagcggcugaagacccccgcgcagauguccauccagcucaucaacaaggccgugaacgcccugaucaacgaccagcugaucaugaagaaccaccuccgcgacaucauggggauccccuacugcaacuacagcaaguacugcuaccugaaccacacgaccaccggcaagaccucccugcccaagugcugccucgugagcaacggcuccuaccugaacgagacgcacuucagcgacgacaucgagcagcaggccgacaacaugaucaccgagaugcugcagaaggaguacauggagcggcaggggaagaccccgcucggccuggucgaccuguucguguucuccaccagcuucuaccugaucuccaucuuccuccaccuggugaagauccccacgcaccgccacaucgucggcaagagcugccccaagccccaccggcugaaccacauggggaucugcuccugcgggcucuacaagcagccgggcgugcccgugcgcuggaagcggugaggacuaguaauaaggaaacuguaugaaugucugugggcaggaagugaagagauccuucuguaaagguuuuuggaauuaugucugcugaauaauaaacuuuuuugaaauaauaaaucugguagaaaaaugagaucuaaaaaaaaaaaaaaaaaaaaaaaaaaaaaaaaaaaaaaaaaaaaaaaaaaaaaaaaaaaaaaaaaaaaaaaaaaaaaaaaaaaaaaaaaaaaaaaaaaaa

SEQ ID NO: 27582 - RNA, 1788 nt, Artificial Sequence
  mRNA product Design b-4 (A100) comprising derived and/or modified sequence from LASV(G502-SLE-2009;Clade IV)__AIT17126__GPCmut4 (opt1)
aggagagucccgcagucggcguccagcggcucugcuuguucgugugugugucguugcaggccuuauucaagcuuaccaugggccagaucgugaccuucuuccaggaggucccccacgugaucgaggaggugaugaacaucguccugaucgcccucagcauccuggccgugcugaaggggcucuacaacuucgcgaccugcggccugguggggcugcucacguuccugcugcucugcggccgcuccugcaccaccgggcuguacaagggcgucuacgagcugcagacccucgagcugaacauggagacgcugaacaugugcaugccgcucagcugcaccaagaacaacucccaccacuacaucauggugggcaacgagaccgggcuggagcugacccucacgaacaccagcaucaucaaccacaaguucugcaaccuguccgacgcccacaagaagaaccuguacgaccacgcccucaugagcaucaucuccaccuuccaccugagcauccccaacuucaaccaguacgaggccauguccugcgacuucaacggcgggaagaucagcgugcaguacaaccugucccacagcuacgccggcgacgcggccgaccacugcgggaccgucgccaacggcgugcuccagacguucaugcggauggccuggggcggguccuacaucgcgcuggacagcggccgcgggcggugggacugcaucaugaccuccuaccaguaccugaucauccagaacaccaccugggaggaccacugccaguucagccgccccucccccaucggcuaccucggccugcugagccagcggacgcgcgacaucuacaucucccggcgccggcgcgggaccuucaccuggacccucagcgacagcgagggcaaggacacgcccgggggcuacugccugacccgguggaugcugaucgaggccgagcucaagugcuucgggaacaccgccguggccaagugcaacgagaagcacgacgaggaguucugcgacaugcugcgccuguucgacuucugcaagcaggccauccagcggcucaaggcgccggcccagauguccauccagcugaucaacaaggccgucaacgcccugaucaacgaccagcucgugaugaagaaccaccuccgcgacaucaugggcauccccuacugcaacuacagccgguacugcuaccugaaccacaccacgaccggccgcaccucccugcccaagugcugccuggugagcaacggguccuaccugaacgagacccacuucagcgacgacaucgagcagcaggccgacaacaugaucacggagaugcuccagaaggaguacauggagcggcagggcaagaccccgcuggggcuggucgaccuguucguguucuccaccagcuucuaccucaucuccaucuuccugcaccuggugaagauccccacccaccgccacaucgucggcaagagcugccccaagccccaccggcucaaccacauggggaucugcuccugcggccuguacaagcagccgggcgugcccgugaaguggaagcgcugaggacuaguaauaaggaaacuguaugaaugucugugggcaggaagugaagagauccuucuguaaagguuuuuggaauuaugucugcugaauaauaaacuuuuuugaaauaauaaaucugguagaaaaaugagaucuaaaaaaaaaaaaaaaaaaaaaaaaaaaaaaaaaaaaaaaaaaaaaaaaaaaaaaaaaaaaaaaaaaaaaaaaaaaaaaaaaaaaaaaaaaaaaaaaaaaa

SEQ ID NO: 27583 - RNA, 1788 nt, Artificial Sequence
  mRNA product Design b-4 (A100) comprising derived and/or modified sequence from LASV(G733-SLE-2010;Clade IV)__AIT17154__GPCmut4 (opt1)
aggagagucccgcagucggcguccagcggcucugcuuguucgugugugugucguugcaggccuuauucaagcuuaccaugggccagaucgugaccuucuuccaggaggucccccacgugaucgaggaggugaugaacaucguccugaucgcccucagcauccuggccgugcugaaggggcucuacaacuucgcgaccugcggcaucguggggcuggucuccuuccugcuccugugcggccgcagcugcacgaccucccuguacaaggggguguacgagcuccagacccuggagcugaacauggagacccucaacaugugcaugccgcugagcugcacgaagaacaacucccaccacuacaucauggugggcaacgagaccggccuggagcucacccugaccaacacgagcaucaucaaccacaaguucugcaaccuguccgacgcccacaagaagaaccucuacgaccacgcccugaugagcaucaucuccaccuuccaccugagcauccccaacuucaaccaguacgaggccauguccugcgacuucaacgggggcaagaucagcguccaguacaaccucucccacagcuacgccggggacgcggccaaccacugcggcaccaucgccaacggggugcugcagaccuucaugcggauggccuggggcggcuccuacaucgcgcuggacagcgggcgcgaccggugggacugcaucaugacguccuaccaguaccucaucauccagaacaccaccugggaggaccacugccaguucagccgccccucccccaucggcuaccuggggcugcucagccagcggacccgcgacaucuacaucagccggcgccggcgcggcacguucaccuggacccuguccgacagcgagggcaaggacacccccgggggcuacugccugacgcgguggaugcucaucgaggccgagcugaagugcuucgggaacaccgccguggccaagugcaacgagaagcacgacgaggaguucugcgacaugcugcgccucuucgacuucugcaagcaggccauccagcggcugaaggcgccggcccagauguccauccagcugaucaacaaggccgucaacgcccucaucaacgaccagcugaucaugaagaaccaccuccgcgacaucaugggcauccccuacugcaacuacagcaaguacugcuaccugaaccacaccaccacggggaagaccucccugcccaagugcugccuggugagcaacggcuccuaccucaacgagacccacuucagcgacgacaucgagcagcaggccgacaacaugaucaccgagaugcugcagaaggaguacauggagcggcagggcaagacgccgcuggggcucguggaccuguucgucuucuccaccagcuucuaccugaucuccaucuuccugcaccucgugaagauccccacccaccgccacguggucggcaagagcugccccaagccccaccggcugaaccacauggggaucugcuccugcggccuguacgggcagccgggcgugcccgugaaguggaagcgcugaggacuaguaauaaggaaacuguaugaaugucugugggcaggaagugaagagauccuucuguaaagguuuuuggaauuaugucugcugaauaauaaacuuuuuugaaauaauaaaucugguagaaaaaugagaucuaaaaaaaaaaaaaaaaaaaaaaaaaaaaaaaaaaaaaaaaaaaaaaaaaaaaaaaaaaaaaaaaaaaaaaaaaaaaaaaaaaaaaaaaaaaaaaaaaaaa

SEQ ID NO: 27584 - RNA, 1788 nt, Artificial Sequence
  mRNA product Design b-4 (A100) comprising derived and/or modified sequence from MOPV/LASV reassortant(IGS-1;Clade IV)__AFY05576__GPCmut4 (opt1)
aggagagucccgcagucggcguccagcggcucugcuuguucgugugugugucguugcaggccuuauucaagcuuaccaugggccagaucgugaccuucuuccaggaggucccccacgugaucgaggaggugaugaacaucguccugaucgcccucagcgugcuggccgugcugaaggggcucuacaacuucgcgaccugcggccuggucgggcuggugacguuccuccugcugugcggccgcuccugcaccaccagccucuacaaggggguguacgagcugcagacccuggagcucaacauggagacgcugaacaugugcaugccgcuguccugcaccaagaacaacagccaccacuacaucauggucggcaacgagaccggccucgagcugacccugacgaacaccuccaucaucaaccacaaguucugcaaccucagcgacgcccacaagaagaaccuguacgaccacgcccugauguccaucaucagcaccuuccaccucuccauccccaacuucaaccaguacgaggccaugagcugcgacuucaacgggggcaagaucuccgugcaguacaaccugagccacuccuacgccggggacgcggccaaccacugcggcaccguggccaacgggguccugcagacguucaugcggauggccuggggcggcagcuacaucgcgcucgacuccgggcgcggcaacugggacugcaucaugaccagcuaccaguaccugaucauccagaacaccaccugggaggaccacugccaguucucccggcccagccccaucggguaccugggccuccugucccagcgcacgcgggacaucuacaucagccgccggcgccggggcaccuucaccuggacccugagcgacuccgagggggaggacacgccgggcggguacugccucacccgcuggaugcugaucgaggccgagcugaagugcuucggcaacaccgccguggccaagugcaacgagaagcacgacgaggaguucugcgacaugcuccggcuguucgacuucugcaagcaggccauccagcgccugaaggcgcccgcccagaugagcauccagcucaucaacaaggccgugaacgcccugaucaacgaccagcugaucaugaagaaccaccuccgggacaucauggggauccccuacugcaacuacuccaaguacugcuaccugaaccacaccacgaccggccgcaccagccugcccaagugcugccucgucuccaacggcagcuaccugaacgagacccacuucuccgacgacaucgagcagcaggccgacaacaugaucacggagaugcugcagaaggaguacauggagcggcaggggaagaccccgcucggccugguggaccuguucguguucagcaccuccuucuaccugaucagcaucuuccuccaccuggucaagauccccacccaccgccacaucguggggaaguccugccccaagccccaccggcugaaccacaugggcaucugcagcugcgggcucuacaagcagccgggcgugcccgucaaguggaagcgcugaggacuaguaauaaggaaacuguaugaaugucugugggcaggaagugaagagauccuucuguaaagguuuuuggaauuaugucugcugaauaauaaacuuuuuugaaauaauaaaucugguagaaaaaugagaucuaaaaaaaaaaaaaaaaaaaaaaaaaaaaaaaaaaaaaaaaaaaaaaaaaaaaaaaaaaaaaaaaaaaaaaaaaaaaaaaaaaaaaaaaaaaaaaaaaaaa

SEQ ID NO: 27585 - RNA, 1788 nt, Artificial Sequence
  mRNA product Design b-4 (A100) comprising derived and/or modified sequence from LASV(LM765-SLE-2012;Clade IV)__AIT17814__GPCmut4 (opt1)
aggagagucccgcagucggcguccagcggcucugcuuguucgugugugugucguugcaggccuuauucaagcuuaccaugggccagaucgugaccuucuuccaggaggucccccacgugaucgaggaggugaugaacaucguccugaucgcccucagcauccuggccgugcugaaggggcucuacaacuucgcgaccugcggccugguggggcuggucacguuccuccugcugugcggccgcuccugcaccaccagccucuacaaggggguguacgagcugcagacccuggagcucaacauggagacgcugaacaugugcaugccgcuguccugcaccaagaacaacagccaccacuacaucauggugggcaacgagaccggccucgagcugacccugacgaacaccuccaucaucgaccacaaguucugcaaccucagcgacgcccaccggaagaaccuguacgaccacgcccugauguccaucaucagcaccuuccaccucuccauccccaacuucaaccaguacgaggccaugagcugcgacuucaacgggggcaagaucuccguccaguacaaccugagccacuccuacgccaaggacgcggccgaccacugcgggaccguggccaacggcgugcugcagacguucaugcgcauggccuggggcgggagcuacaucgcgcucgacuccggccgggggcgcugggacugcaucaugaccagcuaccaguaccugaucauccagaacaccaccugggaggaccacugccaguucucccggcccagccccaucggcuaccuggggcuccugucccagcgcacgcgggacaucuacaucagccgccggcgccggggcaccuucaccuggacccugagcgacuccgagggcaaggacacgcccgggggcuacugccucacccgcuggaugcugaucgaggccgagcugaagugcuucgggaacaccgccgucgccaagugcaacgagaagcacgacgaggaguucugcgacaugcuccggcuguucgacuucugcaagcaggccauccagcgccugaaggcgccggcccagaugagcauccagcucaucaacaaggccgugaacgcccugaucaacgaccagcugaucaugaagaaccaccuccgggacaucaugggcauccccuacugcaacuacuccaaguacugcuaccugaaccacaccacgaccgggaagaccagccugcccaagugcugccucguguccaacggcagcuaccugaacgagacccacuucuccgacgacaucgagcagcaggccgacaacaugaucacggagaugcugcagaaggaguacauggagcgccagggcaagaccccgcucgggcuggucgaccuguucguguucagcaccuccuucuaccugaucagcaucuuccuccaccuggugaagauccccacccaccggcacaucgucggcaagcccugccccaagccgcaccgccugaaccacauggggaucugcuccugcggccucuacaagcagcccggggugcccgugaaguggaagcggugaggacuaguaauaaggaaacuguaugaaugucugugggcaggaagugaagagauccuucuguaaagguuuuuggaauuaugucugcugaauaauaaacuuuuuugaaauaauaaaucugguagaaaaaugagaucuaaaaaaaaaaaaaaaaaaaaaaaaaaaaaaaaaaaaaaaaaaaaaaaaaaaaaaaaaaaaaaaaaaaaaaaaaaaaaaaaaaaaaaaaaaaaaaaaaaaa

SEQ ID NO: 27586 - RNA, 1788 nt, Artificial Sequence
  mRNA product Design b-4 (A100) comprising derived and/or modified sequence from LASV(LM776-SLE-2012;Clade IV)__AIT17824__GPCmut4 (opt1)
aggagagucccgcagucggcguccagcggcucugcuuguucgugugugugucguugcaggccuuauucaagcuuaccaugggccagaucgugaccuucuuccaggaggucccccacgugaucgaggaggugaugaacaucguccugaucgcccucagcauccuggccgugcugaaggggcucuacaacuucgcgaccugcggccugguggggcuggucacguuccuccugcugugcggccgcuccugcaccaccagcguguacaaggggguguacgagcuccagacccuggagcugaacauggagacgcucaacaugugcaugccgcuguccugcaccaagaacaacagccaccacuacaucauggucggcaacgagaccggccuggagcucacccugacgaacaccuccaucaucaaccacaaguucugcaaccugagcgacgcccacaagaagaaccucuacgaccacgcccugauguccaucaucagcaccuuccaccuguccauccccaacuucaaccaguacgaggccaugagcugcgacuucaacgggggcaagaucuccgugcaguacaaccucagccacuccuacgccggggacgcggccaaccacugcggcaccguggccaacgggguccugcagacguucaugcggauggccuggggcggcagcuacaucgcgcuggacuccgggcacggcaagugggacugcaucaugaccagcuaccaguaccucaucauccagaacaccaccugggaggaccacugccaguucucccgccccagccccaucggguaccugggccugcucucccagcggacgcgcgacaucuacaucagccggcgccggcgcggcaccuucaccuggacccugagcgacuccgaggggaaggacacgccgggcggguacugccugacccgguggaugcucaucgaggccgagcugaagugcuucggcaacaccgccguggccaagugcaacgagaagcacgacgaggaguucugcgacaugcugcgccucuucgacuucugcaagcaggccauccagcggcugaaggcgcccgcccagaugagcauccagcugaucaacaaggccgugaacgcccucaucaacgaccagcugaucaugaagaaccaccuccgcgacaucauggggauccccuacugcaacuacuccaaguacugcuaccugaaccacaccacgaccggcaagaccagccugcccaagugcugccuggucuccaacggcagcuaccucaacgagacccacuucuccgacgacaucgagcagcaggccgacaacaugaucacggagaugcugcagaaggaguacauggagcggcaggggaagaccccgcugggccucguggaccuguucguguucagcaccuccuucuaccugaucagcaucuuccugcaccucgucaagauccccacccaccgccacaucguggggaaguccugccccaagccccaccggcugaaccacaugggcaucugcagcugcgggcuguacaagcagccgggcgugcccguccgcuggaagcggugaggacuaguaauaaggaaacuguaugaaugucugugggcaggaagugaagagauccuucuguaaagguuuuuggaauuaugucugcugaauaauaaacuuuuuugaaauaauaaaucugguagaaaaaugagaucuaaaaaaaaaaaaaaaaaaaaaaaaaaaaaaaaaaaaaaaaaaaaaaaaaaaaaaaaaaaaaaaaaaaaaaaaaaaaaaaaaaaaaaaaaaaaaaaaaaaa

SEQ ID NO: 27587 - RNA, 1788 nt, Artificial Sequence
  mRNA product Design b-4 (A100) comprising derived and/or modified sequence from LASV(Mad39;Clade IV)__ANH09722__GPCmut4 (opt1)
aggagagucccgcagucggcguccagcggcucugcuuguucgugugugugucguugcaggccuuauucaagcuuaccaugggccagaucgugaccuucuuccaggaggucccccacgugaucgaggaggugaugaacaucguccugaucgcccucagcauccuggccgugcugaaggggcucuacaacguggcgaccugcggccugaucgggcuggucacguuccuccugcugugcggccgcuccugcaccaccacccucuacaaggggguguacgagcugcaggcccuggagcucaacauggagacgcugaacaugugcaugccgcugagcugcaccaagaacaacucccaccacuacauccgggugggcaacgagaccggccucgagcugacccugacgaacaccagccucaucaaccacaaguucugcaaccuguccgacgcccacaagaagaaccuguacgaccacgcccucaugagcaucaucuccaccuuccaccugagcauccccaacuucaaccaguacgaggccauguccugcgacuucaacgacgggaagaucagcguccaguacaaccugucccacaccuacgcgggcgacacggccaaccacugcgggaccguggccaacggcgugcuccagaccuucaugcgcauggccuggggcgggagcuacaucgcgcuggacuccggccgcgggggcugggacugcaucaugaccagcuaccaguaccugaucauccagaacacgaccugggaggaccacugccaguucucccggcccagccccaucggguaccucggccugcugucccagcggacccgcgacaucuacaucagccggcgccggcgcggcaccuucacguggacccucuccgacagcgaggggaaggacaccccgggcggguacugccugacccgguggaugcugaucgaggccgagcucaagugcuucggcaacacggccgucgccaagugcaacgagaagcacgacgaggaguucugcgacaugcugcgccuguucgacuucugcaagcaggccauccagcggcucaaggcgcccgcccagaugagcauccagcugaucaacaaggccgugaacgcccugaucaacgaccagcucaucaugaagaaccaccuccgcgacaucauggggauccccuacugcaacuacuccaaguacugcuaccugaaccacaccgugaccggcaagaccagccugcccaagugcugccuggucuccaacggcagcuaccugaacgagacgcacuucuccgacgacaucgagcagcaggccgacaacaugaucaccgagaugcuccagaaggaguacauggagcggcaggggaagaccccgcugggccugguggaccuguucguguucagcaccuccuucuaccucaucagcaucuuccugcaccuggucaagauccccacgcaccgccacgugguggggaagcccugccccaagccgcaccggcucaaccacaugggcaucugcuccugcggguucuacaagcagcccggcguccccgugcgcuggaagcggugaggacuaguaauaaggaaacuguaugaaugucugugggcaggaagugaagagauccuucuguaaagguuuuuggaauuaugucugcugaauaauaaacuuuuuugaaauaauaaaucugguagaaaaaugagaucuaaaaaaaaaaaaaaaaaaaaaaaaaaaaaaaaaaaaaaaaaaaaaaaaaaaaaaaaaaaaaaaaaaaaaaaaaaaaaaaaaaaaaaaaaaaaaaaaaaaa

SEQ ID NO: 27588 - RNA, 1788 nt, Artificial Sequence
  mRNA product Design b-4 (A100) comprising derived and/or modified sequence from LASV(Z0947-SLE-2011;Clade IV)__AIT17840__GPCmut4 (opt1)
aggagagucccgcagucggcguccagcggcucugcuuguucgugugugugucguugcaggccuuauucaagcuuaccaugggccagaucgugaccuucuuccaggaggucccccacgugaucgaggaggugaugaacaucguccugaucgcccucagcauccuggccgugcugaaggggcucuacaacuucgcgaccugcggccugguggggcuggucacguuccuccugcugugcggccgcuccugcaccaucagccucuacaaggggguguacgagcugcagacccuggagcucaacauggagacccugaacaugugcaugccgcuguccugcacgaagaacaacagccaccacuacaucauggugggcaacgagaccggccucgagcugacccugaccaacacguccaucaucaaccacaaguucugcaaccucagcgacgcccacaagaagaaccuguacgaccacgcccugauguccaucaucagcaccuuccaccucuccauccccaacuucaaccaguacgaggccaugagcugcgacuucaacgggggcaagaucuccguccaguacaaccugagccacuccuacgccggggacgcggccaaccacugcggcaccguggccaacggggugcugcagaccuucaugcggauggccuggggcggcagcuacaucgcgcucgacuccgggcgcgaccggugggacugcaucaugacgagcuaccaguaccugaucauccagaacaccaccugggaggaccacugccaguucucccgccccagccccaucggcuaccuggggcuccugucccagcggacccgcgacaucuacaucagccggcgccggcgcggcacguucaccuggacccugagcgacuccgagggcaaggacacccccgggggcuacugccucacgcgguggaugcugaucgaggccgagcugaagugcuucgggaacaccgccgucgccaagugcaacgagaagcacgacgaggaguucugcgacaugcuccgccuguucgacuucugcaagcaggccauccagcggcugaaggcgccggcccagaugagcauccagcucaucaacaaggccgugaacgcccugaucaacgaccagcugaucaugaagaaccaccuccgcgacaucaugggcauccccuacugcaacuacuccaaguacugcuaccugaaccacaccaccacggggaagaccagccugcccaagugcugccucguguccaacggcagcuaccugaacgagacccacuucuccgacgacaucgagcagcaggccgacaacaugaucaccgagaugcugcagaaggaguacauggagcggcagggcaagacgccgcucgggcuggucgaccuguucguguucagcaccuccuucuaccugaucagcaucuuccuccaccuggugaagauccccacccaccgccacaucgucggcaagcccugccccaagccgcaccggcugaaccacauggggaucugcuccugcggccucuacaagcagcccggggugcccgugaaguggaagcgcugaggacuaguaauaaggaaacuguaugaaugucugugggcaggaagugaagagauccuucuguaaagguuuuuggaauuaugucugcugaauaauaaacuuuuuugaaauaauaaaucugguagaaaaaugagaucuaaaaaaaaaaaaaaaaaaaaaaaaaaaaaaaaaaaaaaaaaaaaaaaaaaaaaaaaaaaaaaaaaaaaaaaaaaaaaaaaaaaaaaaaaaaaaaaaaaaa

SEQ ID NO: 27589 - RNA, 1788 nt, Artificial Sequence
  mRNA product Design b-4 (A100) comprising derived and/or modified sequence from LASV(Josiah;Clade IV)__NP_694870__GPCmut4 (opt4)
aggagagucccgcagucggcguccagcggcucugcuuguucgugugugugucguugcaggccuuauucaagcuuaccaugggccagaucgugaccuucuuccaggaggugccccacgugaucgaggaggugaugaacaucgugcugaucgcccugagcgugcuggccgugcugaagggccuguacaacuucgccaccugcggccuggugggccuggugaccuuccugcugcugugcggcagaagcugcaccaccagccuguacaagggcguguacgagcugcagacccuggagcugaacauggagacccugaacaugugcaugccccugagcugcaccaagaacaacagccaccacuacaucauggugggcaacgagaccggccuggagcugacccugaccaacaccagcaucaucaaccacaaguucugcaaccugagcgacgcccacaagaagaaccuguacgaccacgcccugaugagcaucaucagcaccuuccaccugagcauccccaacuucaaccaguacgaggccaugagcugcgacuucaacggcggcaagaucagcgugcaguacaaccugagccacagcuacgccggcgacgccgccaaccacugcggcaccguggccaacggcgugcugcagaccuucaugagaauggccuggggcggcagcuacaucgcccuggacagcggcagaggcaacugggacugcaucaugaccagcuaccaguaccugaucauccagaacaccaccugggaggaccacugccaguucagcagacccagccccaucggcuaccugggccugcugagccagagaaccagagacaucuacaucagcagaagaagaagaggcaccuucaccuggacccugagcgacagcgagggcaaggacacccccggcggcuacugccugaccagauggaugcugaucgaggccgagcugaagugcuucggcaacaccgccguggccaagugcaacgagaagcacgacgaggaguucugcgacaugcugagacuguucgacuucugcaagcaggccauccagagacugaaggcccccgcccagaugagcauccagcugaucaacaaggccgugaacgcccugaucaacgaccagcugaucaugaagaaccaccugagagacaucaugggcauccccuacugcaacuacagcaaguacugcuaccugaaccacaccaccaccggcagaaccagccugcccaagugcugccuggugagcaacggcagcuaccugaacgagacccacuucagcgacgacaucgagcagcaggccgacaacaugaucaccgagaugcugcagaaggaguacauggagagacagggcaagaccccccugggccugguggaccuguucguguucagcaccagcuucuaccugaucagcaucuuccugcaccuggugaagauccccacccacagacacaucgugggcaagagcugccccaagccccacagacugaaccacaugggcaucugcagcugcggccuguacaagcagcccggcgugcccgugaaguggaagagaugaggacuaguaauaaggaaacuguaugaaugucugugggcaggaagugaagagauccuucuguaaagguuuuuggaauuaugucugcugaauaauaaacuuuuuugaaauaauaaaucugguagaaaaaugagaucuaaaaaaaaaaaaaaaaaaaaaaaaaaaaaaaaaaaaaaaaaaaaaaaaaaaaaaaaaaaaaaaaaaaaaaaaaaaaaaaaaaaaaaaaaaaaaaaaaaaa

SEQ ID NO: 27590 - RNA, 1785 nt, Artificial Sequence
  mRNA product Design b-4 (A100) comprising derived and/or modified sequence from LASV(LP;Clade I)__AAF86701__GPCmut4 (opt4)
aggagagucccgcagucggcguccagcggcucugcuuguucgugugugugucguugcaggccuuauucaagcuuaccaugggccagaucaucaccuucuuccaggaggugccccacgugaucgaggaggugaugaacaucgugcugaucgcccugagccugcuggccauccugaagggccuguacaacaucgccaccugcggcaucaucggccugguggccuuccuguuccugugcggcaagagcugcagccugacccugaagggcggcuacgagcugcagacccuggagcugaacauggagacccugaacaugugcaugccccugagcugcaccaagaacagcagccaccacuacaucagagugggcaacgagaccggccuggagcugacccugaccaacaccagcaucaucaaccacaaguucugcaaccugagcgacgcccacaagaagaaccuguacgaccacgcccugaugagcaucaucagcaccuuccaccugagcauccccaacuucaaccaguacgaggccaugagcugcgacuucaacggcggcaagaucagcgugcaguacaaccugagccacagcuacgccggcgacgccgccgagcacugcggcaccguggccaacggcgugcugcagaccuucaugagaauggccuggggcggcagauacaucgcccuggacagcggcaagggcaacugggacugcaucaugaccagcuaccaguaccugaucauccagaacaccaccugggaggaccacugccaguucagcagacccagccccaucggcuaccugggccugcugagccagagaaccagagacaucuacaucagcagaagaagaagaggcaccuucaccuggacccugagcgacagcgagggcaacgagacccccggcggcuacugccugaccagauggaugcugaucgaggccgagcugaagugcuucggcaacaccgccguggccaagugcaacgagaagcacgacgaggaguucugcgacaugcugagacuguucgacuucugcaagcaggccaucagaagacugaaggcccccgcccagaugagcauccagcugaucaacaaggccgugaacgcccugaucaacgaccagcugaucaugaagaaccaccugagagacaucaugggcauccccuacugcaacuacagcaaguacugcuaccugaaccacaccagcagcggcagaaccagccugcccaagugcugccugaucagcaacggcagcuaccugaacgagacccaguucagcgacgacaucgagcagcaggccgacaacaugaucaccgagaugcugcagaaggaguacaucgagagacagggcaagaccccccugggccugguggacaucuucaucuucagcaccagcuucuaccugaucagcaucuuccugcaccugaucaagauccccacccacagacacaucgugggcaagcccugccccaagccccacagacugaaccacaugggcgugugcagcugcggccuguacaagcaccccggcgugcccaccaaguggaagagaugaggacuaguaauaaggaaacuguaugaaugucugugggcaggaagugaagagauccuucuguaaagguuuuuggaauuaugucugcugaauaauaaacuuuuuugaaauaauaaaucugguagaaaaaugagaucuaaaaaaaaaaaaaaaaaaaaaaaaaaaaaaaaaaaaaaaaaaaaaaaaaaaaaaaaaaaaaaaaaaaaaaaaaaaaaaaaaaaaaaaaaaaaaaaaaaaa

SEQ ID NO: 27591 - RNA, 1785 nt, Artificial Sequence
  mRNA product Design b-4 (A100) comprising derived and/or modified sequence from LASV(803213;Clade II)__AAF86703__GPCmut4 (opt4)
aggagagucccgcagucggcguccagcggcucugcuuguucgugugugugucguugcaggccuuauucaagcuuaccaugggccagaucaucaccuucuuccaggaggugccccacgugaucgaggaggugaugaacaucgugcugaucgcccugagccugcuggccauccugaagggcaucuacaacguggccaccugcggccuguucggccugaucagcuuccugcugcugugcggcagaagcugcagcgugaccuacaagggcguguacgagcugcagacccuggagcugaacauggccaaccugaacaugugcaugccccugagcugcaccaagaacaacagccaccacuacaucauggugggcaacgagaccggccuggagcugacccugaccaacaccagcaucaucaaccacaaguucugcaaccugagcgacgcccacaagaagaaccuguacgaccacgcccugaugagcaucaucagcaccuuccaccugagcauccccaacuucaaccaguacgaggccaugagcugcgacuucaacggcggcaagaucagcgugcaguacaaccugagccacagcuucgccguggacgccgccaaccacugcggcaccaucgccaacggcgugcugcagaccuucaugagaauggccuggggcggcagcuacaucgcccuggacagcggcaagggcaacugggacugcaucaugaccagcuaccaguaccugaucauccagaacaccaccugggaggaccacugccaguucagcagacccagccccaucggcuaccugggccugcugagccagagaaccagagacaucuacaucagcagaagaagaagaggcaccuucaccuggacccugagcgacagcgagggcaacgaggcccccggcggcuacugccugaccagauggaugcugaucgaggccgagcugaagugcuucggcaacaccgccguggccaagugcaacgagaagcacgacgaggaguucugcgacaugcugagacuguucgacuucugcaagcaggccaucaagagacugaagacccccgcccagaugagcauccagcugaucaacaaggccgugaacgcccugaucaacgaccagcugaucaugaagaaccaccugagagacaucaugggcauccccuacugcaacuacagcagauacugcuaccugaaccacaccgugaccggcaagaccagccugcccagaugcugccuggugagcaacggcagcuaccugaacgagacccacuucagcgacgacaucgagcagcaggccgacaacaugaucaccgagaugcugcagaaggaguacauggacagacagggcaagaccccccugggccugguggaccuguucguguucagcaccagcuucuaccugaucagcaucuuccugcaccuggugaagauccccacccacagacacaucgugggcaagcccugccccaagccccacagacugaaccacaugggcaucugcagcugcggccuguacaagcaccccggcgugcccgugaaguggaagagaugaggacuaguaauaaggaaacuguaugaaugucugugggcaggaagugaagagauccuucuguaaagguuuuuggaauuaugucugcugaauaauaaacuuuuuugaaauaauaaaucugguagaaaaaugagaucuaaaaaaaaaaaaaaaaaaaaaaaaaaaaaaaaaaaaaaaaaaaaaaaaaaaaaaaaaaaaaaaaaaaaaaaaaaaaaaaaaaaaaaaaaaaaaaaaaaaa

SEQ ID NO: 27592 - RNA, 1785 nt, Artificial Sequence
  mRNA product Design b-4 (A100) comprising derived and/or modified sequence from LASV(GA391;Clade III)__CAA36645__GPCmut4 (opt4)
aggagagucccgcagucggcguccagcggcucugcuuguucgugugugugucguugcaggccuuauucaagcuuaccaugggccagaucgugaccuucuuccaggaggugccccacgugaucgaggaggugaugaacaucgugcugaucgcccugagcauccuggccauccugaagggccuguacaacguggccaccugcggccugaucggccuggugaccuuccugcugcugagcggcagaagcugcagccugaucuacaagggcaccuacgagcugcagacccuggagcugaacauggagacccugaacaugugcaugccccugagcugcaccaagaacaacagccaccacuacaucagagugggcaacgagaccggccuggagcugacccugaccaacaccagcauccugaaccacaaguucugcaaccugagcgacgcccacaagagaaaccuguacgaccacagccugaugagcaucaucagcaccuuccaccugagcauccccaacuucaaccaguacgaggccaugagcugcgacuucaacggcggcaagaucaccgugcaguacaaccugagccacagcuucgccguggacgccgccggccacugcggcacccuggccaacggcgugcugcagaccuucaugagaauggccuggggcggcagcuacaucgcccuggacagcggcagaggcaacugggacugcaucaugaccagcuaccaguaccugaucauccagaacaccaccugggacgaccacugccaguucagcagacccagccccaucggcuaccugggccugcugagccagagaaccagagacaucuacaucagcagaagaagaagaggcaccuucaccuggacccugagcgacagcgagggcaacgagacccccggcggcuacugccugaccagauggaugcugaucgaggccgagcugaagugcuucggcaacaccgccguggccaagugcaacgagaagcacgacgaggaguucugcgacaugcugagacuguucgacuucugcaagcaggccaucagaagacugaagacccccgcccagaugagcauccagcugaucaacaaggccgugaacgcccugaucaacgaccagcugaucaugaagaaccaccugagagacaucaugggcauccccuacugcaacuacagcagauacugcuaccugaaccacaccagcaccggcaagaccagccugcccagaugcugccugaucagcaacggcagcuaccugaacgagaccaaguucagcgacgacaucgagcagcaggccgacaacaugaucaccgagaugcugcagaaggaguacaucgacagacagggcaagaccccccugggccugguggaccuguucguguucagcaccagcuucuaccugaucagcaucuuccugcaccuggugaagauccccacccacagacacaucgugggcaagcccugccccaagccccacagacugaaccacaugggcaucugcagcugcggccuguacaagcagcccggcgugcccgugagauggaagagaugaggacuaguaauaaggaaacuguaugaaugucugugggcaggaagugaagagauccuucuguaaagguuuuuggaauuaugucugcugaauaauaaacuuuuuugaaauaauaaaucugguagaaaaaugagaucuaaaaaaaaaaaaaaaaaaaaaaaaaaaaaaaaaaaaaaaaaaaaaaaaaaaaaaaaaaaaaaaaaaaaaaaaaaaaaaaaaaaaaaaaaaaaaaaaaaaa

SEQ ID NO: 27593 - RNA, 1788 nt, Artificial Sequence
  mRNA product Design b-4 (A100) comprising derived and/or modified sequence from LASV(AV;Clade V)__CCA30314__GPCmut4 (opt4)
aggagagucccgcagucggcguccagcggcucugcuuguucgugugugugucguugcaggccuuauucaagcuuaccaugggccagaucgugaccuucuuccaggaggugccccacgugaucgaggaggugaugaacaucgugcugaucgcccugagcauccuggccgugcugaagggccuguacaacaucgccaccugcggccugaucggccugaucaccuuccugcugcugugcggcagaagcugcagcagcaaccuguacaagggcguguacgagcugcagagccuggaccugaacauggagacccugaacaugugcaugccccugagcugcaccaagaacaacagccaccacuacaucagagugggcaacgacaccggccuggagcugacccugaccaacaccagcauccugaaccacaaguucugcaaccugagcgacgcccacaagaaggaccuguacgaccacgcccugaugagcaucaucagcaccuuccaccugagcauccccaacuucaaccaguacgaggccaugagcugcgacuucaacggcggcaagaucagcgugcaguacaaccugagccacagcuacgccaucgacgccgccaaccacugcggcaccguggccaacggcauccugcagaccuucaugagaauggccuggggcggcagcuacaucgcccuggacagcggcagaggcaacugggacugcaucaugaccagcuaccaguaccugaucauccagaacaccaccugggagaaccacugccaguucagcagacccagccccaucggcuaccugggccugcugagccagagaaccagagacaucuacaucagcagaagaagaagaggcaccuucaccuggacccugagcgacagcgagggcaacgccacccccggcggcuacugccugaccagauggaugcugaucgaggccgagcugaagugcuucggcaacaccgccguggccaagugcaacgagaagcacgacgaggaguucugcgacaugcugagacuguucgacuucugcaagcaggccaucagcagacugaagagccccgcccagaugagcauccagcugaucaacaaggccgugaacgcccugaucaacgaccagcugaucaugaagaaccaccugagagacaucaugggcauccccuacugcaacuacagcaaguacugcuaccugaaccacaccaucaccggcaagaccagccugcccaagugcugccuggugagcaacggcagcuaccugaacgagacccacuucagcgacgacaucgagcagcaggccgacaacaugaucaccgagaugcugcagaaggaguacauggagagacagggcaagaccccccugggccugguggaccuguucguguucagcaccagcuucuaccugaucagcaucuuccugagacuggugaagauccccacccacagacacaucgugggcaagcccugccccaagccccacagacugaaccacaugggcaucugcagcugcggccuguacaagcagcccggcgugcccgugagauggaagagaugaggacuaguaauaaggaaacuguaugaaugucugugggcaggaagugaagagauccuucuguaaagguuuuuggaauuaugucugcugaauaauaaacuuuuuugaaauaauaaaucugguagaaaaaugagaucuaaaaaaaaaaaaaaaaaaaaaaaaaaaaaaaaaaaaaaaaaaaaaaaaaaaaaaaaaaaaaaaaaaaaaaaaaaaaaaaaaaaaaaaaaaaaaaaaaaaa

SEQ ID NO: 27594 - RNA, 1785 nt, Artificial Sequence
  mRNA product Design b-4 (A100) comprising derived and/or modified sequence from LASV(Togo/2016/7082;Clade VI)__AMR44577__GPCmut4 (opt4)
aggagagucccgcagucggcguccagcggcucugcuuguucgugugugugucguugcaggccuuauucaagcuuaccaugggccagaucaucaccuucuuccaggaggugccccacgugaucgaggaggugaugaacaucgugcugaucgcccugagccugcuggccauccugaagggcguguacaacguggccaccugcggcaucaucggccuggugaccuuccuguuccugugcggcagaagcugcagccugaucuacaagggcagcuacgagcugcagacccuggagcugaacauggagacccugaacaugugcaugccccugagcugcaccaagaacagcagccaccacuacaucagagugggcaacgagaccggccuggagcugacccugaccaacaccagcaucaucaaccacaaguucugcaaccugagcgacgcccacaagagaaaccuguacgaccacgcccugaugagcauccugagcaccuuccaccugagcauccccaacuucaaccaguacgaggccaugagcugcgacuucaacggcggcaagaucagcgugcaguacaaccugagccacgccuacgccguggacgccgccgagcacugcggcaccguggccaacggcgugcugcagaccuucaugagaauggccuggggcggcagcuacaucgcccuggacagcggcagaggcaacugggacugcaucaugaccagcuaccaguaccugaucauccagaacaccaccugggaggaccacugccaguucagcagacccagccccaucggcuaccugggccugcugagccagagaaccagagacaucuacaucagcagaagaagaagaggcaccuucaccuggacccugagcgacagcgagggcaacgagacccccggcggcuacugccugaccagauggaugcugaucgaggccgagcugaagugcuucggcaacaccgccguggccaagugcaacgagaagcacgacgaggaguucugcgacaugcugagacuguucgacuucugcaagcaggccauccagagacugaagagccccgcccagaugagcauccagcugaucaacaaggccgugaacgcccugaucaacgaccagcugaucaugaagaaccaccugagagacaugaugggcauccccuacugcaacuacagcaaguacugcuaccugaaccacaccagcagcggcagaaccagccugcccaagugcugccuggugagcaacggcagcuaccugaacgagacccacuucagcgacgacaucgagcagcaggccgacaacaugaucaccgagaugcugcagaaggaguacaucgacagacagggcaagaccccccugggccugguggaccuguucguguucagcaccagcuucuaccugaucagcaucuuccugcaccugaucaagauccccacccacagacacaucgugggcaagcccugccccaagccccacagacugaaccacaugggcaucugcagcugcggccuguacaagcagcccggcgugcccaccagauggaagagaugaggacuaguaauaaggaaacuguaugaaugucugugggcaggaagugaagagauccuucuguaaagguuuuuggaauuaugucugcugaauaauaaacuuuuuugaaauaauaaaucugguagaaaaaugagaucuaaaaaaaaaaaaaaaaaaaaaaaaaaaaaaaaaaaaaaaaaaaaaaaaaaaaaaaaaaaaaaaaaaaaaaaaaaaaaaaaaaaaaaaaaaaaaaaaaaaa

SEQ ID NO: 27595 - RNA, 1785 nt, Artificial Sequence
  mRNA product Design b-4 (A100) comprising derived and/or modified sequence from LASV(KAK-428;Clade n.d. (VII))__ANH09740__GPCmut4 (opt4)
aggagagucccgcagucggcguccagcggcucugcuuguucgugugugugucguugcaggccuuauucaagcuuaccaugggccagaucgugaccuucuuccaggaggugccccacgugaucgaggaggugaugaacaucgugcugaucgcccugagccugcuggccauccugaagggccuguacaacuucgccaccugcggcgugaucggccugaucaccuuccugcugcugugcggcagaagcugcagcgccaccuacaagggccaguacgagcugcagacccuggagcugaacauggagagccugaacaugugcaugccccugagcugcaccaagaacaacagccaccacuacaucagagccggcaacaacaccggccuggagcugacccugaccaacaccagcaucaucagccacaaguucugcaaccugagcgacgcccacaagaagaaccuguacgaccacacccugaugagcaucaucaccaccuuccaccugagcauccccaacuucaaccaguacgaggccaugagcugcgacuucaacggcggcaagaucagcauccaguacaaccugagccacagcuacgccggcgacgccgcccagcacugcggcaccguggccaacggcgugcugcagaccuucaugagaauggccuggggcggcagcuaccuggcccuggacagcggcagaagaggcugggacugcaucaucagcagcuaccaguaccugaucauccagaacaccaccugggacgaccacugccaguucagcagacccagccccaucggcuaccugggcuucgugagccagaagaccagagacaucuacaucagcagaagaagaagaggcaccuucaccuggacccugagcgacagcgagggccacgacaugcccggcggcuacugccugaccagauggaugcugaucgaggccgaccugaagugcuucggcaacaccgccguggccaagugcaacgagaagcacgacgaggaguucugcgacauguggagacuguucgacuucugcaagcaggccauccagagacugaaggcccccgcccagaugaacauccagcugaucaacaaggccgugaacgcccugaucaacgaccagcugaugaugaagaaccaccugagagacaucaugggcauccccuacugcaacuacagcaaguucugcuaccugaacaacaccaccaccggcagaaccagccugcccagaugcugccugaucagcaacggcagcuaccugaacgagacccacuucagcgacgacaucgagcagcaggccgacaacaugaucaccgagaugcugcagaaggaguacauggacagacagggcaagaccccccugggccugguggaccuguucguguucagcaccagcuucuaccugaucaccaucuuccugcaccuggugaagauccccacccacagacacaucgugggcaagcccugccccaagccccacagacugaaccacaugggcaucugcagcugcggccuguacaagcagcccggcgugcccgugagauggaagagaugaggacuaguaauaaggaaacuguaugaaugucugugggcaggaagugaagagauccuucuguaaagguuuuuggaauuaugucugcugaauaauaaacuuuuuugaaauaauaaaucugguagaaaaaugagaucuaaaaaaaaaaaaaaaaaaaaaaaaaaaaaaaaaaaaaaaaaaaaaaaaaaaaaaaaaaaaaaaaaaaaaaaaaaaaaaaaaaaaaaaaaaaaaaaaaaaa

SEQ ID NO: 27596 - RNA, 1785 nt, Artificial Sequence; identical to SEQ ID NO: 27590
  mRNA product Design b-4 (A100) comprising derived and/or modified sequence from LASV(Pinneo-NIG-1969;Clade I)__AIT17836__GPCmut4 (opt4)

SEQ ID NO: 27597 - RNA, 1785 nt, Artificial Sequence
  mRNA product Design b-4 (A100) comprising derived and/or modified sequence from LASV(ISTH0009-NIG-2011;Clade II)__AIT17404__GPCmut4 (opt4)
aggagagucccgcagucggcguccagcggcucugcuuguucgugugugugucguugcaggccuuauucaagcuuaccaugggccagaucaucaccuucuuccaggaggugccccacgugaucgaggaggugaugaacaucgugcugaucgcccugagccugcuggccauccugaagggcaucuacaacguggccaccugcggccuguucggccuggugagcuuccugcugcugugcggcagaagcugcagcaccaccuacaagggcguguacgagcugcagacccuggagcuggacauggccagccugaacaugugcaugccccugagcugcaccaagaacaacagccaccacuacaucauggugggcaacgagaccggccuggagcugacccugaccaacaccagcaucaucaaccacaaguucugcaaccugagcgacgcccacaagaagaaccuguacgaccacgcccugaugagcaucaucagcaccuuccaccugagcauccccaacuucaaccaguacgaggccaugagcugcgacuucaacggcggcaagaucagcgugcaguacaaccugagccacgccuacgccguggacgccgccaaccacugcggcaccaucgccaacggcgugcugcagaccuucaugagaauggccuggggcggcagcuacaucgcccuggacagcggcaagggcagcugggacugcaucaugaccagcuaccaguaccugaucauccagaacaccaccugggaggaccacugccaguucagcagacccagccccaucggcuaccugggccugcugagccagagaaccagagacaucuacaucagcagaagaagaagaggcaccuucaccuggacccugagcgacagcgagggcaacgagacccccggcggcuacugccugaccagauggaugcugaucgaggccgagcugaagugcuucggcaacaccgccguggccaagugcaacgagaagcacgacgaggaguucugcgacaugcugagacuguucgacuucugcaagcaggccaucagaagacugaagacccccgcccagaugagcauccagcugaucaacaaggccgugaacgcccugaucaacgaccagcugaucaugaagaaccaccugagagacaucaugggcauccccuacugcaacuacagcaaguacugcuaccugaaccacaccgugaccggcaagaccagccugcccagaugcugccuggugagcaacggcagcuaccugaacgagacccacuucagcgacgacaucgagcagcaggccgacaacaugaucaccgagcugcugcagaaggaguacauggacagacagggcaagaccccccugggccugguggaccuguucguguucagcaccagcuucuaccugaucagcaucuuccugcaccugaucaagauccccacccacagacacaucaccggcaagcccugccccaagccccacagacugaaccacaugggcaucugcagcugcggccuguacaagcaccccggcgugcccgugaaguggaagagaugaggacuaguaauaaggaaacuguaugaaugucugugggcaggaagugaagagauccuucuguaaagguuuuuggaauuaugucugcugaauaauaaacuuuuuugaaauaauaaaucugguagaaaaaugagaucuaaaaaaaaaaaaaaaaaaaaaaaaaaaaaaaaaaaaaaaaaaaaaaaaaaaaaaaaaaaaaaaaaaaaaaaaaaaaaaaaaaaaaaaaaaaaaaaaaaaa

SEQ ID NO: 27598 - RNA, 1785 nt, Artificial Sequence
  mRNA product Design b-4 (A100) comprising derived and/or modified sequence from LASV(ISTH2010-NIG-2012;Clade II)__AIT17482__GPCmut4 (opt4)
aggagagucccgcagucggcguccagcggcucugcuuguucgugugugugucguugcaggccuuauucaagcuuaccaugggccagaucaucaccuucuuccaggaggugccccacgugaucgaggaggugaugaacaucgugcugaucgcccugagccugcuggccauccugaagggcaucuacaacguggccaccugcggccuguucggccuggugagcuuccugcugcugugcggcagaagcugcagcaccaccuacaagggcguguacgagcugcagacccuggagcuggacauggccagccugaacaugugcaugccccugagcugcaccaagaacaacagccaccacuacaucauggugggcaacgagaccggccuggagcugacccugaccaacaccagcaucaucaaccacaaguucugcaaccugagcgacgcccacaagaagaaccuguacgaccacgcccugaugagcaucaucagcaccuuccaccugagcauccccaacuucaaccaguacgaggccaugagcugcgacuucaacggcggcaagaucagcgugcaguacaaccugagccacgccuacgccguggacgccgccaaccacugcggcaccaucgccaacggcgugcugcagaccuucaugagaauggccuggggcggcagcuacaucgcccuggacagcggcaagggcagcugggacugcaucaugaccagcuaccaguaccugaucauccagaacaucaccugggaggaccacugccaguucagcagacccagccccaucggcuaccugggccugcugagccagagaaccagagacaucuacaucagcagaagaagaagaggcaccuucaccuggacccugagcgacagcgagggcaacgagacccccggcggcuacugccugaccagauggaugcugaucgaggccgagcugaagugcuucggcaacaccgccguggccaagugcaacgagaagcacgacgaggaguucugcgacaugcugagacuguucgacuucugcaagcaggccaucagaagacugaagacccccgcccagaugagcauccagcugaucaacaaggccgugaacgcccugaucaacgaccagcugaucaugaagaaccaccugagagacaucaugggcauccccuacugcaacuacagcaaguacugcuaccugaaccacaccgugaccggcaagaccagccugcccagaugcugccuggugagcaacggcagcuaccugaacgagacccacuucagcgacgacaucgagcagcaggccgacaacaugaucaccgagcugcugcagaaggaguacaucgacagacagggcaagaccccccugggccugguggaccuguucguguucagcaccagcuucuaccugaucagcaucuuccugcaccuggugaagauccccacccacagacacguggugggcaagcccugccccaagccccacagacugaaccacaugggcaucugcagcugcggccuguacaagcaccccggcgugcccgugaaguggaagagaugaggacuaguaauaaggaaacuguaugaaugucugugggcaggaagugaagagauccuucuguaaagguuuuuggaauuaugucugcugaauaauaaacuuuuuugaaauaauaaaucugguagaaaaaugagaucuaaaaaaaaaaaaaaaaaaaaaaaaaaaaaaaaaaaaaaaaaaaaaaaaaaaaaaaaaaaaaaaaaaaaaaaaaaaaaaaaaaaaaaaaaaaaaaaaaaaa

SEQ ID NO: 27599 - RNA, 1785 nt, Artificial Sequence
  mRNA product Design b-4 (A100) comprising derived and/or modified sequence from LASV(Lassa virus/H.sapiens-wt/NGA/2015/ISTH_0543;Clade II)__AVO03639__GPCmut4 (opt4)
aggagagucccgcagucggcguccagcggcucugcuuguucgugugugugucguugcaggccuuauucaagcuuaccaugggccagaucaucaccuucuuccaggaggugccccacgugaucgaggaggugaugaacaucgugcugaucgcccugagccugcuggccauccugaagggcaucuacaacguggccaccugcggccuguucggccuggugagcuuccugcugcugugcggcagaagcugcagcaccaccuacaagggcguguacgagcugcagacccuggagcuggacauggccaaccugaacaugugcaugccccugagcugcaccaagaacaacagccaccacuacaucauggugggcaacgagaccggccuggagcugacccugaccaacaccagcaucaucaaccacaaguucugcaaccugagcgacgcccacaagaagaaccuguacgaccacgcccugaugagcaucaucagcaccuuccaccugagcauccccaacuucaaccaguacgaggccaugagcugcgacuucaacggcggcaagaucagcgugcaguacaaccugagccacaccuacgccguggacgccgccaaccacugcggcaccaucgccaacggcgugcugcagaccuucaugagaauggccuggggcggcagcuacaucgcccuggacagcggcaagggcagcugggacugcaucaugaccagcuaccaguaccuggugauccagaacaccaccugggaggaccacugccaguucagcagacccagccccaucggcuaccugggccugcugagccagagaaccagagacaucuacaucagcagaagaagaagaggcaccuucaccuggacccugagcgacagcgagggcaacgagacccccggcggcuacugccugaccagauggaugcugaucgaggccgagcugaagugcuucggcaacaccgccguggccaagugcaacgagaagcacgacgaggaguucugcgacaugcugagacuguucgacuucugcaagcaggccaucagaagacugaagacccccgcccagaugagcauccagcugaucaacaaggccgugaacgcccugaucaacgaccagcugaucaugaagaaccaccugagagacaucaugggcauccccuacugcaacuacagcaaguacugcuaccugaaccacaccgugaccggcaagaccagccugcccagaugcugccuggugagcaacggcagcuaccugaacgagacccacuucagcgacgacaucgagcagcaggccgacaacaugaucaccgagcugcugcagaaggaguacaucgacagacagggcaagaccccccugggccugguggaccuguucguguucagcaccagcuucuaccugaucagcaucuuccugcaccuggugaagauccccacccacagacacaucaccggcaagcccugccccaagccccacagacugaaccacaugggcaucugcagcugcggccuguacaagcaccccggcgugcccgugaaguggaagagaugaggacuaguaauaaggaaacuguaugaaugucugugggcaggaagugaagagauccuucuguaaagguuuuuggaauuaugucugcugaauaauaaacuuuuuugaaauaauaaaucugguagaaaaaugagaucuaaaaaaaaaaaaaaaaaaaaaaaaaaaaaaaaaaaaaaaaaaaaaaaaaaaaaaaaaaaaaaaaaaaaaaaaaaaaaaaaaaaaaaaaaaaaaaaaaaaa

SEQ ID NO: 27600 - RNA, 1785 nt, Artificial Sequence
  mRNA product Design b-4 (A100) comprising derived and/or modified sequence from LASV(Lassa virus/H.sapiens-wt/NGA/2016/ISTH_0009;Clade II)__AVO03571__GPCmut4 (opt4)
aggagagucccgcagucggcguccagcggcucugcuuguucgugugugugucguugcaggccuuauucaagcuuaccaugggccagaucaucaccuucuuccaggaggugccccacgugaucgaggaggugaugaacaucgugcugaucgcccugagccugcuggccauccugaagggcaucuacaacguggccaccugcggccugcugggccuggugagcuuccugcugcugugcggcagaagcugcagcaccaccuacaagggcguguacgagcugcagacccuggagcuggacauggccagccugaacaugugcaugccccugagcugcaccaagaacaacagccaccacuacaucauggugggcaacgagaccggccuggagcugacccugaccaacaccagcaucaucaaccacaaguucugcaaccugagcgacgcccacaagaagaaccuguacgaccacgcccugaugagcaucaucagcaccuuccaccugagcauccccaacuucaaccaguacgaggccaugagcugcgacuucaacggcggcagaaucagcgugcaguacaaccugagccacagcuacgccguggacgccgccaaccacugcggcaccaucgccaacggcgugcugcagaccuucaugagaauggccuggggcggcagcuacaucgcccuggacagcggcaagggcagcugggacugcaucaugaccagcuaccaguaccugaucauccagaacaccaccugggaggaccacugccaguucagcagacccagccccaucggcuaccugggccugcugagccagagaaccagagacaucuacaucagcagaagaagaagaggcaccuucaccuggacccugagcgacagcgagggcaacgagacccccggcggcuacugccugaccagauggaugcugaucgaggccgagcugaagugcuucggcaacaccgccguggccaagugcaacgagaagcacgacgaggaguucugcgacaugcugagacuguucgacuucugcaagcaggccaucagaagacugaagacccccgcccagaugagcauccagcugaucaacaaggccgugaacgcccugaucaacgaccagcugaucaugaagaaccaccugagagacaucaugggcauccccuacugcaacuacagcaaguacugcuaccugaaccacaccgugaccggcaagaccagccugcccagaugcugccuggugagcaacggcagcuaccugaacgagacccacuucagcgacgacaucgagcagcaggccgacaacaugaucaccgagcugcugcagaaggaguacaucgacagacagggcaagaccccccugggccugguggaccuguucguguucagcaccagcuucuaccugaucagcaucuuccugcaccuggugaagauccccacccacagacacaucaccggcaagcccugccccaagccccacagacugaaccacaugggcaucugcagcugcggccuguacaaccaccccggcgugcccgugaaguggaagagaugaggacuaguaauaaggaaacuguaugaaugucugugggcaggaagugaagagauccuucuguaaagguuuuuggaauuaugucugcugaauaauaaacuuuuuugaaauaauaaaucugguagaaaaaugagaucuaaaaaaaaaaaaaaaaaaaaaaaaaaaaaaaaaaaaaaaaaaaaaaaaaaaaaaaaaaaaaaaaaaaaaaaaaaaaaaaaaaaaaaaaaaaaaaaaaaaa

SEQ ID NO: 27601 - RNA, 1785 nt, Artificial Sequence
  mRNA product Design b-4 (A100) comprising derived and/or modified sequence from LASV(Lassa virus/H.sapiens-wt/NGA/2016/ISTH_0017;Clade II)__AVO03567__GPCmut4 (opt4)
aggagagucccgcagucggcguccagcggcucugcuuguucgugugugugucguugcaggccuuauucaagcuuaccaugggccagaucaucaccuucuuccaggaggugccccacgugaucgaggaggugaugaacaucgugcugaucgcccugagccugcuggccauccugaagggcaucuacaacguggccaccugcggccuguucggccuggugagcuuccugcugcugugcggcagaagcugcagcaccaccuacaagggcguguacgagcugcagacccuggagcuggacauggccagccugaacaugugcaugccccugagcugcaccaagaacaacagccaccacuacaucauggugggcaacgagaccggccuggagcugacccugaccaacaccagcaucaucaaccacaaguucugcaaccugagcgacgcccacaagaagaaccuguacgaccacgcccugaugagcaucaucagcaccuuccaccugagcauccccaacuucaaccaguacgaggccaugagcugcgacuucaacggcggcaagaucagcgugcaguacaaccugagccacaccuacgccaucgacgccgccaaccacugcggcaccaucgccaacggcgugcugcagaccuucaugagaauggccuggggcggcagcuacaucgcccuggacagcggcaagggcagcugggacugcaucaugaccagcuaccaguaccugaucauccagaacaccaccugggaggaccacugccaguucagcagacccagccccaucggcuaccugggccugcugagccagagaaccagagacaucuacaucagcagaagaagaagaggcaccuucaccuggacccugagcgacagcgagggcaacgagacccccggcggcuacugccugaccagauggaugcugaucgaggccgagcugaagugcuucggcaacaccgccguggccaagugcaacgagaagcacgacgaggaguucugcgacaugcugagacuguucgacuucugcaagcaggccaucagaagacugaagacccccgcccagaugagcauccagcugaucaacaaggccgugaacgcccugaucaacgaccagcugaucaugaagaaccaccugagagacaucaugggcauccccuacugcaacuacagcaaguacugcuaccugaaccacaccgugaccggcaagaccagccugcccagaugcugccuggugagcaacggcagcuaccugaacgagacccacuucagcgacgacaucgagcagcaggccgacaacaugaucaccgagcugcugcagaaggaguacauggacagacagggcaagaccccccugggccugguggaccuguucguguucagcaccagcuucuaccugaucagcaucuuccugcaccuggugagaauccccacccacagacacgugaucggcaagcccugccccaagccccacagacugaaccacaugggcaucugcagcugcggccuguacaagcaccccggcgugcccgugaaguggaagagaugaggacuaguaauaaggaaacuguaugaaugucugugggcaggaagugaagagauccuucuguaaagguuuuuggaauuaugucugcugaauaauaaacuuuuuugaaauaauaaaucugguagaaaaaugagaucuaaaaaaaaaaaaaaaaaaaaaaaaaaaaaaaaaaaaaaaaaaaaaaaaaaaaaaaaaaaaaaaaaaaaaaaaaaaaaaaaaaaaaaaaaaaaaaaaaaaa

SEQ ID NO: 27602 - RNA, 1785 nt, Artificial Sequence
  mRNA product Design b-4 (A100) comprising derived and/or modified sequence from LASV(Lassa virus/H.sapiens-wt/NGA/2018/ISTH_0959;Clade II)__AVV65099__GPCmut4 (opt4)
aggagagucccgcagucggcguccagcggcucugcuuguucgugugugugucguugcaggccuuauucaagcuuaccaugggccagaucaucaccuucuuccaggaggugccccacgugaucgaggaggugaugaacaucgugcugaucgcccugagccugcuggccauccugaagggcaucuacaacguggugaccugcggccuguucggccuggugagcuuccugcugcugugcggcagaagcugcagcaccaccuacaagggcguguacgagcugcagacccuggagcuggacauggccagccugaacaugugcaugccccugagcugcaccaagaacaacagccaccacuacaucauggugggcaacgagaccggccuggagcugacccugaccaacaccagcaucaucaaccacaaguucugcaaccugagcgacgcccacaagaagaaccuguacgaccacgcccugaugagcaucaucagcaccuuccaccugagcauccccaacuucaaccaguacgaggccaugagcugcgacuucaacggcggcaagaucagcgugcaguacaaccugagccacgccuacgccaucgacgccgccaaccacugcggcaccaucgccaacggcgugcugcagaccuucaugagaauggccuggggcggcagcuacaucgcccuggacagcggcaagggcagcugggacugcaucaugaccagcuaccaguaccugaucauccagaacaccaccugggaggaccacugccaguucagcagacccagccccaucggcuaccugggccugcugagccagagaaccagagacaucuacaucagcagaagaagaagaggcaccuucaccuggacccugagcgacagcgagggcaacgagacccccggcggcuacugccugaccagauggaugcugaucgaggccgagcugaagugcuucggcaacaccgccguggccaagugcaacgagaagcacgacgaggaguucugcgacaugcugagacuguucgacuucugcaagcaggccaucagaagacugaagacccccgcccagaugagcauccagcugaucaacaaggccgugaacgcccugaucaacgaccagcugaucaugaagaaccaccugagagacaucaugggcauccccuacugcaacuacagcaaguacugcuaccugaaccacaccgugaccggcaagaccagccugcccagaugcugccuggugagcaacggcagcuaccugaacgagacccacuucagcgacgacaucgagcagcaggccgacaacaugaucaccgagcugcugcagaaggaguacaucgacagacagggcaagaccccccugggccugguggaccuguucguguucagcaccagcuucuaccugaucagcaucuuccugcaccuggugaagauccccacccacagacacgugaucggcaagcccugccccaagccccacagacugaaccacaugggcaucugcagcugcggccuguacaagcaccccggcgugcccgugaaguggaagagaugaggacuaguaauaaggaaacuguaugaaugucugugggcaggaagugaagagauccuucuguaaagguuuuuggaauuaugucugcugaauaauaaacuuuuuugaaauaauaaaucugguagaaaaaugagaucuaaaaaaaaaaaaaaaaaaaaaaaaaaaaaaaaaaaaaaaaaaaaaaaaaaaaaaaaaaaaaaaaaaaaaaaaaaaaaaaaaaaaaaaaaaaaaaaaaaaa

SEQ ID NO: 27603 - RNA, 1785 nt, Artificial Sequence
  mRNA product Design b-4 (A100) comprising derived and/or modified sequence from LASV(LASV003-NIG-2008;Clade II)__AIT17580__GPCmut4 (opt4)
aggagagucccgcagucggcguccagcggcucugcuuguucgugugugugucguugcaggccuuauucaagcuuaccaugggccagaucaucaccuucuuccaggaggugccccacgugaucgaggaggugaugaacaucgugcugaucgcccugagccugcuggccauccugaagggcaucuacaacguggccaccugcggccuguucggccuggugagcuuccugcugcugugcggcagaagcugcagcaccaccuacaagggcguguacgagcugcagacccuggagcuggacauggccagccugaacaugugcaugccccugagcugcaccaagaacaacagccaccacuacaucauggugggcaacgagaccggccuggagcugacccugaccaacaccagcaucaucaaccacaaguucugcaaccugagcgacgcccacaagaagaaccuguacgaccacgcccugaugagcaucaucagcaccuuccaccugagcauccccaacuucaaccaguacgaggccaugagcugcgacuucaacggcggcaagaucagcgugcaguacaaccugagccacaccuacgccguggacgccgccaaccacugcggcaccaucgccaacggcgugcugcagaccuucaugagaauggccuggggcggcagcuacaucgcccuggacagcggcaagggcagcugggacugcaucaugaccagcuaccaguaccugaucauccagaacaccaccugggaggaccacugccaguucagcagacccagccccaucggcuaccugggccugcugagccagagaaccagagacaucuacaucagcagaagaagaagaggcaccuucaccuggacccugagcgacagcgagagcaacgagacccccggcggcuacugccugaccagauggaugcugaucgaggccgagcugaagugcuucggcaacaccgccguggccaagugcaacgagaagcacgacgaggaguucugcgacaugcugagacuguucgacuucugcaagcaggccaucagaagacugaaggcccccgcccagaugagcauccagcugaucaacaaggccgugaacgcccugaucaacgaccagcugaucaugaagaaccaccugagagacaucaugggcauccccuacugcaacuacagcaaguacugcuaccugaaccacaccgugaccggcagaaccagccugcccagaugcugccuggugagcaacggcagcuaccugaacgagacccacuucagcgacgacaucgagcagcaggccgacaacaugaucaccgagcugcugcagaaggaguacauggacagacagggcaagaccccccugggccugguggaccuguucguguucagcaccagcuucuaccugaucagcaucuuccugcaccuggugaagauccccacccacagacacgugaucggcaagcccugccccaagccccacagacugaaccacaugggcaucugcagcugcggccuguacaagcaccccggcgugcccgugaaguggaagagaugaggacuaguaauaaggaaacuguaugaaugucugugggcaggaagugaagagauccuucuguaaagguuuuuggaauuaugucugcugaauaauaaacuuuuuugaaauaauaaaucugguagaaaaaugagaucuaaaaaaaaaaaaaaaaaaaaaaaaaaaaaaaaaaaaaaaaaaaaaaaaaaaaaaaaaaaaaaaaaaaaaaaaaaaaaaaaaaaaaaaaaaaaaaaaaaaa

SEQ ID NO: 27604 - RNA, 1785 nt, Artificial Sequence
  mRNA product Design b-4 (A100) comprising derived and/or modified sequence from LASV(LASV035-NIG-2009;Clade II)__AIT17588__GPCmut4 (opt4)
aggagagucccgcagucggcguccagcggcucugcuuguucgugugugugucguugcaggccuuauucaagcuuaccaugggccagaucaucaccuucuuccaggaggugccccacgugaucgaggaggugaugaacaucgugcugaucgcccugagccugcuggccauccugaagggcaucuacaacguggccaccugcggccuguucggccuggugagcuuccugcugcugugcggcagaagcugcagcaccaccuacaagggcguguacgagcugcagacccuggagcuggacauggccagccugaacaugugcaugccccugagcugcaccaagaacaacagccaccacuacaucauggugggcaacgagaccggccuggagcugacccugaccaacaccagcaucaucaaccacaaguucugcaaccugagcgacgcccacaagaagaaccuguacgaccacgcccugaugagcaucaucagcaccuuccaccugagcauccccaacuucaaccaguacgaggccaugagcugcgacuucaacggcggcaagaucagcgugcaguacaaccugagccacgccuacgccguggacgccgccaaccacugcggcaccaucgccaacggcgugcugcagaccuucaugagaauggccuggggcggcagcuacaucgcccuggacagcggcaagggcagcugggacugcaucaugaccagcuaccaguaccugaucauccagaacaccaccugggaggaccacugccaguucagcagacccagccccaucggcuaccugggccugcugagccagagaaccagagacaucuacaucagcagaagaagaagaggcaccuucaccuggacccugagcgacagcgagggcaacgagacccccggcggcuacugccugaccagauggaugcugaucgaggccgagcugaagugcuucggcaacaccgccguggccaagugcaacgagaagcacgacgaggaguucugcgacaugcugagacuguucgacuucugcaagcaggccaucagaagacugaaggcccccgcccagaugagcauccagcugaucaacaaggccgugaacgcccugaucaacgaccagcugaucaugaagaaccaccugagagacaucaugggcauccccuacugcaacuacagcaaguacugcuaccugaaccacaccgugaccggcaagaccagccugcccagaugcugccuggugagcaacggcagcuaccugaacgagacccacuucagcgacgacaucgagcagcaggccgacaacaugaucaccgagcugcugcagaaggaguacaucgacagacagggcaagaccccccugggccugguggaccuguucguguucagcaccagcuucuaccugaucagcaucuuccugcaccuggugaagauccccacccacagacacgugaucggcaagcccugccccaagccccacagacugaaccacaugggcaucugcagcugcggccuguacaagcaccccggcgugcccgugaaguggaagagaugaggacuaguaauaaggaaacuguaugaaugucugugggcaggaagugaagagauccuucuguaaagguuuuuggaauuaugucugcugaauaauaaacuuuuuugaaauaauaaaucugguagaaaaaugagaucuaaaaaaaaaaaaaaaaaaaaaaaaaaaaaaaaaaaaaaaaaaaaaaaaaaaaaaaaaaaaaaaaaaaaaaaaaaaaaaaaaaaaaaaaaaaaaaaaaaaa

SEQ ID NO: 27605 - RNA, 1785 nt, Artificial Sequence
  mRNA product Design b-4 (A100) comprising derived and/or modified sequence from LASV(LASV1000-NIG-2009;Clade II)__AIT17782__GPCmut4 (opt4)
aggagagucccgcagucggcguccagcggcucugcuuguucgugugugugucguugcaggccuuauucaagcuuaccaugggccagaucaucaccuucuuccaggaggugccccacgugaucgaggaggugaugaacaucgugcugaucgcccugagccugcuggccauccugaagggcaucuacaacguggccaccugcggccuguucggccuggugagcuuccugcugcugugcggcagaagcugcagcaccaccuacaagggcguguacgagcugcagacccuggagcuggacauggccagccugaacaugugcaugccccugagcugcaccaagaacaacagccaccacuacaucauggugggcaacgagaccggccuggagcugacccugaccaacaccagcaucaucaaccacaaguucugcaaccugagcgacgcccacaagaagaaccuguacgaccacgcccugaugagcaucaucagcaccuuccaccugagcauccccaacuucaaccaguacgaggccaugagcugcgacuucaacggcggcaagaucagcgugcaguacaaccugagccacaccuacgccguggacgccgccaaccacugcggcaccaucgccaacggcgugcugcagaccuucaugagaauggccuggggcggcagcuacaucgcccuggacagcggcaagggcagcugggacugcaucaugaccagcuaccaguaccugaucauccagaacaccaccugggaggaccacugccaguucagcagacccagccccaucggcuaccugggccugcugagccagagaaccagagacaucuacaucagcagaagaagaagaggcaccuucaccuggacccugagcgacagcgagggcaacgagacccccggcggcuacugccugaccagauggaugcugaucgaggccgagcugaagugcuucggcaacaccgccguggccaagugcaacgagaagcacgacgaggaguucugcgacaugcugagacuguucgacuucugcaagcaggccaucaagagacugaagacccccgcccagaugagcauccagcugaucaacaaggccgugaacgcccugaucaacgaccagcugaucaugaagaaccaccugagagacaucaugggcauccccuacugcaacuacagcaaguacugcuaccugaaccacaccgugaccggcaagaccagccugcccagaugcugccuggugagcaacggcagcuaccugaacgagacccacuucagcgacgacaucgagcagcaggccgacaacaugaucaccgagcugcugcagaaggaguacaucgacagacagggcaagaccccccugggccugguggaccuguucguguucagcaccagcuucuaccugaucagcaucuuccugcaccuggugaagauccccacccacagacacguggugggcaagcccugccccaagccccacagacugaaccacaugggcaucugcagcugcggccuguacaagcaccccggcgugcccgugaaguggaagagaugaggacuaguaauaaggaaacuguaugaaugucugugggcaggaagugaagagauccuucuguaaagguuuuuggaauuaugucugcugaauaauaaacuuuuuugaaauaauaaaucugguagaaaaaugagaucuaaaaaaaaaaaaaaaaaaaaaaaaaaaaaaaaaaaaaaaaaaaaaaaaaaaaaaaaaaaaaaaaaaaaaaaaaaaaaaaaaaaaaaaaaaaaaaaaaaaa

SEQ ID NO: 27606 - RNA, 1785 nt, Artificial Sequence
  mRNA product Design b-4 (A100) comprising derived and/or modified sequence from LASV(LASV221-NIG-2010;Clade II)__AIT17624__GPCmut4 (opt4)
aggagagucccgcagucggcguccagcggcucugcuuguucgugugugugucguugcaggccuuauucaagcuuaccaugggccagaucaucaccuucuuccaggaggugccccacgugaucgaggaggugaugaacaucgugcugaucgcccugagccugcuggccauccugaagggcaucuacaacguggccaccugcggccuguucggccuggugagcuuccugcugcugugcggcagaagcugcagcaccaccuacaagggcguguacgagcugcagacccuggagcuggacauggccagccugaacaugugcaugccccugagcugcaccaagaacaacagccaccacuacaucauggugggcaacgagaccggccuggagcugacccugaccaacaccagcaucaucaaccacaaguucugcaaccugagcgacgcccacaagaagaaccuguacgaccacgcccugaugagcaucaucagcaccuuccaccugagcauccccaacuucaaccaguacgaggccaugagcugcgacuucaacggcggcaagaucagcgugcaguacaaccugagccacaccuacgccaucgacgccgccaaccacugcggcaccaucgccaacggcgugcugcagaccuucaugagaauggccuggggcggcagcuacaucgcccuggacagcggcaagggcagcugggacugcaucaugaccagcuaccaguaccugaucauccagaacaccaccugggaggaccacugccaguucagcagacccagccccaucggcuaccugggccugcugagccagagaaccagagacaucuacaucagcagaagaagaagaggcaccuucaccuggacccugagcgacagcgagggcaacgagacccccggcggcuacugccugaccagauggaugcugaucgaggccgagcugaagugcuucggcaacaccgccguggccaagugcaacgagaagcacgacgaggaguucugcgacaugcugagacuguucgacuucugcaagcaggccaucagaagacugaagacccccgcccagaugagcauccagcugaucaacaaggccgugaacgcccugaucaacgaccagcugaucaugaagaaccaccugagagacaucaugggcauccccuacugcaacuacagcaaguacugcuaccugaaccacaccgugaccggcaagaccagccugcccagaugcugccuggugagcaacggcagcuaccugaacgagacccacuucagcgacgacaucgagcagcaggccgacaacaugaucaccgagaugcugcagaaggaguacauggacagacagggcaagaccccccugggccugguggaccuguucguguucagcaccagcuucuaccugaucagcaucuuccugcaccuggugaagauccccacccacagacacgugaucggcaagcccugccccaagccccacagacugaaccacaugggcaucugcagcugcggccuguacaagcaccccggcgugcccgugaaguggaagagaugaggacuaguaauaaggaaacuguaugaaugucugugggcaggaagugaagagauccuucuguaaagguuuuuggaauuaugucugcugaauaauaaacuuuuuugaaauaauaaaucugguagaaaaaugagaucuaaaaaaaaaaaaaaaaaaaaaaaaaaaaaaaaaaaaaaaaaaaaaaaaaaaaaaaaaaaaaaaaaaaaaaaaaaaaaaaaaaaaaaaaaaaaaaaaaaaa

SEQ ID NO: 27607 - RNA, 1785 nt, Artificial Sequence
  mRNA product Design b-4 (A100) comprising derived and/or modified sequence from LASV(LASV237-NIG-2010;Clade II)__AIT17638__GPCmut4 (opt4)
aggagagucccgcagucggcguccagcggcucugcuuguucgugugugugucguugcaggccuuauucaagcuuaccaugggccagaucaucaccuucuuccaggaggugccccacgugaucgaggaggugaugaacaucgugcugaucgcccugagccugcuggccauccugaagggcaucuacaacguggccaccugcggccuguucggccuggugagcuuccugcugcugugcggcagaagcugcagcaccaccuacaagggcguguacgagcugcagacccuggagcuggacauggccagccugaacaugugcaugccccugagcugcaccaagaacaacagccaccacuacaucauggugggcaacgagaccggccuggagcugacccugaccaacaccagcaucaucaaccacaaguucugcaaccugagcgacgcccacaagaaggaccuguacgaccacgcccugaugagcaucaucagcaccuuccaccugagcauccccaacuucaaccaguacgaggccaugagcugcgacuucaacggcggcaagaucagcgugcaguacaaccugagccacaccuacgccguggacgccgccaaccacugcggcaccaucgccaacggcgugcugcagaccuucaugagaauggccuggggcggcagcuacaucgcccuggacagcggcaagggcagcugggacugcaucaugaccagcuaccaguaccugaucauccagaacaccaccugggaggaccacugccaguucagcagacccagccccaucggcuaccugggccugcugagccagagaaccagagacaucuacaucagcagaagaagaagaggcaccuucaccuggacccugagcgacagcgagggcaacgagacccccggcggcuacugccugaccagauggaugcugaucgaggccgagcugaagugcuucggcaacaccgccguggccaagugcaacgagaagcacgacgaggaguucugcgacaugcugagacuguucgacuucugcaagcaggccaucagaagacugaagacccccgcccagaugagcauccagcugaucaacaaggccgugaacgcccugaucaacgaccagcugaucaugaagaaccaccugagagacaucaugggcauccccuacugcaacuacagcaaguacugcuaccugaaccacaccgugaccggcaagaccagccugcccagaugcugccuggugagcaacggcagcuaccugaacgagacccacuucagcgacgacaucgagcagcaggccgacaacaugaucaccgagcugcugcagaaggaguacauggacagacagggcaagaccccccugggccugguggaccuguucguguucagcaccagcuucuaccugaucagcaucuuccugcaccugaucaagauccccacccacagacacaucaccggcaagcccugccccaagccccacagacugaaccacaugggcaucugcagcugcggccuguacaagcaccccggcgugcccgugaaguggaagagaugaggacuaguaauaaggaaacuguaugaaugucugugggcaggaagugaagagauccuucuguaaagguuuuuggaauuaugucugcugaauaauaaacuuuuuugaaauaauaaaucugguagaaaaaugagaucuaaaaaaaaaaaaaaaaaaaaaaaaaaaaaaaaaaaaaaaaaaaaaaaaaaaaaaaaaaaaaaaaaaaaaaaaaaaaaaaaaaaaaaaaaaaaaaaaaaaa

SEQ ID NO: 27608 - RNA, 1785 nt, Artificial Sequence
  mRNA product Design b-4 (A100) comprising derived and/or modified sequence from LASV(LASV253-NIG-2011;Clade II)__AIT17670__GPCmut4 (opt4)
aggagagucccgcagucggcguccagcggcucugcuuguucgugugugugucguugcaggccuuauucaagcuuaccaugggccagaucaucaccuucuuccaggaggugccccacgugaucgaggaggugaugaacaucgugcugaucgcccugagccugcuggccauccugaagggcaucuacaacguggccaccugcggccuguucggccuggugagcuuccugcugcugugcggcagaagcugcagcaccaccuacaagggcguguacgagcugcagacccuggagcuggacauggccagccugaacaugugcaugccccugagcugcaccaagaacaacagccaccacuacaucauggugggcaacgagaccggccuggagcugacccugaccaacaccagcaucaucaaccacaaguucugcaaccugagcgacgcccacaagaagaaccuguacgaccacgcccugaugagcaucaucagcaccuuccaccugagcauccccaacuucaaccaguacgaggccaugagcugcgacuucaacggcggcaagaucagcgugcaguacaaccugagccacaccuacgccguggacgccgccaaccacugcggcaccaucgccaacggcgugcugcagaccuucaugagaauggccuggggcggcagcuacaucgcccuggacagcggcaagggcagcugggacugcaucaugaccagcuaccaguaccugaucauccagaacaccaccugggaggaccacugccaguucagcagacccagccccaucggcuaccugggccugcugagccagagaaccagagacaucuacaucagcagaagaagaagaggcaccuucaccuggacccugagcgacagcgagggcaacgagacccccggcggcuacugccugaccagauggaugcugaucgaggccgagcugaagugcuucggcaacaccgccguggccaagugcaacgagaagcacgacgaggaguucugcgacaugcugagacuguucgacuucugcaagcaggccaucagaagacugaaggcccccgcccagaugagcauccagcugaucaacaaggccgugaacgcccugaucaacgaccagcugaucaugaagaaccaccugagagacaucaugggcauccccuacugcaacuacagcaaguacugcuaccugaaccacaccgugaccggcagaaccagccugcccagaugcugccuggugagcaacggcagcuaccugaacgagacccacuucagcgacgacaucgagcagcaggccgacaacaugaucaccgagcugcugcagaaggaguacaucgacagacagggcaagaccccccugggccugguggaccuguucguguucagcaccagcuucuaccugaucagcaucuuccugcaccuggugaagauccccacccacagacacaucaucggcaagcccugccccaagccccacagacugaaccacaugggcaucugcagcugcggccuguacaagcaccccggcgugcccgugaaguggaagagaugaggacuaguaauaaggaaacuguaugaaugucugugggcaggaagugaagagauccuucuguaaagguuuuuggaauuaugucugcugaauaauaaacuuuuuugaaauaauaaaucugguagaaaaaugagaucuaaaaaaaaaaaaaaaaaaaaaaaaaaaaaaaaaaaaaaaaaaaaaaaaaaaaaaaaaaaaaaaaaaaaaaaaaaaaaaaaaaaaaaaaaaaaaaaaaaaa

SEQ ID NO: 27609 - RNA, 1785 nt, Artificial Sequence
  mRNA product Design b-4 (A100) comprising derived and/or modified sequence from LASV(LASV254-NIG-2011;Clade II)__AIT17674__GPCmut4 (opt4)
aggagagucccgcagucggcguccagcggcucugcuuguucgugugugugucguugcaggccuuauucaagcuuaccaugggccagaucaucaccuucuuccaggaggugccccacgugaucgaggaggugaugaacaucgugcugaucgcccugagccugcuggccauccugaagggcaucuacaacguggccaccugcggccuguucggccuggugagcuuccugcugcugugcggcagaagcugcagcaccaccuacaagggcguguacgagcugcagacccuggagcuggacaugaccaaccugaacaugugcaugccccugagcugcaccaagaacaacagccaccacuacaucauggugggcaacgagaccggccuggagcugacccugaccaacaccagcaucaucaaccacaaguucugcaaccugagcgacgcccacaagaagaaccuguacaaccacgcccugaugagcaucaucagcaccuuccaccugagcauccccaacuucaaccaguacgaggccaugagcugcgacuucaacggcggcaagaucagcgugcaguacaaccugagccacagcuacgccguggacgccgccaaccacugcggcaccaucgccaacggcgugcugcagaccuucaugagaauggccuggggcggcagcuacaucgcccuggacagcggcaagggcaacugggacugcaucaugaccagcuaccaguaccugaucauccagaacaccaccugggaggaccacugccaguucagcagacccagccccaucggcuaccugggccugcugagccagagaaccagagacaucuacaucagcagaagaagaagaggcaccuucaccuggacccugagcgacagcgagggcaacgagacccccggcggcuacugccugaccagauggaugcugaucgaggccgagcugaagugcuucggcaacaccgccguggccaagugcaacgagaagcacgacgaggaguucugcgacaugcugagacuguucgacuucugcaagcaggccaucagaagacugaagacccccgcccaggccaacauccagcugaucaacaaggccgugaacgcccugaucaacgaccagcugaucaugaagaaccaccugagagacaucaugggcauccccuacugcaacuacagcaaguacugcuaccugaaccacaccgugaccggcaagaccagccugcccagaugcugccuggugagcaacggcagcuaccugaacgagacccacuucagcgacgacaucgagcagcaggccgacaacaugaucaccgagcugcugcagaaggaguacauggacagacagggcaagaccccccugggccugguggaccuguucguguucagcaccagcuucuaccugaucagcaucuuccugcaccuggugaagauccccacccacagacacgugaucggcaagcccugccccaagccccacagacugaaccacaugggcaucugcagcugcggccuguacaagcaccccggcgugcccgugaaguggaagagaugaggacuaguaauaaggaaacuguaugaaugucugugggcaggaagugaagagauccuucuguaaagguuuuuggaauuaugucugcugaauaauaaacuuuuuugaaauaauaaaucugguagaaaaaugagaucuaaaaaaaaaaaaaaaaaaaaaaaaaaaaaaaaaaaaaaaaaaaaaaaaaaaaaaaaaaaaaaaaaaaaaaaaaaaaaaaaaaaaaaaaaaaaaaaaaaaa

SEQ ID NO: 27610 - RNA, 1785 nt, Artificial Sequence
  mRNA product Design b-4 (A100) comprising derived and/or modified sequence from LASV(Nig08-A19;Clade III)__ADU56618__GPCmut4 (opt4)
aggagagucccgcagucggcguccagcggcucugcuuguucgugugugugucguugcaggccuuauucaagcuuaccaugggccagaucgugaccuucuuccaggaggugccccacgugaucgaggaggugaugaacaucgugcugaucgcccugagcauccuggccauccugaagggccuguacaacaucgccaccugcggccugaucggccuggugaccuuccugcugcugagcggcagaagcugcagcaugaccuacaagggcguguacgagcugcagacccuggagcugaacaugaacacccugaacaugugcaugccccugagcugcaccaagaacaacagccaccacuacaucauggugggcaacgagaccggccuggagcugacccugaccaacaccagccugcugcaccacaaguucugcaaccugagcgacgcccacaagaagaaccuguacgaccacacccugaugagcaucaucagcaccuuccaccugagcauccccaacuucaaccaguacgaggccaugagcugcgacuucaacggcggcaagaucaccgugcaguacaaccugagccacagcuacgccaucgacgccgccaaccacugcggcaccguggccaacggcgugcugcagaccuucaugagaauggccuggggcggcagcuacaucgcccuggacagcggcagaggcaagugggacugcaucaugaccagcuaccaguaccugaucauccagaacaccaccugggaggaccacugccaguucagcagacccagccccaucggcuaccugggccugcugagccagagaaccagagacaucuacaucagcagaagaagaagaggcaccuucaccuggacccugagcgacagcgagggcaacgagacccccggcggcuacugccugaccagauggaugcugaucgaggccgagcugaagugcuucggcaacaccgccguggccaagugcaacgagaagcacgacgaggaguucugcgacaugcugagacuguucgacuucugcaagcaggccaucagaagacugaaggcccccgcccagaugagcauccagcugaucaacaaggccgugaacgcccugaucaacgaccagcugaucaugaagaaccaccugagagacaucaugggcauccccuacugcaacuacagcaaguacugcuaccugaaccacaccagcaccggcagaaccagccugcccagaugcugccuggugagcaacggcagcuaccugaacgagacccacuucagcgacgacaucgagcagcaggccgacaacaugaucaccgagaugcugcagaaggaguaccuggacagacagggcaagaccccccugggccugguggaccuguucguguucagcaccagcuucuaccugaucagcaucuuccugcaccuggugaagauccccacccacagacacaucgugggcaagcccugccccaagccccacagacugaaccacaugggcaucugcagcugcggccuguacaagcagcccggcgugcccgugagauggaagagaugaggacuaguaauaaggaaacuguaugaaugucugugggcaggaagugaagagauccuucuguaaagguuuuuggaauuaugucugcugaauaauaaacuuuuuugaaauaauaaaucugguagaaaaaugagaucuaaaaaaaaaaaaaaaaaaaaaaaaaaaaaaaaaaaaaaaaaaaaaaaaaaaaaaaaaaaaaaaaaaaaaaaaaaaaaaaaaaaaaaaaaaaaaaaaaaaa

SEQ ID NO: 27611 - RNA, 1788 nt, Artificial Sequence
  mRNA product Design b-4 (A100) comprising derived and/or modified sequence from LASV(G1180-SLE-2010;Clade IV)__AIT17168__GPCmut4 (opt4)
aggagagucccgcagucggcguccagcggcucugcuuguucgugugugugucguugcaggccuuauucaagcuuaccaugggccagaucgugaccuucuuccaggaggugccccacgugaucgaggaggugaugaacaucgugcugaucgcccugagcauccuggccgugcugaagggccuguacaacuucgccaccugcggccuggugggccugcugaccuuccugcugcugugcggcagaagcugcaccgccagcagauacaagggcguguacgagcugcagacccuggagcugaacauggagacccugaacaugugcaugccccugagcugcaccaagaacaacagccaccacuacaucauggugggcaacgagaccggccuggagcugacccugaccaacaccagcaucaucaaccacaaguucugcaaccugagcgacgcccacaagaagaaccuguacgaccacgcccugaugagcaucaucagcaccuuccaccugagcauccccaacuucaaccaguacgaggccaugagcugcgacuucaacggcggcaagaucagcgugcaguacaaccugagccacagcuacgccggcgacgccgccaaccacugcggcaccguggccaacggcgugcugcagaccuucaugagaauggccuggggcggcagcuacaucgcccuggacagcggccacggcagcugggacugcaucaugaccagcuaccaguaccugaucauccagaacaccaccugggaggaccacugccaguucagcagacccagccccaucggcuaccugggccugcugagccagagaaccagagacaucuacaucagcagaagaagaagaggcaccuucaccuggacccugagcgacagcgagggcaaggacacccccggcggcuacugccugaccagauggaugcugaucgaggccgagcugaagugcuucggcaacaccgccguggccaagugcaacgagaagcacgacgaggaguucugcgacaugcugagacuguucgacuucugcaagcaggccauccagagacugaaggcccccgcccagaugagcauccagcugaucaacaaggccgugaacgcccugaucaacgaccagcugaucaugaagaaccaccugagagacaucaugggcauccccuacugcaacuacagcaaguacugcuaccugaaccacaccaccaccggcaagaccagccugcccaagugcugccuggugagcaacggcagcuaccugaacgagacccacuucagcgacgacaucgagcagcaggccgacaacaugaucaccgagaugcugcagaaggaguacauggagagacagggcaagaccccccugggccugguggaccuguucguguucagcaccagcuucuaccugaucagcaucuuccugcaccuggugaagauccccacccacagacacaucgugggcaagagcugccccaagccccacagacugaaccacaugggcaucugcagcugcggccuguacaagcagcccggcgugcccgugaaguggaagagaugaggacuaguaauaaggaaacuguaugaaugucugugggcaggaagugaagagauccuucuguaaagguuuuuggaauuaugucugcugaauaauaaacuuuuuugaaauaauaaaucugguagaaaaaugagaucuaaaaaaaaaaaaaaaaaaaaaaaaaaaaaaaaaaaaaaaaaaaaaaaaaaaaaaaaaaaaaaaaaaaaaaaaaaaaaaaaaaaaaaaaaaaaaaaaaaaa

SEQ ID NO: 27612 - RNA, 1788 nt, Artificial Sequence
  mRNA product Design b-4 (A100) comprising derived and/or modified sequence from LASV(G1442-SLE-2011;Clade IV)__AIT17180__GPCmut4 (opt4)
aggagagucccgcagucggcguccagcggcucugcuuguucgugugugugucguugcaggccuuauucaagcuuaccaugggccagaucgugaccuucuuccaggaggugccccacgugaucgaggaggugaugaacaucgugcugaucgcccugagcauccuggccgugcugaagggccuguacaacguggccaccugcggccugaucggccuggugaccuuccugcugcugugcggcagaagcugcaccaccacccuguacaagggcguguacgagcugcagacccuggagcugaacauggagacccugaacaugugcaugccccugagcugcaccaagaacaacagccaccacuacaucagagugggcaacgagaccggccuggagcugacccugaccaacaccagcaucaucaaccacaaguucugcaaccugagcgacgcccacaagaagaaccuguacgaccacgcccugaugagcaucaucagcaccuuccaccugagcauccccaacuucaaccaguacgaggccaugagcugcgacuucaacggcggcaagaucagcgugcaguacaaccugagccacagcuacgccggcgacgccgccaaccacugcggcaccguggccaacggcgugcugcagaccuucaugagaauggccuggggcggcagcuacaucgcccuggacagcggcagaggcaacugggacugcaucaugaccagcuaccaguaccugaucauccagaacaccaccugggacgaccacugccaguucagcagacccagccccaucggcuaccugggccugcugagccagagaaccagagacguguacaucagcagaagaagaagaggcaccuucaccuggacccugagcgacagcgagggcaaggacacccccggcggcuacugccugaccagauggaugcugaucgaggccgagcugaagugcuucggcaacaccgccguggccaagugcaacgagaagcacgacgaggaguucugcgacaugcugagacuguucgacuucugcaagcaggccauccagagacugaaggcccccgcccagaugagcauccagcugaucaacaaggccgugaacgcccugaucaacgaccagcugaucaugaagaaccaccugagagacaucaugggcauccccuacugcaacuacagcaaguacugcuaccugaacaacaccgccaccggcaagaccagccugcccaagugcugccugaucagcaacggcagcuaccugaacgagacccacuucagcgacgacaucgagcaggaggccgacaacaugaucaccgagaugcugcagaaggaguacauggagagacagggcaagaccccccugggccugguggaccuguucguguucagcaccagcuucuaccugaucagcaucuuccugcaccuggugaagauccccacccacagacacaucgugggcaagagcugccccaagccccacagacugaaccacaugggcaucugcagcugcggccuguacaagcagcccggcgugcccgugagauggaagagaugaggacuaguaauaaggaaacuguaugaaugucugugggcaggaagugaagagauccuucuguaaagguuuuuggaauuaugucugcugaauaauaaacuuuuuugaaauaauaaaucugguagaaaaaugagaucuaaaaaaaaaaaaaaaaaaaaaaaaaaaaaaaaaaaaaaaaaaaaaaaaaaaaaaaaaaaaaaaaaaaaaaaaaaaaaaaaaaaaaaaaaaaaaaaaaaaa

SEQ ID NO: 27613 - RNA, 1788 nt, Artificial Sequence
  mRNA product Design b-4 (A100) comprising derived and/or modified sequence from LASV(G3010-SLE-2013;Clade IV)__AIT17344__GPCmut4 (opt4)
aggagagucccgcagucggcguccagcggcucugcuuguucgugugugugucguugcaggccuuauucaagcuuaccaugggccagaucgugaccuucuuccaggaggugccccacgugaucgaggaggugaugaacaucgugcugaucgcccugagcauccuggccgugcugaagggccuguacaacuucgccaccugcggccuggugggccuggugaccuuccugcugcugugcggcagaagcugcaccaccagccuguacaagggcguguacgagcugcagacccuggagcugaacauggagacccugaacaugugcaugccccugagcugcaccaagaacaacagccaccacuacaucauggugggcaacgagaccggccuggagcugacccugaccaacaccagcaucaucaaccacaaguucugcaaccugagcgacgcccacaagaagaaccuguacaaccacgcccugaugagcaucaucagcaccuuccaccugagcauccccaacuucaaccaguacgaggccaugagcugcgacuucaacggcggcaagaucagcgugcaguacaaccugagccacagcuacgccggcgacgccgccagccacugcggcaccguggccaacggcgugcugcagaccuucaugagaauggccuggggcggcagcuacaucgcccuggacagcggcuacggcaagugggacugcaucaugaccagcuaccaguaccugaucauccagaacaccaccugggaggaccacugccaguucagcagacccagccccaucggcuaccugggccugcugagccagagaaccagagacaucuacaucagcagaagaagaagaggcaccuucaccuggacccugagcgacagcgagggcaaggacacccccggcggcuacugccugaccagauggaugcugaucgaggccgagcugaagugcuucggcaacaccgccguggccaagugcaacgagaagcacgacgaggaguucugcgacaugcugagacuguucgacuucugcaagcaggccauccagagacugaagacccccgcccagaugagcauccagcugaucaacaaggccgugaacgcccugaucaacgaccagcugaucaugaagaaccaccugagagacaucaugggcauccccuacugcaacuacagcaaguacugcuaccugaaccacaccaccaccggcaagaccagccugcccaagugcugccuggugagcaacggcagcuaccugaacgagacccacuucagcgacgacaucgagcagcaggccgacaacaugaucaccgagaugcugcagaaggaguacauggagagacagggcaagaccccccugggccugguggaccuguucguguucagcaccagcuucuaccugaucagcaucuuccugcaccuggugaagauccccacccacagacacaucgugggcaagagcugccccaagccccacagacugaaccacaugggcaucugcagcugcggccuguacaagcagcccggcgugcccgugagauggaagagaugaggacuaguaauaaggaaacuguaugaaugucugugggcaggaagugaagagauccuucuguaaagguuuuuggaauuaugucugcugaauaauaaacuuuuuugaaauaauaaaucugguagaaaaaugagaucuaaaaaaaaaaaaaaaaaaaaaaaaaaaaaaaaaaaaaaaaaaaaaaaaaaaaaaaaaaaaaaaaaaaaaaaaaaaaaaaaaaaaaaaaaaaaaaaaaaaa

SEQ ID NO: 27614 - RNA, 1788 nt, Artificial Sequence
  mRNA product Design b-4 (A100) comprising derived and/or modified sequence from LASV(G502-SLE-2009;Clade IV)__AIT17126__GPCmut4 (opt4)
aggagagucccgcagucggcguccagcggcucugcuuguucgugugugugucguugcaggccuuauucaagcuuaccaugggccagaucgugaccuucuuccaggaggugccccacgugaucgaggaggugaugaacaucgugcugaucgcccugagcauccuggccgugcugaagggccuguacaacuucgccaccugcggccuggugggccugcugaccuuccugcugcugugcggcagaagcugcaccaccggccuguacaagggcguguacgagcugcagacccuggagcugaacauggagacccugaacaugugcaugccccugagcugcaccaagaacaacagccaccacuacaucauggugggcaacgagaccggccuggagcugacccugaccaacaccagcaucaucaaccacaaguucugcaaccugagcgacgcccacaagaagaaccuguacgaccacgcccugaugagcaucaucagcaccuuccaccugagcauccccaacuucaaccaguacgaggccaugagcugcgacuucaacggcggcaagaucagcgugcaguacaaccugagccacagcuacgccggcgacgccgccgaccacugcggcaccguggccaacggcgugcugcagaccuucaugagaauggccuggggcggcagcuacaucgcccuggacagcggcagaggcagaugggacugcaucaugaccagcuaccaguaccugaucauccagaacaccaccugggaggaccacugccaguucagcagacccagccccaucggcuaccugggccugcugagccagagaaccagagacaucuacaucagcagaagaagaagaggcaccuucaccuggacccugagcgacagcgagggcaaggacacccccggcggcuacugccugaccagauggaugcugaucgaggccgagcugaagugcuucggcaacaccgccguggccaagugcaacgagaagcacgacgaggaguucugcgacaugcugagacuguucgacuucugcaagcaggccauccagagacugaaggcccccgcccagaugagcauccagcugaucaacaaggccgugaacgcccugaucaacgaccagcuggugaugaagaaccaccugagagacaucaugggcauccccuacugcaacuacagcagauacugcuaccugaaccacaccaccaccggcagaaccagccugcccaagugcugccuggugagcaacggcagcuaccugaacgagacccacuucagcgacgacaucgagcagcaggccgacaacaugaucaccgagaugcugcagaaggaguacauggagagacagggcaagaccccccugggccugguggaccuguucguguucagcaccagcuucuaccugaucagcaucuuccugcaccuggugaagauccccacccacagacacaucgugggcaagagcugccccaagccccacagacugaaccacaugggcaucugcagcugcggccuguacaagcagcccggcgugcccgugaaguggaagagaugaggacuaguaauaaggaaacuguaugaaugucugugggcaggaagugaagagauccuucuguaaagguuuuuggaauuaugucugcugaauaauaaacuuuuuugaaauaauaaaucugguagaaaaaugagaucuaaaaaaaaaaaaaaaaaaaaaaaaaaaaaaaaaaaaaaaaaaaaaaaaaaaaaaaaaaaaaaaaaaaaaaaaaaaaaaaaaaaaaaaaaaaaaaaaaaaa

SEQ ID NO: 27615 - RNA, 1788 nt, Artificial Sequence
  mRNA product Design b-4 (A100) comprising derived and/or modified sequence from LASV(G733-SLE-2010;Clade IV)__AIT17154__GPCmut4 (opt4)
aggagagucccgcagucggcguccagcggcucugcuuguucgugugugugucguugcaggccuuauucaagcuuaccaugggccagaucgugaccuucuuccaggaggugccccacgugaucgaggaggugaugaacaucgugcugaucgcccugagcauccuggccgugcugaagggccuguacaacuucgccaccugcggcaucgugggccuggugagcuuccugcugcugugcggcagaagcugcaccaccagccuguacaagggcguguacgagcugcagacccuggagcugaacauggagacccugaacaugugcaugccccugagcugcaccaagaacaacagccaccacuacaucauggugggcaacgagaccggccuggagcugacccugaccaacaccagcaucaucaaccacaaguucugcaaccugagcgacgcccacaagaagaaccuguacgaccacgcccugaugagcaucaucagcaccuuccaccugagcauccccaacuucaaccaguacgaggccaugagcugcgacuucaacggcggcaagaucagcgugcaguacaaccugagccacagcuacgccggcgacgccgccaaccacugcggcaccaucgccaacggcgugcugcagaccuucaugagaauggccuggggcggcagcuacaucgcccuggacagcggcagagacagaugggacugcaucaugaccagcuaccaguaccugaucauccagaacaccaccugggaggaccacugccaguucagcagacccagccccaucggcuaccugggccugcugagccagagaaccagagacaucuacaucagcagaagaagaagaggcaccuucaccuggacccugagcgacagcgagggcaaggacacccccggcggcuacugccugaccagauggaugcugaucgaggccgagcugaagugcuucggcaacaccgccguggccaagugcaacgagaagcacgacgaggaguucugcgacaugcugagacuguucgacuucugcaagcaggccauccagagacugaaggcccccgcccagaugagcauccagcugaucaacaaggccgugaacgcccugaucaacgaccagcugaucaugaagaaccaccugagagacaucaugggcauccccuacugcaacuacagcaaguacugcuaccugaaccacaccaccaccggcaagaccagccugcccaagugcugccuggugagcaacggcagcuaccugaacgagacccacuucagcgacgacaucgagcagcaggccgacaacaugaucaccgagaugcugcagaaggaguacauggagagacagggcaagaccccccugggccugguggaccuguucguguucagcaccagcuucuaccugaucagcaucuuccugcaccuggugaagauccccacccacagacacguggugggcaagagcugccccaagccccacagacugaaccacaugggcaucugcagcugcggccuguacggccagcccggcgugcccgugaaguggaagagaugaggacuaguaauaaggaaacuguaugaaugucugugggcaggaagugaagagauccuucuguaaagguuuuuggaauuaugucugcugaauaauaaacuuuuuugaaauaauaaaucugguagaaaaaugagaucuaaaaaaaaaaaaaaaaaaaaaaaaaaaaaaaaaaaaaaaaaaaaaaaaaaaaaaaaaaaaaaaaaaaaaaaaaaaaaaaaaaaaaaaaaaaaaaaaaaaa

SEQ ID NO: 27616 - RNA, 1788 nt, Artificial Sequence
  mRNA product Design b-4 (A100) comprising derived and/or modified sequence from MOPV/LASV reassortant(IGS-1;Clade IV)__AFY05576__GPCmut4 (opt4)
aggagagucccgcagucggcguccagcggcucugcuuguucgugugugugucguugcaggccuuauucaagcuuaccaugggccagaucgugaccuucuuccaggaggugccccacgugaucgaggaggugaugaacaucgugcugaucgcccugagcgugcuggccgugcugaagggccuguacaacuucgccaccugcggccuggugggccuggugaccuuccugcugcugugcggcagaagcugcaccaccagccuguacaagggcguguacgagcugcagacccuggagcugaacauggagacccugaacaugugcaugccccugagcugcaccaagaacaacagccaccacuacaucauggugggcaacgagaccggccuggagcugacccugaccaacaccagcaucaucaaccacaaguucugcaaccugagcgacgcccacaagaagaaccuguacgaccacgcccugaugagcaucaucagcaccuuccaccugagcauccccaacuucaaccaguacgaggccaugagcugcgacuucaacggcggcaagaucagcgugcaguacaaccugagccacagcuacgccggcgacgccgccaaccacugcggcaccguggccaacggcgugcugcagaccuucaugagaauggccuggggcggcagcuacaucgcccuggacagcggcagaggcaacugggacugcaucaugaccagcuaccaguaccugaucauccagaacaccaccugggaggaccacugccaguucagcagacccagccccaucggcuaccugggccugcugagccagagaaccagagacaucuacaucagcagaagaagaagaggcaccuucaccuggacccugagcgacagcgagggcgaggacacccccggcggcuacugccugaccagauggaugcugaucgaggccgagcugaagugcuucggcaacaccgccguggccaagugcaacgagaagcacgacgaggaguucugcgacaugcugagacuguucgacuucugcaagcaggccauccagagacugaaggcccccgcccagaugagcauccagcugaucaacaaggccgugaacgcccugaucaacgaccagcugaucaugaagaaccaccugagagacaucaugggcauccccuacugcaacuacagcaaguacugcuaccugaaccacaccaccaccggcagaaccagccugcccaagugcugccuggugagcaacggcagcuaccugaacgagacccacuucagcgacgacaucgagcagcaggccgacaacaugaucaccgagaugcugcagaaggaguacauggagagacagggcaagaccccccugggccugguggaccuguucguguucagcaccagcuucuaccugaucagcaucuuccugcaccuggugaagauccccacccacagacacaucgugggcaagagcugccccaagccccacagacugaaccacaugggcaucugcagcugcggccuguacaagcagcccggcgugcccgugaaguggaagagaugaggacuaguaauaaggaaacuguaugaaugucugugggcaggaagugaagagauccuucuguaaagguuuuuggaauuaugucugcugaauaauaaacuuuuuugaaauaauaaaucugguagaaaaaugagaucuaaaaaaaaaaaaaaaaaaaaaaaaaaaaaaaaaaaaaaaaaaaaaaaaaaaaaaaaaaaaaaaaaaaaaaaaaaaaaaaaaaaaaaaaaaaaaaaaaaaa

SEQ ID NO: 27617 - RNA, 1788 nt, Artificial Sequence
  mRNA product Design b-4 (A100) comprising derived and/or modified sequence from LASV(LM765-SLE-2012;Clade IV)__AIT17814__GPCmut4 (opt4)
aggagagucccgcagucggcguccagcggcucugcuuguucgugugugugucguugcaggccuuauucaagcuuaccaugggccagaucgugaccuucuuccaggaggugccccacgugaucgaggaggugaugaacaucgugcugaucgcccugagcauccuggccgugcugaagggccuguacaacuucgccaccugcggccuggugggccuggugaccuuccugcugcugugcggcagaagcugcaccaccagccuguacaagggcguguacgagcugcagacccuggagcugaacauggagacccugaacaugugcaugccccugagcugcaccaagaacaacagccaccacuacaucauggugggcaacgagaccggccuggagcugacccugaccaacaccagcaucaucgaccacaaguucugcaaccugagcgacgcccacagaaagaaccuguacgaccacgcccugaugagcaucaucagcaccuuccaccugagcauccccaacuucaaccaguacgaggccaugagcugcgacuucaacggcggcaagaucagcgugcaguacaaccugagccacagcuacgccaaggacgccgccgaccacugcggcaccguggccaacggcgugcugcagaccuucaugagaauggccuggggcggcagcuacaucgcccuggacagcggcagaggcagaugggacugcaucaugaccagcuaccaguaccugaucauccagaacaccaccugggaggaccacugccaguucagcagacccagccccaucggcuaccugggccugcugagccagagaaccagagacaucuacaucagcagaagaagaagaggcaccuucaccuggacccugagcgacagcgagggcaaggacacccccggcggcuacugccugaccagauggaugcugaucgaggccgagcugaagugcuucggcaacaccgccguggccaagugcaacgagaagcacgacgaggaguucugcgacaugcugagacuguucgacuucugcaagcaggccauccagagacugaaggcccccgcccagaugagcauccagcugaucaacaaggccgugaacgcccugaucaacgaccagcugaucaugaagaaccaccugagagacaucaugggcauccccuacugcaacuacagcaaguacugcuaccugaaccacaccaccaccggcaagaccagccugcccaagugcugccuggugagcaacggcagcuaccugaacgagacccacuucagcgacgacaucgagcagcaggccgacaacaugaucaccgagaugcugcagaaggaguacauggagagacagggcaagaccccccugggccugguggaccuguucguguucagcaccagcuucuaccugaucagcaucuuccugcaccuggugaagauccccacccacagacacaucgugggcaagcccugccccaagccccacagacugaaccacaugggcaucugcagcugcggccuguacaagcagcccggcgugcccgugaaguggaagagaugaggacuaguaauaaggaaacuguaugaaugucugugggcaggaagugaagagauccuucuguaaagguuuuuggaauuaugucugcugaauaauaaacuuuuuugaaauaauaaaucugguagaaaaaugagaucuaaaaaaaaaaaaaaaaaaaaaaaaaaaaaaaaaaaaaaaaaaaaaaaaaaaaaaaaaaaaaaaaaaaaaaaaaaaaaaaaaaaaaaaaaaaaaaaaaaaa

SEQ ID NO: 27618 - RNA, 1788 nt, Artificial Sequence
  mRNA product Design b-4 (A100) comprising derived and/or modified sequence from LASV(LM776-SLE-2012;Clade IV)__AIT17824__GPCmut4 (opt4)
aggagagucccgcagucggcguccagcggcucugcuuguucgugugugugucguugcaggccuuauucaagcuuaccaugggccagaucgugaccuucuuccaggaggugccccacgugaucgaggaggugaugaacaucgugcugaucgcccugagcauccuggccgugcugaagggccuguacaacuucgccaccugcggccuggugggccuggugaccuuccugcugcugugcggcagaagcugcaccaccagcguguacaagggcguguacgagcugcagacccuggagcugaacauggagacccugaacaugugcaugccccugagcugcaccaagaacaacagccaccacuacaucauggugggcaacgagaccggccuggagcugacccugaccaacaccagcaucaucaaccacaaguucugcaaccugagcgacgcccacaagaagaaccuguacgaccacgcccugaugagcaucaucagcaccuuccaccugagcauccccaacuucaaccaguacgaggccaugagcugcgacuucaacggcggcaagaucagcgugcaguacaaccugagccacagcuacgccggcgacgccgccaaccacugcggcaccguggccaacggcgugcugcagaccuucaugagaauggccuggggcggcagcuacaucgcccuggacagcggccacggcaagugggacugcaucaugaccagcuaccaguaccugaucauccagaacaccaccugggaggaccacugccaguucagcagacccagccccaucggcuaccugggccugcugagccagagaaccagagacaucuacaucagcagaagaagaagaggcaccuucaccuggacccugagcgacagcgagggcaaggacacccccggcggcuacugccugaccagauggaugcugaucgaggccgagcugaagugcuucggcaacaccgccguggccaagugcaacgagaagcacgacgaggaguucugcgacaugcugagacuguucgacuucugcaagcaggccauccagagacugaaggcccccgcccagaugagcauccagcugaucaacaaggccgugaacgcccugaucaacgaccagcugaucaugaagaaccaccugagagacaucaugggcauccccuacugcaacuacagcaaguacugcuaccugaaccacaccaccaccggcaagaccagccugcccaagugcugccuggugagcaacggcagcuaccugaacgagacccacuucagcgacgacaucgagcagcaggccgacaacaugaucaccgagaugcugcagaaggaguacauggagagacagggcaagaccccccugggccugguggaccuguucguguucagcaccagcuucuaccugaucagcaucuuccugcaccuggugaagauccccacccacagacacaucgugggcaagagcugccccaagccccacagacugaaccacaugggcaucugcagcugcggccuguacaagcagcccggcgugcccgugagauggaagagaugaggacuaguaauaaggaaacuguaugaaugucugugggcaggaagugaagagauccuucuguaaagguuuuuggaauuaugucugcugaauaauaaacuuuuuugaaauaauaaaucugguagaaaaaugagaucuaaaaaaaaaaaaaaaaaaaaaaaaaaaaaaaaaaaaaaaaaaaaaaaaaaaaaaaaaaaaaaaaaaaaaaaaaaaaaaaaaaaaaaaaaaaaaaaaaaaa

SEQ ID NO: 27619 - RNA, 1788 nt, Artificial Sequence
  mRNA product Design b-4 (A100) comprising derived and/or modified sequence from LASV(Mad39;Clade IV)__ANH09722__GPCmut4 (opt4)
aggagagucccgcagucggcguccagcggcucugcuuguucgugugugugucguugcaggccuuauucaagcuuaccaugggccagaucgugaccuucuuccaggaggugccccacgugaucgaggaggugaugaacaucgugcugaucgcccugagcauccuggccgugcugaagggccuguacaacguggccaccugcggccugaucggccuggugaccuuccugcugcugugcggcagaagcugcaccaccacccuguacaagggcguguacgagcugcaggcccuggagcugaacauggagacccugaacaugugcaugccccugagcugcaccaagaacaacagccaccacuacaucagagugggcaacgagaccggccuggagcugacccugaccaacaccagccugaucaaccacaaguucugcaaccugagcgacgcccacaagaagaaccuguacgaccacgcccugaugagcaucaucagcaccuuccaccugagcauccccaacuucaaccaguacgaggccaugagcugcgacuucaacgacggcaagaucagcgugcaguacaaccugagccacaccuacgccggcgacaccgccaaccacugcggcaccguggccaacggcgugcugcagaccuucaugagaauggccuggggcggcagcuacaucgcccuggacagcggcagaggcggcugggacugcaucaugaccagcuaccaguaccugaucauccagaacaccaccugggaggaccacugccaguucagcagacccagccccaucggcuaccugggccugcugagccagagaaccagagacaucuacaucagcagaagaagaagaggcaccuucaccuggacccugagcgacagcgagggcaaggacacccccggcggcuacugccugaccagauggaugcugaucgaggccgagcugaagugcuucggcaacaccgccguggccaagugcaacgagaagcacgacgaggaguucugcgacaugcugagacuguucgacuucugcaagcaggccauccagagacugaaggcccccgcccagaugagcauccagcugaucaacaaggccgugaacgcccugaucaacgaccagcugaucaugaagaaccaccugagagacaucaugggcauccccuacugcaacuacagcaaguacugcuaccugaaccacaccgugaccggcaagaccagccugcccaagugcugccuggugagcaacggcagcuaccugaacgagacccacuucagcgacgacaucgagcagcaggccgacaacaugaucaccgagaugcugcagaaggaguacauggagagacagggcaagaccccccugggccugguggaccuguucguguucagcaccagcuucuaccugaucagcaucuuccugcaccuggugaagauccccacccacagacacguggugggcaagcccugccccaagccccacagacugaaccacaugggcaucugcagcugcggcuucuacaagcagcccggcgugcccgugagauggaagagaugaggacuaguaauaaggaaacuguaugaaugucugugggcaggaagugaagagauccuucuguaaagguuuuuggaauuaugucugcugaauaauaaacuuuuuugaaauaauaaaucugguagaaaaaugagaucuaaaaaaaaaaaaaaaaaaaaaaaaaaaaaaaaaaaaaaaaaaaaaaaaaaaaaaaaaaaaaaaaaaaaaaaaaaaaaaaaaaaaaaaaaaaaaaaaaaaa

SEQ ID NO: 27620 - RNA, 1788 nt, Artificial Sequence
  mRNA product Design b-4 (A100) comprising derived and/or modified sequence from LASV(Z0947-SLE-2011;Clade IV)__AIT17840__GPCmut4 (opt4)
aggagagucccgcagucggcguccagcggcucugcuuguucgugugugugucguugcaggccuuauucaagcuuaccaugggccagaucgugaccuucuuccaggaggugccccacgugaucgaggaggugaugaacaucgugcugaucgcccugagcauccuggccgugcugaagggccuguacaacuucgccaccugcggccuggugggccuggugaccuuccugcugcugugcggcagaagcugcaccaucagccuguacaagggcguguacgagcugcagacccuggagcugaacauggagacccugaacaugugcaugccccugagcugcaccaagaacaacagccaccacuacaucauggugggcaacgagaccggccuggagcugacccugaccaacaccagcaucaucaaccacaaguucugcaaccugagcgacgcccacaagaagaaccuguacgaccacgcccugaugagcaucaucagcaccuuccaccugagcauccccaacuucaaccaguacgaggccaugagcugcgacuucaacggcggcaagaucagcgugcaguacaaccugagccacagcuacgccggcgacgccgccaaccacugcggcaccguggccaacggcgugcugcagaccuucaugagaauggccuggggcggcagcuacaucgcccuggacagcggcagagacagaugggacugcaucaugaccagcuaccaguaccugaucauccagaacaccaccugggaggaccacugccaguucagcagacccagccccaucggcuaccugggccugcugagccagagaaccagagacaucuacaucagcagaagaagaagaggcaccuucaccuggacccugagcgacagcgagggcaaggacacccccggcggcuacugccugaccagauggaugcugaucgaggccgagcugaagugcuucggcaacaccgccguggccaagugcaacgagaagcacgacgaggaguucugcgacaugcugagacuguucgacuucugcaagcaggccauccagagacugaaggcccccgcccagaugagcauccagcugaucaacaaggccgugaacgcccugaucaacgaccagcugaucaugaagaaccaccugagagacaucaugggcauccccuacugcaacuacagcaaguacugcuaccugaaccacaccaccaccggcaagaccagccugcccaagugcugccuggugagcaacggcagcuaccugaacgagacccacuucagcgacgacaucgagcagcaggccgacaacaugaucaccgagaugcugcagaaggaguacauggagagacagggcaagaccccccugggccugguggaccuguucguguucagcaccagcuucuaccugaucagcaucuuccugcaccuggugaagauccccacccacagacacaucgugggcaagcccugccccaagccccacagacugaaccacaugggcaucugcagcugcggccuguacaagcagcccggcgugcccgugaaguggaagagaugaggacuaguaauaaggaaacuguaugaaugucugugggcaggaagugaagagauccuucuguaaagguuuuuggaauuaugucugcugaauaauaaacuuuuuugaaauaauaaaucugguagaaaaaugagaucuaaaaaaaaaaaaaaaaaaaaaaaaaaaaaaaaaaaaaaaaaaaaaaaaaaaaaaaaaaaaaaaaaaaaaaaaaaaaaaaaaaaaaaaaaaaaaaaaaaaa

SEQ ID NO: 27621 - RNA, 1788 nt, Artificial Sequence
  mRNA product Design b-4 (A100) comprising derived and/or modified sequence from LASV(Josiah;Clade IV)__NP_694870__GPCmut4 (opt5)
aggagagucccgcagucggcguccagcggcucugcuuguucgugugugugucguugcaggccuuauucaagcuuaccaugggccagaucgugaccuucuuucaagaggucccccacguuauugaagaggugaugaacaucgugcugauugcccucagcguccuggcugugcuuaaggggcuguacaauuucgccacaugcggacucguuggccuggugacguuucuucugcucugugggagauccugcaccacaucucuguauaaaggagucuacgaacugcagacccucgagcugaacauggaaacacuuaauauguguaugccucugagcugcaccaagaacaauucccaucacuauaucauggugggcaacgagacagggcucgagcugacccuuacgaauaccucuauuaucaaccauaaauucuguaaucugagcgacgcgcacaagaaaaaccucuacgaucaugcucugauguccaucauuucuacauuucaccugagcaucccgaauuucaaccaguaugaagccauguccugcgacuuuaauggaggcaagauuagcguucaguacaaccucucucacuccuaugccggcgaugcugccaaucauugugggaccguggcuaacggaguccugcaaacauucaugcggauggccuggggcgggagcuacaucgcgcuugacucuggacgcggcaacugggauugcauuaugaccuccuaccaguaucugaucauucagaauacgacaugggaggaccacugucaguuuagcagacccucuccuaucggguaccucggacugcuuucccaacggacccgcgauaucuauauuagcagacggcgcagaggcacauucaccuggacccuguccgacucugaaggcaaggauacacccgggggauacugccucacgcgguggaugcugaucgaggccgagcugaaauguuuuggcaacaccgcuguggccaagugcaaugaaaaacaugacgaggaguucugcgauaugcuccgccuguuugacuucuguaagcaggcuauucagagacuuaaagccccugcgcagaugagcauccaacugauuaacaaggccgugaaugcucucaucaacgaucagcugaucaugaagaaucaccuucgggacauuauggggauccccuauugcaacuacuccaaauauuguuaccugaaucacacaaccacaggacgcaccagccucccuaagugcugucuggucucuaacggcuccuaccugaaugaaacgcauuucagcgacgauauugaacagcaagccgacaacaugaucacagagaugcuccagaaagaguauauggaaagacaggggaagaccccgcugggacuuguugaucuguuuguguucucuaccagcuuuuaccucauuuccaucuuccugcaccuggugaaaauccccacacaucggcacauugucggcaagucuugcccuaaaccccaucgccuuaaucacaugggcaucuguagcugcgggcucuauaagcagccuggagugcccguuaaguggaaaagaugaggacuaguaauaaggaaacuguaugaaugucugugggcaggaagugaagagauccuucuguaaagguuuuuggaauuaugucugcugaauaauaaacuuuuuugaaauaauaaaucugguagaaaaaugagaucuaaaaaaaaaaaaaaaaaaaaaaaaaaaaaaaaaaaaaaaaaaaaaaaaaaaaaaaaaaaaaaaaaaaaaaaaaaaaaaaaaaaaaaaaaaaaaaaaaaaa

SEQ ID NO: 27622 - RNA, 1785 nt, Artificial Sequence
  mRNA product Design b-4 (A100) comprising derived and/or modified sequence from LASV(LP;Clade I)__AAF86701__GPCmut4 (opt5)
aggagagucccgcagucggcguccagcggcucugcuuguucgugugugugucguugcaggccuuauucaagcuuaccaugggccagaucauuaccuucuuucaagaggugccccacgucaucgaagagguuaugaacauugugcugaucgcccucagccugcuugcuauucugaaggggcucuacaauaucgccacaugcggaaucauuggccugguggcguuccuuuuucugugugggaaauccugcucucucacgcugaagggaggcuaugaacugcagacccucgagcugaacauggaaacacuuaauauguguaugccucugagcugcaccaaaaacuccucucaucacuacaucagagucgggaaugagacaggacucgagcugacccuuacaaacaccagcauuaucaaucauaaguucuguaaccuguccgacgcucacaaaaagaaucucuaugaucaugcccugaugucuauuaucagcacguuucaccuguccauuccgaacuucaaucaguacgaagccaugagcugcgacuuuaacggcggcaagaucucugugcaguauaaucucucccacagcuacgcuggggaugccgcugagcauuguggaaccguugccaacggcgugcugcaaacauucaugcggauggcguggggagggcgcuauaucgcccuugacucuggcaaagggaauugggauugcauuaugaccuccuaccaguaccugaucauucagaacacaaccugggaagaccacugucaguuuagcagacccucuccuaucggauaucucggccugcuuucccaacggacgcgcgauauuuacaucagcagacggcgcagaggcacauucaccuggacacuguccgacucugaggggaacgagacccccggaggcuauugccucacccgguggaugcugaucgaagcugagcugaaguguuuugggaauacagccgucgcuaaaugcaacgaaaagcaugaugaggaguucugcgacaugcuccgccuguuugauuucuguaaacaggccauuagacggcuuaaggcgccugcccagaugagcauccagcugauuaauaaggcugugaacgcccucaucaaugaccaacugauuaugaaaaaccaccuucgcgauaucaugggaauccccuacugcaauuauuccaaguacuguuaucugaaccacacgagcucuggcagaaccucccucccuaaaugcugucugauuagcaaugggucuuaccugaacgaaacacaguucagcgacgacaucgagcagcaagcugauaauaugauuaccgaaaugcuccagaaggaguacaucgaacggcagggaaaaacaccgcugggccuuguugacauuuuuaucuucuccaccucuuuuuaucugauuagcaucuuccuccaucugaucaagauucccacgcaccgccauaucgugggcaaaccuugccccaagccucacagacugaaccauaugggggucuguuccugcggacuuuacaagcaccccggcgugccgacaaaauggaagcggugaggacuaguaauaaggaaacuguaugaaugucugugggcaggaagugaagagauccuucuguaaagguuuuuggaauuaugucugcugaauaauaaacuuuuuugaaauaauaaaucugguagaaaaaugagaucuaaaaaaaaaaaaaaaaaaaaaaaaaaaaaaaaaaaaaaaaaaaaaaaaaaaaaaaaaaaaaaaaaaaaaaaaaaaaaaaaaaaaaaaaaaaaaaaaaaaa

SEQ ID NO: 27623 - RNA, 1785 nt, Artificial Sequence
  mRNA product Design b-4 (A100) comprising derived and/or modified sequence from LASV(803213;Clade II)__AAF86703__GPCmut4 (opt5)
aggagagucccgcagucggcguccagcggcucugcuuguucgugugugugucguugcaggccuuauucaagcuuaccaugggccagaucauuaccuucuuucaagaggugccccacgucaucgaagagguuaugaacauugugcugaucgcccucagccugcuugcuauucugaaggggaucuacaauguggccacaugcggacucuucggccugaucuccuuucuucugcucugugggagaucuugcagcgucacguauaaaggaguguacgaacugcagacccuggagcucaacauggcgaaucugaacauguguaugccucuuuccugcacaaagaauaacucucaucacuauauuaugguuggcaaugaaaccgggcuggagcucacacugaccaacacaagcaucauuaaucauaaauucuguaaccuuuccgacgcucacaagaaaaaucuguacgaucaugcccucaugucuaucauuagcaccuuucaccuguccaucccgaacuucaaucaguaugaggccaugagcugcgacuuuaacggaggcaagauuucugugcaguacaaucugucccacagcuucgcugucgaugccgcuaaccauuguggcacgaucgccaacggggugcuccaaaccuuuaugcggauggcguggggaggcucuuauaucgcccuggacuccgggaagggaaauugggauugcauuaugacaagcuaccaguaccuuaucauucagaacaccacaugggaagaccacugucaguucucucgccccuccccuaucggcuaucuggggcuccugagccaaagaacccgggauauuuacaucucccgcagacggcgcggaacguuuacauggacccuuucugacagcgagggcaaugaagcucccggcggguauugccugacaagauggaugcucaucgaggccgagcugaaauguuucggaaacaccgcuguugccaagugcaaugaaaaacaugaugaggaauuuugcgacaugcugcgccucuucgauuucuguaagcaggcgauuaaacggcugaagaccccugcccagauguccauccagcuuauuaacaaggcugugaaugcccugaucaacgaccaacucauuaugaaaaaucaccugagagauaucaugggcauccccuacugcaacuauagccgguacuguuaucuuaaucacacagucacggggaagaccucucugccucgcugcugucucguguccaacggaagcuaccugaaugagacacauuuuucugacgacauugaacagcaggcugauaacaugaucaccgagaugcugcaaaaagaguacauggacagacagggcaagacaccgcucgggcugguggaucuuuucgucuuuagcaccuccuucuaucugauuucuaucuuucuccaccugguuaaaauucccacgcaucggcacaucgugggaaagccuugccccaaaccucaucgccugaaucacaugggcauuuguagcugcggccuuuacaagcaccccggggugccggucaaguggaaaagaugaggacuaguaauaaggaaacuguaugaaugucugugggcaggaagugaagagauccuucuguaaagguuuuuggaauuaugucugcugaauaauaaacuuuuuugaaauaauaaaucugguagaaaaaugagaucuaaaaaaaaaaaaaaaaaaaaaaaaaaaaaaaaaaaaaaaaaaaaaaaaaaaaaaaaaaaaaaaaaaaaaaaaaaaaaaaaaaaaaaaaaaaaaaaaaaaa

SEQ ID NO: 27624 - RNA, 1785 nt, Artificial Sequence
  mRNA product Design b-4 (A100) comprising derived and/or modified sequence from LASV(GA391;Clade III)__CAA36645__GPCmut4 (opt5)
aggagagucccgcagucggcguccagcggcucugcuuguucgugugugugucguugcaggccuuauucaagcuuaccaugggccagaucgugaccuucuuucaagaggucccccacguuauugaagaggugaugaacaucgugcugauugcccucagcauccuggcuauucuuaaggggcuguacaaugucgccacaugcggacucaucggccuggugacguuccuucugcucuccgggagaucuuguagccugaucuauaaaggaaccuacgaacugcagacacucgagcugaacauggaaacccuuaauaugugcaugccucuguccuguacaaagaacaauucucaucacuauauucggguuggcaacgagaccgggcucgagcugacacuuaccaauacgagcauccugaaccauaaauuuugcaaucucuccgacgcgcacaagcgcaaccuguacgaucauucucugaugagcauuaucuccaccuuccaccucagcauuccgaauuuuaaccaguaugaagcuaugucuugugacuucaauggaggcaaaaucacagugcaguacaaccugucccacagcuuugccgucgaugccgcuggccauugcgggacccuugccaauggagugcugcaaacauucaugagaauggcuuggggcgggucuuauauugcccucgacuccggacggggcaacugggauuguaucaugaccagcuaccaguaccugaucauucagaacacgacaugggacgaucacugccaguuuucucgccccuccccuaucggguaucuuggacugcucagccaaagaacccgggacauuuacaucucccgcagacggcgcggcacauucaccuggacccugucugauagcgagggcaaugaaacacccgggggauauugucugacgagauggaugcucauugaggcggagcugaagugcuuuggcaacaccgccguugcuaaguguaaugaaaaacaugacgaggaguucugcgauaugcuucggcuguuugacuucugcaagcaggccauccgcagacucaaaaccccugcucagauguccauccagcugauuaacaaggccgugaaugcgcuuaucaacgaucaacugauuaugaaaaaucaccuccgggacaucauggggauucccuacuguaacuauagccgcuacugcuaucugaaucacacaucuacaggaaagaccucccugccuagauguugccucaucagcaacggcucuuaccugaaugaaacgaaguucagcgacgauaucgaacagcaggccgacaacaugauuacagagaugcuucaaaaagaguacaucgaucggcaggggaagaccccgcugggacucgucgaccuguuuguguucuccaccucuuuuuaucugauuagcaucuuccuucaucucgugaaaauucccacacacagacauaucgucggcaagccuugucccaaaccucaccgccugaaucauaugggcauuugcuccugugggcuguacaagcagcccggaguuccggugcgguggaaaagaugaggacuaguaauaaggaaacuguaugaaugucugugggcaggaagugaagagauccuucuguaaagguuuuuggaauuaugucugcugaauaauaaacuuuuuugaaauaauaaaucugguagaaaaaugagaucuaaaaaaaaaaaaaaaaaaaaaaaaaaaaaaaaaaaaaaaaaaaaaaaaaaaaaaaaaaaaaaaaaaaaaaaaaaaaaaaaaaaaaaaaaaaaaaaaaaaa

SEQ ID NO: 27625 - RNA, 1788 nt, Artificial Sequence
  mRNA product Design b-4 (A100) comprising derived and/or modified sequence from LASV(AV;Clade V)__CCA30314__GPCmut4 (opt5)
aggagagucccgcagucggcguccagcggcucugcuuguucgugugugugucguugcaggccuuauucaagcuuaccaugggccagaucgugaccuucuuucaagaggucccccacguuauugaagaggugaugaacaucgugcugauugcccucagcauccuggcuguccuuaaggggcuguacaauauugccacaugcggacucaucggccugaucacguuccuucugcucugugggagauccugcucuagcaaccuguauaaaggaguguacgaacugcagucccucgaccugaauauggagacccuuaacauguguaugccucugucuugcacaaagaauaacagccaucacuauauucggguuggcaaugauaccgggcucgaacugacacuuaccaacacauccauccugaaucauaaauuuuguaaccucucugacgcgcacaagaaagaucuguacgaccaugcucugaugagcauuaucuccaccuuccaccucagcauuccgaauuuuaaccaguaugaggccaugucuugcgauuucaauggaggcaagaucuccgugcaguacaaccugagccacucuuaugccauugacgcugccaaucauuguggcacggucgcuaacgggauccuucaaaccuuuaugcgcauggccuggggaggcuccuacaucgcgcuggauagcgggagaggaaacugggacugcauuaugacaucuuaccaguaucucaucauucagaauaccacaugggagaaccacugucaguucucccggcccagcccuaucggcuaccuggggcuucugucccaacgcaccagagauauuuauaucucucggcgcagacggggaacguuuacauggacccucagcgacuccgaaggcaaugccacacccggcggguacugccugacccgcuggaugcugaucgaggcugaacucaaguguuucggaaacaccgccguggcuaaaugcaaugagaagcaugaugaggaauuuugcgacaugcugagacuuuucgauuuuuguaaacaggccauuagccggcugaagucuccugcgcagauguccauccagcucauuaacaaagccguuaaugcucugaucaacgaccaacuuauuaugaagaaucaucugcgcgacaucaugggcauccccuauugcaacuacagcaaguauuguuaccucaaucacacaauuacggggaaaaccucucugccuaagugcugucuggugagcaacggauccuaccucaaugagacacacuucucugaugacaucgaacagcaggccgauaacaugauuaccgagaugcugcaaaaagaauauauggagagacagggcaagacaccgcuugggcuggucgaccucuucguguuuagcaccuccuucuaccugaucagcauuuuucugcggcuugugaaaauccccacgcaccgccauauugucggaaagccuugccccaaaccucacagacucaaucauaugggcaucuguucuugcggccuguauaagcagcccgggguuccggugcgguggaagagaugaggacuaguaauaaggaaacuguaugaaugucugugggcaggaagugaagagauccuucuguaaagguuuuuggaauuaugucugcugaauaauaaacuuuuuugaaauaauaaaucugguagaaaaaugagaucuaaaaaaaaaaaaaaaaaaaaaaaaaaaaaaaaaaaaaaaaaaaaaaaaaaaaaaaaaaaaaaaaaaaaaaaaaaaaaaaaaaaaaaaaaaaaaaaaaaaa

SEQ ID NO: 27626 - RNA, 1785 nt, Artificial Sequence
  mRNA product Design b-4 (A100) comprising derived and/or modified sequence from LASV(Togo/2016/7082;Clade VI)__AMR44577__GPCmut4 (opt5)
aggagagucccgcagucggcguccagcggcucugcuuguucgugugugugucguugcaggccuuauucaagcuuaccaugggccagaucauuaccuucuuucaagaggugccccacgucaucgaagagguuaugaacauugugcugaucgcccucagccugcuugcuauucugaaggggguguacaaugucgccacaugcggaaucaucggccucgugacguuccuguuucuuugugggagauccugcucucugauuuauaaaggaagcuacgaacuccagacccuggagcugaacauggaaacacucaauauguguaugccucuguccugcaccaagaacucuagccaucacuauauccggguuggcaaugagacagggcuugagcugacccucacaaacaccuccauuaucaaucauaaauucuguaaccugucugacgcgcacaagcgcaaucuuuacgaucaugcucugaugagcauucucuccacguuucaccugagcaucccgaacuucaaucaguaugaagccaugucuugcgacuuuaacggaggcaaaauuuccgugcaguacaaucugagccacgccuaugcugucgaugccgcugagcauuguggcaccguggccaacgggguucuccaaacauucaugagaauggcguggggaggcucuuacaucgcccuggacuccgggcggggaaauugggauugcaucaugaccagcuaccaguaucuuauuauccagaacacaaccugggaagaccacugucaguuuucucgccccuccccuauuggcuaccuggggcuccugagccaaagaacgcgggauaucuauauuucccgcagacggcgcggaacauucaccuggacacuuucugacagcgagggcaacgagacccccggcggguacugccugaccagauggaugcucaucgaagcugagcugaaguguuuuggaaauacagccguggcuaagugcaacgaaaaacaugaugaggaguucugcgacaugcugcggcucuuugauuucuguaagcaggccauccagcgccugaaauccccugcgcagaugagcauucaacuuaucaauaaggccgucaacgcucugauuaaugaccagcucaucaugaaaaaccaccugagagauaugaugggcauucccuauugcaauuacucuaaguauuguuaccuuaaccacacguccagcgggcggaccucucugccuaagugcugucucgugagcaauggauccuaccugaacgaaacacauuucucugacgacaucgagcagcaagccgauaauaugaucaccgaaaugcugcagaaagaguauauugaccgccagggcaagacaccgcucgggcugguggaucuuuuugucuucagcaccuccuuuuaccugaucagcauuuuccuccaccugaucaaaauucccacgcauagacacaucguuggaaagccuugccccaaaccucaucggcugaaccacaugggcauuuguucuugcggccuuuauaagcagcccggggugccgacaagauggaaacgcugaggacuaguaauaaggaaacuguaugaaugucugugggcaggaagugaagagauccuucuguaaagguuuuuggaauuaugucugcugaauaauaaacuuuuuugaaauaauaaaucugguagaaaaaugagaucuaaaaaaaaaaaaaaaaaaaaaaaaaaaaaaaaaaaaaaaaaaaaaaaaaaaaaaaaaaaaaaaaaaaaaaaaaaaaaaaaaaaaaaaaaaaaaaaaaaaa

SEQ ID NO: 27627 - RNA, 1785 nt, Artificial Sequence
  mRNA product Design b-4 (A100) comprising derived and/or modified sequence from LASV(KAK-428;Clade n.d. (VII))__ANH09740__GPCmut4 (opt5)
aggagagucccgcagucggcguccagcggcucugcuuguucgugugugugucguugcaggccuuauucaagcuuaccaugggccagaucgugaccuucuuucaagaggucccccacguuauugaagaggugaugaacaucgugcugauugcccucagccugcuugcuauccugaaggggcucuacaauuucgccacaugcggagucauuggccugaucacguuucuucugcucugugggagauccugcucugcgaccuauaaaggacaguacgaacugcagacacuggagcucaacauggaaagccugaauauguguaugccucuuuccugcaccaagaacaauucucaucacuauauccgggcuggcaacaauacagggcuggagcucacccugacaaacaccagcauuaucucccauaaauucuguaaucuuucugacgcccacaagaaaaaccuguacgaucauacgcucaugagcauuaucaccacauuucaccuguccauuccgaauuucaaccaguaugaggccaugagcugcgacuuuaauggaggcaagaucucuauucaauacaaccugucccacagcuaugcuggcgaugccgcucagcauugugggaccguggccaauggaguucuccagacauucaugcgcauggcguggggcgggucuuaccuggcccuugacuccggaagacggggcugggauugcaucaucagcucuuaccaguaucugauuauccaaaacaccacgugggacgaucacugucaguuuucccgccccagcccuauuggguaccucggauucgugucccagaagacaagagacaucuauauuucucggcgcagacggggcaccuuuacauggacccugagcgauuccgaaggccaugacaugcccgggggauacugccuuacccgcuggaugcugaucgaggcugaucucaaauguuucggcaacacagccgucgcuaagugcaaugaaaaacacgacgaggaguuuugcgauauguggagacuguucgacuucuguaagcaggccauccaacggcugaaagcgccugcccagaugaacauucagcucaucaauaaggcugugaacgcccugauuaaugaccaacuuaugaugaagaaccaucugcgcgauaucauggggauucccuauugcaauuacagcaaauuuuguuaucucaacaauacgaccacaggaagaaccucucugccucggugcugucuuaucuccaacggcagcuaccugaaugaaacacacuucucugacgauaucgagcagcaggcugacaacaugauuaccgaaaugcuccagaaggaguacauggaucgccaagggaaaacgccgcugggacugguugaccucuuuguguucagcacauccuuuuaucugaucaccauuuuccuucaccuggucaagauccccacccauagacacauugugggcaaaccuugccccaagccucaucggcucaaucacaugggcaucuguucuugcgggcuguacaaacagcccggagugccggucagauggaagcgcugaggacuaguaauaaggaaacuguaugaaugucugugggcaggaagugaagagauccuucuguaaagguuuuuggaauuaugucugcugaauaauaaacuuuuuugaaauaauaaaucugguagaaaaaugagaucuaaaaaaaaaaaaaaaaaaaaaaaaaaaaaaaaaaaaaaaaaaaaaaaaaaaaaaaaaaaaaaaaaaaaaaaaaaaaaaaaaaaaaaaaaaaaaaaaaaaa

SEQ ID NO: 27628 - RNA, 1785 nt, Artificial Sequence; identical to SEQ ID NO: 27622
  mRNA product Design b-4 (A100) comprising derived and/or modified sequence from LASV(Pinneo-NIG-1969;Clade I)__AIT17836__GPCmut4 (opt5)

SEQ ID NO: 27629 - RNA, 1785 nt, Artificial Sequence
  mRNA product Design b-4 (A100) comprising derived and/or modified sequence from LASV(ISTH0009-NIG-2011;Clade II)__AIT17404__GPCmut4 (opt5)
aggagagucccgcagucggcguccagcggcucugcuuguucgugugugugucguugcaggccuuauucaagcuuaccaugggccagaucauuaccuucuuucaagaggugccccacgucaucgaagagguuaugaacauugugcugaucgcccucagccugcuugcuauucugaaggggaucuacaauguggccacaugcggacucuucggccuggucuccuuucuucugcucugugggagaucuugcagcacgaccuauaaaggaguguacgaacugcagacacuggagcucgacauggcgucccugaacauguguaugccucuuucuugcaccaagaauaacagccaucacuauaucaugguuggcaaugaaacagggcuggagcucacccugacaaacaccuccauuaucaaucauaaauucuguaaccuuucugaugcucacaagaaaaaucuguacgaccaugcccucaugagcauuaucuccacguuucaccugagcauuccgaacuucaaucaguaugaggccaugucuugcgauuuuaacggaggcaagaucuccgugcaguacaaucugagccacgcuuaugccgucgacgcugccaaccauuguggcaccauugcgaauggggugcuccaaacauucaugcggauggccuggggaggcucuuacaucgcucuggauuccgggaagggaagcugggacugcaucaugaccucuuaccaguaucuuauuauccagaacacaaccugggaagaucacugucaguuuucccgccccagcccuauuggcuaccuggggcuccugucccaaagaacgcgggacaucuauauuucucgcagacggcgcggaacauucaccuggacacuuagcgauuccgagggcaacgaaacccccggcggguacugccugaccagauggaugcucaucgaggccgagcugaaauguuuuggaaauacagcuguugccaagugcaacgaaaaacaugacgaggaguucugcgauaugcugcggcucuuugacuucuguaagcaggcgauccgcagacugaaaacgccugcccagaugagcauucagcuuaucaauaaggcugugaacgcccugauuaaugaucaacucaucaugaagaaccaucugcgggacauuaugggcauccccuauugcaauuacucuaaauauuguuaccuuaaccacaccgucacagggaagaccucccugccucgcugcugucucgugagcaauggaucuuaccugaacgaaacacacuucagcgacgauaucgaacagcaggcugacaauaugauuaccgagcugcuccaaaaagaguauauggauagacagggcaagacgccgcuggggcuuguggaccuguuugucuucuccacaucuuuuuaccucaucagcauuuuccugcaccugaucaaaauucccacccaucggcacaucaccggaaagccuugccccaaaccucaucgccuuaaccacaugggcauuuguuccugcggccucuauaagcaccccgggguuccggugaaguggaaaagaugaggacuaguaauaaggaaacuguaugaaugucugugggcaggaagugaagagauccuucuguaaagguuuuuggaauuaugucugcugaauaauaaacuuuuuugaaauaauaaaucugguagaaaaaugagaucuaaaaaaaaaaaaaaaaaaaaaaaaaaaaaaaaaaaaaaaaaaaaaaaaaaaaaaaaaaaaaaaaaaaaaaaaaaaaaaaaaaaaaaaaaaaaaaaaaaaa

SEQ ID NO: 27630 - RNA, 1785 nt, Artificial Sequence
  mRNA product Design b-4 (A100) comprising derived and/or modified sequence from LASV(ISTH2010-NIG-2012;Clade II)__AIT17482__GPCmut4 (opt5)
aggagagucccgcagucggcguccagcggcucugcuuguucgugugugugucguugcaggccuuauucaagcuuaccaugggccagaucauuaccuucuuucaagaggugccccacgucaucgaagagguuaugaacauugugcugaucgcccucagccugcuugcuauucugaaggggaucuacaauguggccacaugcggacucuucggccuggucuccuuucuucugcucugugggagaucuugcagcacgaccuauaaaggaguguacgaacugcagacacuggagcucgacauggcgucccugaacauguguaugccucuuucuugcaccaagaauaacagccaucacuauaucaugguuggcaaugaaacagggcuggagcucacccugacaaacaccuccauuaucaaucauaaauucuguaaccuuucugaugcucacaagaaaaaucuguacgaccaugcccucaugagcauuaucuccacguuucaccugagcauuccgaacuucaaucaguaugaggccaugucuugcgauuuuaacggaggcaagaucuccgugcaguacaaucugagccacgcuuaugccgucgacgcugccaaccauuguggcaccauugcgaauggggugcuccaaacauucaugcggauggccuggggaggcucuuacaucgcucuggauuccgggaagggaagcugggacugcaucaugaccucuuaccaguaucuuauuauccagaacauuacaugggaagaucacugucaguuuucccgccccagcccuaucggcuaccuggggcuccugucccaaagaacccgggacauuuauaucucucgcagacggcgcggaacguucacauggacccuuagcgauuccgagggcaacgaaacacccggcggguacugccugaccagauggaugcucaucgaggccgagcugaaauguuuuggaaauaccgcuguugccaagugcaacgaaaaacaugacgaggaguucugcgauaugcugcggcucuuugacuucuguaagcaggcgauucgcagacugaaaacgccugcccagaugagcauccagcuuauuaauaaggcugugaacgcccugaucaaugaucaacucauuaugaagaaccaucugcgggacaucaugggcauccccuauugcaauuacucuaaauauuguuaccuuaaccacacagucaccgggaagacaucccugccucgcugcugucucgugagcaauggaucuuaccugaacgaaacccacuucagcgacgauauugaacagcaggcugacaauaugaucacagagcugcuccaaaaagaguauauugauagacagggcaagaccccgcuggggcuuguggaccuguuugucuucuccacgucuuuuuaccucaucagcauuuuccugcaccugguuaaaauccccacacaucggcacguggugggaaagccuugccccaaaccucaucgccuuaaccacaugggcauuuguuccugcggccucuauaagcaccccggggucccggugaaguggaaaagaugaggacuaguaauaaggaaacuguaugaaugucugugggcaggaagugaagagauccuucuguaaagguuuuuggaauuaugucugcugaauaauaaacuuuuuugaaauaauaaaucugguagaaaaaugagaucuaaaaaaaaaaaaaaaaaaaaaaaaaaaaaaaaaaaaaaaaaaaaaaaaaaaaaaaaaaaaaaaaaaaaaaaaaaaaaaaaaaaaaaaaaaaaaaaaaaaa

SEQ ID NO: 27631 - RNA, 1785 nt, Artificial Sequence
  mRNA product Design b-4 (A100) comprising derived and/or modified sequence from LASV(Lassa virus/H.sapiens-wt/NGA/2015/ISTH_0543;Clade II)__AVO03639__GPCmut4 (opt5)
aggagagucccgcagucggcguccagcggcucugcuuguucgugugugugucguugcaggccuuauucaagcuuaccaugggccagaucauuaccuucuuucaagaggugccccacgucaucgaagagguuaugaacauugugcugaucgcccucagccugcuugcuauucugaaggggaucuacaauguggccacaugcggacucuucggccuggucuccuuucuucugcucugugggagaucuugcagcacgaccuauaaaggaguguacgaacugcagacacuggagcucgacauggcgaaccugaauauguguaugccucuuuccugcaccaagaacaauucucaucacuauaucaugguuggcaacgaaacagggcuggagcucacccugacaaauaccagcauuaucaaccauaaauucuguaaucuuuccgaugcucacaagaaaaaccuguacgaccaugcccucaugucuauuaucagcacguuucaccuguccauuccgaauuucaaccaguaugaggccaugagcugcgauuuuaauggaggcaagaucucugugcaguacaaccugucccacaccuaugcugucgacgccgcuaaucauuguggcacaauugccaacggggugcuccaaaccuucaugcggauggcguggggaggcagcuacaucgcccuggauucugggaagggauccugggacugcaucaugacaagcuaccaguaucuuguuauucagaacaccacgugggaagaucacugucaguuuucucgccccuccccuaucggcuaccuggggcuccugagccaaagaacacgggacauuuauaucucccgcagacggcgcggaaccuucacauggacccuuucugauagcgagggcaaugaaacccccggcggguacugccugacaagauggaugcucauugaggcugagcugaaauguuuuggaaacacggccguggcuaagugcaaugaaaaacaugacgaggaguucugcgauaugcugcggcucuuugacuucuguaagcaggccauccgcagacugaaaaccccugcgcagauguccauccagcuuauuaacaaggccgucaaugcucugaucaacgaucaacucauuaugaagaaucaucugcgggacaucaugggcauucccuauugcaacuacagcaaauauuguuaccuuaaucacacagugaccgggaagacaucucugccucgcugcugucucguguccaacggaagcuaccugaaugaaacccacuucucugacgauaucgaacagcaggccgacaacaugaucacggagcugcuccaaaaagaguauauugauagacagggcaagacaccgcuggggcuugucgaccuguuuguuuucagcaccuccuuuuaccucaucucuauuuuccugcaccuggugaaaauccccacccaucggcacauuacaggaaagccuugccccaaaccucaucgccuuaaucacaugggcaucuguagcugcggccucuauaagcaccccggggugccggucaaguggaaaagaugaggacuaguaauaaggaaacuguaugaaugucugugggcaggaagugaagagauccuucuguaaagguuuuuggaauuaugucugcugaauaauaaacuuuuuugaaauaauaaaucugguagaaaaaugagaucuaaaaaaaaaaaaaaaaaaaaaaaaaaaaaaaaaaaaaaaaaaaaaaaaaaaaaaaaaaaaaaaaaaaaaaaaaaaaaaaaaaaaaaaaaaaaaaaaaaaa

SEQ ID NO: 27632 - RNA, 1785 nt, Artificial Sequence
  mRNA product Design b-4 (A100) comprising derived and/or modified sequence from LASV(Lassa virus/H.sapiens-wt/NGA/2016/ISTH_0009;Clade II)__AVO03571__GPCmut4 (opt5)
aggagagucccgcagucggcguccagcggcucugcuuguucgugugugugucguugcaggccuuauucaagcuuaccaugggccagaucauuaccuucuuucaagaggugccccacgucaucgaagagguuaugaacauugugcugaucgcccucagccugcuugcuauucugaaggggaucuacaauguggccacaugcggacuccugggccuugucuccuuccugcuccugugugggagaucuugcagcacgaccuauaaaggaguguacgaacugcagacacucgagcuggacauggcgucccuuaacauguguaugccucugucuugcaccaagaauaacagccaucacuauaucaugguuggcaaugaaacagggcucgagcugacccuuacaaacaccuccauuaucaaucauaaauuuuguaaccugucugaugcucacaagaaaaaucucuacgaccaugcccugaugagcauuaucuccacguuccaccugagcauuccgaacuuuaaucaguaugaggccaugucuugcgauuucaacggaggccggaucuccgugcaguacaaucucagccacucuuaugcugucgacgccgcuaaccauuguggcaccauugccaauggggugcugcaaacauuuaugcgcauggcguggggaggcuccuacaucgcccuugauagcgggaagggaucuugggacugcaucaugaccuccuaccaguaucugauuauccagaacacaaccugggaagaucacugucaguucagcagacccuccccuauuggcuaccucgggcugcuuucucaacggacgcgcgacaucuauauuagcagacggcgcagaggaacauuuaccuggacacuguccgauagcgagggcaacgaaacccccggcggguacugccucacccgguggaugcugaucgaggcugagcugaaguguuucggaaauacagccguugcuaaaugcaacgaaaagcaugacgaggaauuuugcgauaugcuccgccuguucgacuuuuguaaacaggccaucagacggcuuaagacgccugcgcagaugucuauucagcugaucaauaaagccgugaacgcucucauuaaugaucaacugaucaugaagaaccaccuucgcgacauuaugggcauccccuauugcaauuacuccaaguauuguuaccugaaccacaccgucacagggaaaaccagccucccuagaugcugucuggugucuaauggaagcuaccugaacgagacacauuucuccgacgauaucgaacagcaggccgacaauaugauuaccgagcuccugcaaaaggaguauaucgaucggcagggcaaaacgccgcuugggcugguggaccucuucgucuuuucuaccagcuucuaccugauuuccaucuuucugcaccuuguuaagauucccacacaucgccacaucaccggaaaaccuugccccaagccucauagacucaaccacaugggcauuuguagcugcggccuguauaaucaccccggggugccggugaaauggaagcggugaggacuaguaauaaggaaacuguaugaaugucugugggcaggaagugaagagauccuucuguaaagguuuuuggaauuaugucugcugaauaauaaacuuuuuugaaauaauaaaucugguagaaaaaugagaucuaaaaaaaaaaaaaaaaaaaaaaaaaaaaaaaaaaaaaaaaaaaaaaaaaaaaaaaaaaaaaaaaaaaaaaaaaaaaaaaaaaaaaaaaaaaaaaaaaaaa

SEQ ID NO: 27633 - RNA, 1785 nt, Artificial Sequence
  mRNA product Design b-4 (A100) comprising derived and/or modified sequence from LASV(Lassa virus/H.sapiens-wt/NGA/2016/ISTH_0017;Clade II)__AVO03567__GPCmut4 (opt5)
aggagagucccgcagucggcguccagcggcucugcuuguucgugugugugucguugcaggccuuauucaagcuuaccaugggccagaucauuaccuucuuucaagaggugccccacgucaucgaagagguuaugaacauugugcugaucgcccucagccugcuugcuauucugaaggggaucuacaauguggccacaugcggacucuucggccuggucuccuuucuucugcucugugggagaucuugcagcacgaccuauaaaggaguguacgaacugcagacacuggagcucgacauggcgucccugaacauguguaugccucuuucuugcaccaagaauaacagccaucacuauaucaugguuggcaaugaaacagggcuggagcucacccugacaaacaccuccauuaucaaucauaaauucuguaaccuuucugaugcucacaagaaaaaucuguacgaccaugcccucaugagcauuaucuccacguuucaccugagcauuccgaacuucaaucaguaugaggccaugucuugcgauuuuaacggaggcaagaucuccgugcaguacaaucugagccacaccuaugcuauugacgccgcuaaccauuguggcacaaucgccaaugggguccuccaaaccuucaugcggauggcguggggaggcucuuacaucgcccuggauuccgggaagggaagcugggacugcauuaugacaucuuaccaguaucuuaucauucagaacaccacgugggaagaucacugucaguuuucccgccccagcccuaucggcuaccuggggcuccugucccaaagaacacgggacauuuauaucucucgcagacggcgcggaaccuucacauggacccuuagcgauuccgagggcaacgaaacccccggcggguacugccugacaagauggaugcucaucgaggcugagcugaaauguuuuggaaauacggccguggcuaagugcaacgaaaaacaugacgaggaguucugcgauaugcugcggcucuuugacuucuguaagcaggccauucgcagacugaaaaccccugcgcagaugagcauccagcuuauuaauaaggccguuaacgcucugaucaaugaucaacucauuaugaagaaccaucugcgggacaucaugggcauccccuauugcaauuacucuaaauauuguuaccuuaaccacacagugaccgggaagacaucccugccucgcugcugucucgucagcaauggaucuuaccugaacgaaacccacuucagcgacgauauugaacagcaggccgacaauaugaucacggagcugcuccaaaaagaguauauggauagacagggcaagacaccgcuggggcuuguggaccuguuuguguucuccaccucuuuuuaccucauuagcaucuuccugcaccugguccggauucccacccaucgccacguuaucggaaaaccuugccccaagccucauagacuuaaccacaugggcauuuguuccugcggccucuauaaacaccccggggugccggugaaguggaagcggugaggacuaguaauaaggaaacuguaugaaugucugugggcaggaagugaagagauccuucuguaaagguuuuuggaauuaugucugcugaauaauaaacuuuuuugaaauaauaaaucugguagaaaaaugagaucuaaaaaaaaaaaaaaaaaaaaaaaaaaaaaaaaaaaaaaaaaaaaaaaaaaaaaaaaaaaaaaaaaaaaaaaaaaaaaaaaaaaaaaaaaaaaaaaaaaaa

SEQ ID NO: 27634 - RNA, 1785 nt, Artificial Sequence
  mRNA product Design b-4 (A100) comprising derived and/or modified sequence from LASV(Lassa virus/H.sapiens-wt/NGA/2018/ISTH_0959;Clade II)__AVV65099__GPCmut4 (opt5)
aggagagucccgcagucggcguccagcggcucugcuuguucgugugugugucguugcaggccuuauucaagcuuaccaugggccagaucauuaccuucuuucaagaggugccccacgucaucgaagagguuaugaacauugugcugaucgcccucagccugcuugcuauucugaaggggaucuacaauguggucacaugcggacucuucggccugguguccuuucuucugcucugugggagaucuugcagcacgaccuauaaaggaguuuacgaacugcagacacuggagcucgacauggccucccugaacauguguaugccucuuucuugcaccaagaauaacagccaucacuauaucauggugggcaaugaaacagggcuggagcucacccugacaaacaccuccauuaucaaucauaaauucuguaaccuuucugaugcgcacaagaaaaaucuguacgaccaugcucucaugagcauuaucuccacguuucaccugagcauuccgaacuucaaucaguaugaggccaugucuugcgauuuuaacggaggcaagaucuccguccaguacaaucugagccacgccuaugcuauugacgccgcuaaccauuguggcaccaucgccaauggggugcuccaaacauucaugcggauggcguggggaggcucuuacaucgcccuggauuccgggaagggaagcugggacugcauuaugaccucuuaccaguaucuuaucauucagaacacaaccugggaagaucacugucaguuuucccgccccagcccuaucggcuaccuggggcuccugucccaaagaacgcgggacauuuauaucucucgcagacggcgcggaacauucaccuggacacuuagcgauuccgagggcaacgaaacccccggcggguacugccugaccagauggaugcucaucgaggcugagcugaaauguuuuggaaauacagccguugcuaagugcaacgaaaaacaugacgaggaguucugcgauaugcugcggcucuuugacuucuguaagcaggccauucgcagacugaaaacgccugcgcagaugagcauccagcuuauuaauaaggccgugaacgcucugaucaaugaucaacucauuaugaagaaccaucugcgggacaucaugggcauccccuauugcaauuacucuaaauauuguuaccuuaaccacaccgucacagggaagaccucccugccucgcugcugucucgugagcaauggaucuuaccugaacgaaacacacuucagcgacgauauugaacagcaggccgacaauaugaucaccgagcugcuccaaaaagaguauauugauagacagggcaagacgccgcuggggcuuguggaccuguuugucuucuccacaucuuuuuaccucaucagcauuuuccugcaccugguuaaaauccccacccaucggcacgugauuggaaagccuugccccaaaccucaucgccuuaaccacaugggcaucuguuccugcggccucuauaagcaccccggggugccggucaaguggaaaagaugaggacuaguaauaaggaaacuguaugaaugucugugggcaggaagugaagagauccuucuguaaagguuuuuggaauuaugucugcugaauaauaaacuuuuuugaaauaauaaaucugguagaaaaaugagaucuaaaaaaaaaaaaaaaaaaaaaaaaaaaaaaaaaaaaaaaaaaaaaaaaaaaaaaaaaaaaaaaaaaaaaaaaaaaaaaaaaaaaaaaaaaaaaaaaaaaa

SEQ ID NO: 27635 - RNA, 1785 nt, Artificial Sequence
  mRNA product Design b-4 (A100) comprising derived and/or modified sequence from LASV(LASV003-NIG-2008;Clade II)__AIT17580__GPCmut4 (opt5)
aggagagucccgcagucggcguccagcggcucugcuuguucgugugugugucguugcaggccuuauucaagcuuaccaugggccagaucauuaccuucuuucaagaggugccccacgucaucgaagagguuaugaacauugugcugaucgcccucagccugcuugcuauucugaaggggaucuacaauguggccacaugcggacucuucggccuggucuccuuucuucugcucugugggagaucuugcagcacgaccuauaaaggaguguacgaacugcagacacuggagcucgacauggcgucccugaacauguguaugccucuuucuugcaccaagaauaacagccaucacuauaucaugguuggcaaugaaacagggcuggagcucacccugacaaacaccuccauuaucaaucauaaauucuguaaccuuucugaugcucacaagaaaaaucuguacgaccaugcccucaugagcauuaucuccacguuucaccugagcauuccgaacuucaaucaguaugaggccaugucuugcgauuuuaacggaggcaagaucuccgugcaguacaaucugagccacaccuaugcugucgacgccgcuaaccauuguggcacaauugccaauggggugcuccaaaccuucaugcggauggcguggggaggcucuuacaucgcccuggauuccgggaagggaagcugggacugcaucaugacaucuuaccaguaucuuauuauccagaacaccacgugggaagaucacugucaguuuucccgccccagcccuauuggcuaccuggggcuccugucccaaagaacacgggacaucuauauuucucgcagacggcgcggaaccuucacauggacccuuagcgauuccgagagcaacgaaacccccggcggcuacugccugacaagauggaugcucaucgaggcugagcugaaauguuuugggaauacggccguugcuaagugcaacgaaaaacaugacgaggaguucugcgauaugcugcggcucuuugacuucuguaagcaggccauccgcagacugaaagcgccugcccagaugucuauucagcuuaucaauaaggcugugaacgcccugauuaaugaucaacucaucaugaagaaccaucugcgggacauuaugggaauccccuauugcaauuacuccaaauauuguuaccuuaaccacaccgucacaggccgcaccagccugccuagaugcugucucgugucuaaugggagcuaccugaacgaaacacacuucuccgacgauaucgaacagcaggcugacaauaugauuaccgagcugcuccaaaaggaguauauggaucggcagggaaaaacgccgcugggccuuguggaccuguuugucuucucuaccagcuuuuaccucaucuccauuuuccugcaccugguuaagauccccacacaucgccacgugauugggaaaccuugccccaagccucauagacuuaaccacaugggaaucuguagcugcggccucuauaaacaccccggcgugccggucaaguggaagcggugaggacuaguaauaaggaaacuguaugaaugucugugggcaggaagugaagagauccuucuguaaagguuuuuggaauuaugucugcugaauaauaaacuuuuuugaaauaauaaaucugguagaaaaaugagaucuaaaaaaaaaaaaaaaaaaaaaaaaaaaaaaaaaaaaaaaaaaaaaaaaaaaaaaaaaaaaaaaaaaaaaaaaaaaaaaaaaaaaaaaaaaaaaaaaaaaa

SEQ ID NO: 27636 - RNA, 1785 nt, Artificial Sequence
  mRNA product Design b-4 (A100) comprising derived and/or modified sequence from LASV(LASV035-NIG-2009;Clade II)__AIT17588__GPCmut4 (opt5)
aggagagucccgcagucggcguccagcggcucugcuuguucgugugugugucguugcaggccuuauucaagcuuaccaugggccagaucauuaccuucuuucaagaggugccccacgucaucgaagagguuaugaacauugugcugaucgcccucagccugcuugcuauucugaaggggaucuacaauguggccacaugcggacucuucggccuggucuccuuucuucugcucugugggagaucuugcagcacgaccuauaaaggaguguacgaacugcagacacuggagcucgacauggcgucccugaacauguguaugccucuuucuugcaccaagaauaacagccaucacuauaucaugguuggcaaugaaacagggcuggagcucacccugacaaacaccuccauuaucaaucauaaauucuguaaccuuucugaugcucacaagaaaaaucuguacgaccaugcccucaugagcauuaucuccacguuucaccugagcauuccgaacuucaaucaguaugaggccaugucuugcgauuuuaacggaggcaagaucuccgugcaguacaaucugagccacgcuuaugccgucgacgcugccaaccauuguggcaccauugcgaauggggugcuccaaacauucaugcggauggccuggggaggcucuuacaucgcucuggauuccgggaagggaagcugggacugcaucaugaccucuuaccaguaucuuauuauccagaacacaaccugggaagaucacugucaguuuucccgccccagcccuauuggcuaccuggggcuccugucccaaagaacgcgggacaucuauauuucucgcagacggcgcggaacauucaccuggacacuuagcgauuccgagggcaacgaaacccccggcggguacugccugaccagauggaugcucaucgaggccgagcugaaauguuuuggaaauacagcuguugccaagugcaacgaaaaacaugacgaggaguucugcgauaugcugcggcucuuugacuucuguaagcaggcgauccgcagacugaaagccccugcucagaugagcauucagcuuaucaauaaggccgugaacgcucugauuaaugaucaacucaucaugaagaaccaucugcgggacauuaugggcauccccuauugcaauuacucuaaauauuguuaccuuaaccacacggucaccgggaagacaucccugccucgcugcugucucgugagcaauggaucuuaccugaacgaaacccacuucagcgacgauaucgaacagcaggccgacaauaugauuacagagcugcuccaaaaagaguauaucgauagacagggcaagaccccgcuggggcuuguggaccuguuugucuucuccacgucuuuuuaccucauuagcaucuuccugcaccugguuaaaauucccacacaucggcacgugaucggaaagccuugccccaaaccucaucgccuuaaccacaugggcauuuguuccugcggccucuauaagcaccccggggugccggucaaguggaaaagaugaggacuaguaauaaggaaacuguaugaaugucugugggcaggaagugaagagauccuucuguaaagguuuuuggaauuaugucugcugaauaauaaacuuuuuugaaauaauaaaucugguagaaaaaugagaucuaaaaaaaaaaaaaaaaaaaaaaaaaaaaaaaaaaaaaaaaaaaaaaaaaaaaaaaaaaaaaaaaaaaaaaaaaaaaaaaaaaaaaaaaaaaaaaaaaaaa

SEQ ID NO: 27637 - RNA, 1785 nt, Artificial Sequence
  mRNA product Design b-4 (A100) comprising derived and/or modified sequence from LASV(LASV1000-NIG-2009;Clade II)__AIT17782__GPCmut4 (opt5)
aggagagucccgcagucggcguccagcggcucugcuuguucgugugugugucguugcaggccuuauucaagcuuaccaugggccagaucauuaccuucuuucaagaggugccccacgucaucgaagagguuaugaacauugugcugaucgcccucagccugcuugcuauucugaaggggaucuacaauguggccacaugcggacucuucggccuggucuccuuucuucugcucugugggagaucuugcagcacgaccuauaaaggaguguacgaacugcagacacuggagcucgacauggcgucccugaacauguguaugccucuuucuugcaccaagaauaacagccaucacuauaucaugguuggcaaugaaacagggcuggagcucacccugacaaacaccuccauuaucaaucauaaauucuguaaccuuucugaugcucacaagaaaaaucuguacgaccaugcccucaugagcauuaucuccacguuucaccugagcauuccgaacuucaaucaguaugaggccaugucuugcgauuuuaacggaggcaagaucuccgugcaguacaaucugagccacaccuaugcugucgacgccgcuaaccauuguggcacaauugccaauggggugcuccaaaccuucaugcggauggcguggggaggcucuuacaucgcccuggauuccgggaagggaagcugggacugcaucaugacaucuuaccaguaucuuauuauccagaacaccacgugggaagaucacugucaguuuucccgccccagcccuauuggcuaccuggggcuccugucccaaagaacacgggacaucuauauuucucgcagacggcgcggaaccuucacauggacccuuagcgauuccgagggcaacgaaacccccggcggguacugccugacaagauggaugcucaucgaggcugagcugaaauguuuuggaaauacggccguugcuaagugcaacgaaaaacaugacgaggaguucugcgauaugcugcggcucuuugacuucuguaagcaggccaucaaacgccugaagaccccugcgcagaugagcauucagcuuaucaauaaggccgugaacgcucugauuaaugaucaacucaucaugaaaaaccaccugagagacauuaugggcauccccuauugcaauuacucuaaguauuguuaccuuaaccacacagucaccgggaaaacaucccugccucggugcugucucgugagcaauggaucuuaccugaacgaaacccauuucagcgacgauaucgaacagcaggccgacaauaugauuacggagcugcuccaaaaggaguauaucgaucgccagggcaaaacaccgcuggggcuuguggaccuguuugucuucuccaccucuuuuuaccucauuagcaucuuccugcaccugguuaagauucccacccauagacacguggugggaaaaccuugccccaagccucaucggcuuaaccacaugggcaucuguuccugcggccucuauaagcaccccggggucccggugaaauggaagcgcugaggacuaguaauaaggaaacuguaugaaugucugugggcaggaagugaagagauccuucuguaaagguuuuuggaauuaugucugcugaauaauaaacuuuuuugaaauaauaaaucugguagaaaaaugagaucuaaaaaaaaaaaaaaaaaaaaaaaaaaaaaaaaaaaaaaaaaaaaaaaaaaaaaaaaaaaaaaaaaaaaaaaaaaaaaaaaaaaaaaaaaaaaaaaaaaaa

SEQ ID NO: 27638 - RNA, 1785 nt, Artificial Sequence
  mRNA product Design b-4 (A100) comprising derived and/or modified sequence from LASV(LASV221-NIG-2010;Clade II)__AIT17624__GPCmut4 (opt5)
aggagagucccgcagucggcguccagcggcucugcuuguucgugugugugucguugcaggccuuauucaagcuuaccaugggccagaucauuaccuucuuucaagaggugccccacgucaucgaagagguuaugaacauugugcugaucgcccucagccugcuugcuauucugaaggggaucuacaauguggccacaugcggacucuucggccuggucuccuuucuucugcucugugggagaucuugcagcacgaccuauaaaggaguguacgaacugcagacacuggagcucgacauggcgucccugaacauguguaugccucuuucuugcaccaagaauaacagccaucacuauaucaugguuggcaaugaaacagggcuggagcucacccugacaaacaccuccauuaucaaucauaaauucuguaaccuuucugaugcucacaagaaaaaucuguacgaccaugcccucaugagcauuaucuccacguuucaccugagcauuccgaacuucaaucaguaugaggccaugucuugcgauuuuaacggaggcaagaucuccgugcaguacaaucugagccacaccuaugcuauugacgccgcuaaccauuguggcacaaucgccaaugggguccuccaaaccuucaugcggauggcguggggaggcucuuacaucgcccuggauuccgggaagggaagcugggacugcauuaugacaucuuaccaguaucuuaucauucagaacaccacgugggaagaucacugucaguuuucccgccccagcccuaucggcuaccuggggcuccugucccaaagaacacgggacauuuauaucucucgcagacggcgcggaaccuucacauggacccuuagcgauuccgagggcaacgaaacccccggcggguacugccugacaagauggaugcucaucgaggcugagcugaaauguuuuggaaauacggccguggcuaagugcaacgaaaaacaugacgaggaguucugcgauaugcugcggcucuuugacuucuguaagcaggccauucgcagacugaaaaccccugcgcagaugagcauccagcuuauuaauaaggccguuaacgcucugaucaaugaucaacucauuaugaagaaccaucugcgggacaucaugggcauccccuauugcaauuacucuaaauauuguuaccuuaaccacacagugaccgggaagacaucccugccucgcugcugucucgucagcaauggaucuuaccugaacgaaacccacuucagcgacgauauugaacagcaggccgacaauaugaucacggagaugcugcaaaaagaguauauggauagacagggcaagacaccgcucgggcugguggaccuuuuuguguucuccaccucuuuuuaccugauuagcaucuuccuccaccuggucaaaauucccacccaucggcacguuaucggaaagccuugccccaaaccucaucgccugaaccacaugggcauuuguuccugcggccuuuauaagcaccccggggugccggugaaguggaaaagaugaggacuaguaauaaggaaacuguaugaaugucugugggcaggaagugaagagauccuucuguaaagguuuuuggaauuaugucugcugaauaauaaacuuuuuugaaauaauaaaucugguagaaaaaugagaucuaaaaaaaaaaaaaaaaaaaaaaaaaaaaaaaaaaaaaaaaaaaaaaaaaaaaaaaaaaaaaaaaaaaaaaaaaaaaaaaaaaaaaaaaaaaaaaaaaaaa

SEQ ID NO: 27639 - RNA, 1785 nt, Artificial Sequence
  mRNA product Design b-4 (A100) comprising derived and/or modified sequence from LASV(LASV237-NIG-2010;Clade II)__AIT17638__GPCmut4 (opt5)
aggagagucccgcagucggcguccagcggcucugcuuguucgugugugugucguugcaggccuuauucaagcuuaccaugggccagaucauuaccuucuuucaagaggugccccacgucaucgaagagguuaugaacauugugcugaucgcccucagccugcuugcuauucugaaggggaucuacaauguggccacaugcggacucuucggccuggucuccuuucuucugcucugugggagaucuugcagcacgaccuauaaaggaguguacgaacugcagacacuggagcucgacauggcgucccugaacauguguaugccucuuucuugcaccaagaauaacagccaucacuauaucaugguuggcaaugaaacagggcuggagcucacccugacaaacaccuccauuaucaaucauaaauucuguaaccuuucugaugcucacaagaaagaccuguacgaucaugcccucaugagcauuaucuccacguuucaccugagcauuccgaauuucaaccaguaugaggccaugucuugcgacuuuaauggaggcaagaucuccgugcaguacaaccugagccacaccuaugcugucgaugccgcuaaucauuguggcacaauugccaacggggugcuccaaaccuucaugcggauggcguggggaggcucuuacaucgcccuggacuccgggaagggaagcugggauugcaucaugacaucuuaccaguaucuuauuauccagaauaccacgugggaagaccacugucaguuuucccgccccagcccuauuggcuaccuggggcuccugucccaaagaacacgggauaucuauauuucucgcagacggcgcggaaccuucacauggacccuuagcgacuccgagggcaacgaaacccccggcggguacugccugacaagauggaugcucaucgaggcugagcugaaauguuuuggaaacacggccguugcuaagugcaaugaaaaacaugaugaggaguucugcgacaugcugcggcucuuugauuucuguaagcaggccauccgcagacugaaaaccccugcgcagaugagcauucagcuuaucaacaaggccgugaaugcucugauuaacgaccaacucaucaugaagaaucaucugcgggacauuaugggcauccccuauugcaacuacucuaaauauuguuaccuuaaucacacagucaccgggaagacaucccugccucgcugcugucucgugagcaacggaucuuaccugaaugaaacccacuucagcgaugacaucgaacagcaggccgauaacaugauuacggagcugcuccaaaaagaguauauggacagacagggcaagacaccgcuggggcuuguggaucuguuugucuucuccaccucuuuuuaccucaucagcauuuuccugcaccugaucaaaauucccacccaucggcacaucacaggaaagccuugccccaaaccucaucgccuuaaucacaugggcauuuguuccugcggccucuauaagcaccccgggguuccggugaaguggaaaagaugaggacuaguaauaaggaaacuguaugaaugucugugggcaggaagugaagagauccuucuguaaagguuuuuggaauuaugucugcugaauaauaaacuuuuuugaaauaauaaaucugguagaaaaaugagaucuaaaaaaaaaaaaaaaaaaaaaaaaaaaaaaaaaaaaaaaaaaaaaaaaaaaaaaaaaaaaaaaaaaaaaaaaaaaaaaaaaaaaaaaaaaaaaaaaaaaa

SEQ ID NO: 27640 - RNA, 1785 nt, Artificial Sequence
  mRNA product Design b-4 (A100) comprising derived and/or modified sequence from LASV(LASV253-NIG-2011;Clade II)__AIT17670__GPCmut4 (opt5)
aggagagucccgcagucggcguccagcggcucugcuuguucgugugugugucguugcaggccuuauucaagcuuaccaugggccagaucauuaccuucuuucaagaggugccccacgucaucgaagagguuaugaacauugugcugaucgcccucagccugcuugcuauucugaaggggaucuacaauguggccacaugcggacucuucggccuggucuccuuucuucugcucugugggagaucuugcagcacgaccuauaaaggaguguacgaacugcagacacuggagcucgacauggcgucccugaacauguguaugccucuuucuugcaccaagaauaacagccaucacuauaucaugguuggcaaugaaacagggcuggagcucacccugacaaacaccuccauuaucaaucauaaauucuguaaccuuucugaugcucacaagaaaaaucuguacgaccaugcccucaugagcauuaucuccacguuucaccugagcauuccgaacuucaaucaguaugaggccaugucuugcgauuuuaacggaggcaagaucuccgugcaguacaaucugagccacaccuaugcugucgacgccgcuaaccauuguggcacaauugccaauggggugcuccaaaccuucaugcggauggcguggggaggcucuuacaucgcccuggauuccgggaagggaagcugggacugcaucaugacaucuuaccaguaucuuauuauccagaacaccacgugggaagaucacugucaguuuucccgccccagcccuauuggcuaccuggggcuccugucccaaagaacacgggacaucuauauuucucgcagacggcgcggaaccuucacauggacccuuagcgauuccgagggcaacgaaacccccggcggguacugccugacaagauggaugcucaucgaggcugagcugaaauguuuuggaaauacggccguugcuaagugcaacgaaaaacaugacgaggaguucugcgauaugcugcggcucuuugacuucuguaagcaggccauccgcagacugaaagcgccugcccagaugagcauucagcuuaucaauaaggcugugaacgcccugauuaaugaucaacucaucaugaagaaccaucugcgggacauuaugggcauccccuauugcaauuacucuaaauauuguuaccuuaaccacaccgucacagggcgcaccucccugccuagaugcugucucgugagcaauggaucuuaccugaacgaaacacacuucagcgacgauaucgaacagcaggcugacaauaugauuaccgagcugcuccaaaaggaguauaucgaucggcagggcaaaacgccgcuggggcuuguggaccuguuugucuucuccacaucuuuuuaccucauuagcaucuuccugcaccugguuaagauucccacccaucgccacaucauuggaaaaccuugccccaagccucauagacuuaaccacaugggcaucuguuccugcggccucuauaaacaccccggggugccggugaaguggaagcggugaggacuaguaauaaggaaacuguaugaaugucugugggcaggaagugaagagauccuucuguaaagguuuuuggaauuaugucugcugaauaauaaacuuuuuugaaauaauaaaucugguagaaaaaugagaucuaaaaaaaaaaaaaaaaaaaaaaaaaaaaaaaaaaaaaaaaaaaaaaaaaaaaaaaaaaaaaaaaaaaaaaaaaaaaaaaaaaaaaaaaaaaaaaaaaaaa

SEQ ID NO: 27641 - RNA, 1785 nt, Artificial Sequence
  mRNA product Design b-4 (A100) comprising derived and/or modified sequence from LASV(LASV254-NIG-2011;Clade II)__AIT17674__GPCmut4 (opt5)
aggagagucccgcagucggcguccagcggcucugcuuguucgugugugugucguugcaggccuuauucaagcuuaccaugggccagaucauuaccuucuuucaagaggugccccacgucaucgaagagguuaugaacauugugcugaucgcccucagccugcuugcuauucugaaggggaucuacaauguggccacaugcggacucuucggccuggucuccuuucuucugcucugugggagaucuugcagcacgaccuauaaaggaguguacgaacugcagacacuggagcucgacaugaccaaccugaauauguguaugccucuuuccugcacaaagaacaauucucaucacuauaucaugguuggcaacgaaaccgggcuggagcucacacugaccaauacgagcauuaucaaccauaaauucuguaaucuuuccgaugcgcacaagaaaaaccuguacaaucaugcucucaugucuauuaucagcaccuuucaccuguccauuccgaacuucaaucaguaugaggccaugagcugcgacuuuaacggaggcaagaucucugugcaguacaaucugucccacagcuaugccgucgaugcugccaaccauuguggcacaauugcuaacggggugcuccaaaccuucaugcggauggccuggggaggcucuuacaucgcgcuggacuccgggaagggaaauugggauugcaucaugacaagcuaccaguaucuuauuauccagaacaccacgugggaagaccacugucaguuuucucgccccuccccuauuggcuaccuggggcuccugagccaaagaacacgggauaucuauauuucccgcagacggcgcggaaccuucacauggacccuuucugacagcgagggcaaugaaacccccggcggguacugccugacaagauggaugcucaucgaggccgagcugaaauguuuuggaaacacggcuguugccaagugcaaugaaaaacaugaugaggaguucugcgacaugcugcggcucuuugauuucuguaagcaggcuauccgcagacugaaaaccccugcccaggcgaacauucagcuuaucaauaaggccgugaacgcucugauuaaugaccaacucaucaugaagaaccaucugcgggauauuaugggcauccccuauugcaauuacuccaaauauuguuaccuuaaccacacagucaccgggaagacaagccugccucgcugcugucucgugucuaauggauccuaccugaacgaaacccacuucagcgacgacaucgaacagcaggccgauaauaugauuacggagcugcuccaaaaagaguauauggacagacagggcaagacaccgcuggggcuuguggaucuguuugucuucucuaccagcuuuuaccucaucuccauuuuccugcaccugguuaaaauccccacccaucggcacgugauuggaaagccuugccccaaaccucaucgccuuaaccacaugggcaucuguucuugcggccucuauaagcaccccggggugccggucaaguggaaaagaugaggacuaguaauaaggaaacuguaugaaugucugugggcaggaagugaagagauccuucuguaaagguuuuuggaauuaugucugcugaauaauaaacuuuuuugaaauaauaaaucugguagaaaaaugagaucuaaaaaaaaaaaaaaaaaaaaaaaaaaaaaaaaaaaaaaaaaaaaaaaaaaaaaaaaaaaaaaaaaaaaaaaaaaaaaaaaaaaaaaaaaaaaaaaaaaaa

SEQ ID NO: 27642 - RNA, 1785 nt, Artificial Sequence
  mRNA product Design b-4 (A100) comprising derived and/or modified sequence from LASV(Nig08-A19;Clade III)__ADU56618__GPCmut4 (opt5)
aggagagucccgcagucggcguccagcggcucugcuuguucgugugugugucguugcaggccuuauucaagcuuaccaugggccagaucgugaccuucuuucaagaggucccccacguuauugaagaggugaugaacaucgugcugauugcccucagcauccuggcuauucuuaaggggcuguacaauaucgccacaugcggacucaucggccuggucacguuccuucugcucuccgggagaucuuguagcaugaccuauaaaggaguguacgaacugcagacacuggagcucaacaugaauacccugaacaugugcaugccucuuuccuguacaaagaauaacucucaucacuauauuaugguuggcaaugaaaccgggcuggagcucacacugaccaacacgagccuucugcaucacaaauuuugcaaucucuccgacgcgcauaagaaaaaccuguacgaucacacccugaugucuaucauuagcacauuccaccucuccaucccgaauuuuaaccaguaugaggcuaugagcugugacuucaauggaggcaagauuaccgugcaguacaaccugucucauuccuaugccaucgaugccgcuaaucacugcggcacagucgccaacggggugcuucaaaccuuuaugcggauggcuuggggaggcagcuacauugcccuggacucugggcgcggaaagugggauuguaucaugacguccuaccaguaucucaucauucagaacacaaccugggaagaccauugccaguucagcagacccucuccuaucggcuaccuggggcuucugucccaacggacacgcgauauuuauaucagcagacggcgcagaggaaccuuuaccuggacacucuccgacucugagggcaaugaaacgcccggcggguacugucugacccgguggaugcugauugaggcggagcucaaaugcuucggaaacacagccguugcuaaguguaaugaaaaacacgaugaggaauuuugcgacaugcugcgccuuuucgauuuuugcaagcaggccaucagacggcugaaagcuccugcccagaugagcauccagcucauuaacaaggcggugaaugcccugaucaacgaccaacuuauuaugaagaaucaucugcgcgauaucaugggcauucccuauuguaacuacuccaaauauugcuaccucaaucacaccagcacagggagaaccucucugccucgguguugccuggucuccaacggaagcuaccucaaugagacgcacuucucugacgacaucgaacagcaggcugauaacaugaucacagagaugcugcaaaaggaguaucuugaccgccagggcaaaaccccgcuggggcucguggaucuguucguguuuagcaccuccuucuaccugauuucuaucuuucuucaucucgucaagauucccacacacagacauaucguuggaaaaccuugucccaagccucaccggcugaaucacaugggcauuugcagcuguggccuguauaaacagcccggggugccggugagauggaagcgcugaggacuaguaauaaggaaacuguaugaaugucugugggcaggaagugaagagauccuucuguaaagguuuuuggaauuaugucugcugaauaauaaacuuuuuugaaauaauaaaucugguagaaaaaugagaucuaaaaaaaaaaaaaaaaaaaaaaaaaaaaaaaaaaaaaaaaaaaaaaaaaaaaaaaaaaaaaaaaaaaaaaaaaaaaaaaaaaaaaaaaaaaaaaaaaaaa

SEQ ID NO: 27643 - RNA, 1788 nt, Artificial Sequence
  mRNA product Design b-4 (A100) comprising derived and/or modified sequence from LASV(G1180-SLE-2010;Clade IV)__AIT17168__GPCmut4 (opt5)
aggagagucccgcagucggcguccagcggcucugcuuguucgugugugugucguugcaggccuuauucaagcuuaccaugggccagaucgugaccuucuuucaagaggucccccacguuauugaagaggugaugaacaucgugcugauugcccucagcauccuggcuguccuuaaggggcuguacaauuucgccacaugcggacucgugggccugcuuacguuucugcuccugugugggagauccugcaccgcgucucgguauaaaggaguuuacgaacugcagacacucgagcugaacauggaaacccuuaauauguguaugccucugagcugcacaaagaacaauucccaucacuauauuauggugggcaacgagaccgggcucgagcugacacuuaccaauacgucuaucaucaaccauaaauucuguaaucugagcgacgcucacaagaaaaaccucuacgaucaugcccugauguccauuaucucuaccuuucaccugagcauuccgaauuucaaccaguaugaagccauguccugcgacuuuaauggaggcaagaucagcguccaguacaaccucucucacuccuaugcuggcgaugccgcuaaucauugugggacaguggccaacggaguucugcaaaccuucaugcgcauggcguggggcgggagcuacauugcccuugacucuggacacggcuccugggauugcaucaugacaagcuaccaguaucugauuauccagaacaccacgugggaggaccauugucaguuuucuagacccuccccuaucggguaccucggacugcuuagccaacggacacgcgauauuuauaucuccagacggcgcagaggcaccuucacauggacccugucugacagcgaaggcaaggauacccccgggggauacugccucacacgguggaugcugauugaggcugagcugaaauguuuuggcaauacggccguggcuaagugcaacgaaaaacacgacgaggaguucugcgauaugcuccgccuguuugacuucuguaagcaggccauccagagacuuaaagcgccugcccagauguccauucaacugaucaauaaggcugucaacgcccucaucaaugaucagcugauuaugaagaaccaccuucgggacaucauggggauucccuauugcaauuacagcaaauauuguuaccugaaccauaccacaaccggaaagacaucucucccuaaaugcugucugguguccaauggcagcuaccugaacgaaacccacuucucugacgauaucgaacagcaagcugacaauaugauuacggagaugcuccagaaggaguauauggaacgccaggggaaaacaccgcugggacuuguggaucuguuugucuucagcaccuccuuuuaccucaucucuaucuuccugcaucugguuaagauucccacccacagacauaucgugggcaaaagcugcccuaagccccaccggcuuaaccacaugggcauuuguuccugcgggcucuauaagcagccuggagugcccgucaaauggaagcgcugaggacuaguaauaaggaaacuguaugaaugucugugggcaggaagugaagagauccuucuguaaagguuuuuggaauuaugucugcugaauaauaaacuuuuuugaaauaauaaaucugguagaaaaaugagaucuaaaaaaaaaaaaaaaaaaaaaaaaaaaaaaaaaaaaaaaaaaaaaaaaaaaaaaaaaaaaaaaaaaaaaaaaaaaaaaaaaaaaaaaaaaaaaaaaaaaa

SEQ ID NO: 27644 - RNA, 1788 nt, Artificial Sequence
  mRNA product Design b-4 (A100) comprising derived and/or modified sequence from LASV(G1442-SLE-2011;Clade IV)__AIT17180__GPCmut4 (opt5)
aggagagucccgcagucggcguccagcggcucugcuuguucgugugugugucguugcaggccuuauucaagcuuaccaugggccagaucgugaccuucuuucaagaggucccccacguuauugaagaggugaugaacaucgugcugauugcccucagcauccuggcuguccuuaaggggcuguacaauguggccacaugcggacucauuggccugguuacguuccuucugcucugugggagauccugcaccacaacccuguauaaaggaguguacgaacugcagacacucgagcugaacauggaaacccuuaauauguguaugccucugucuugcacaaagaacaauagccaucacuauauccgggucggcaacgagaccgggcucgagcugacgcuuaccaauacauccaucauuaaccauaaauuuuguaaucugucugacgcgcacaagaaaaaccucuacgaucaugcucugaugagcaucauuuccaccuuccaccugucuaucccgaauuuuaaccaguaugaagccaugagcugcgacuucaauggaggcaagauuuccgugcaguacaaccucagccacucuuaugccggcgaugcugccaaucauugugggacaguugcuaacggagugcugcaaaccuuuaugcgcauggccuggggcggguccuacaucgcgcuugacagcggaagaggcaacugggauugcauuaugacgucuuaccaguaucugaucauccagaauacaaccugggacgaucacugucaguucucccggcccagcccuauuggguaccucggacugcuuucucaacgcacaagagacgucuauaucucccggcgcagacggggcaccuuuaccuggacacugagcgauuccgagggcaaggacacgcccgggggauacugccucacccgcuggaugcugauugaagccgagcugaaauguuucggcaacacagcuguggccaagugcaaugagaaacaugaugaagaguuuugcgacaugcucagacuguucgauuuuuguaagcaggcuauccagcggcuuaaagccccugcgcagaugucuauucaacugaucaacaaggccgugaaugcucucaucaacgaccagcugauuaugaagaaucaccuucgcgacaucauggggauucccuauugcaacuacagcaaauauuguuaccugaauaacaccgccacaggaaagaccucccucccuaaaugcugucugaucagcaauggcucuuaccugaacgaaacgcacuucuccgaugacauugagcaggaagcugauaauaugaucacagagaugcuccaaaaggaguauauggaaagacaggggaaaaccccgcugggacuugucgaccuguucguuuuuagcaccucuuucuaccucaucagcauuuuucugcaucuggugaagauccccacacaccggcauauugugggcaaauccugcccuaagccccaccgccuuaaccauaugggcaucuguucuugcgggcucuauaagcagccuggaguccccgugagauggaaacggugaggacuaguaauaaggaaacuguaugaaugucugugggcaggaagugaagagauccuucuguaaagguuuuuggaauuaugucugcugaauaauaaacuuuuuugaaauaauaaaucugguagaaaaaugagaucuaaaaaaaaaaaaaaaaaaaaaaaaaaaaaaaaaaaaaaaaaaaaaaaaaaaaaaaaaaaaaaaaaaaaaaaaaaaaaaaaaaaaaaaaaaaaaaaaaaaa

SEQ ID NO: 27645 - RNA, 1788 nt, Artificial Sequence
  mRNA product Design b-4 (A100) comprising derived and/or modified sequence from LASV(G3010-SLE-2013;Clade IV)__AIT17344__GPCmut4 (opt5)
aggagagucccgcagucggcguccagcggcucugcuuguucgugugugugucguugcaggccuuauucaagcuuaccaugggccagaucgugaccuucuuucaagaggucccccacguuauugaagaggugaugaacaucgugcugauugcccucagcauccuggcuguccuuaaggggcuguacaauuucgccacaugcggacucgugggccugguuacguuucuucugcucugugggagauccugcaccacaucucuguauaaaggaguguacgaacugcagacccucgagcugaacauggaaacacuuaauauguguaugccucugagcugcaccaagaacaauucccaucacuauauuauggucggcaacgagacagggcucgagcugacccuuacgaauaccucuaucaucaaccauaaauucuguaaucugagcgacgcgcacaagaaaaaccucuacaaucaugcucugauguccauuaucucuacauuucaccugagcauuccgaacuucaaucaguaugaagccauguccugcgauuuuaacggaggcaagaucagcgugcaguacaaucucucucacuccuaugccggcgacgcugccagccauugugggaccguugcuaacggagugcugcaaacauucaugcggauggccuggggcgggucuuacauugcgcuugauuccggauacggcaagugggacugcaucaugaccagcuaucaguaccugauuauccagaacacgacaugggaggaucacugucaguuuucucgccccuccccuaucggguaucucggacugcuuagccaaagaacccgggacauuuacaucucccgcagacggcgcggcacauucaccuggacccugucugauagcgaaggcaaagacacacccgggggauauugccucacgagauggaugcugauugaggccgagcugaaguguuuuggcaauaccgcugucgccaaaugcaacgaaaagcaugaugaggaguucugcgacaugcuccggcuguuugauuucuguaaacaggcuauccagcgccuuaagaccccugcccagauguccauucaacugaucaauaaggcggugaacgcccucaucaaugaccagcugauuaugaaaaaccaccuuagagauaucauggggauucccuacugcaauuauagcaaguacuguuaccugaaccacacaacaaccggaaaaacgucucucccuaagugcugucugguguccaauggcagcuaucugaacgaaacacauuucucugacgacaucgaacagcaagcugauaauaugauuaccgagaugcuccagaaagaguacauggaacggcaggggaagaccccgcugggacuugucgaccuguuuguuuucagcacauccuuuuaucucaucucuaucuuccugcaccuggugaaaauucccacccaucgccacaucgugggcaagagcugcccuaagccccauagacuuaaccacaugggcauuuguuccugcgggcucuacaaacagccuggaguccccgugcgguggaagcgcugaggacuaguaauaaggaaacuguaugaaugucugugggcaggaagugaagagauccuucuguaaagguuuuuggaauuaugucugcugaauaauaaacuuuuuugaaauaauaaaucugguagaaaaaugagaucuaaaaaaaaaaaaaaaaaaaaaaaaaaaaaaaaaaaaaaaaaaaaaaaaaaaaaaaaaaaaaaaaaaaaaaaaaaaaaaaaaaaaaaaaaaaaaaaaaaaa

SEQ ID NO: 27646 - RNA, 1788 nt, Artificial Sequence
  mRNA product Design b-4 (A100) comprising derived and/or modified sequence from LASV(G502-SLE-2009;Clade IV)__AIT17126__GPCmut4 (opt5)
aggagagucccgcagucggcguccagcggcucugcuuguucgugugugugucguugcaggccuuauucaagcuuaccaugggccagaucgugaccuucuuucaagaggucccccacguuauugaagaggugaugaacaucgugcugauugcccucagcauccuggcuguccuuaaggggcuguacaauuucgccacaugcggacucgugggccugcuuacguuucugcuccugugugggagauccugcaccacaggacuguauaaaggcguuuacgaacuccagacccuggagcuuaacauggaaacacugaauauguguaugccucucucuugcaccaagaacaauagccaucacuauauuaugguggggaacgagacaggacuggagcuuacccugacgaauaccuccaucaucaaccauaaauucuguaaucucucugacgcgcacaagaaaaaccuguacgaucaugcucugaugagcauuaucuccacauuucaccucucuauuccgaauuucaaccaguaugaagccaugagcugcgacuuuaauggcggcaagaucuccguccaguacaaccugagccacucuuaugccggggaugcugccgaccauuguggaaccguggcuaauggcguucuucaaacauucaugcggauggccuggggaggguccuacauugcgcuggauagcggccgcgggagaugggacugcaucaugaccucuuaccaguaucucauuauccagaacacgacaugggaggaucacugucaguuuucccggcccagcccuaucggauaccugggccuucugucucaacgcaccagagacauuuauaucucccggcgcagacggggcacauucaccuggacccucagcgauuccgaagggaaggacacacccggaggcuacugccugacgcgcuggaugcugauugaggccgagcucaaauguuuugggaacaccgcuguggccaagugcaaugaaaaacaugaugaggaguucugcgacaugcugagacuuuuugauuucuguaagcaggcuauccagcggcugaaagccccugcgcagaugucuauucaacucaucaacaaggccgucaaugcucugaucaacgaccagcuugugaugaagaaucaucugcgcgacauuaugggaauccccuauugcaacuacagcagauauuguuaccucaaucacacaaccacaggccggaccucccugccuaaaugcugucuggugagcaacgggucuuaccucaaugaaacgcacuucuccgaugacauugaacagcaagccgauaacaugaucacagagaugcugcagaaggaguauauggaacgccagggaaaaaccccgcuuggccuggucgaccucuuuguuuucagcaccucuuuuuaccugauuagcaucuuccugcaccuugugaagauccccacacauagacacauugugggcaaauccugcccuaagccccaucggcucaaucacauggggaucuguucuugcggacuguauaaacagccuggcguccccgugaaguggaagagaugaggacuaguaauaaggaaacuguaugaaugucugugggcaggaagugaagagauccuucuguaaagguuuuuggaauuaugucugcugaauaauaaacuuuuuugaaauaauaaaucugguagaaaaaugagaucuaaaaaaaaaaaaaaaaaaaaaaaaaaaaaaaaaaaaaaaaaaaaaaaaaaaaaaaaaaaaaaaaaaaaaaaaaaaaaaaaaaaaaaaaaaaaaaaaaaaa

SEQ ID NO: 27647 - RNA, 1788 nt, Artificial Sequence
  mRNA product Design b-4 (A100) comprising derived and/or modified sequence from LASV(G733-SLE-2010;Clade IV)__AIT17154__GPCmut4 (opt5)
aggagagucccgcagucggcguccagcggcucugcuuguucgugugugugucguugcaggccuuauucaagcuuaccaugggccagaucgugaccuucuuucaagaggucccccacguuauugaagaggugaugaacaucgugcugauugcccucagcauccuggcuguccuuaaggggcuguacaauuucgccacaugcggaauugugggccucguuuccuuucugcuucugugugggagaucuugcacgaccagccucuauaaaggaguguacgaacugcagacacuggagcucaacauggaaacccugaauauguguaugccucuuuccugcacaaagaacaauucucaucacuauaucauggucggcaacgagaccgggcuggagcucacacugaccaauacgagcaucauuaaccauaaauucuguaaucuuuccgacgcgcacaagaaaaaccuguacgaucaugcucucaugucuaucauuagcaccuuucaccuguccaucccgaauuucaaccaguaugaagccaugagcugcgacuuuaauggaggcaagauuucugugcaguacaaccugucccacagcuaugccggcgaugcugccaaucauugugggacaaucgcuaacggaguucuccaaaccuucaugcggauggccuggggcgggucuuacauugcgcuggacuccggacgcgauagaugggacugcaucaugacaagcuaccaguaucuuaucauucagaacaccacgugggaggaucacugucaguuuucucggcccuccccuaucggcuaccuggggcuccugagccaacgcacaagagacauuuauaucucccggcgcagacggggaaccuucacauggacccuuucugauagcgaaggcaaggacacccccggcggguacugccugacacgcuggaugcucauugaggccgagcugaaauguuuuggaaauacggcuguggccaagugcaacgaaaaacaugaugaggaguucugcgacaugcugagacucuuugauuucuguaagcaggcuauccagcggcugaaagccccugcgcagauguccauccaacuuauuaauaaggccgucaacgcucugaucaaugaccagcucauuaugaagaaccaucugcgcgacaucaugggcauucccuauugcaauuacagcaaauauuguuaccuuaaccacaccacaaccgggaagacaucucugccuaaaugcugucucguguccaauggaagcuaccugaacgaaacccacuucucugaugacaucgaacagcaagccgauaauaugaucacggagaugcugcagaaggaguauauggaaagacagggcaaaacaccgcucgggcugguggaccuuuuugucuucagcaccuccuuuuaccugauuucuaucuuccuccaccugguuaagauucccacccaucggcacguggugggaaaaagcugcccuaagccccaucgccugaaccacaugggcaucuguuccugcggccuuuaugggcagccuggaguccccgugaaguggaaaagaugaggacuaguaauaaggaaacuguaugaaugucugugggcaggaagugaagagauccuucuguaaagguuuuuggaauuaugucugcugaauaauaaacuuuuuugaaauaauaaaucugguagaaaaaugagaucuaaaaaaaaaaaaaaaaaaaaaaaaaaaaaaaaaaaaaaaaaaaaaaaaaaaaaaaaaaaaaaaaaaaaaaaaaaaaaaaaaaaaaaaaaaaaaaaaaaaa

SEQ ID NO: 27648 - RNA, 1788 nt, Artificial Sequence
  mRNA product Design b-4 (A100) comprising derived and/or modified sequence from MOPV/LASV reassortant(IGS-1;Clade IV)__AFY05576__GPCmut4 (opt5)
aggagagucccgcagucggcguccagcggcucugcuuguucgugugugugucguugcaggccuuauucaagcuuaccaugggccagaucgugaccuucuuucaagaggucccccacguuauugaagaggugaugaacaucgugcugauugcccucagcguccuggcugugcuuaaggggcuguacaauuucgccacaugcggacucguuggccuggugacguuucuucugcucugugggagauccugcaccacaucucuguauaaaggagucuacgaacugcagacccucgagcugaacauggaaacacuuaauauguguaugccucugagcugcaccaagaacaauucccaucacuauaucauggugggcaacgagacagggcucgagcugacccuuacgaauaccucuauuaucaaccauaaauucuguaaucugagcgacgcgcacaagaaaaaccucuacgaucaugcucugauguccaucauuucuacauuucaccugagcaucccgaauuucaaccaguaugaagccauguccugcgacuuuaauggaggcaagauuagcguucaguacaaccucucucacuccuaugccggcgaugcugccaaucauugugggaccguggcuaacggaguccugcaaacauucaugcggauggccuggggcgggagcuacaucgcgcuugacucuggacgcggcaacugggauugcauuaugaccuccuaccaguaucugaucauucagaauacgacaugggaggaccacugucaguuuagcagacccucuccuaucggguaccucggacugcuuucccaacggacccgcgauaucuauauuagcagacggcgcagaggcacauucaccuggacccuguccgacucugaaggcgaggauacacccgggggauacugccucacgcgguggaugcugaucgaggccgaacugaaguguuuuggcaacaccgcuguggccaaaugcaaugagaagcaugacgaagaguucugcgauaugcuccgccuguuugacuucuguaaacaggcuauucagagacuuaaggccccugcgcagaugagcauccaacugauuaacaaagccgugaaugcucucaucaacgaucagcugaucaugaagaaucaccuucgggacauuauggggauccccuauugcaacuacuccaaguauuguuaccugaaucacacaaccacaggacgcaccagccucccuaaaugcugucuggucucuaacggcuccuaccugaaugaaacgcauuucagcgacgauauugagcagcaagccgacaacaugaucacagagaugcuccagaaggaauauauggagagacaggggaaaaccccgcugggacuuguugaucuguuuguguucucuaccagcuuuuaccucauuuccaucuuccugcaccuggugaagauccccacacaucggcacauugucggcaaaucuugcccuaagccccaucgccuuaaucacaugggcaucuguagcugcgggcucuauaaacagccuggagugcccguuaaguggaagagaugaggacuaguaauaaggaaacuguaugaaugucugugggcaggaagugaagagauccuucuguaaagguuuuuggaauuaugucugcugaauaauaaacuuuuuugaaauaauaaaucugguagaaaaaugagaucuaaaaaaaaaaaaaaaaaaaaaaaaaaaaaaaaaaaaaaaaaaaaaaaaaaaaaaaaaaaaaaaaaaaaaaaaaaaaaaaaaaaaaaaaaaaaaaaaaaaa

SEQ ID NO: 27649 - RNA, 1788 nt, Artificial Sequence
  mRNA product Design b-4 (A100) comprising derived and/or modified sequence from LASV(LM765-SLE-2012;Clade IV)__AIT17814__GPCmut4 (opt5)
aggagagucccgcagucggcguccagcggcucugcuuguucgugugugugucguugcaggccuuauucaagcuuaccaugggccagaucgugaccuucuuucaagaggucccccacguuauugaagaggugaugaacaucgugcugauugcccucagcauccuggcuguccuuaaggggcuguacaauuucgccacaugcggacucgugggccugguuacguuucuucugcucugugggagauccugcaccacaucucuguauaaaggaguguacgaacugcagacccucgagcugaacauggaaacacuuaauauguguaugccucugagcugcaccaagaacaauucccaucacuauauuauggucggcaacgagacagggcucgagcugacccuuacgaauaccucuaucaucgaccauaaauucuguaaccugagcgaugcgcaccggaagaaucucuacgaccaugcucugauguccauuaucucuacauuucaccugagcauuccgaacuucaaucaguaugaagccauguccugcgauuuuaacggaggcaaaaucagcgugcaguacaaucucucucacuccuaugccaaggacgcugccgaucauuguggcaccguugcuaacggggugcugcaaacauucaugcgcauggccuggggaggcagcuacauugcgcuugacucugggagaggacggugggauugcaucaugaccuccuaccaguaucugauuauccagaauacgacaugggaggaccacugucaguuuagccgccccucuccuaucggcuaccucgggcugcuuucccaaagaacccgggauauuuauaucagccgcagacggcgcggaacauucaccuggacccuguccgacucugaaggcaaggauacacccggcggguacugccucacgagauggaugcugauugaggccgagcugaaauguuuuggaaacaccgcugucgccaagugcaacgaaaaacaugacgaggaguucugcgauaugcuccggcuguuugacuucuguaagcaggcuauccagcgccuuaaagccccugcgcagaugagcauucaacugaucaauaaggccgugaacgcucucaucaaugaccagcugauuaugaagaaccaccuuagagauaucaugggcauucccuauugcaauuacuccaaauauuguuaccugaaccacacaaccacagggaagaccagccucccuaaaugcugucuggugucuaauggauccuaccugaacgaaacgcauuucagcgacgauaucgaacagcaagccgacaauaugauuacagagaugcuccagaaggaguauauggaacggcagggcaaaaccccgcuggggcuugucgaucuguuuguuuucucuaccagcuuuuaccucaucuccaucuuccugcaccuggugaagauucccacacaucgccacaucgugggaaaaccuugccccaagccucauagacuuaaccacaugggcauuuguucuugcggccucuauaagcagcccggggucccggugaaauggaagcggugaggacuaguaauaaggaaacuguaugaaugucugugggcaggaagugaagagauccuucuguaaagguuuuuggaauuaugucugcugaauaauaaacuuuuuugaaauaauaaaucugguagaaaaaugagaucuaaaaaaaaaaaaaaaaaaaaaaaaaaaaaaaaaaaaaaaaaaaaaaaaaaaaaaaaaaaaaaaaaaaaaaaaaaaaaaaaaaaaaaaaaaaaaaaaaaaa

SEQ ID NO: 27650 - RNA, 1788 nt, Artificial Sequence
  mRNA product Design b-4 (A100) comprising derived and/or modified sequence from LASV(LM776-SLE-2012;Clade IV)__AIT17824__GPCmut4 (opt5)
aggagagucccgcagucggcguccagcggcucugcuuguucgugugugugucguugcaggccuuauucaagcuuaccaugggccagaucgugaccuucuuucaagaggucccccacguuauugaagaggugaugaacaucgugcugauugcccucagcauccuggcuguccuuaaggggcuguacaauuucgccacaugcggacucgugggccugguuacguuucuucugcucugugggagauccugcaccacaucuguguauaaaggagucuacgaacugcagacccuggagcucaacauggaaacacugaauauguguaugccucuuagcugcaccaagaacaauucccaucacuauauuauggugggcaacgagacagggcuggagcucacccugacgaauaccucuaucaucaaccauaaauucuguaaucuuagcgacgcgcacaagaaaaaccuguacgaucaugcucucauguccauuaucucuacauuucaccugagcauuccgaauuucaaccaguaugaagccauguccugcgacuuuaauggaggcaagaucagcguucaguacaaccugucucacuccuaugccggcgaugcugccaaucauugugggaccguggcuaacggaguccuccaaacauucaugcggauggccuggggcgggagcuacauugcgcuggacucuggacacggcaagugggauugcaucaugaccuccuaccaguaucuuauuauccagaacacgacaugggaggaccauugucaguuuagccgccccucuccuaucggguaccugggacuccugucccaaagaacccgggauauuuauaucagccgcagacggcgcggcacauucaccuggacccuuuccgacucugaaggcaaagauacacccgggggauacugccugacgagauggaugcucauugaggccgagcugaaguguuuuggcaauaccgcuguggccaaaugcaacgaaaagcacgacgaggaguucugcgauaugcugcggcucuuugacuucuguaaacaggcuauccagcgccugaaggccccugcgcagaugagcauucaacuuaucaauaaggccgugaacgcucugaucaaugaucagcucauuaugaaaaaccaccugagagacaucauggggauucccuauugcaauuacuccaaguauuguuaccuuaaccauacaaccacaggaaaaaccagccugccuaagugcugucucgucucuaauggcuccuaccugaacgaaacgcacuucagcgacgauaucgaacagcaagccgacaauaugauuacagagaugcugcagaaagaguauauggaacggcaggggaagaccccgcucggacugguugaucuuuuuguguucucuaccagcuuuuaccugaucuccaucuuccuccaucuggugaaaauucccacacaccgccauaucgucggcaagucuugcccuaagccccacagacugaaccacaugggcauuuguagcugcgggcuuuauaaacagccuggagugcccguucgguggaagcgcugaggacuaguaauaaggaaacuguaugaaugucugugggcaggaagugaagagauccuucuguaaagguuuuuggaauuaugucugcugaauaauaaacuuuuuugaaauaauaaaucugguagaaaaaugagaucuaaaaaaaaaaaaaaaaaaaaaaaaaaaaaaaaaaaaaaaaaaaaaaaaaaaaaaaaaaaaaaaaaaaaaaaaaaaaaaaaaaaaaaaaaaaaaaaaaaaa

SEQ ID NO: 27651 - RNA, 1788 nt, Artificial Sequence
  mRNA product Design b-4 (A100) comprising derived and/or modified sequence from LASV(Mad39;Clade IV)__ANH09722__GPCmut4 (opt5)
aggagagucccgcagucggcguccagcggcucugcuuguucgugugugugucguugcaggccuuauucaagcuuaccaugggccagaucgugaccuucuuucaagaggucccccacguuauugaagaggugaugaacaucgugcugauugcccucagcauccuggcuguccuuaaggggcuguacaauguggccacaugcggacucauuggccugguuacguuccuucugcucugugggagauccugcaccacaacccuguauaaaggaguguacgaacugcaggcgcucgagcugaacauggaaacacuuaauauguguaugccucugucuugcaccaagaacaauagccaucacuauauccgggucggcaacgagacagggcucgagcugacccuuacgaauaccucccugaucaaccauaaauuuuguaaucucucugacgcucacaagaaaaaccuguacgaucaugcccugaugagcauuaucuccacauuccaccucucuauuccgaauuuuaaccaguaugaagccaugagcugcgacuucaaugauggaaagaucuccgugcaguacaaccugagccacaccuaugcuggcgacacagccaaucauuguggcaccguugcuaacggggugcuucaaacguuuaugcgcauggccuggggaggcucuuacauugcgcuggauuccgggagaggaggcugggacugcaucaugacaagcuaccaguaucucauuauccagaacaccacaugggaggaucacugucaguucucucggcccuccccuaucggguaccugggacuucugagccaacgcaccagagacauuuauaucucucggcgcagacggggcaccuuuacauggacgcucuccgauagcgaaggcaaggacacccccgggggauacugccugacacgcuggaugcugauugaggccgagcucaaauguuucggcaauaccgcugucgccaagugcaacgaaaaacaugaugaggaauuuugcgacaugcugagacuuuucgauuuuuguaagcaggcuauccagcggcugaaagccccugcgcagauguccauucaacucaucaauaaggccgugaacgcucugaucaaugaccagcuuauuaugaagaaccaucugcgcgacaucauggggauucccuauugcaauuacucuaaauauuguuaccucaaccacacagugaccggaaagacgagccugccuaaaugcugucuggucuccaauggcagcuaccucaacgagacacacuucucugaugacaucgaacagcaagccgauaauaugauuaccgagaugcugcagaaggaguauauggaaagacaggggaaaaccccgcuuggacugguugaccucuucguguuuuccaccagcuucuaccugaucucuaucuuucugcaccuugugaagauucccacacaucggcacgucgugggcaaaccuugccccaagccucaucgccucaaccacaugggcaucuguagcugcggguucuauaagcagcccggaguuccggugagauggaaacggugaggacuaguaauaaggaaacuguaugaaugucugugggcaggaagugaagagauccuucuguaaagguuuuuggaauuaugucugcugaauaauaaacuuuuuugaaauaauaaaucugguagaaaaaugagaucuaaaaaaaaaaaaaaaaaaaaaaaaaaaaaaaaaaaaaaaaaaaaaaaaaaaaaaaaaaaaaaaaaaaaaaaaaaaaaaaaaaaaaaaaaaaaaaaaaaaa

SEQ ID NO: 27652 - RNA, 1788 nt, Artificial Sequence
  mRNA product Design b-4 (A100) comprising derived and/or modified sequence from LASV(Z0947-SLE-2011;Clade IV)__AIT17840__GPCmut4 (opt5)
aggagagucccgcagucggcguccagcggcucugcuuguucgugugugugucguugcaggccuuauucaagcuuaccaugggccagaucgugaccuucuuucaagaggucccccacguuauugaagaggugaugaacaucgugcugauugcccucagcauccuggcuguccuuaaggggcuguacaauuucgccacaugcggacucgugggccugguuacguuucuucugcucugugggagauccugcaccauuucucuguauaaaggaguguacgaacugcagacacucgagcugaacauggaaacccuuaauauguguaugccucugagcugcacaaagaacaauucccaucacuauaucauggucggcaacgagaccgggcucgagcugacacuuaccaauacgucuaucauuaaccauaaauucuguaaucugagcgacgcgcacaagaaaaaccucuacgaucaugcucugauguccaucauuucuaccuuucaccugagcaucccgaauuucaaccaguaugaagccauguccugcgacuuuaauggaggcaagauuagcgugcaguacaaccucucucacuccuaugccggcgaugcugccaaucauugugggacaguugcuaacggagugcugcaaaccuucaugcggauggccuggggcgggagcuacaucgcgcuugacucuggacgcgauagaugggacugcauuaugacauccuaccaguaucugaucauccagaacaccacgugggaggaucacugucaguuuagccggcccucuccuauuggcuaccucgggcugcuuucccaacgcacaagagacaucuauauuagccggcgcagacggggaaccuucacauggacccuguccgauucugaaggcaaggacacccccggcggguacugccucacacgcuggaugcugaucgaggccgagcugaaauguuuuggaaauacggcugucgccaagugcaacgaaaaacaugaugaggaguucugcgacaugcucagacuguuugauuucuguaagcaggcuauucagcggcuuaaagccccugcgcagaugagcauccaacugaucaauaaggccgugaacgcucucauuaaugaccagcugaucaugaagaaccaccuucgcgacauuaugggcauccccuauugcaauuacuccaaauauuguuaccugaaccacaccacaaccgggaagacaagccucccuaaaugcugucuggugucuaauggauccuaccugaacgaaacccauuucagcgaugacauugaacagcaagccgauaauaugaucacggagaugcuccagaaggaguauauggaaagacagggcaaaacaccgcuggggcuugucgaccuguuuguuuucucuaccagcuuuuaccucaucuccauuuuccugcaccuggugaagauccccacccaucggcacauugugggaaaaccuugccccaagccucaucgccuuaaccacaugggcaucuguucuugcggccucuauaagcagcccggggucccggugaaauggaagagaugaggacuaguaauaaggaaacuguaugaaugucugugggcaggaagugaagagauccuucuguaaagguuuuuggaauuaugucugcugaauaauaaacuuuuuugaaauaauaaaucugguagaaaaaugagaucuaaaaaaaaaaaaaaaaaaaaaaaaaaaaaaaaaaaaaaaaaaaaaaaaaaaaaaaaaaaaaaaaaaaaaaaaaaaaaaaaaaaaaaaaaaaaaaaaaaaa

SEQ ID NO: 27653 - RNA, 1658 nt, Artificial Sequence
  mRNA product Design i-3 (hSL-A64-N5) comprising derived and/or modified sequence from LASV(Josiah;Clade IV)__NP_694870__GPCmut4 (opt1)
aggagaaagcuuaccaugggccagaucgugaccuucuuccaggaggucccccacgugaucgaggaggugaugaacaucguccugaucgcccucagcgugcuggccgugcugaaggggcucuacaacuucgcgaccugcggccuggucgggcuggugacguuccuccugcugugcggccgcuccugcaccaccagccucuacaaggggguguacgagcugcagacccuggagcucaacauggagacgcugaacaugugcaugccgcuguccugcaccaagaacaacagccaccacuacaucauggucggcaacgagaccggccucgagcugacgcugaccaacaccuccaucaucaaccacaaguucugcaaccucagcgacgcccacaagaagaaccuguacgaccacgcccugauguccaucaucagcaccuuccaccucuccauccccaacuucaaccaguacgaggccaugagcugcgacuucaacgggggcaagaucuccgugcaguacaaccugagccacuccuacgccggggacgcggccaaccacugcggcacgguggccaacgggguccugcagaccuucaugcggauggccuggggcggcagcuacaucgcgcucgacuccgggcgcggcaacugggacugcaucaugaccagcuaccaguaccugaucauccagaacaccacgugggaggaccacugccaguucucccggcccagccccaucggguaccugggccuccugucccagcgcacccgggacaucuacaucagccgccggcgccggggcaccuucaccuggacgcugagcgacuccgaggggaaggacaccccgggcggguacugccugacccgcuggaugcucaucgaggccgagcugaagugcuucggcaacaccgccguggccaagugcaacgagaagcacgacgaggaguucugcgacaugcugcggcuguucgacuucugcaagcaggccauccagcgccugaaggcgcccgcccagaugagcauccagcugaucaacaaggccgugaacgcccucaucaacgaccagcugaucaugaagaaccaccuccgggacaucauggggauccccuacugcaacuacuccaaguacugcuaccucaaccacacgaccaccggccgcaccagccugcccaagugcugccuggucuccaacggcagcuaccucaacgagacgcacuucuccgacgacaucgagcagcaggccgacaacaugaucaccgagaugcugcagaaggaguacauggagcggcaggggaagacgccccugggccucguggaccuguucguguucagcaccuccuucuaccugaucagcaucuuccugcaccucgucaagaucccgacccaccgccacaucguggggaaguccugccccaagccccaccggcugaaccacaugggcaucugcagcugcgggcuguacaagcagcccggcgugccggucaaguggaagcgcugaggacuaguuauaagacugacuagcccgaugggccucccaacgggcccuccuccccuccuugcaccgagauuaaucaaaggcucuuuucagagccaccaaaaaaaaaaaaaaaaaaaaaaaaaaaaaaaaaaaaaaaaaaaaaaaaaaaaaaaaaaaaaaaaagaauu

SEQ ID NO: 27654 - RNA, 1655 nt, Artificial Sequence
  mRNA product Design i-3 (hSL-A64-N5) comprising derived and/or modified sequence from LASV(LP;Clade I)__AAF86701__GPCmut4 (opt1)
aggagaaagcuuaccaugggccagaucaucaccuucuuccaggaggugccccacgucaucgaggaggugaugaacaucgugcugaucgcccucagccugcuggccauccucaaggggcuguacaacaucgcgaccugcggcaucaucgggcuggucgccuuccucuuccugugcggcaaguccugcagccugacgcucaagggcggguacgagcugcagacccuggagcucaacauggagacccugaacaugugcaugccgcuguccugcacgaagaacagcucccaccacuacauccgcgugggcaacgagaccgggcucgagcugacccugaccaacacgagcaucaucaaccacaaguucugcaaccucuccgacgcccacaagaagaaccuguacgaccacgcccugaugagcaucaucuccaccuuccaccucagcauccccaacuucaaccaguacgaggccauguccugcgacuucaacggcgggaagaucagcgugcaguacaaccugucccacagcuacgcgggcgacgccgccgagcacugcgggaccgucgccaacggcgugcugcagaccuucaugcggauggcguggggcgggcgcuacaucgcccucgacuccggcaaggggaacugggacugcaucaugacgagcuaccaguaccugaucauccagaacaccaccugggaggaccacugccaguucucccggcccagccccaucggcuaccugggccuccugucccagcgcacccgggacaucuacaucagccgccggcgccgggggacguucaccuggacccugagcgacuccgagggcaacgagacccccgggggcuacugccugacgcgcuggaugcucaucgaggccgagcugaagugcuucgggaacaccgccguggccaagugcaacgagaagcacgacgaggaguucugcgacaugcugcggcuguucgacuucugcaagcaggcgauccgccggcugaaggcccccgcccagaugagcauccagcugaucaacaaggccgucaacgcccucaucaacgaccagcugaucaugaagaaccaccuccgcgacaucaugggcauccccuacugcaacuacuccaaguacugcuaccucaaccacaccagcuccggccggaccagccugcccaagugcugccugaucuccaacgggagcuaccucaacgagacgcaguucuccgacgacaucgagcagcaggcggacaacaugaucaccgagaugcugcagaaggaguacaucgagcgccagggcaagaccccgcuggggcucguggacaucuucaucuucagcaccuccuucuaccugaucagcaucuuccugcaccugaucaagaucccgacgcaccggcacaucgugggcaagcccugccccaagccccaccgccucaaccacaugggggucugcuccugcggccuguacaagcacccgggcgugcccaccaaguggaagcggugaggacuaguuauaagacugacuagcccgaugggccucccaacgggcccuccuccccuccuugcaccgagauuaaucaaaggcucuuuucagagccaccaaaaaaaaaaaaaaaaaaaaaaaaaaaaaaaaaaaaaaaaaaaaaaaaaaaaaaaaaaaaaaaaagaauu

SEQ ID NO: 27655 - RNA, 1655 nt, Artificial Sequence
  mRNA product Design i-3 (hSL-A64-N5) comprising derived and/or modified sequence from LASV(803213;Clade II)__AAF86703__GPCmut4 (opt1)
aggagaaagcuuaccaugggccagaucaucaccuucuuccaggaggugccccacgucaucgaggaggugaugaacaucgugcugaucgcccucagccugcuggccauccucaaggggaucuacaacgucgcgaccugcggccuguucgggcugaucuccuuccuccugcugugcggccgcagcugcuccgugacguacaaggggguguacgagcuccagacccuggagcugaacauggccaaccucaacaugugcaugccgcugagcugcaccaagaacaacucccaccacuacaucauggucggcaacgagacgggccuggagcucacccugaccaacaccagcaucaucaaccacaaguucugcaaccuguccgacgcccacaagaagaaccucuacgaccacgcccugaugagcaucaucuccacguuccaccugagcauccccaacuucaaccaguacgaggccauguccugcgacuucaacgggggcaagaucagcgugcaguacaaccucucccacagcuucgcgguggacgccgccaaccacugcgggaccaucgccaacggcguccugcagaccuucaugcggauggcguggggcggguccuacaucgcccuggacagcggcaaggggaacugggacugcaucaugaccuccuaccaguaccucaucauccagaacacgaccugggaggaccacugccaguucagccgccccucccccaucggcuaccuggggcugcucagccagcggacccgcgacaucuacaucagccggcgccgccggggcaccuucacguggacccucuccgacagcgagggcaacgaggcccccgggggcuacugccugacccgguggaugcugaucgaggccgagcucaagugcuucgggaacaccgccguggcgaagugcaacgagaagcacgacgaggaguucugcgacaugcugcgccuguucgacuucugcaagcaggccaucaagcggcucaagacgcccgcccagauguccauccagcugaucaacaaggccgugaacgcccugaucaacgaccagcucaucaugaagaaccaccuccgcgacaucaugggcauccccuacugcaacuacagccgguacugcuaccugaaccacaccgucaccgggaagaccucccugccccgcugcugccuggugagcaacggcuccuaccugaacgagacgcacuucagcgacgacaucgagcagcaggcggacaacaugaucaccgagaugcuccagaaggaguacauggaccggcagggcaagaccccgcuggggcugguggaccucuucgucuucuccaccagcuucuaccugaucuccaucuuccugcaccuggugaagaucccgacgcaccgccacaucgugggcaagcccugccccaagccccaccggcucaaccacauggggaucugcagcugcggccuguacaagcacccggggguccccgugaaguggaagcgcugaggacuaguuauaagacugacuagcccgaugggccucccaacgggcccuccuccccuccuugcaccgagauuaaucaaaggcucuuuucagagccaccaaaaaaaaaaaaaaaaaaaaaaaaaaaaaaaaaaaaaaaaaaaaaaaaaaaaaaaaaaaaaaaaagaauu

SEQ ID NO: 27656 - RNA, 1655 nt, Artificial Sequence
  mRNA product Design i-3 (hSL-A64-N5) comprising derived and/or modified sequence from LASV(GA391;Clade III)__CAA36645__GPCmut4 (opt1)
aggagaaagcuuaccaugggccagaucgugaccuucuuccaggaggucccccacgugaucgaggaggugaugaacaucguccugaucgcccucagcauccuggccauccugaaggggcucuacaacguggcgaccugcggccugaucgggcuggugacguuccuccugcuguccggccgcagcugcucccucaucuacaaggggaccuacgagcugcagacccuggagcucaacauggagacccugaacaugugcaugccgcugagcugcaccaagaacaacucccaccacuacauccgggucggcaacgagaccggccucgagcugacccugacgaacaccagcauccucaaccacaaguucugcaaccuguccgacgcccacaagcgcaaccuguacgaccacagccucauguccaucaucagcaccuuccaccuguccauccccaacuucaaccaguacgaggccaugagcugcgacuucaacgggggcaagaucaccgugcaguacaaccugucccacagcuucgccguggacgccgcggggcacugcggcacgcucgccaacgggguccugcagaccuucaugcggauggccuggggcggcuccuacaucgcccuggacagcgggcgcggcaacugggacugcaucaugaccuccuaccaguaccucaucauccagaacaccacgugggacgaccacugccaguucagccggcccucccccaucggguaccugggccugcucagccagcgcacccgggacaucuacaucagccgccggcgccggggcaccuucaccuggacgcucuccgacagcgaggggaacgagaccccgggcggguacugccugacccgcuggaugcugaucgaggcggagcucaagugcuucggcaacaccgccguggccaagugcaacgagaagcacgacgaggaguucugcgacaugcugcggcuguucgacuucugcaagcaggccauccgccggcucaagacgcccgcccagauguccauccagcugaucaacaaggcggugaacgcccugaucaacgaccagcucaucaugaagaaccaccuccgcgacaucauggggauccccuacugcaacuacagccgguacugcuaccugaaccacaccuccaccggcaagaccagccugccccgcugcugccugaucuccaacggcagcuaccugaacgagacgaaguucuccgacgacaucgagcagcaggccgacaacaugaucaccgagaugcuccagaaggaguacaucgaccggcaggggaagacgccccugggccuggucgaccuguucguguucagcaccuccuucuaccucaucagcaucuuccugcaccuggugaagaucccgacccaccgccacaucgucgggaagcccugccccaagccccaccggcucaaccacaugggcaucugcuccugcgggcuguacaagcagccgggcgugcccgugcgcuggaagcggugaggacuaguuauaagacugacuagcccgaugggccucccaacgggcccuccuccccuccuugcaccgagauuaaucaaaggcucuuuucagagccaccaaaaaaaaaaaaaaaaaaaaaaaaaaaaaaaaaaaaaaaaaaaaaaaaaaaaaaaaaaaaaaaaagaauu

SEQ ID NO: 27657 - RNA, 1658 nt, Artificial Sequence
  mRNA product Design i-3 (hSL-A64-N5) comprising derived and/or modified sequence from LASV(AV;Clade V)__CCA30314__GPCmut4 (opt1)
aggagaaagcuuaccaugggccagaucgugaccuucuuccaggaggucccccacgugaucgaggaggugaugaacaucguccugaucgcccucagcauccuggccgugcugaaggggcucuacaacaucgcgaccugcggccugaucgggcugaucacguuccuccugcugugcggccgcuccugcagcuccaaccucuacaaggggguguacgagcugcagagccuggaccucaacauggagacccugaacaugugcaugccgcuguccugcaccaagaacaacagccaccacuacauccgggucggcaacgacacgggccucgagcugacccugaccaacaccuccauccucaaccacaaguucugcaaccugagcgacgcccacaagaaggaccuguacgaccacgcccucauguccaucaucagcacguuccaccuguccauccccaacuucaaccaguacgaggccaugagcugcgacuucaacgggggcaagaucuccgugcaguacaaccugagccacuccuacgccaucgacgcggccaaccacugcgggaccguggccaacggcauccuccagaccuucaugcgcauggccuggggcgggagcuacaucgcgcuggacuccggccgggggaacugggacugcaucaugaccagcuaccaguaccugaucauccagaacacgaccugggagaaccacugccaguucucccgccccagccccaucggcuaccucgggcugcugagccagcggacccgcgacaucuacaucucccggcgccgccggggcaccuucacguggacccugagcgacuccgagggcaacgccacccccgggggcuacugccucacccgguggaugcugaucgaggccgagcugaagugcuucgggaacacggccgucgccaagugcaacgagaagcacgacgaggaguucugcgacaugcuccgccuguucgacuucugcaagcaggcgaucagccggcugaagucccccgcccagaugagcauccagcucaucaacaaggccgugaacgcccugaucaacgaccagcugaucaugaagaaccaccuccgcgacaucaugggcauccccuacugcaacuacuccaaguacugcuaccugaaccacaccaucaccgggaagaccagccugcccaagugcugccucguguccaacggcagcuaccugaacgagacgcacuucuccgacgacaucgagcagcaggccgacaacaugaucaccgagaugcugcagaaggaguacauggagcggcagggcaagaccccgcucgggcuggucgaccuguucguguucagcaccuccuucuaccugaucagcaucuuccuccgccuggugaagaucccgacgcaccggcacaucgucggcaagcccugccccaagccccaccgccugaaccacauggggaucugcuccugcggccucuacaagcagccgggggugcccgugcgguggaagcgcugaggacuaguuauaagacugacuagcccgaugggccucccaacgggcccuccuccccuccuugcaccgagauuaaucaaaggcucuuuucagagccaccaaaaaaaaaaaaaaaaaaaaaaaaaaaaaaaaaaaaaaaaaaaaaaaaaaaaaaaaaaaaaaaaagaauu

SEQ ID NO: 27658 - RNA, 1655 nt, Artificial Sequence
  mRNA product Design i-3 (hSL-A64-N5) comprising derived and/or modified sequence from LASV(Togo/2016/7082;Clade VI)__AMR44577__GPCmut4 (opt1)
aggagaaagcuuaccaugggccagaucaucaccuucuuccaggaggugccccacgucaucgaggaggugaugaacaucgugcugaucgcccucagccugcuggccauccucaagggggucuacaacguggcgaccugcggcaucaucgggcuggugacguuccuguuccucugcggccgcuccugcagccugaucuacaagggguccuacgagcugcagacccucgagcugaacauggagacccugaacaugugcaugccgcucagcugcacgaagaacuccagccaccacuacauccgggucggcaacgagaccggccuggagcugacccucaccaacacguccaucaucaaccacaaguucugcaaccugagcgacgcccacaagcgcaaccuguacgaccacgcccucauguccauccugagcaccuuccaccuguccauccccaacuucaaccaguacgaggccaugagcugcgacuucaacgggggcaagaucuccgugcaguacaaccucagccacgccuacgcgguggacgccgccgagcacugcgggaccgucgccaacggcgugcugcagaccuucaugcggauggcguggggcggguccuacaucgcccuggacagcggccgcgggaacugggacugcaucaugacguccuaccaguaccucaucauccagaacaccaccugggaggaccacugccaguucagccggcccucccccaucggcuaccuggggcugcucagccagcgcacccgggacaucuacaucagccgccggcgccggggcacguucaccuggacccucuccgacagcgagggcaacgagacccccgggggcuacugccugacgcgcuggaugcugaucgaggccgagcucaagugcuucgggaacaccgccguggccaagugcaacgagaagcacgacgaggaguucugcgacaugcugcggcuguucgacuucugcaagcaggcgauccagcgccucaagucccccgcccagaugagcauccagcugaucaacaaggccgucaacgcccugaucaacgaccagcucaucaugaagaaccaccuccgggacaugaugggcauccccuacugcaacuacuccaaguacugcuaccugaaccacaccagcuccgggcgcaccagccugcccaagugcugccugguguccaacggcagcuaccugaacgagacgcacuucuccgacgacaucgagcagcaggccgacaacaugaucaccgagaugcuccagaaggaguacaucgaccggcagggcaagaccccgcuggggcugguggaccucuucgucuucagcaccuccuucuaccugaucagcaucuuccugcaccugaucaagaucccgacgcaccgccacaucgugggcaagcccugccccaagccccaccggcucaaccacauggggaucugcuccugcggccuguacaagcagccgggggugcccacccgcuggaagcggugaggacuaguuauaagacugacuagcccgaugggccucccaacgggcccuccuccccuccuugcaccgagauuaaucaaaggcucuuuucagagccaccaaaaaaaaaaaaaaaaaaaaaaaaaaaaaaaaaaaaaaaaaaaaaaaaaaaaaaaaaaaaaaaaagaauu

SEQ ID NO: 27659 - RNA, 1655 nt, Artificial Sequence
  mRNA product Design i-3 (hSL-A64-N5) comprising derived and/or modified sequence from LASV(KAK-428;Clade n.d. (VII))__ANH09740__GPCmut4 (opt1)
aggagaaagcuuaccaugggccagaucgugaccuucuuccaggaggucccccacgugaucgaggaggugaugaacaucguccugaucgcccucagccugcuggccauccucaaggggcuguacaacuucgcgaccugcggcgugaucgggcugaucacguuccuccugcugugcggccgcuccugcagcgccaccuacaaggggcaguacgagcuccagacccuggagcugaacauggagucccucaacaugugcaugccgcugagcugcacgaagaacaacucccaccacuacauccgggccggcaacaacaccggccuggagcucacccugaccaacacgagcaucaucucccacaaguucugcaaccugagcgacgcccacaagaagaaccucuacgaccacacccugauguccaucaucaccaccuuccaccugagcauccccaacuucaaccaguacgaggccauguccugcgacuucaacgggggcaagaucagcauccaguacaaccucucccacagcuacgcgggggacgccgcccagcacugcggcacgguggccaacgggguccugcagaccuucaugcgcauggcguggggcggcuccuaccuggcccucgacagcgggcggcgcggcugggacugcaucaucuccagcuaccaguaccugaucauccagaacaccaccugggacgaccacugccaguucucccggcccagccccaucggguaccugggcuucgugagccagaagacgcgcgacaucuacaucucccggcgccgccggggcaccuucaccuggacccugagcgacuccgaggggcacgacaugccgggcggguacugccucacgcgguggaugcugaucgaggccgaccugaagugcuucggcaacaccgccguggccaagugcaacgagaagcacgacgaggaguucugcgacauguggcgccucuucgacuucugcaagcaggcgauccagcggcugaaggcccccgcccagaugaacauccagcugaucaacaaggccgucaacgcccucaucaacgaccagcugaugaugaagaaccaccuccgcgacaucauggggauccccuacugcaacuacagcaaguucugcuaccugaacaacaccaccacgggccggaccucccugccccgcugcugccugaucagcaacggcuccuaccucaacgagacccacuucagcgacgacaucgagcagcaggcggacaacaugaucaccgagaugcugcagaaggaguacauggaccggcaggggaagacgccccugggccucguggaccuguucguguucuccaccagcuucuaccugaucaccaucuuccuccaccuggucaagaucccgacccaccgccacaucguggggaagcccugccccaagccccaccggcugaaccacaugggcaucugcuccugcgggcuguacaagcagccgggcgugcccguccgcuggaagcggugaggacuaguuauaagacugacuagcccgaugggccucccaacgggcccuccuccccuccuugcaccgagauuaaucaaaggcucuuuucagagccaccaaaaaaaaaaaaaaaaaaaaaaaaaaaaaaaaaaaaaaaaaaaaaaaaaaaaaaaaaaaaaaaaagaauu

SEQ ID NO: 27660 - RNA, 1655 nt, Artificial Sequence; identical to SEQ ID NO: 27654
  mRNA product Design i-3 (hSL-A64-N5) comprising derived and/or modified sequence from LASV(Pinneo-NIG-1969;Clade I)__AIT17836__GPCmut4 (opt1)

SEQ ID NO: 27661 - RNA, 1655 nt, Artificial Sequence
  mRNA product Design i-3 (hSL-A64-N5) comprising derived and/or modified sequence from LASV(ISTH0009-NIG-2011;Clade II)__AIT17404__GPCmut4 (opt1)
aggagaaagcuuaccaugggccagaucaucaccuucuuccaggaggugccccacgucaucgaggaggugaugaacaucgugcugaucgcccucagccugcuggccauccucaaggggaucuacaacgucgcgaccugcggccuguucgggcugguguccuuccuccugcugugcggccgcagcugcuccacgaccuacaaggggguguacgagcuccagacccuggagcuggacauggccagccucaacaugugcaugccgcuguccugcacgaagaacaacagccaccacuacaucauggucggcaacgagaccggccuggagcucacccugaccaacacguccaucaucaaccacaaguucugcaaccugagcgacgcccacaagaagaaccucuacgaccacgcccugauguccaucaucagcaccuuccaccuguccauccccaacuucaaccaguacgaggccaugagcugcgacuucaacgggggcaagaucuccgugcaguacaaccucagccacgcguacgccguggacgccgccaaccacugcgggaccaucgcgaacggcguccugcagaccuucaugcggauggccuggggcggguccuacaucgcccuggacagcggcaagggguccugggacugcaucaugacgagcuaccaguaccucaucauccagaacaccaccugggaggaccacugccaguucucccgccccagccccaucggcuaccuggggcugcucagccagcggacccgcgacaucuacaucucccggcgccgccggggcacguucaccuggacccucagcgacuccgagggcaacgagacccccgggggcuacugccugacgcgguggaugcugaucgaggccgagcucaagugcuucgggaacaccgccguggcgaagugcaacgagaagcacgacgaggaguucugcgacaugcugcgccuguucgacuucugcaagcaggccauccggcgccucaagacccccgcccagaugagcauccagcugaucaacaaggccgugaacgcccugaucaacgaccagcucaucaugaagaaccaccuccgggacaucaugggcaucccguacugcaacuacuccaaguacugcuaccugaaccacaccgucacggggaagaccagccugccccgcugcugccugguguccaacggcagcuaccugaacgagacccacuucuccgacgacaucgagcagcaggcggacaacaugaucaccgagcuccugcagaaggaguacauggaccggcagggcaagacgccccuggggcucguggaccuguucgucuucagcaccuccuucuaccugaucagcaucuuccugcaccucaucaagaucccgacccaccgccacaucaccggcaagcccugccccaagccccaccggcugaaccacauggggaucugcuccugcggccuguacaagcacccgggggugcccgugaaguggaagcgcugaggacuaguuauaagacugacuagcccgaugggccucccaacgggcccuccuccccuccuugcaccgagauuaaucaaaggcucuuuucagagccaccaaaaaaaaaaaaaaaaaaaaaaaaaaaaaaaaaaaaaaaaaaaaaaaaaaaaaaaaaaaaaaaaagaauu

SEQ ID NO: 27662 - RNA, 1655 nt, Artificial Sequence
  mRNA product Design i-3 (hSL-A64-N5) comprising derived and/or modified sequence from LASV(ISTH2010-NIG-2012;Clade II)__AIT17482__GPCmut4 (opt1)
aggagaaagcuuaccaugggccagaucaucaccuucuuccaggaggugccccacgucaucgaggaggugaugaacaucgugcugaucgcccucagccugcuggccauccucaaggggaucuacaacgucgcgaccugcggccuguucgggcugguguccuuccuccugcugugcggccgcagcugcuccacgaccuacaaggggguguacgagcuccagacccuggagcuggacauggccagccucaacaugugcaugccgcuguccugcacgaagaacaacagccaccacuacaucauggucggcaacgagaccggccuggagcucacccugaccaacacguccaucaucaaccacaaguucugcaaccugagcgacgcccacaagaagaaccucuacgaccacgcccugauguccaucaucagcaccuuccaccuguccauccccaacuucaaccaguacgaggccaugagcugcgacuucaacgggggcaagaucuccgugcaguacaaccucagccacgcguacgccguggacgccgccaaccacugcgggaccaucgcgaacggcguccugcagaccuucaugcggauggccuggggcggguccuacaucgcccuggacagcggcaagggguccugggacugcaucaugacgagcuaccaguaccucaucauccagaacaucaccugggaggaccacugccaguucucccgccccagccccaucggcuaccuggggcugcucagccagcggacccgcgacaucuacaucucccggcgccgccggggcaccuucacguggacccucagcgacuccgagggcaacgagacccccgggggcuacugccugacccgguggaugcugaucgaggccgagcucaagugcuucgggaacacggccguggcgaagugcaacgagaagcacgacgaggaguucugcgacaugcugcgccuguucgacuucugcaagcaggccauccggcgccucaagacccccgcccagaugagcauccagcugaucaacaaggccgugaacgcccugaucaacgaccagcucaucaugaagaaccaccuccgggacaucaugggcauccccuacugcaacuacuccaaguacugcuaccugaaccacaccgucaccgggaagacgagccugccccgcugcugccugguguccaacggcagcuaccugaacgagacccacuucuccgacgacaucgagcagcaggcggacaacaugaucaccgagcuccugcagaaggaguacaucgaccggcagggcaagaccccgcuggggcucguggaccuguucgucuucagcacguccuucuaccugaucagcaucuuccugcaccucgugaagaucccgacccaccgccacguggucggcaagcccugccccaagccccaccggcugaaccacauggggaucugcuccugcggccuguacaagcacccgggggugcccgugaaguggaagcgcugaggacuaguuauaagacugacuagcccgaugggccucccaacgggcccuccuccccuccuugcaccgagauuaaucaaaggcucuuuucagagccaccaaaaaaaaaaaaaaaaaaaaaaaaaaaaaaaaaaaaaaaaaaaaaaaaaaaaaaaaaaaaaaaaagaauu

SEQ ID NO: 27663 - RNA, 1655 nt, Artificial Sequence
  mRNA product Design i-3 (hSL-A64-N5) comprising derived and/or modified sequence from LASV(Lassa virus/H.sapiens-wt/NGA/2015/ISTH_0543;Clade II)__AVO03639__GPCmut4 (opt1)
aggagaaagcuuaccaugggccagaucaucaccuucuuccaggaggugccccacgucaucgaggaggugaugaacaucgugcugaucgcccucagccugcuggccauccucaaggggaucuacaacgucgcgaccugcggccuguucgggcugguguccuuccuccugcugugcggccgcagcugcuccacgaccuacaaggggguguacgagcuccagacccuggagcuggacauggccaaccucaacaugugcaugccgcugagcugcacgaagaacaacucccaccacuacaucauggucggcaacgagaccggccuggagcucacccugaccaacacgagcaucaucaaccacaaguucugcaaccuguccgacgcccacaagaagaaccucuacgaccacgcccugaugagcaucaucuccaccuuccaccugagcauccccaacuucaaccaguacgaggccauguccugcgacuucaacgggggcaagaucagcgugcaguacaaccucucccacaccuacgcgguggacgccgccaaccacugcgggaccaucgccaacggcguccugcagacguucaugcggauggcguggggcgggagcuacaucgcccuggacuccggcaaggggagcugggacugcaucaugaccuccuaccaguaccucgugauccagaacaccaccugggaggaccacugccaguucagccgccccucccccaucggcuaccuggggcugcucagccagcggacgcgcgacaucuacaucagccggcgccgccggggcaccuucaccuggacccucuccgacagcgagggcaacgagacgcccgggggcuacugccugacccgguggaugcugaucgaggccgagcucaagugcuucgggaacaccgccguggccaagugcaacgagaagcacgacgaggaguucugcgacaugcugcgccuguucgacuucugcaagcaggcgauccggcgccucaagacccccgcccagauguccauccagcugaucaacaaggccgucaacgcccugaucaacgaccagcucaucaugaagaaccaccuccgggacaucaugggcauccccuacugcaacuacagcaaguacugcuaccugaaccacacggugaccgggaagaccucccugccccgcugcugccuggugagcaacggcuccuaccugaacgagacccacuucagcgacgacaucgagcagcaggccgacaacaugaucacggagcuccugcagaaggaguacaucgaccggcagggcaagaccccgcuggggcucgucgaccuguucguguucuccaccagcuucuaccugaucuccaucuuccugcaccucgugaagaucccgacccaccgccacaucacgggcaagcccugccccaagccccaccggcugaaccacauggggaucugcagcugcggccuguacaagcacccggggguccccgugaaguggaagcgcugaggacuaguuauaagacugacuagcccgaugggccucccaacgggcccuccuccccuccuugcaccgagauuaaucaaaggcucuuuucagagccaccaaaaaaaaaaaaaaaaaaaaaaaaaaaaaaaaaaaaaaaaaaaaaaaaaaaaaaaaaaaaaaaaagaauu

SEQ ID NO: 27664 - RNA, 1655 nt, Artificial Sequence
  mRNA product Design i-3 (hSL-A64-N5) comprising derived and/or modified sequence from LASV(Lassa virus/H.sapiens-wt/NGA/2016/ISTH_0009;Clade II)__AVO03571__GPCmut4 (opt1)
aggagaaagcuuaccaugggccagaucaucaccuucuuccaggaggugccccacgucaucgaggaggugaugaacaucgugcugaucgcccucagccugcuggccauccucaaggggaucuacaacgucgcgaccugcggccugcuggggcucguguccuuccugcugcucugcggccgcagcugcuccacgaccuacaaggggguguacgagcugcagacccuggagcucgacauggccagccugaacaugugcaugccgcuguccugcacgaagaacaacagccaccacuacaucauggucggcaacgagaccggccucgagcugacccugaccaacacguccaucaucaaccacaaguucugcaaccucagcgacgcccacaagaagaaccuguacgaccacgcccugauguccaucaucagcaccuuccaccucuccauccccaacuucaaccaguacgaggccaugagcugcgacuucaacgggggccggaucuccgugcaguacaaccugagccacuccuacgcgguggacgccgccaaccacugcgggaccaucgccaacggcguccugcagaccuucaugcgcauggcguggggcgggagcuacaucgcccucgacuccggcaaggggagcugggacugcaucaugacguccuaccaguaccugaucauccagaacaccaccugggaggaccacugccaguucagccggcccagccccaucggcuaccuggggcuccugucccagcgcacccgggacaucuacaucagccgccggcgccggggcacguucaccuggacccuguccgacagcgagggcaacgagacccccgggggcuacugccugacgcgcuggaugcucaucgaggccgagcugaagugcuucgggaacaccgccguggccaagugcaacgagaagcacgacgaggaguucugcgacaugcugcggcuguucgacuucugcaagcaggcgauccgccggcugaagacccccgcccagauguccauccagcugaucaacaaggccgugaacgcccucaucaacgaccagcugaucaugaagaaccaccuccgcgacaucaugggcaucccguacugcaacuacagcaaguacugcuaccucaaccacaccgucacggggaagaccucccugccccggugcugccuggugagcaacggcuccuaccucaacgagacccacuucagcgacgacaucgagcagcaggccgacaacaugaucaccgagcugcugcagaaggaguacaucgaccgccagggcaagacgccccucgggcugguggaccuguucgucuucuccaccagcuucuaccugaucuccaucuuccuccaccuggugaagaucccgacccaccggcacaucaccggcaagcccugccccaagccccaccgccugaaccacauggggaucugcagcugcggccucuacaaccacccgggggugcccgucaaguggaagcggugaggacuaguuauaagacugacuagcccgaugggccucccaacgggcccuccuccccuccuugcaccgagauuaaucaaaggcucuuuucagagccaccaaaaaaaaaaaaaaaaaaaaaaaaaaaaaaaaaaaaaaaaaaaaaaaaaaaaaaaaaaaaaaaaagaauu

SEQ ID NO: 27665 - RNA, 1655 nt, Artificial Sequence
  mRNA product Design i-3 (hSL-A64-N5) comprising derived and/or modified sequence from LASV(Lassa virus/H.sapiens-wt/NGA/2016/ISTH_0017;Clade II)__AVO03567__GPCmut4 (opt1)
aggagaaagcuuaccaugggccagaucaucaccuucuuccaggaggugccccacgucaucgaggaggugaugaacaucgugcugaucgcccucagccugcuggccauccucaaggggaucuacaacgucgcgaccugcggccuguucgggcugguguccuuccuccugcugugcggccgcagcugcuccacgaccuacaaggggguguacgagcuccagacccuggagcuggacauggccagccucaacaugugcaugccgcuguccugcacgaagaacaacagccaccacuacaucauggucggcaacgagaccggccuggagcucacccugaccaacacguccaucaucaaccacaaguucugcaaccugagcgacgcccacaagaagaaccucuacgaccacgcccugauguccaucaucagcaccuuccaccuguccauccccaacuucaaccaguacgaggccaugagcugcgacuucaacgggggcaagaucuccgugcaguacaaccucagccacaccuacgcgaucgacgccgccaaccacugcgggaccaucgccaacggcgugcugcagacguucaugcggauggcguggggcggguccuacaucgcccuggacagcggcaagggguccugggacugcaucaugaccagcuaccaguaccucaucauccagaacaccaccugggaggaccacugccaguucucccgccccagccccaucggcuaccuggggcugcucagccagcggacgcgcgacaucuacaucucccggcgccgccggggcaccuucaccuggacccucagcgacuccgagggcaacgagacgcccgggggcuacugccugacccgguggaugcugaucgaggccgagcucaagugcuucgggaacaccgccgucgccaagugcaacgagaagcacgacgaggaguucugcgacaugcugcgccuguucgacuucugcaagcaggcgauccggcgccucaagacccccgcccagaugagcauccagcugaucaacaaggccgugaacgcccugaucaacgaccagcucaucaugaagaaccaccuccgggacaucaugggcauccccuacugcaacuacuccaaguacugcuaccugaaccacacggugaccgggaagaccagccugccccgcugcugccuggucuccaacggcagcuaccugaacgagacccacuucuccgacgacaucgagcagcaggccgacaacaugaucacggagcuccugcagaaggaguacauggaccggcagggcaagaccccgcuggggcucguggaccuguucguguucagcaccuccuucuaccugaucagcaucuuccugcaccucguccgcaucccgacccaccggcacgugaucggcaagcccugccccaagccccaccgccugaaccacauggggaucugcuccugcggccuguacaagcacccgggggugcccgucaaguggaagcggugaggacuaguuauaagacugacuagcccgaugggccucccaacgggcccuccuccccuccuugcaccgagauuaaucaaaggcucuuuucagagccaccaaaaaaaaaaaaaaaaaaaaaaaaaaaaaaaaaaaaaaaaaaaaaaaaaaaaaaaaaaaaaaaaagaauu

SEQ ID NO: 27666 - RNA, 1655 nt, Artificial Sequence
  mRNA product Design i-3 (hSL-A64-N5) comprising derived and/or modified sequence from LASV(Lassa virus/H.sapiens-wt/NGA/2018/ISTH_0959;Clade II)__AVV65099__GPCmut4 (opt1)
aggagaaagcuuaccaugggccagaucaucaccuucuuccaggaggugccccacgucaucgaggaggugaugaacaucgugcugaucgcccucagccugcuggccauccucaaggggaucuacaacgucgugaccugcggccuguucgggcugguguccuuccuccugcugugcggccgcagcugcuccacgaccuacaagggggucuacgagcuccagacccuggagcuggacauggcgagccucaacaugugcaugccgcuguccugcacgaagaacaacagccaccacuacaucauggugggcaacgagaccggccuggagcucacccugaccaacacguccaucaucaaccacaaguucugcaaccugagcgacgcccacaagaagaaccucuacgaccacgcccugauguccaucaucagcaccuuccaccuguccauccccaacuucaaccaguacgaggccaugagcugcgacuucaacgggggcaagaucuccgugcaguacaaccucagccacgccuacgcgaucgacgccgccaaccacugcgggaccaucgccaacggcguccugcagaccuucaugcggauggcguggggcggguccuacaucgcccuggacagcggcaagggguccugggacugcaucaugacgagcuaccaguaccucaucauccagaacaccaccugggaggaccacugccaguucucccgccccagccccaucggcuaccuggggcugcucagccagcggacccgcgacaucuacaucucccggcgccgccggggcacguucaccuggacccucagcgacuccgagggcaacgagacccccgggggcuacugccugacgcgguggaugcugaucgaggccgagcucaagugcuucgggaacaccgccguggccaagugcaacgagaagcacgacgaggaguucugcgacaugcugcgccuguucgacuucugcaagcaggcgauccggcgccucaagacccccgcccagaugagcauccagcugaucaacaaggccgugaacgcccugaucaacgaccagcucaucaugaagaaccaccuccgggacaucaugggcaucccguacugcaacuacuccaaguacugcuaccugaaccacaccgucacggggaagaccagccugccccgcugcugccugguguccaacggcagcuaccugaacgagacccacuucuccgacgacaucgagcagcaggccgacaacaugaucaccgagcuccugcagaaggaguacaucgaccggcagggcaagacgccccuggggcucguggaccuguucgucuucagcaccuccuucuaccugaucagcaucuuccugcaccucgugaagaucccgacccaccgccacgugaucggcaagcccugccccaagccccaccggcugaaccacauggggaucugcuccugcggccuguacaagcacccggggguccccgugaaguggaagcgcugaggacuaguuauaagacugacuagcccgaugggccucccaacgggcccuccuccccuccuugcaccgagauuaaucaaaggcucuuuucagagccaccaaaaaaaaaaaaaaaaaaaaaaaaaaaaaaaaaaaaaaaaaaaaaaaaaaaaaaaaaaaaaaaaagaauu

SEQ ID NO: 27667 - RNA, 1655 nt, Artificial Sequence
  mRNA product Design i-3 (hSL-A64-N5) comprising derived and/or modified sequence from LASV(LASV003-NIG-2008;Clade II)__AIT17580__GPCmut4 (opt1)
aggagaaagcuuaccaugggccagaucaucaccuucuuccaggaggugccccacgucaucgaggaggugaugaacaucgugcugaucgcccucagccugcuggccauccucaaggggaucuacaacgucgcgaccugcggccuguucgggcugguguccuuccuccugcugugcggccgcagcugcuccacgaccuacaaggggguguacgagcuccagacccuggagcuggacauggccagccucaacaugugcaugccgcuguccugcacgaagaacaacagccaccacuacaucauggucggcaacgagaccggccuggagcucacccugaccaacacguccaucaucaaccacaaguucugcaaccugagcgacgcccacaagaagaaccucuacgaccacgcccugauguccaucaucagcaccuuccaccuguccauccccaacuucaaccaguacgaggccaugagcugcgacuucaacgggggcaagaucuccgugcaguacaaccucagccacaccuacgcgguggacgccgccaaccacugcgggaccaucgccaacggcguccugcagacguucaugcggauggcguggggcggguccuacaucgcccuggacagcggcaagggguccugggacugcaucaugaccagcuaccaguaccucaucauccagaacaccaccugggaggaccacugccaguucucccgccccagccccaucggcuaccuggggcugcucagccagcggacgcgcgacaucuacaucucccggcgccgccggggcaccuucaccuggacccucagcgacuccgagagcaacgagacgccgggcggguacugccugacccgguggaugcugaucgaggccgagcucaagugcuucggcaacaccgccguggccaagugcaacgagaagcacgacgaggaguucugcgacaugcugcgccuguucgacuucugcaagcaggcgauccggcgccucaaggcccccgcccagauguccauccagcugaucaacaaggccgugaacgcccugaucaacgaccagcucaucaugaagaaccaccuccgggacaucauggggauccccuacugcaacuacagcaaguacugcuaccugaaccacaccgucacgggccgcaccucccugccccggugcugccuggugagcaacggguccuaccugaacgagacccacuucagcgacgacaucgagcagcaggcggacaacaugaucaccgagcuccugcagaaggaguacauggaccgccagggcaagacgccccugggccucguggaccuguucgucuucuccaccagcuucuaccugaucuccaucuuccugcaccucgugaagaucccgacccaccggcacgugaucgggaagcccugccccaagccccaccgccugaaccacaugggcaucugcagcugcgggcuguacaagcacccgggcguccccgugaaguggaagcggugaggacuaguuauaagacugacuagcccgaugggccucccaacgggcccuccuccccuccuugcaccgagauuaaucaaaggcucuuuucagagccaccaaaaaaaaaaaaaaaaaaaaaaaaaaaaaaaaaaaaaaaaaaaaaaaaaaaaaaaaaaaaaaaaagaauu

SEQ ID NO: 27668 - RNA, 1655 nt, Artificial Sequence
  mRNA product Design i-3 (hSL-A64-N5) comprising derived and/or modified sequence from LASV(LASV035-NIG-2009;Clade II)__AIT17588__GPCmut4 (opt1)
aggagaaagcuuaccaugggccagaucaucaccuucuuccaggaggugccccacgucaucgaggaggugaugaacaucgugcugaucgcccucagccugcuggccauccucaaggggaucuacaacgucgcgaccugcggccuguucgggcugguguccuuccuccugcugugcggccgcagcugcuccacgaccuacaaggggguguacgagcuccagacccuggagcuggacauggccagccucaacaugugcaugccgcuguccugcacgaagaacaacagccaccacuacaucauggucggcaacgagaccggccuggagcucacccugaccaacacguccaucaucaaccacaaguucugcaaccugagcgacgcccacaagaagaaccucuacgaccacgcccugauguccaucaucagcaccuuccaccuguccauccccaacuucaaccaguacgaggccaugagcugcgacuucaacgggggcaagaucuccgugcaguacaaccucagccacgcguacgccguggacgccgccaaccacugcgggaccaucgcgaacggcguccugcagaccuucaugcggauggccuggggcggguccuacaucgcccuggacagcggcaagggguccugggacugcaucaugacgagcuaccaguaccucaucauccagaacaccaccugggaggaccacugccaguucucccgccccagccccaucggcuaccuggggcugcucagccagcggacccgcgacaucuacaucucccggcgccgccggggcacguucaccuggacccucagcgacuccgagggcaacgagacccccgggggcuacugccugacgcgguggaugcugaucgaggccgagcucaagugcuucgggaacaccgccguggcgaagugcaacgagaagcacgacgaggaguucugcgacaugcugcgccuguucgacuucugcaagcaggccauccggcgccucaaggcccccgcccagaugagcauccagcugaucaacaaggccgugaacgcgcugaucaacgaccagcucaucaugaagaaccaccuccgggacaucaugggcauccccuacugcaacuacuccaaguacugcuaccugaaccacaccgucaccgggaagacgagccugccccgcugcugccugguguccaacggcagcuaccugaacgagacccacuucuccgacgacaucgagcagcaggccgacaacaugaucaccgagcuccugcagaaggaguacaucgaccggcagggcaagaccccgcuggggcucguggaccuguucgucuucagcacguccuucuaccugaucagcaucuuccugcaccucgugaagaucccgacccaccgccacgugaucggcaagcccugccccaagccccaccggcugaaccacauggggaucugcuccugcggccuguacaagcacccggggguccccgugaaguggaagcgcugaggacuaguuauaagacugacuagcccgaugggccucccaacgggcccuccuccccuccuugcaccgagauuaaucaaaggcucuuuucagagccaccaaaaaaaaaaaaaaaaaaaaaaaaaaaaaaaaaaaaaaaaaaaaaaaaaaaaaaaaaaaaaaaaagaauu

SEQ ID NO: 27669 - RNA, 1655 nt, Artificial Sequence
  mRNA product Design i-3 (hSL-A64-N5) comprising derived and/or modified sequence from LASV(LASV1000-NIG-2009;Clade II)__AIT17782__GPCmut4 (opt1)
aggagaaagcuuaccaugggccagaucaucaccuucuuccaggaggugccccacgucaucgaggaggugaugaacaucgugcugaucgcccucagccugcuggccauccucaaggggaucuacaacgucgcgaccugcggccuguucgggcugguguccuuccuccugcugugcggccgcagcugcuccacgaccuacaaggggguguacgagcuccagacccuggagcuggacauggccagccucaacaugugcaugccgcuguccugcacgaagaacaacagccaccacuacaucauggucggcaacgagaccggccuggagcucacccugaccaacacguccaucaucaaccacaaguucugcaaccugagcgacgcccacaagaagaaccucuacgaccacgcccugauguccaucaucagcaccuuccaccuguccauccccaacuucaaccaguacgaggccaugagcugcgacuucaacgggggcaagaucuccgugcaguacaaccucagccacaccuacgcgguggacgccgccaaccacugcgggaccaucgccaacggcguccugcagacguucaugcggauggcguggggcggguccuacaucgcccuggacagcggcaagggguccugggacugcaucaugaccagcuaccaguaccucaucauccagaacaccaccugggaggaccacugccaguucucccgccccagccccaucggcuaccuggggcugcucagccagcggacgcgcgacaucuacaucucccggcgccgccggggcaccuucaccuggacccucagcgacuccgagggcaacgagacgcccgggggcuacugccugacccgguggaugcugaucgaggccgagcucaagugcuucgggaacaccgccguggccaagugcaacgagaagcacgacgaggaguucugcgacaugcugcgccuguucgacuucugcaagcaggcgaucaagcggcucaagacccccgcccagaugagcauccagcugaucaacaaggccgugaacgcccugaucaacgaccagcucaucaugaagaaccaccuccgcgacaucaugggcauccccuacugcaacuacuccaaguacugcuaccugaaccacacggucaccgggaagaccagccugccccggugcugccugguguccaacggcagcuaccugaacgagacccacuucuccgacgacaucgagcagcaggccgacaacaugaucacggagcuccugcagaaggaguacaucgaccgccagggcaagaccccgcuggggcucguggaccuguucgucuucagcaccuccuucuaccugaucagcaucuuccugcaccucgugaagaucccgacccaccggcacguggucggcaagcccugccccaagccccaccgccugaaccacauggggaucugcuccugcggccuguacaagcacccgggggugcccgugaaguggaagcggugaggacuaguuauaagacugacuagcccgaugggccucccaacgggcccuccuccccuccuugcaccgagauuaaucaaaggcucuuuucagagccaccaaaaaaaaaaaaaaaaaaaaaaaaaaaaaaaaaaaaaaaaaaaaaaaaaaaaaaaaaaaaaaaaagaauu

SEQ ID NO: 27670 - RNA, 1655 nt, Artificial Sequence
  mRNA product Design i-3 (hSL-A64-N5) comprising derived and/or modified sequence from LASV(LASV221-NIG-2010;Clade II)__AIT17624__GPCmut4 (opt1)
aggagaaagcuuaccaugggccagaucaucaccuucuuccaggaggugccccacgucaucgaggaggugaugaacaucgugcugaucgcccucagccugcuggccauccucaaggggaucuacaacgucgcgaccugcggccuguucgggcugguguccuuccuccugcugugcggccgcagcugcuccacgaccuacaaggggguguacgagcuccagacccuggagcuggacauggccagccucaacaugugcaugccgcuguccugcacgaagaacaacagccaccacuacaucauggucggcaacgagaccggccuggagcucacccugaccaacacguccaucaucaaccacaaguucugcaaccugagcgacgcccacaagaagaaccucuacgaccacgcccugauguccaucaucagcaccuuccaccuguccauccccaacuucaaccaguacgaggccaugagcugcgacuucaacgggggcaagaucuccgugcaguacaaccucagccacaccuacgcgaucgacgccgccaaccacugcgggaccaucgccaacggcgugcugcagacguucaugcggauggcguggggcggguccuacaucgcccuggacagcggcaagggguccugggacugcaucaugaccagcuaccaguaccucaucauccagaacaccaccugggaggaccacugccaguucucccgccccagccccaucggcuaccuggggcugcucagccagcggacgcgcgacaucuacaucucccggcgccgccggggcaccuucaccuggacccucagcgacuccgagggcaacgagacgcccgggggcuacugccugacccgguggaugcugaucgaggccgagcucaagugcuucgggaacaccgccgucgccaagugcaacgagaagcacgacgaggaguucugcgacaugcugcgccuguucgacuucugcaagcaggcgauccggcgccucaagacccccgcccagaugagcauccagcugaucaacaaggccgugaacgcccugaucaacgaccagcucaucaugaagaaccaccuccgggacaucaugggcauccccuacugcaacuacuccaaguacugcuaccugaaccacacggugaccgggaagaccagccugccccgcugcugccuggucuccaacggcagcuaccugaacgagacccacuucuccgacgacaucgagcagcaggccgacaacaugaucacggagaugcuccagaaggaguacauggaccggcagggcaagaccccgcuggggcugguggaccucuucguguucagcaccuccuucuaccugaucagcaucuuccugcaccuggucaagaucccgacccaccgccacgugaucggcaagcccugccccaagccccaccggcucaaccacauggggaucugcuccugcggccuguacaagcacccgggggugcccgucaaguggaagcgcugaggacuaguuauaagacugacuagcccgaugggccucccaacgggcccuccuccccuccuugcaccgagauuaaucaaaggcucuuuucagagccaccaaaaaaaaaaaaaaaaaaaaaaaaaaaaaaaaaaaaaaaaaaaaaaaaaaaaaaaaaaaaaaaaagaauu

SEQ ID NO: 27671 - RNA, 1655 nt, Artificial Sequence
  mRNA product Design i-3 (hSL-A64-N5) comprising derived and/or modified sequence from LASV(LASV237-NIG-2010;Clade II)__AIT17638__GPCmut4 (opt1)
aggagaaagcuuaccaugggccagaucaucaccuucuuccaggaggugccccacgucaucgaggaggugaugaacaucgugcugaucgcccucagccugcuggccauccucaaggggaucuacaacgucgcgaccugcggccuguucgggcugguguccuuccuccugcugugcggccgcagcugcuccacgaccuacaaggggguguacgagcuccagacccuggagcuggacauggccagccucaacaugugcaugccgcuguccugcacgaagaacaacagccaccacuacaucauggucggcaacgagaccggccuggagcucacccugaccaacacguccaucaucaaccacaaguucugcaaccugagcgacgcccacaagaaggaccucuacgaccacgcccugauguccaucaucagcaccuuccaccuguccauccccaacuucaaccaguacgaggccaugagcugcgacuucaacgggggcaagaucuccgugcaguacaaccucagccacaccuacgcgguggacgccgccaaccacugcgggaccaucgccaacggcguccugcagacguucaugcggauggcguggggcggguccuacaucgcccuggacagcggcaagggguccugggacugcaucaugaccagcuaccaguaccucaucauccagaacaccaccugggaggaccacugccaguucucccgccccagccccaucggcuaccuggggcugcucagccagcggacgcgcgacaucuacaucucccggcgccgccggggcaccuucaccuggacccucagcgacuccgagggcaacgagacgcccgggggcuacugccugacccgguggaugcugaucgaggccgagcucaagugcuucgggaacaccgccguggccaagugcaacgagaagcacgacgaggaguucugcgacaugcugcgccuguucgacuucugcaagcaggcgauccggcgccucaagacccccgcccagaugagcauccagcugaucaacaaggccgugaacgcccugaucaacgaccagcucaucaugaagaaccaccuccgggacaucaugggcauccccuacugcaacuacuccaaguacugcuaccugaaccacacggucaccgggaagaccagccugccccgcugcugccugguguccaacggcagcuaccugaacgagacccacuucuccgacgacaucgagcagcaggccgacaacaugaucacggagcuccugcagaaggaguacauggaccggcagggcaagaccccgcuggggcucguggaccuguucgucuucagcaccuccuucuaccugaucagcaucuuccugcaccucaucaagaucccgacccaccgccacaucacgggcaagcccugccccaagccccaccggcugaaccacauggggaucugcuccugcggccuguacaagcacccgggggugcccgugaaguggaagcgcugaggacuaguuauaagacugacuagcccgaugggccucccaacgggcccuccuccccuccuugcaccgagauuaaucaaaggcucuuuucagagccaccaaaaaaaaaaaaaaaaaaaaaaaaaaaaaaaaaaaaaaaaaaaaaaaaaaaaaaaaaaaaaaaaagaauu

SEQ ID NO: 27672 - RNA, 1655 nt, Artificial Sequence
  mRNA product Design i-3 (hSL-A64-N5) comprising derived and/or modified sequence from LASV(LASV253-NIG-2011;Clade II)__AIT17670__GPCmut4 (opt1)
aggagaaagcuuaccaugggccagaucaucaccuucuuccaggaggugccccacgucaucgaggaggugaugaacaucgugcugaucgcccucagccugcuggccauccucaaggggaucuacaacgucgcgaccugcggccuguucgggcugguguccuuccuccugcugugcggccgcagcugcuccacgaccuacaaggggguguacgagcuccagacccuggagcuggacauggccagccucaacaugugcaugccgcuguccugcacgaagaacaacagccaccacuacaucauggucggcaacgagaccggccuggagcucacccugaccaacacguccaucaucaaccacaaguucugcaaccugagcgacgcccacaagaagaaccucuacgaccacgcccugauguccaucaucagcaccuuccaccuguccauccccaacuucaaccaguacgaggccaugagcugcgacuucaacgggggcaagaucuccgugcaguacaaccucagccacaccuacgcgguggacgccgccaaccacugcgggaccaucgccaacggcguccugcagacguucaugcggauggcguggggcggguccuacaucgcccuggacagcggcaagggguccugggacugcaucaugaccagcuaccaguaccucaucauccagaacaccaccugggaggaccacugccaguucucccgccccagccccaucggcuaccuggggcugcucagccagcggacgcgcgacaucuacaucucccggcgccgccggggcaccuucaccuggacccucagcgacuccgagggcaacgagacgcccgggggcuacugccugacccgguggaugcugaucgaggccgagcucaagugcuucgggaacaccgccguggccaagugcaacgagaagcacgacgaggaguucugcgacaugcugcgccuguucgacuucugcaagcaggcgauccggcgccucaaggcccccgcccagaugagcauccagcugaucaacaaggccgugaacgcccugaucaacgaccagcucaucaugaagaaccaccuccgggacaucaugggcaucccguacugcaacuacuccaaguacugcuaccugaaccacaccgucacggggcgcaccagccugccccggugcugccugguguccaacggcagcuaccugaacgagacccacuucuccgacgacaucgagcagcaggcggacaacaugaucaccgagcuccugcagaaggaguacaucgaccgccagggcaagacgccccuggggcucguggaccuguucgucuucagcaccuccuucuaccugaucagcaucuuccugcaccucgugaagaucccgacccaccggcacaucaucggcaagcccugccccaagccccaccgccugaaccacauggggaucugcuccugcggccuguacaagcacccgggggugcccgucaaguggaagcggugaggacuaguuauaagacugacuagcccgaugggccucccaacgggcccuccuccccuccuugcaccgagauuaaucaaaggcucuuuucagagccaccaaaaaaaaaaaaaaaaaaaaaaaaaaaaaaaaaaaaaaaaaaaaaaaaaaaaaaaaaaaaaaaaagaauu

SEQ ID NO: 27673 - RNA, 1655 nt, Artificial Sequence
  mRNA product Design i-3 (hSL-A64-N5) comprising derived and/or modified sequence from LASV(LASV254-NIG-2011;Clade II)__AIT17674__GPCmut4 (opt1)
aggagaaagcuuaccaugggccagaucaucaccuucuuccaggaggugccccacgucaucgaggaggugaugaacaucgugcugaucgcccucagccugcuggccauccucaaggggaucuacaacgucgcgaccugcggccuguucgggcugguguccuuccuccugcugugcggccgcagcugcuccacgaccuacaaggggguguacgagcuccagacccuggagcuggacaugaccaaccucaacaugugcaugccgcugagcugcaccaagaacaacucccaccacuacaucauggucggcaacgagaccggccuggagcucacccugacgaacaccagcaucaucaaccacaaguucugcaaccuguccgacgcccacaagaagaaccucuacaaccacgcccugaugagcaucaucuccaccuuccaccugagcauccccaacuucaaccaguacgaggccauguccugcgacuucaacgggggcaagaucagcgugcaguacaaccucucccacagcuacgccguggacgcggccaaccacugcgggaccaucgccaacggcguccugcagacguucaugcggauggccuggggcggguccuacaucgcgcuggacagcggcaaggggaacugggacugcaucaugaccuccuaccaguaccucaucauccagaacaccaccugggaggaccacugccaguucagccgccccucccccaucggcuaccuggggcugcucagccagcggacgcgcgacaucuacaucagccggcgccgccggggcaccuucaccuggacccucuccgacagcgagggcaacgagacgcccgggggcuacugccugacccgguggaugcugaucgaggccgagcucaagugcuucgggaacaccgccguggccaagugcaacgagaagcacgacgaggaguucugcgacaugcugcgccuguucgacuucugcaagcaggccauccggcgccucaagacccccgcgcaggccaacauccagcugaucaacaaggccgugaacgcccugaucaacgaccagcucaucaugaagaaccaccuccgggacaucaugggcauccccuacugcaacuacuccaaguacugcuaccugaaccacacggucaccgggaagaccagccugccccgcugcugccugguguccaacggcagcuaccugaacgagacccacuucuccgacgacaucgagcagcaggccgacaacaugaucacggagcuccugcagaaggaguacauggaccggcagggcaagaccccgcuggggcucguggaccuguucgucuucagcaccuccuucuaccugaucagcaucuuccugcaccucgugaagaucccgacccaccgccacgugaucggcaagcccugccccaagccccaccggcugaaccacauggggaucugcuccugcggccuguacaagcacccggggguccccgugaaguggaagcgcugaggacuaguuauaagacugacuagcccgaugggccucccaacgggcccuccuccccuccuugcaccgagauuaaucaaaggcucuuuucagagccaccaaaaaaaaaaaaaaaaaaaaaaaaaaaaaaaaaaaaaaaaaaaaaaaaaaaaaaaaaaaaaaaaagaauu

SEQ ID NO: 27674 - RNA, 1655 nt, Artificial Sequence
  mRNA product Design i-3 (hSL-A64-N5) comprising derived and/or modified sequence from LASV(Nig08-A19;Clade III)__ADU56618__GPCmut4 (opt1)
aggagaaagcuuaccaugggccagaucgugaccuucuuccaggaggucccccacgugaucgaggaggugaugaacaucguccugaucgcccucagcauccuggccauccugaaggggcucuacaacaucgcgaccugcggccugaucgggcuggugacguuccuccugcuguccggccgcagcugcuccaugaccuacaaggggguguacgagcuccagacccuggagcugaacaugaacacccucaacaugugcaugccgcugagcugcaccaagaacaacucccaccacuacaucauggucggcaacgagaccggccuggagcucacccugacgaacaccagccugcuccaccacaaguucugcaaccuguccgacgcccacaagaagaaccuguacgaccacacccucaugagcaucaucuccaccuuccaccugagcauccccaacuucaaccaguacgaggccauguccugcgacuucaacgggggcaagaucacggugcaguacaaccugagccacuccuacgccaucgacgccgcgaaccacugcgggaccguggccaacggcguccuccagaccuucaugcggauggccuggggcgggagcuacaucgcccuggacuccggccgcgggaagugggacugcaucaugaccagcuaccaguaccugaucauccagaacacgaccugggaggaccacugccaguucucccggcccagccccaucggcuaccucgggcugcugucccagcgcacccgggacaucuacaucagccgccggcgccggggcaccuucacguggacccugagcgacuccgagggcaacgagacccccgggggcuacugccucacccgcuggaugcugaucgaggcggagcugaagugcuucgggaacacggccguggccaagugcaacgagaagcacgacgaggaguucugcgacaugcuccggcuguucgacuucugcaagcaggccauccgccggcugaaggcccccgcgcagaugagcauccagcucaucaacaaggccgugaacgcccugaucaacgaccagcugaucaugaagaaccaccuccgcgacaucaugggcauccccuacugcaacuacuccaaguacugcuaccugaaccacaccagcaccgggcggaccucccugccccgcugcugccucgucagcaacggcuccuaccugaacgagacgcacuucagcgacgacaucgagcagcaggccgacaacaugaucaccgagaugcugcagaaggaguaccucgaccggcagggcaagaccccgcuggggcugguggaccuguucguguucuccaccagcuucuaccucaucuccaucuuccugcaccuggucaagaucccgacgcaccgccacaucgugggcaagcccugccccaagccccaccggcucaaccacauggggaucugcagcugcggccuguacaagcagccgggggugcccguccgcuggaagcggugaggacuaguuauaagacugacuagcccgaugggccucccaacgggcccuccuccccuccuugcaccgagauuaaucaaaggcucuuuucagagccaccaaaaaaaaaaaaaaaaaaaaaaaaaaaaaaaaaaaaaaaaaaaaaaaaaaaaaaaaaaaaaaaaagaauu

SEQ ID NO: 27675 - RNA, 1658 nt, Artificial Sequence
  mRNA product Design i-3 (hSL-A64-N5) comprising derived and/or modified sequence from LASV(G1180-SLE-2010;Clade IV)__AIT17168__GPCmut4 (opt1)
aggagaaagcuuaccaugggccagaucgugaccuucuuccaggaggucccccacgugaucgaggaggugaugaacaucguccugaucgcccucagcauccuggccgugcugaaggggcucuacaacuucgcgaccugcggccugguggggcugcucaccuuccugcugcucugcggccgcuccugcaccgccagccgguacaagggggucuacgagcugcagacccuggagcucaacauggagacccugaacaugugcaugccgcuguccugcaccaagaacaacagccaccacuacaucauggugggcaacgagaccggccucgagcugacccugacgaacaccuccaucaucaaccacaaguucugcaaccucagcgacgcccacaagaagaaccuguacgaccacgcccugauguccaucaucagcaccuuccaccucuccauccccaacuucaaccaguacgaggccaugagcugcgacuucaacgggggcaagaucuccgugcaguacaaccugagccacuccuacgcgggggacgccgccaaccacugcggcaccgucgccaacggggugcugcagacguucaugcgcauggcguggggcggcagcuacaucgcccucgacuccgggcacggcagcugggacugcaucaugaccuccuaccaguaccugaucauccagaacaccaccugggaggaccacugccaguucagccggcccucccccaucggguaccugggccuccugagccagcgcacgcgggacaucuacaucagccgccggcgccggggcaccuucaccuggacccuguccgacagcgaggggaaggacacgccgggcggguacugccugacccgcuggaugcucaucgaggccgagcugaagugcuucggcaacaccgccguggccaagugcaacgagaagcacgacgaggaguucugcgacaugcugcggcuguucgacuucugcaagcaggcgauccagcgccugaaggcccccgcccagauguccauccagcugaucaacaaggccgucaacgcccucaucaacgaccagcugaucaugaagaaccaccuccgggacaucauggggauccccuacugcaacuacagcaaguacugcuaccucaaccacaccacgaccggcaagaccucccugcccaagugcugccuggugagcaacggcuccuaccucaacgagacccacuucagcgacgacaucgagcagcaggcggacaacaugaucacggagaugcugcagaaggaguacauggagcgccaggggaagacgccccugggccucguggaccuguucgucuucuccaccagcuucuaccugaucuccaucuuccugcaccucgugaagaucccgacccaccggcacaucgugggcaagagcugccccaagccccaccgccugaaccacauggggaucugcuccugcgggcuguacaagcagcccggcgucccggugaaguggaagcggugaggacuaguuauaagacugacuagcccgaugggccucccaacgggcccuccuccccuccuugcaccgagauuaaucaaaggcucuuuucagagccaccaaaaaaaaaaaaaaaaaaaaaaaaaaaaaaaaaaaaaaaaaaaaaaaaaaaaaaaaaaaaaaaaagaauu

SEQ ID NO: 27676 - RNA, 1658 nt, Artificial Sequence
  mRNA product Design i-3 (hSL-A64-N5) comprising derived and/or modified sequence from LASV(G1442-SLE-2011;Clade IV)__AIT17180__GPCmut4 (opt1)
aggagaaagcuuaccaugggccagaucgugaccuucuuccaggaggucccccacgugaucgaggaggugaugaacaucguccugaucgcccucagcauccuggccgugcugaaggggcucuacaacguggcgaccugcggccugaucgggcuggucacguuccuccugcugugcggccgcuccugcaccaccacccucuacaaggggguguacgagcugcagacgcuggagcucaacauggagacccugaacaugugcaugccgcugagcugcaccaagaacaacucccaccacuacauccgggugggcaacgagacgggccucgagcugacccugaccaacaccagcaucaucaaccacaaguucugcaaccucuccgacgcccacaagaagaaccuguacgaccacgcccugaugagcaucaucuccacguuccaccucagcauccccaacuucaaccaguacgaggccauguccugcgacuucaacgggggcaagaucagcguccaguacaaccugucccacagcuacgccggggacgcggccaaccacugcggcaccguggccaacggggugcugcagaccuucaugcgcauggccuggggcggcuccuacaucgcgcucgacagcgggcggggcaacugggacugcaucaugaccuccuaccaguaccugaucauccagaacacgaccugggacgaccacugccaguucagccgccccucccccaucggguaccugggccuccugagccagcggacccgcgacgucuacaucucccggcgccgccggggcaccuucacguggacccugagcgacagcgaggggaaggacaccccgggcggguacugccugacccgguggaugcucaucgaggccgagcugaagugcuucggcaacacggccguggccaagugcaacgagaagcacgacgaggaguucugcgacaugcugcgccucuucgacuucugcaagcaggccauccagcggcugaaggcgcccgcccagauguccauccagcugaucaacaaggccgugaacgcccucaucaacgaccagcugaucaugaagaaccaccuccgcgacaucauggggauccccuacugcaacuacagcaaguacugcuaccugaacaacaccgccaccggcaagaccucccugcccaagugcugccugaucagcaacggcuccuaccucaacgagacgcacuucagcgacgacaucgagcaggaggcggacaacaugaucaccgagaugcugcagaaggaguacauggagcggcaggggaagacgccccugggccucgucgaccuguucguguucuccaccagcuucuaccugaucuccaucuuccugcaccucgugaagaucccgacccaccgccacaucgucggcaagagcugccccaagccccaccggcugaaccacauggggaucugcuccugcgggcuguacaagcagcccggcgugccggugcgcuggaagcggugaggacuaguuauaagacugacuagcccgaugggccucccaacgggcccuccuccccuccuugcaccgagauuaaucaaaggcucuuuucagagccaccaaaaaaaaaaaaaaaaaaaaaaaaaaaaaaaaaaaaaaaaaaaaaaaaaaaaaaaaaaaaaaaaagaauu

SEQ ID NO: 27677 - RNA, 1658 nt, Artificial Sequence
  mRNA product Design i-3 (hSL-A64-N5) comprising derived and/or modified sequence from LASV(G3010-SLE-2013;Clade IV)__AIT17344__GPCmut4 (opt1)
aggagaaagcuuaccaugggccagaucgugaccuucuuccaggaggucccccacgugaucgaggaggugaugaacaucguccugaucgcccucagcauccuggccgugcugaaggggcucuacaacuucgcgaccugcggccugguggggcuggucacguuccuccugcugugcggccgcuccugcaccaccagccucuacaaggggguguacgagcugcagacccuggagcucaacauggagacgcugaacaugugcaugccgcuguccugcaccaagaacaacagccaccacuacaucauggugggcaacgagaccggccucgagcugacgcugaccaacaccuccaucaucaaccacaaguucugcaaccucagcgacgcccacaagaagaaccuguacaaccacgcccugauguccaucaucagcaccuuccaccucuccauccccaacuucaaccaguacgaggccaugagcugcgacuucaacgggggcaagaucuccguccaguacaaccugagccacuccuacgccggggacgcggccagccacugcggcacgguggccaacggggugcugcagaccuucaugcggauggccuggggcggcuccuacaucgcgcucgacagcggguacggcaagugggacugcaucaugaccuccuaccaguaccugaucauccagaacaccacgugggaggaccacugccaguucagccgccccucccccaucggguaccugggccuccugagccagcggacccgcgacaucuacaucagccggcgccgccggggcaccuucaccuggacgcuguccgacagcgaggggaaggacaccccgggcggguacugccugacccgguggaugcucaucgaggccgagcugaagugcuucggcaacaccgccgucgccaagugcaacgagaagcacgacgaggaguucugcgacaugcugcgccucuucgacuucugcaagcaggccauccagcggcugaagacgcccgcgcagauguccauccagcugaucaacaaggccgugaacgcccucaucaacgaccagcugaucaugaagaaccaccuccgcgacaucauggggauccccuacugcaacuacagcaaguacugcuaccugaaccacaccaccaccggcaagacgucccugcccaagugcugccuggugagcaacggcuccuaccucaacgagacccacuucagcgacgacaucgagcagcaggccgacaacaugaucaccgagaugcugcagaaggaguacauggagcggcaggggaagacgccccugggccucgucgaccuguucguguucuccaccagcuucuaccugaucuccaucuuccugcaccucgugaagaucccgacccaccgccacaucgucggcaagagcugccccaagccccaccggcugaaccacauggggaucugcuccugcgggcuguacaagcagcccggcgugccggugcgcuggaagcggugaggacuaguuauaagacugacuagcccgaugggccucccaacgggcccuccuccccuccuugcaccgagauuaaucaaaggcucuuuucagagccaccaaaaaaaaaaaaaaaaaaaaaaaaaaaaaaaaaaaaaaaaaaaaaaaaaaaaaaaaaaaaaaaaagaauu

SEQ ID NO: 27678 - RNA, 1658 nt, Artificial Sequence
  mRNA product Design i-3 (hSL-A64-N5) comprising derived and/or modified sequence from LASV(G502-SLE-2009;Clade IV)__AIT17126__GPCmut4 (opt1)
aggagaaagcuuaccaugggccagaucgugaccuucuuccaggaggucccccacgugaucgaggaggugaugaacaucguccugaucgcccucagcauccuggccgugcugaaggggcucuacaacuucgcgaccugcggccugguggggcugcucacguuccugcugcucugcggccgcuccugcaccaccgggcuguacaagggcgucuacgagcugcagacccucgagcugaacauggagacgcugaacaugugcaugccgcucagcugcaccaagaacaacucccaccacuacaucauggugggcaacgagaccgggcuggagcugacgcucaccaacaccagcaucaucaaccacaaguucugcaaccuguccgacgcccacaagaagaaccuguacgaccacgcccucaugagcaucaucuccaccuuccaccugagcauccccaacuucaaccaguacgaggccauguccugcgacuucaacggcgggaagaucagcgugcaguacaaccugucccacagcuacgccggcgacgcggccgaccacugcgggacggucgccaacggcgugcuccagaccuucaugcggauggccuggggcggguccuacaucgcgcuggacagcggccgcgggcggugggacugcaucaugaccuccuaccaguaccugaucauccagaacaccacgugggaggaccacugccaguucagccgccccucccccaucggcuaccucggccugcugagccagcggacccgcgacaucuacaucucccggcgccgccgggggaccuucaccuggacgcugagcgacagcgagggcaaggacacccccgggggcuacugccucacccgguggaugcugaucgaggccgagcugaagugcuucgggaacaccgccguggccaagugcaacgagaagcacgacgaggaguucugcgacaugcuccgccuguucgacuucugcaagcaggccauccagcggcugaaggcgcccgcccagauguccauccagcucaucaacaaggccgucaacgcccugaucaacgaccagcuggugaugaagaaccaccuccgcgacaucaugggcauccccuacugcaacuacagccgguacugcuaccugaaccacacgaccaccggccgcaccucccugcccaagugcugccucgugagcaacggguccuaccugaacgagacgcacuucagcgacgacaucgagcagcaggccgacaacaugaucaccgagaugcugcagaaggaguacauggagcggcagggcaagaccccgcucgggcuggucgaccuguucguguucuccaccagcuucuaccugaucuccaucuuccuccaccuggugaagaucccgacgcaccgccacaucgucggcaagagcugccccaagccccaccggcugaaccacauggggaucugcuccugcggccucuacaagcagcccggcgugccggugaaguggaagcgcugaggacuaguuauaagacugacuagcccgaugggccucccaacgggcccuccuccccuccuugcaccgagauuaaucaaaggcucuuuucagagccaccaaaaaaaaaaaaaaaaaaaaaaaaaaaaaaaaaaaaaaaaaaaaaaaaaaaaaaaaaaaaaaaaagaauu

SEQ ID NO: 27679 - RNA, 1658 nt, Artificial Sequence
  mRNA product Design i-3 (hSL-A64-N5) comprising derived and/or modified sequence from LASV(G733-SLE-2010;Clade IV)__AIT17154__GPCmut4 (opt1)
aggagaaagcuuaccaugggccagaucgugaccuucuuccaggaggucccccacgugaucgaggaggugaugaacaucguccugaucgcccucagcauccuggccgugcugaaggggcucuacaacuucgcgaccugcggcaucguggggcuggucuccuuccugcuccugugcggccgcagcugcacgaccucccuguacaaggggguguacgagcuccagacccuggagcugaacauggagacccucaacaugugcaugccgcugagcugcaccaagaacaacucccaccacuacaucauggugggcaacgagaccggccuggagcucacccugacgaacaccagcaucaucaaccacaaguucugcaaccuguccgacgcccacaagaagaaccucuacgaccacgcccugaugagcaucaucuccaccuuccaccugagcauccccaacuucaaccaguacgaggccauguccugcgacuucaacgggggcaagaucagcguccaguacaaccucucccacagcuacgccggggacgcggccaaccacugcggcaccaucgccaacggggugcugcagacguucaugcggauggccuggggcggcuccuacaucgcgcuggacagcgggcgcgaccggugggacugcaucaugaccuccuaccaguaccucaucauccagaacaccaccugggaggaccacugccaguucagccgccccucccccaucggcuaccuggggcugcucagccagcggacgcgcgacaucuacaucagccggcgccgccggggcaccuucaccuggacccucuccgacagcgagggcaaggacacgcccgggggcuacugccugacccgguggaugcugaucgaggccgagcucaagugcuucgggaacaccgccguggccaagugcaacgagaagcacgacgaggaguucugcgacaugcugcgccuguucgacuucugcaagcaggccauccagcggcucaaggcgcccgcccagauguccauccagcugaucaacaaggccgucaacgcccugaucaacgaccagcucaucaugaagaaccaccuccgcgacaucaugggcauccccuacugcaacuacagcaaguacugcuaccugaaccacaccacgaccgggaagaccucccugcccaagugcugccuggugagcaacggcuccuaccugaacgagacccacuucagcgacgacaucgagcagcaggccgacaacaugaucacggagaugcuccagaaggaguacauggagcggcagggcaagaccccgcuggggcugguggaccucuucgucuucuccaccagcuucuaccugaucuccaucuuccugcaccuggugaagaucccgacccaccgccacguggucggcaagagcugccccaagccccaccggcucaaccacauggggaucugcuccugcggccuguacgggcagcccggcgugccggugaaguggaagcgcugaggacuaguuauaagacugacuagcccgaugggccucccaacgggcccuccuccccuccuugcaccgagauuaaucaaaggcucuuuucagagccaccaaaaaaaaaaaaaaaaaaaaaaaaaaaaaaaaaaaaaaaaaaaaaaaaaaaaaaaaaaaaaaaaagaauu

SEQ ID NO: 27680 - RNA, 1658 nt, Artificial Sequence
  mRNA product Design i-3 (hSL-A64-N5) comprising derived and/or modified sequence from MOPV/LASV reassortant(IGS-1;Clade IV)__AFY05576__GPCmut4 (opt1)
aggagaaagcuuaccaugggccagaucgugaccuucuuccaggaggucccccacgugaucgaggaggugaugaacaucguccugaucgcccucagcgugcuggccgugcugaaggggcucuacaacuucgcgaccugcggccuggucgggcuggugacguuccuccugcugugcggccgcuccugcaccaccagccucuacaaggggguguacgagcugcagacccuggagcucaacauggagacgcugaacaugugcaugccgcuguccugcaccaagaacaacagccaccacuacaucauggucggcaacgagaccggccucgagcugacgcugaccaacaccuccaucaucaaccacaaguucugcaaccucagcgacgcccacaagaagaaccuguacgaccacgcccugauguccaucaucagcaccuuccaccucuccauccccaacuucaaccaguacgaggccaugagcugcgacuucaacgggggcaagaucuccgugcaguacaaccugagccacuccuacgccggggacgcggccaaccacugcggcacgguggccaacgggguccugcagaccuucaugcggauggccuggggcggcagcuacaucgcgcucgacuccgggcgcggcaacugggacugcaucaugaccagcuaccaguaccugaucauccagaacaccacgugggaggaccacugccaguucucccggcccagccccaucggguaccugggccuccugucccagcgcacccgggacaucuacaucagccgccggcgccggggcaccuucaccuggacgcugagcgacuccgagggggaggacaccccgggcggguacugccugacccgcuggaugcucaucgaggccgagcugaagugcuucggcaacaccgccguggccaagugcaacgagaagcacgacgaggaguucugcgacaugcugcggcuguucgacuucugcaagcaggccauccagcgccugaaggcgcccgcccagaugagcauccagcugaucaacaaggccgugaacgcccucaucaacgaccagcugaucaugaagaaccaccuccgggacaucauggggauccccuacugcaacuacuccaaguacugcuaccucaaccacacgaccaccggccgcaccagccugcccaagugcugccuggucuccaacggcagcuaccucaacgagacgcacuucuccgacgacaucgagcagcaggccgacaacaugaucaccgagaugcugcagaaggaguacauggagcggcaggggaagacgccccugggccucguggaccuguucguguucagcaccuccuucuaccugaucagcaucuuccugcaccucgucaagaucccgacccaccgccacaucguggggaaguccugccccaagccccaccggcugaaccacaugggcaucugcagcugcgggcuguacaagcagcccggcgugccggucaaguggaagcgcugaggacuaguuauaagacugacuagcccgaugggccucccaacgggcccuccuccccuccuugcaccgagauuaaucaaaggcucuuuucagagccaccaaaaaaaaaaaaaaaaaaaaaaaaaaaaaaaaaaaaaaaaaaaaaaaaaaaaaaaaaaaaaaaaagaauu

SEQ ID NO: 27681 - RNA, 1658 nt, Artificial Sequence
  mRNA product Design i-3 (hSL-A64-N5) comprising derived and/or modified sequence from LASV(LM765-SLE-2012;Clade IV)__AIT17814__GPCmut4 (opt1)
aggagaaagcuuaccaugggccagaucgugaccuucuuccaggaggucccccacgugaucgaggaggugaugaacaucguccugaucgcccucagcauccuggccgugcugaaggggcucuacaacuucgcgaccugcggccugguggggcuggucacguuccuccugcugugcggccgcuccugcaccaccagccucuacaaggggguguacgagcugcagacccuggagcucaacauggagacgcugaacaugugcaugccgcuguccugcaccaagaacaacagccaccacuacaucauggugggcaacgagaccggccucgagcugacgcugaccaacaccuccaucaucgaccacaaguucugcaaccucagcgacgcccaccggaagaaccuguacgaccacgcccugauguccaucaucagcaccuuccaccucuccauccccaacuucaaccaguacgaggccaugagcugcgacuucaacgggggcaagaucuccguccaguacaaccugagccacuccuacgccaaggacgcggccgaccacugcgggacgguggccaacggcgugcugcagaccuucaugcgcauggccuggggcgggagcuacaucgcgcucgacuccggccgggggcgcugggacugcaucaugaccagcuaccaguaccugaucauccagaacaccacgugggaggaccacugccaguucucccggcccagccccaucggcuaccuggggcuccugucccagcgcacccgggacaucuacaucagccgccggcgccggggcaccuucaccuggacgcugagcgacuccgagggcaaggacacccccgggggcuacugccugacccgcuggaugcucaucgaggccgagcugaagugcuucgggaacaccgccgucgccaagugcaacgagaagcacgacgaggaguucugcgacaugcugcggcuguucgacuucugcaagcaggccauccagcgccugaaggcgcccgcccagaugagcauccagcugaucaacaaggccgugaacgcccucaucaacgaccagcugaucaugaagaaccaccuccgggacaucaugggcauccccuacugcaacuacuccaaguacugcuaccucaaccacacgaccaccgggaagaccagccugcccaagugcugccugguguccaacggcagcuaccucaacgagacgcacuucuccgacgacaucgagcagcaggccgacaacaugaucaccgagaugcugcagaaggaguacauggagcgccagggcaagaccccgcuggggcucgucgaccuguucguguucagcaccuccuucuaccugaucagcaucuuccugcaccucgugaagaucccgacgcaccggcacaucgucggcaagcccugccccaagccccaccgccugaaccacauggggaucugcuccugcggccuguacaagcagccgggggugcccgugaaguggaagcggugaggacuaguuauaagacugacuagcccgaugggccucccaacgggcccuccuccccuccuugcaccgagauuaaucaaaggcucuuuucagagccaccaaaaaaaaaaaaaaaaaaaaaaaaaaaaaaaaaaaaaaaaaaaaaaaaaaaaaaaaaaaaaaaaagaauu

SEQ ID NO: 27682 - RNA, 1658 nt, Artificial Sequence
  mRNA product Design i-3 (hSL-A64-N5) comprising derived and/or modified sequence from LASV(LM776-SLE-2012;Clade IV)__AIT17824__GPCmut4 (opt1)
aggagaaagcuuaccaugggccagaucgugaccuucuuccaggaggucccccacgugaucgaggaggugaugaacaucguccugaucgcccucagcauccuggccgugcugaaggggcucuacaacuucgcgaccugcggccugguggggcuggucacguuccuccugcugugcggccgcuccugcaccaccagcguguacaaggggguguacgagcuccagacccuggagcugaacauggagacgcucaacaugugcaugccgcuguccugcaccaagaacaacagccaccacuacaucauggucggcaacgagaccggccuggagcucacgcugaccaacaccuccaucaucaaccacaaguucugcaaccugagcgacgcccacaagaagaaccucuacgaccacgcccugauguccaucaucagcaccuuccaccuguccauccccaacuucaaccaguacgaggccaugagcugcgacuucaacgggggcaagaucuccgugcaguacaaccucagccacuccuacgccggggacgcggccaaccacugcggcacgguggccaacgggguccugcagaccuucaugcggauggccuggggcggcagcuacaucgcgcuggacuccgggcacggcaagugggacugcaucaugaccagcuaccaguaccucaucauccagaacaccacgugggaggaccacugccaguucucccgccccagccccaucggguaccugggccugcucucccagcggacccgcgacaucuacaucagccggcgccgccggggcaccuucaccuggacgcucagcgacuccgaggggaaggacaccccgggcggguacugccugacccgguggaugcugaucgaggccgagcucaagugcuucggcaacaccgccguggccaagugcaacgagaagcacgacgaggaguucugcgacaugcugcgccuguucgacuucugcaagcaggccauccagcggcucaaggcgcccgcccagaugagcauccagcugaucaacaaggccgugaacgcccugaucaacgaccagcucaucaugaagaaccaccuccgcgacaucauggggauccccuacugcaacuacuccaaguacugcuaccugaaccacacgaccaccggcaagaccagccugcccaagugcugccuggucuccaacggcagcuaccugaacgagacgcacuucuccgacgacaucgagcagcaggccgacaacaugaucaccgagaugcuccagaaggaguacauggagcggcaggggaagacgccccugggccugguggaccucuucguguucagcaccuccuucuaccugaucagcaucuuccugcaccuggucaagaucccgacccaccgccacaucguggggaaguccugccccaagccccaccggcucaaccacaugggcaucugcagcugcgggcuguacaagcagcccggcgugccgguccgcuggaagcggugaggacuaguuauaagacugacuagcccgaugggccucccaacgggcccuccuccccuccuugcaccgagauuaaucaaaggcucuuuucagagccaccaaaaaaaaaaaaaaaaaaaaaaaaaaaaaaaaaaaaaaaaaaaaaaaaaaaaaaaaaaaaaaaaagaauu

SEQ ID NO: 27683 - RNA, 1658 nt, Artificial Sequence
  mRNA product Design i-3 (hSL-A64-N5) comprising derived and/or modified sequence from LASV(Mad39;Clade IV)__ANH09722__GPCmut4 (opt1)
aggagaaagcuuaccaugggccagaucgugaccuucuuccaggaggucccccacgugaucgaggaggugaugaacaucguccugaucgcccucagcauccuggccgugcugaaggggcucuacaacguggcgaccugcggccugaucgggcuggucacguuccuccugcugugcggccgcuccugcaccaccacccucuacaaggggguguacgagcugcaggcccuggagcucaacauggagacgcugaacaugugcaugccgcugagcugcaccaagaacaacucccaccacuacauccgggugggcaacgagaccggccucgagcugacgcugaccaacaccagccucaucaaccacaaguucugcaaccuguccgacgcccacaagaagaaccuguacgaccacgcccucaugagcaucaucuccaccuuccaccugagcauccccaacuucaaccaguacgaggccauguccugcgacuucaacgacgggaagaucagcguccaguacaaccugucccacacguacgcgggcgacaccgccaaccacugcgggaccguggccaacggcgugcuccagaccuucaugcgcauggccuggggcgggagcuacaucgcgcuggacuccggccgcgggggcugggacugcaucaugacgagcuaccaguaccugaucauccagaacaccaccugggaggaccacugccaguucucccggcccagccccaucggguaccucggccugcugucccagcggacccgcgacaucuacaucagccggcgccgccggggcacguucaccuggacccuguccgacagcgaggggaaggacaccccgggcggguacugccucacgcgguggaugcugaucgaggccgagcugaagugcuucggcaacaccgccgucgccaagugcaacgagaagcacgacgaggaguucugcgacaugcuccgccuguucgacuucugcaagcaggccauccagcggcugaaggcgcccgcccagaugagcauccagcucaucaacaaggccgugaacgcccugaucaacgaccagcugaucaugaagaaccaccuccgcgacaucauggggauccccuacugcaacuacuccaaguacugcuaccugaaccacaccgugaccggcaagacgagccugcccaagugcugccucgucuccaacggcagcuaccugaacgagacccacuucuccgacgacaucgagcagcaggccgacaacaugaucaccgagaugcugcagaaggaguacauggagcggcaggggaagacgccccucggccugguggaccuguucguguucagcaccuccuucuaccugaucagcaucuuccuccaccuggucaagaucccgacccaccgccacgugguggggaagcccugccccaagccccaccggcugaaccacaugggcaucugcuccugcggguucuacaagcagccgggcguccccgugcgcuggaagcggugaggacuaguuauaagacugacuagcccgaugggccucccaacgggcccuccuccccuccuugcaccgagauuaaucaaaggcucuuuucagagccaccaaaaaaaaaaaaaaaaaaaaaaaaaaaaaaaaaaaaaaaaaaaaaaaaaaaaaaaaaaaaaaaaagaauu

SEQ ID NO: 27684 - RNA, 1658 nt, Artificial Sequence
  mRNA product Design i-3 (hSL-A64-N5) comprising derived and/or modified sequence from LASV(Z0947-SLE-2011;Clade IV)__AIT17840__GPCmut4 (opt1)
aggagaaagcuuaccaugggccagaucgugaccuucuuccaggaggucccccacgugaucgaggaggugaugaacaucguccugaucgcccucagcauccuggccgugcugaaggggcucuacaacuucgcgaccugcggccugguggggcuggucacguuccuccugcugugcggccgcuccugcaccaucagccucuacaaggggguguacgagcugcagacccuggagcucaacauggagacccugaacaugugcaugccgcuguccugcaccaagaacaacagccaccacuacaucauggugggcaacgagaccggccucgagcugacccugacgaacaccuccaucaucaaccacaaguucugcaaccucagcgacgcccacaagaagaaccuguacgaccacgcccugauguccaucaucagcaccuuccaccucuccauccccaacuucaaccaguacgaggccaugagcugcgacuucaacgggggcaagaucuccguccaguacaaccugagccacuccuacgccggggacgcggccaaccacugcggcaccguggccaacggggugcugcagacguucaugcggauggccuggggcggcagcuacaucgcgcucgacuccgggcgcgaccggugggacugcaucaugaccagcuaccaguaccugaucauccagaacaccaccugggaggaccacugccaguucucccgccccagccccaucggcuaccuggggcuccugucccagcggacgcgcgacaucuacaucagccggcgccgccggggcaccuucaccuggacccugagcgacuccgagggcaaggacacgcccgggggcuacugccugacccgguggaugcucaucgaggccgagcugaagugcuucgggaacaccgccgucgccaagugcaacgagaagcacgacgaggaguucugcgacaugcugcgccucuucgacuucugcaagcaggccauccagcggcugaaggcgcccgcccagaugagcauccagcugaucaacaaggccgugaacgcccucaucaacgaccagcugaucaugaagaaccaccuccgcgacaucaugggcauccccuacugcaacuacuccaaguacugcuaccugaaccacaccacgaccgggaagaccagccugcccaagugcugccugguguccaacggcagcuaccucaacgagacccacuucuccgacgacaucgagcagcaggccgacaacaugaucacggagaugcugcagaaggaguacauggagcggcagggcaagaccccgcuggggcucgucgaccuguucguguucagcaccuccuucuaccugaucagcaucuuccugcaccucgugaagaucccgacccaccgccacaucgucggcaagcccugccccaagccccaccggcugaaccacauggggaucugcuccugcggccuguacaagcagccgggggugcccgugaaguggaagcgcugaggacuaguuauaagacugacuagcccgaugggccucccaacgggcccuccuccccuccuugcaccgagauuaaucaaaggcucuuuucagagccaccaaaaaaaaaaaaaaaaaaaaaaaaaaaaaaaaaaaaaaaaaaaaaaaaaaaaaaaaaaaaaaaaagaauu

SEQ ID NO: 27685 - RNA, 1658 nt, Artificial Sequence
  mRNA product Design i-3 (hSL-A64-N5) comprising derived and/or modified sequence from LASV(Josiah;Clade IV)__NP_694870__GPCmut4 (opt1)
aggagaaagcuuaccaugggccagaucgugaccuucuuccaggaggucccccacgugaucgaggaggugaugaacaucguccugaucgcccucagcgugcuggccgugcugaaggggcucuacaacuucgcgaccugcggccuggucgggcuggugacguuccuccugcugugcggccgcuccugcaccaccagccucuacaaggggguguacgagcugcagacccuggagcucaacauggagacgcugaacaugugcaugccgcuguccugcaccaagaacaacagccaccacuacaucauggucggcaacgagaccggccucgagcugacccugacgaacaccuccaucaucaaccacaaguucugcaaccucagcgacgcccacaagaagaaccuguacgaccacgcccugauguccaucaucagcaccuuccaccucuccauccccaacuucaaccaguacgaggccaugagcugcgacuucaacgggggcaagaucuccgugcaguacaaccugagccacuccuacgccggggacgcggccaaccacugcggcaccguggccaacgggguccugcagacguucaugcggauggccuggggcggcagcuacaucgcgcucgacuccgggcgcggcaacugggacugcaucaugaccagcuaccaguaccugaucauccagaacaccaccugggaggaccacugccaguucucccggcccagccccaucggguaccugggccuccugucccagcgcacgcgggacaucuacaucagccgccggcgccggggcaccuucaccuggacccugagcgacuccgaggggaaggacacgccgggcggguacugccucacccgcuggaugcugaucgaggccgagcugaagugcuucggcaacaccgccguggccaagugcaacgagaagcacgacgaggaguucugcgacaugcuccggcuguucgacuucugcaagcaggccauccagcgccugaaggcgcccgcccagaugagcauccagcucaucaacaaggccgugaacgcccugaucaacgaccagcugaucaugaagaaccaccuccgggacaucauggggauccccuacugcaacuacuccaaguacugcuaccugaaccacaccacgaccggccgcaccagccugcccaagugcugccucgucuccaacggcagcuaccugaacgagacccacuucuccgacgacaucgagcagcaggccgacaacaugaucacggagaugcugcagaaggaguacauggagcggcaggggaagaccccgcucggccugguggaccuguucguguucagcaccuccuucuaccugaucagcaucuuccuccaccuggucaagauccccacccaccgccacaucguggggaaguccugccccaagccccaccggcugaaccacaugggcaucugcagcugcgggcucuacaagcagccgggcgugcccgucaaguggaagcgcugaggacuaguuauaagacugacuagcccgaugggccucccaacgggcccuccuccccuccuugcaccgagauuaaucaaaggcucuuuucagagccaccaaaaaaaaaaaaaaaaaaaaaaaaaaaaaaaaaaaaaaaaaaaaaaaaaaaaaaaaaaaaaaaaagaauu

SEQ ID NO: 27686 - RNA, 1655 nt, Artificial Sequence
  mRNA product Design i-3 (hSL-A64-N5) comprising derived and/or modified sequence from LASV(LP;Clade I)__AAF86701__GPCmut4 (opt1)
aggagaaagcuuaccaugggccagaucaucaccuucuuccaggaggugccccacgucaucgaggaggugaugaacaucgugcugaucgcccucagccugcuggccauccucaaggggcuguacaacaucgcgaccugcggcaucaucgggcuggucgccuuccucuuccugugcggcaaguccugcagccugacgcucaagggcggguacgagcugcagacccuggagcucaacauggagacccugaacaugugcaugccgcuguccugcaccaagaacagcucccaccacuacauccgcgugggcaacgagacggggcucgagcugacccugaccaacaccagcaucaucaaccacaaguucugcaaccucuccgacgcccacaagaagaaccuguacgaccacgcccugaugagcaucaucuccacguuccaccucagcauccccaacuucaaccaguacgaggccauguccugcgacuucaacggcgggaagaucagcgugcaguacaaccugucccacagcuacgcgggcgacgccgccgagcacugcgggaccgucgccaacggcgugcugcagaccuucaugcggauggcguggggcgggcgcuacaucgcccucgacuccggcaaggggaacugggacugcaucaugaccagcuaccaguaccugaucauccagaacacgaccugggaggaccacugccaguucucccggcccagccccaucggcuaccugggccuccugucccagcgcacccgggacaucuacaucagccgccggcgccgggggaccuucacguggacccugagcgacuccgagggcaacgagacccccgggggcuacugccucacccgcuggaugcugaucgaggccgagcugaagugcuucgggaacacggccguggccaagugcaacgagaagcacgacgaggaguucugcgacaugcuccggcuguucgacuucugcaagcaggcgauccgccggcugaaggccccggcccagaugagcauccagcucaucaacaaggccgucaacgcccugaucaacgaccagcugaucaugaagaaccaccuccgcgacaucaugggcauccccuacugcaacuacuccaaguacugcuaccugaaccacaccagcuccggccggaccagccugcccaagugcugccucaucuccaacgggagcuaccugaacgagacccaguucuccgacgacaucgagcagcaggcggacaacaugaucacggagaugcugcagaaggaguacaucgagcgccagggcaagaccccgcucgggcugguggacaucuucaucuucagcaccuccuucuaccugaucagcaucuuccugcaccucaucaagauccccacccaccggcacaucgugggcaagcccugccccaagccgcaccgccugaaccacaugggggucugcuccugcggccuguacaagcaccccggcgugcccacgaaguggaagcggugaggacuaguuauaagacugacuagcccgaugggccucccaacgggcccuccuccccuccuugcaccgagauuaaucaaaggcucuuuucagagccaccaaaaaaaaaaaaaaaaaaaaaaaaaaaaaaaaaaaaaaaaaaaaaaaaaaaaaaaaaaaaaaaaagaauu

SEQ ID NO: 27687 - RNA, 1655 nt, Artificial Sequence
  mRNA product Design i-3 (hSL-A64-N5) comprising derived and/or modified sequence from LASV(803213;Clade II)__AAF86703__GPCmut4 (opt1)
aggagaaagcuuaccaugggccagaucaucaccuucuuccaggaggugccccacgucaucgaggaggugaugaacaucgugcugaucgcccucagccugcuggccauccucaaggggaucuacaacgucgcgaccugcggccuguucgggcugaucuccuuccuccugcugugcggccgcagcugcuccgugacguacaaggggguguacgagcuccagacccuggagcugaacauggccaaccucaacaugugcaugccgcugagcugcaccaagaacaacucccaccacuacaucauggucggcaacgagaccggccuggagcucacgcugaccaacaccagcaucaucaaccacaaguucugcaaccuguccgacgcccacaagaagaaccucuacgaccacgcccugaugagcaucaucuccaccuuccaccugagcauccccaacuucaaccaguacgaggccauguccugcgacuucaacgggggcaagaucagcgugcaguacaaccucucccacagcuucgcgguggacgccgccaaccacugcgggacgaucgccaacggcguccugcagaccuucaugcggauggcguggggcggguccuacaucgcccuggacagcggcaaggggaacugggacugcaucaugaccuccuaccaguaccucaucauccagaacaccacgugggaggaccacugccaguucagccgccccucccccaucggcuaccuggggcugcucagccagcggacccgcgacaucuacaucagccggcgccggcgcggcaccuucaccuggacgcuguccgacagcgagggcaacgaggcccccgggggcuacugccugacccgguggaugcucaucgaggccgagcugaagugcuucgggaacaccgccguggcgaagugcaacgagaagcacgacgaggaguucugcgacaugcugcgccucuucgacuucugcaagcaggccaucaagcggcugaagaccccggcccagauguccauccagcugaucaacaaggccgugaacgcccucaucaacgaccagcugaucaugaagaaccaccuccgcgacaucaugggcauccccuacugcaacuacagccgguacugcuaccugaaccacacggucaccgggaagaccucccugccccgcugcugccuggugagcaacggcuccuaccucaacgagacccacuucagcgacgacaucgagcagcaggcggacaacaugaucacggagaugcugcagaaggaguacauggaccggcagggcaagaccccgcuggggcucguggaccuguucgucuucuccaccagcuucuaccugaucuccaucuuccugcaccucgugaagauccccacccaccgccacaucgugggcaagcccugccccaagccgcaccggcugaaccacauggggaucugcagcugcggccuguacaagcaccccgggguccccgugaaguggaagcgcugaggacuaguuauaagacugacuagcccgaugggccucccaacgggcccuccuccccuccuugcaccgagauuaaucaaaggcucuuuucagagccaccaaaaaaaaaaaaaaaaaaaaaaaaaaaaaaaaaaaaaaaaaaaaaaaaaaaaaaaaaaaaaaaaagaauu

SEQ ID NO: 27688 - RNA, 1655 nt, Artificial Sequence
  mRNA product Design i-3 (hSL-A64-N5) comprising derived and/or modified sequence from LASV(GA391;Clade III)__CAA36645__GPCmut4 (opt1)
aggagaaagcuuaccaugggccagaucgugaccuucuuccaggaggucccccacgugaucgaggaggugaugaacaucguccugaucgcccucagcauccuggccauccugaaggggcucuacaacguggcgaccugcggccugaucgggcuggugacguuccuccugcuguccggccgcagcugcucccucaucuacaaggggaccuacgagcugcagacccuggagcucaacauggagacccugaacaugugcaugccgcugagcugcacgaagaacaacucccaccacuacauccgggucggcaacgagaccggccucgagcugacccugaccaacacgagcauccucaaccacaaguucugcaaccuguccgacgcccacaagcgcaaccuguacgaccacagccucauguccaucaucagcaccuuccaccuguccauccccaacuucaaccaguacgaggccaugagcugcgacuucaacgggggcaagaucaccgugcaguacaaccugucccacagcuucgccguggacgccgcggggcacugcggcacccucgccaacgggguccugcagacguucaugcggauggccuggggcggcuccuacaucgcccuggacagcgggcgcggcaacugggacugcaucaugaccuccuaccaguaccucaucauccagaacaccaccugggacgaccacugccaguucagccggcccucccccaucggguaccugggccugcucagccagcgcacgcgggacaucuacaucagccgccggcgccggggcaccuucaccuggacccuguccgacagcgaggggaacgagacgccgggcggguacugccugacccgcuggaugcucaucgaggcggagcugaagugcuucggcaacaccgccguggccaagugcaacgagaagcacgacgaggaguucugcgacaugcugcggcuguucgacuucugcaagcaggccauccgccggcugaagacccccgcccagauguccauccagcugaucaacaaggcggugaacgcccucaucaacgaccagcugaucaugaagaaccaccuccgcgacaucauggggauccccuacugcaacuacagccgguacugcuaccucaaccacacguccaccggcaagaccagccugccccgcugcugccugaucuccaacggcagcuaccucaacgagaccaaguucuccgacgacaucgagcagcaggccgacaacaugaucacggagaugcugcagaaggaguacaucgaccggcaggggaagaccccgcugggccuggucgaccucuucguguucagcaccuccuucuaccugaucagcaucuuccugcaccucgugaagauccccacccaccgccacaucgucgggaagcccugccccaagccgcaccggcugaaccacaugggcaucugcuccugcgggcuguacaagcagcccggcgugcccgugcgcuggaagcgcugaggacuaguuauaagacugacuagcccgaugggccucccaacgggcccuccuccccuccuugcaccgagauuaaucaaaggcucuuuucagagccaccaaaaaaaaaaaaaaaaaaaaaaaaaaaaaaaaaaaaaaaaaaaaaaaaaaaaaaaaaaaaaaaaagaauu

SEQ ID NO: 27689 - RNA, 1658 nt, Artificial Sequence
  mRNA product Design i-3 (hSL-A64-N5) comprising derived and/or modified sequence from LASV(AV;Clade V)__CCA30314__GPCmut4 (opt1)
aggagaaagcuuaccaugggccagaucgugaccuucuuccaggaggucccccacgugaucgaggaggugaugaacaucguccugaucgcccucagcauccuggccgugcugaaggggcucuacaacaucgcgaccugcggccugaucgggcugaucacguuccuccugcugugcggccgcuccugcagcuccaaccucuacaaggggguguacgagcugcagagccuggaccucaacauggagacccugaacaugugcaugccgcuguccugcaccaagaacaacagccaccacuacauccgggucggcaacgacaccggccucgagcugacgcugaccaacaccuccauccucaaccacaaguucugcaaccugagcgacgcccacaagaaggaccuguacgaccacgcccucauguccaucaucagcaccuuccaccuguccauccccaacuucaaccaguacgaggccaugagcugcgacuucaacgggggcaagaucuccgugcaguacaaccugagccacuccuacgccaucgacgcggccaaccacugcgggacgguggccaacggcauccuccagaccuucaugcgcauggccuggggcgggagcuacaucgcgcuggacuccggccgggggaacugggacugcaucaugaccagcuaccaguaccugaucauccagaacaccacgugggagaaccacugccaguucucccgccccagccccaucggcuaccucgggcugcugagccagcggacccgcgacaucuacaucucccggcgccggcgcggcaccuucaccuggacgcucagcgacuccgagggcaacgccacccccgggggcuacugccugacccgguggaugcugaucgaggccgagcucaagugcuucgggaacaccgccgucgccaagugcaacgagaagcacgacgaggaguucugcgacaugcugcgccuguucgacuucugcaagcaggcgaucagccggcucaaguccccggcccagaugagcauccagcugaucaacaaggccgugaacgcccugaucaacgaccagcucaucaugaagaaccaccuccgcgacaucaugggcauccccuacugcaacuacuccaaguacugcuaccugaaccacacgaucaccgggaagaccagccugcccaagugcugccugguguccaacggcagcuaccugaacgagacccacuucuccgacgacaucgagcagcaggccgacaacaugaucacggagaugcuccagaaggaguacauggagcggcagggcaagaccccgcuggggcuggucgaccuguucguguucagcaccuccuucuaccucaucagcaucuuccugcgccuggugaagauccccacccaccggcacaucgucggcaagcccugccccaagccgcaccgccucaaccacauggggaucugcuccugcggccuguacaagcagcccggggugcccgugcgguggaagcgcugaggacuaguuauaagacugacuagcccgaugggccucccaacgggcccuccuccccuccuugcaccgagauuaaucaaaggcucuuuucagagccaccaaaaaaaaaaaaaaaaaaaaaaaaaaaaaaaaaaaaaaaaaaaaaaaaaaaaaaaaaaaaaaaaagaauu

SEQ ID NO: 27690 - RNA, 1655 nt, Artificial Sequence
  mRNA product Design i-3 (hSL-A64-N5) comprising derived and/or modified sequence from LASV(Togo/2016/7082;Clade VI)__AMR44577__GPCmut4 (opt1)
aggagaaagcuuaccaugggccagaucaucaccuucuuccaggaggugccccacgucaucgaggaggugaugaacaucgugcugaucgcccucagccugcuggccauccucaagggggucuacaacguggcgaccugcggcaucaucgggcuggugacguuccuguuccucugcggccgcuccugcagccugaucuacaagggguccuacgagcugcagacccucgagcugaacauggagacccugaacaugugcaugccgcucagcugcaccaagaacuccagccaccacuacauccgggucggcaacgagacgggccuggagcugacccucaccaacaccuccaucaucaaccacaaguucugcaaccugagcgacgcccacaagcgcaaccuguacgaccacgcccucauguccauccugagcacguuccaccuguccauccccaacuucaaccaguacgaggccaugagcugcgacuucaacgggggcaagaucuccgugcaguacaaccucagccacgccuacgcgguggacgccgccgagcacugcgggaccgucgccaacggcgugcugcagaccuucaugcggauggcguggggcggguccuacaucgcccuggacagcggccgcgggaacugggacugcaucaugaccuccuaccaguaccucaucauccagaacacgaccugggaggaccacugccaguucagccggcccucccccaucggcuaccuggggcugcucagccagcgcacccgggacaucuacaucagccgccggcgccggggcaccuucacguggacccuguccgacagcgagggcaacgagacccccgggggcuacugccugacccgcuggaugcucaucgaggccgagcugaagugcuucgggaacacggccguggccaagugcaacgagaagcacgacgaggaguucugcgacaugcugcggcuguucgacuucugcaagcaggcgauccagcgccugaaguccccggcccagaugagcauccagcugaucaacaaggccgucaacgcccucaucaacgaccagcugaucaugaagaaccaccuccgggacaugaugggcauccccuacugcaacuacuccaaguacugcuaccucaaccacaccagcuccgggcgcaccagccugcccaagugcugccugguguccaacggcagcuaccucaacgagacccacuucuccgacgacaucgagcagcaggccgacaacaugaucacggagaugcugcagaaggaguacaucgaccggcagggcaagaccccgcuggggcucguggaccuguucgucuucagcaccuccuucuaccugaucagcaucuuccugcaccucaucaagauccccacccaccgccacaucgugggcaagcccugccccaagccgcaccggcugaaccacauggggaucugcuccugcggccuguacaagcagcccggggugcccacgcgcuggaagcggugaggacuaguuauaagacugacuagcccgaugggccucccaacgggcccuccuccccuccuugcaccgagauuaaucaaaggcucuuuucagagccaccaaaaaaaaaaaaaaaaaaaaaaaaaaaaaaaaaaaaaaaaaaaaaaaaaaaaaaaaaaaaaaaaagaauu

SEQ ID NO: 27691 - RNA, 1655 nt, Artificial Sequence
  mRNA product Design i-3 (hSL-A64-N5) comprising derived and/or modified sequence from LASV(KAK-428;Clade n.d. (VII))__ANH09740__GPCmut4 (opt1)
aggagaaagcuuaccaugggccagaucgugaccuucuuccaggaggucccccacgugaucgaggaggugaugaacaucguccugaucgcccucagccugcuggccauccucaaggggcuguacaacuucgcgaccugcggcgugaucgggcugaucacguuccuccugcugugcggccgcuccugcagcgccaccuacaaggggcaguacgagcuccagacccuggagcugaacauggagucccucaacaugugcaugccgcugagcugcaccaagaacaacucccaccacuacauccgggccggcaacaacacgggccuggagcucacccugaccaacaccagcaucaucucccacaaguucugcaaccugagcgacgcccacaagaagaaccucuacgaccacacgcugauguccaucaucaccaccuuccaccugagcauccccaacuucaaccaguacgaggccauguccugcgacuucaacgggggcaagaucagcauccaguacaaccucucccacagcuacgcgggggacgccgcccagcacugcggcaccguggccaacgggguccugcagacguucaugcgcauggcguggggcggcuccuaccuggcccucgacagcgggcggcgcggcugggacugcaucaucuccagcuaccaguaccugaucauccagaacaccaccugggacgaccacugccaguucucccggcccagccccaucggguaccugggcuucgugagccagaagacccgcgacaucuacaucucccggcgccggcgcggcacguucaccuggacccucagcgacuccgaggggcacgacaugccgggcggguacugccugacccgguggaugcugaucgaggccgaccucaagugcuucggcaacacggccguggccaagugcaacgagaagcacgacgaggaguucugcgacauguggcgccuguucgacuucugcaagcaggcgauccagcggcugaaggcccccgcccagaugaacauccagcucaucaacaaggccgucaacgcccugaucaacgaccagcugaugaugaagaaccaccuccgcgacaucauggggauccccuacugcaacuacagcaaguucugcuaccugaacaacaccaccaccggccggacgucccugccccgcugcugccucaucagcaacggcuccuaccugaacgagacccacuucagcgacgacaucgagcagcaggcggacaacaugaucaccgagaugcugcagaaggaguacauggaccggcaggggaagaccccgcucggccugguggaccuguucguguucuccacgagcuucuaccucaucaccaucuuccugcaccuggucaagauccccacccaccgccacaucguggggaagcccugccccaagccgcaccggcugaaccacaugggcaucugcuccugcgggcucuacaagcagcccggcgugcccguccgcuggaagcggugaggacuaguuauaagacugacuagcccgaugggccucccaacgggcccuccuccccuccuugcaccgagauuaaucaaaggcucuuuucagagccaccaaaaaaaaaaaaaaaaaaaaaaaaaaaaaaaaaaaaaaaaaaaaaaaaaaaaaaaaaaaaaaaaagaauu

SEQ ID NO: 27692 - RNA, 1655 nt, Artificial Sequence; identical to SEQ ID NO: 27686
  mRNA product Design i-3 (hSL-A64-N5) comprising derived and/or modified sequence from LASV(Pinneo-NIG-1969;Clade I)__AIT17836__GPCmut4 (opt1)

SEQ ID NO: 27693 - RNA, 1655 nt, Artificial Sequence
  mRNA product Design i-3 (hSL-A64-N5) comprising derived and/or modified sequence from LASV(ISTH0009-NIG-2011;Clade II)__AIT17404__GPCmut4 (opt1)
aggagaaagcuuaccaugggccagaucaucaccuucuuccaggaggugccccacgucaucgaggaggugaugaacaucgugcugaucgcccucagccugcuggccauccucaaggggaucuacaacgucgcgaccugcggccuguucgggcugguguccuuccuccugcugugcggccgcagcugcuccacgaccuacaaggggguguacgagcuccagacccuggagcuggacauggccagccucaacaugugcaugccgcuguccugcaccaagaacaacagccaccacuacaucauggucggcaacgagacgggccuggagcucacccugaccaacaccuccaucaucaaccacaaguucugcaaccugagcgacgcccacaagaagaaccucuacgaccacgcccugauguccaucaucagcacguuccaccuguccauccccaacuucaaccaguacgaggccaugagcugcgacuucaacgggggcaagaucuccgugcaguacaaccucagccacgcguacgccguggacgccgccaaccacugcgggaccaucgcgaacggcguccugcagaccuucaugcggauggccuggggcggguccuacaucgcccuggacagcggcaagggguccugggacugcaucaugaccagcuaccaguaccucaucauccagaacacgaccugggaggaccacugccaguucucccgccccagccccaucggcuaccuggggcugcucagccagcggacccgcgacaucuacaucucccggcgccggcgcggcaccuucacguggacccugagcgacuccgagggcaacgagacccccgggggcuacugccugacccgguggaugcucaucgaggccgagcugaagugcuucgggaacacggccguggcgaagugcaacgagaagcacgacgaggaguucugcgacaugcugcgccucuucgacuucugcaagcaggccauccggcgccugaagaccccggcccagaugagcauccagcugaucaacaaggccgugaacgcccucaucaacgaccagcugaucaugaagaaccaccuccgggacaucaugggcauccccuacugcaacuacuccaaguacugcuaccugaaccacaccgucaccgggaagacgagccugccccgcugcugccugguguccaacggcagcuaccucaacgagacccacuucuccgacgacaucgagcagcaggcggacaacaugaucaccgagcugcugcagaaggaguacauggaccggcagggcaagaccccgcucgggcugguggaccuguucgucuucagcacguccuucuaccugaucagcaucuuccuccaccugaucaagauccccacccaccgccacaucaccggcaagcccugccccaagccgcaccggcugaaccacauggggaucugcuccugcggccucuacaagcaccccggggugcccgugaaguggaagcgcugaggacuaguuauaagacugacuagcccgaugggccucccaacgggcccuccuccccuccuugcaccgagauuaaucaaaggcucuuuucagagccaccaaaaaaaaaaaaaaaaaaaaaaaaaaaaaaaaaaaaaaaaaaaaaaaaaaaaaaaaaaaaaaaaagaauu

SEQ ID NO: 27694 - RNA, 1655 nt, Artificial Sequence
  mRNA product Design i-3 (hSL-A64-N5) comprising derived and/or modified sequence from LASV(ISTH2010-NIG-2012;Clade II)__AIT17482__GPCmut4 (opt1)
aggagaaagcuuaccaugggccagaucaucaccuucuuccaggaggugccccacgucaucgaggaggugaugaacaucgugcugaucgcccucagccugcuggccauccucaaggggaucuacaacgucgcgaccugcggccuguucgggcugguguccuuccuccugcugugcggccgcagcugcuccacgaccuacaaggggguguacgagcuccagacccuggagcuggacauggccagccucaacaugugcaugccgcuguccugcaccaagaacaacagccaccacuacaucauggucggcaacgagacgggccuggagcucacccugaccaacaccuccaucaucaaccacaaguucugcaaccugagcgacgcccacaagaagaaccucuacgaccacgcccugauguccaucaucagcacguuccaccuguccauccccaacuucaaccaguacgaggccaugagcugcgacuucaacgggggcaagaucuccgugcaguacaaccucagccacgcguacgccguggacgccgccaaccacugcgggaccaucgcgaacggcguccugcagaccuucaugcggauggccuggggcggguccuacaucgcccuggacagcggcaagggguccugggacugcaucaugaccagcuaccaguaccucaucauccagaacaucacgugggaggaccacugccaguucucccgccccagccccaucggcuaccuggggcugcucagccagcggacccgcgacaucuacaucucccggcgccggcgcggcaccuucaccuggacgcugagcgacuccgagggcaacgagacccccgggggcuacugccugacccgguggaugcucaucgaggccgagcugaagugcuucgggaacaccgccguggcgaagugcaacgagaagcacgacgaggaguucugcgacaugcugcgccucuucgacuucugcaagcaggccauccggcgccugaagacgccggcccagaugagcauccagcugaucaacaaggccgugaacgcccucaucaacgaccagcugaucaugaagaaccaccuccgggacaucaugggcauccccuacugcaacuacuccaaguacugcuaccugaaccacaccgucaccgggaagaccagccugccccgcugcugccugguguccaacggcagcuaccucaacgagacgcacuucuccgacgacaucgagcagcaggcggacaacaugaucaccgagcugcugcagaaggaguacaucgaccggcagggcaagaccccgcucgggcugguggaccuguucgucuucagcaccuccuucuaccugaucagcaucuuccuccaccuggugaagauccccacgcaccgccacguggucggcaagcccugccccaagccgcaccggcugaaccacauggggaucugcuccugcggccucuacaagcaccccggggugcccgugaaguggaagcgcugaggacuaguuauaagacugacuagcccgaugggccucccaacgggcccuccuccccuccuugcaccgagauuaaucaaaggcucuuuucagagccaccaaaaaaaaaaaaaaaaaaaaaaaaaaaaaaaaaaaaaaaaaaaaaaaaaaaaaaaaaaaaaaaaagaauu

SEQ ID NO: 27695 - RNA, 1655 nt, Artificial Sequence
  mRNA product Design i-3 (hSL-A64-N5) comprising derived and/or modified sequence from LASV(Lassa virus/H.sapiens-wt/NGA/2015/ISTH_0543;Clade II)__AVO03639__GPCmut4 (opt1)
aggagaaagcuuaccaugggccagaucaucaccuucuuccaggaggugccccacgucaucgaggaggugaugaacaucgugcugaucgcccucagccugcuggccauccucaaggggaucuacaacgucgcgaccugcggccuguucgggcugguguccuuccuccugcugugcggccgcagcugcuccacgaccuacaaggggguguacgagcuccagacccuggagcuggacauggccaaccucaacaugugcaugccgcugagcugcaccaagaacaacucccaccacuacaucauggucggcaacgagacgggccuggagcucacccugaccaacaccagcaucaucaaccacaaguucugcaaccuguccgacgcccacaagaagaaccucuacgaccacgcccugaugagcaucaucuccacguuccaccugagcauccccaacuucaaccaguacgaggccauguccugcgacuucaacgggggcaagaucagcgugcaguacaaccucucccacaccuacgcgguggacgccgccaaccacugcgggaccaucgccaacggcguccugcagaccuucaugcggauggcguggggcgggagcuacaucgcccuggacuccggcaaggggagcugggacugcaucaugacguccuaccaguaccucgugauccagaacaccaccugggaggaccacugccaguucagccgccccucccccaucggcuaccuggggcugcucagccagcggacccgcgacaucuacaucagccggcgccggcgcggcacguucaccuggacccuguccgacagcgagggcaacgagacccccgggggcuacugccugacgcgguggaugcucaucgaggccgagcugaagugcuucgggaacaccgccguggccaagugcaacgagaagcacgacgaggaguucugcgacaugcugcgccucuucgacuucugcaagcaggcgauccggcgccugaagaccccggcccagauguccauccagcugaucaacaaggccgucaacgcccucaucaacgaccagcugaucaugaagaaccaccuccgggacaucaugggcauccccuacugcaacuacagcaaguacugcuaccugaaccacaccgugacggggaagaccucccugccccgcugcugccuggugagcaacggcuccuaccucaacgagacccacuucagcgacgacaucgagcagcaggccgacaacaugaucaccgagcugcugcagaaggaguacaucgaccggcagggcaagacgccgcucgggcuggucgaccuguucguguucuccaccagcuucuaccugaucuccaucuuccuccaccuggugaagauccccacccaccgccacaucaccggcaagcccugccccaagccgcaccggcugaaccacauggggaucugcagcugcggccucuacaagcaccccgggguccccgugaaguggaagcgcugaggacuaguuauaagacugacuagcccgaugggccucccaacgggcccuccuccccuccuugcaccgagauuaaucaaaggcucuuuucagagccaccaaaaaaaaaaaaaaaaaaaaaaaaaaaaaaaaaaaaaaaaaaaaaaaaaaaaaaaaaaaaaaaaagaauu

SEQ ID NO: 27696 - RNA, 1655 nt, Artificial Sequence
  mRNA product Design i-3 (hSL-A64-N5) comprising derived and/or modified sequence from LASV(Lassa virus/H.sapiens-wt/NGA/2016/ISTH_0009;Clade II)__AVO03571__GPCmut4 (opt1)
aggagaaagcuuaccaugggccagaucaucaccuucuuccaggaggugccccacgucaucgaggaggugaugaacaucgugcugaucgcccucagccugcuggccauccucaaggggaucuacaacgucgcgaccugcggccugcuggggcucguguccuuccugcugcucugcggccgcagcugcuccacgaccuacaaggggguguacgagcugcagacccuggagcucgacauggccagccugaacaugugcaugccgcuguccugcaccaagaacaacagccaccacuacaucauggucggcaacgagacgggccucgagcugacccugaccaacaccuccaucaucaaccacaaguucugcaaccucagcgacgcccacaagaagaaccuguacgaccacgcccugauguccaucaucagcacguuccaccucuccauccccaacuucaaccaguacgaggccaugagcugcgacuucaacgggggccggaucuccgugcaguacaaccugagccacuccuacgcgguggacgccgccaaccacugcgggaccaucgccaacggcguccugcagaccuucaugcgcauggcguggggcgggagcuacaucgcccucgacuccggcaaggggagcugggacugcaucaugaccuccuaccaguaccugaucauccagaacacgaccugggaggaccacugccaguucagccggcccagccccaucggcuaccuggggcuccugucccagcgcacccgggacaucuacaucagccgccggcgccggggcaccuucacguggacccuguccgacagcgagggcaacgagacccccgggggcuacugccucacccgcuggaugcugaucgaggccgagcugaagugcuucgggaacacggccguggccaagugcaacgagaagcacgacgaggaguucugcgacaugcuccggcuguucgacuucugcaagcaggcgauccgccggcugaagaccccggcccagauguccauccagcucaucaacaaggccgugaacgcccugaucaacgaccagcugaucaugaagaaccaccuccgcgacaucaugggcauccccuacugcaacuacagcaaguacugcuaccugaaccacaccgucaccgggaagacgucccugccccggugcugccucgugagcaacggcuccuaccugaacgagacccacuucagcgacgacaucgagcagcaggccgacaacaugaucaccgagcugcuccagaaggaguacaucgaccgccagggcaagaccccgcuggggcugguggaccuguucgucuucuccacgagcuucuaccucaucuccaucuuccugcaccuggugaagauccccacccaccggcacaucaccggcaagcccugccccaagccgcaccgccucaaccacauggggaucugcagcugcggccuguacaaccaccccggggugcccgucaaguggaagcggugaggacuaguuauaagacugacuagcccgaugggccucccaacgggcccuccuccccuccuugcaccgagauuaaucaaaggcucuuuucagagccaccaaaaaaaaaaaaaaaaaaaaaaaaaaaaaaaaaaaaaaaaaaaaaaaaaaaaaaaaaaaaaaaaagaauu

SEQ ID NO: 27697 - RNA, 1655 nt, Artificial Sequence
  mRNA product Design i-3 (hSL-A64-N5) comprising derived and/or modified sequence from LASV(Lassa virus/H.sapiens-wt/NGA/2016/ISTH_0017;Clade II)__AVO03567__GPCmut4 (opt1)
aggagaaagcuuaccaugggccagaucaucaccuucuuccaggaggugccccacgucaucgaggaggugaugaacaucgugcugaucgcccucagccugcuggccauccucaaggggaucuacaacgucgcgaccugcggccuguucgggcugguguccuuccuccugcugugcggccgcagcugcuccacgaccuacaaggggguguacgagcuccagacccuggagcuggacauggccagccucaacaugugcaugccgcuguccugcaccaagaacaacagccaccacuacaucauggucggcaacgagacgggccuggagcucacccugaccaacaccuccaucaucaaccacaaguucugcaaccugagcgacgcccacaagaagaaccucuacgaccacgcccugauguccaucaucagcacguuccaccuguccauccccaacuucaaccaguacgaggccaugagcugcgacuucaacgggggcaagaucuccgugcaguacaaccucagccacaccuacgcgaucgacgccgccaaccacugcgggaccaucgccaacggcgugcugcagaccuucaugcggauggcguggggcggguccuacaucgcccuggacagcggcaagggguccugggacugcaucaugacgagcuaccaguaccucaucauccagaacaccaccugggaggaccacugccaguucucccgccccagccccaucggcuaccuggggcugcucagccagcggacccgcgacaucuacaucucccggcgccggcgcggcacguucaccuggacccugagcgacuccgagggcaacgagacccccgggggcuacugccugacgcgguggaugcucaucgaggccgagcugaagugcuucgggaacaccgccgucgccaagugcaacgagaagcacgacgaggaguucugcgacaugcugcgccucuucgacuucugcaagcaggcgauccggcgccugaagaccccggcccagaugagcauccagcugaucaacaaggccgugaacgcccucaucaacgaccagcugaucaugaagaaccaccuccgggacaucaugggcauccccuacugcaacuacuccaaguacugcuaccugaaccacaccgugacggggaagaccagccugccccgcugcugccuggucuccaacggcagcuaccucaacgagacccacuucuccgacgacaucgagcagcaggccgacaacaugaucaccgagcugcugcagaaggaguacauggaccggcagggcaagacgccgcucgggcugguggaccuguucguguucagcaccuccuucuaccugaucagcaucuuccuccaccugguccgcauccccacccaccggcacgugaucggcaagcccugccccaagccgcaccgccugaaccacauggggaucugcuccugcggccucuacaagcaccccggggugcccgucaaguggaagcggugaggacuaguuauaagacugacuagcccgaugggccucccaacgggcccuccuccccuccuugcaccgagauuaaucaaaggcucuuuucagagccaccaaaaaaaaaaaaaaaaaaaaaaaaaaaaaaaaaaaaaaaaaaaaaaaaaaaaaaaaaaaaaaaaagaauu

SEQ ID NO: 27698 - RNA, 1655 nt, Artificial Sequence
  mRNA product Design i-3 (hSL-A64-N5) comprising derived and/or modified sequence from LASV(Lassa virus/H.sapiens-wt/NGA/2018/ISTH_0959;Clade II)__AVV65099__GPCmut4 (opt1)
aggagaaagcuuaccaugggccagaucaucaccuucuuccaggaggugccccacgucaucgaggaggugaugaacaucgugcugaucgcccucagccugcuggccauccucaaggggaucuacaacgucgugaccugcggccuguucgggcugguguccuuccuccugcugugcggccgcagcugcuccacgaccuacaagggggucuacgagcuccagacccuggagcuggacauggcgagccucaacaugugcaugccgcuguccugcaccaagaacaacagccaccacuacaucauggugggcaacgagacgggccuggagcucacccugaccaacaccuccaucaucaaccacaaguucugcaaccugagcgacgcccacaagaagaaccucuacgaccacgcccugauguccaucaucagcacguuccaccuguccauccccaacuucaaccaguacgaggccaugagcugcgacuucaacgggggcaagaucuccgugcaguacaaccucagccacgccuacgcgaucgacgccgccaaccacugcgggaccaucgccaacggcguccugcagaccuucaugcggauggcguggggcggguccuacaucgcccuggacagcggcaagggguccugggacugcaucaugaccagcuaccaguaccucaucauccagaacacgaccugggaggaccacugccaguucucccgccccagccccaucggcuaccuggggcugcucagccagcggacccgcgacaucuacaucucccggcgccggcgcggcaccuucacguggacccugagcgacuccgagggcaacgagacccccgggggcuacugccugacccgguggaugcucaucgaggccgagcugaagugcuucgggaacacggccguggccaagugcaacgagaagcacgacgaggaguucugcgacaugcugcgccucuucgacuucugcaagcaggcgauccggcgccugaagaccccggcccagaugagcauccagcugaucaacaaggccgugaacgcccucaucaacgaccagcugaucaugaagaaccaccuccgggacaucaugggcauccccuacugcaacuacuccaaguacugcuaccugaaccacaccgucaccgggaagacgagccugccccgcugcugccugguguccaacggcagcuaccucaacgagacccacuucuccgacgacaucgagcagcaggccgacaacaugaucaccgagcugcugcagaaggaguacaucgaccggcagggcaagaccccgcucgggcugguggaccuguucgucuucagcacguccuucuaccugaucagcaucuuccuccaccuggugaagauccccacccaccgccacgugaucggcaagcccugccccaagccgcaccggcugaaccacauggggaucugcuccugcggccucuacaagcaccccgggguccccgugaaguggaagcgcugaggacuaguuauaagacugacuagcccgaugggccucccaacgggcccuccuccccuccuugcaccgagauuaaucaaaggcucuuuucagagccaccaaaaaaaaaaaaaaaaaaaaaaaaaaaaaaaaaaaaaaaaaaaaaaaaaaaaaaaaaaaaaaaaagaauu

SEQ ID NO: 27699 - RNA, 1655 nt, Artificial Sequence
  mRNA product Design i-3 (hSL-A64-N5) comprising derived and/or modified sequence from LASV(LASV003-NIG-2008;Clade II)__AIT17580__GPCmut4 (opt1)
aggagaaagcuuaccaugggccagaucaucaccuucuuccaggaggugccccacgucaucgaggaggugaugaacaucgugcugaucgcccucagccugcuggccauccucaaggggaucuacaacgucgcgaccugcggccuguucgggcugguguccuuccuccugcugugcggccgcagcugcuccacgaccuacaaggggguguacgagcuccagacccuggagcuggacauggccagccucaacaugugcaugccgcuguccugcaccaagaacaacagccaccacuacaucauggucggcaacgagacgggccuggagcucacccugaccaacaccuccaucaucaaccacaaguucugcaaccugagcgacgcccacaagaagaaccucuacgaccacgcccugauguccaucaucagcacguuccaccuguccauccccaacuucaaccaguacgaggccaugagcugcgacuucaacgggggcaagaucuccgugcaguacaaccucagccacaccuacgcgguggacgccgccaaccacugcgggaccaucgccaacggcguccugcagaccuucaugcggauggcguggggcggguccuacaucgcccuggacagcggcaagggguccugggacugcaucaugacgagcuaccaguaccucaucauccagaacaccaccugggaggaccacugccaguucucccgccccagccccaucggcuaccuggggcugcucagccagcggacccgcgacaucuacaucucccggcgccggcgcggcacguucaccuggacccugagcgacuccgagagcaacgagaccccgggcggguacugccugacgcgguggaugcucaucgaggccgagcugaagugcuucggcaacaccgccguggccaagugcaacgagaagcacgacgaggaguucugcgacaugcugcgccucuucgacuucugcaagcaggcgauccggcgccugaaggcccccgcccagauguccauccagcugaucaacaaggccgugaacgcccucaucaacgaccagcugaucaugaagaaccaccuccgggacaucauggggauccccuacugcaacuacagcaaguacugcuaccugaaccacaccgucaccggccgcacgucccugccccggugcugccuggugagcaacggguccuaccucaacgagacccacuucagcgacgacaucgagcagcaggcggacaacaugaucaccgagcugcugcagaaggaguacauggaccgccagggcaagaccccgcucggccugguggaccuguucgucuucuccacgagcuucuaccugaucuccaucuuccuccaccuggugaagauccccacccaccggcacgugaucgggaagcccugccccaagccgcaccgccugaaccacaugggcaucugcagcugcgggcucuacaagcaccccggcguccccgugaaguggaagcggugaggacuaguuauaagacugacuagcccgaugggccucccaacgggcccuccuccccuccuugcaccgagauuaaucaaaggcucuuuucagagccaccaaaaaaaaaaaaaaaaaaaaaaaaaaaaaaaaaaaaaaaaaaaaaaaaaaaaaaaaaaaaaaaaagaauu

SEQ ID NO: 27700 - RNA, 1655 nt, Artificial Sequence
  mRNA product Design i-3 (hSL-A64-N5) comprising derived and/or modified sequence from LASV(LASV035-NIG-2009;Clade II)__AIT17588__GPCmut4 (opt1)
aggagaaagcuuaccaugggccagaucaucaccuucuuccaggaggugccccacgucaucgaggaggugaugaacaucgugcugaucgcccucagccugcuggccauccucaaggggaucuacaacgucgcgaccugcggccuguucgggcugguguccuuccuccugcugugcggccgcagcugcuccacgaccuacaaggggguguacgagcuccagacccuggagcuggacauggccagccucaacaugugcaugccgcuguccugcaccaagaacaacagccaccacuacaucauggucggcaacgagacgggccuggagcucacccugaccaacaccuccaucaucaaccacaaguucugcaaccugagcgacgcccacaagaagaaccucuacgaccacgcccugauguccaucaucagcacguuccaccuguccauccccaacuucaaccaguacgaggccaugagcugcgacuucaacgggggcaagaucuccgugcaguacaaccucagccacgcguacgccguggacgccgccaaccacugcgggaccaucgcgaacggcguccugcagaccuucaugcggauggccuggggcggguccuacaucgcccuggacagcggcaagggguccugggacugcaucaugaccagcuaccaguaccucaucauccagaacacgaccugggaggaccacugccaguucucccgccccagccccaucggcuaccuggggcugcucagccagcggacccgcgacaucuacaucucccggcgccggcgcggcaccuucacguggacccugagcgacuccgagggcaacgagacccccgggggcuacugccugacccgguggaugcucaucgaggccgagcugaagugcuucgggaacacggccguggcgaagugcaacgagaagcacgacgaggaguucugcgacaugcugcgccucuucgacuucugcaagcaggccauccggcgccugaaggccccggcccagaugagcauccagcugaucaacaaggccgugaacgcgcucaucaacgaccagcugaucaugaagaaccaccuccgggacaucaugggcauccccuacugcaacuacuccaaguacugcuaccugaaccacaccgucaccgggaagaccagccugccccgcugcugccugguguccaacggcagcuaccucaacgagacgcacuucuccgacgacaucgagcagcaggccgacaacaugaucaccgagcugcugcagaaggaguacaucgaccggcagggcaagaccccgcucgggcugguggaccuguucgucuucagcaccuccuucuaccugaucagcaucuuccuccaccuggugaagauccccacgcaccgccacgugaucggcaagcccugccccaagccgcaccggcugaaccacauggggaucugcuccugcggccucuacaagcaccccgggguccccgugaaguggaagcgcugaggacuaguuauaagacugacuagcccgaugggccucccaacgggcccuccuccccuccuugcaccgagauuaaucaaaggcucuuuucagagccaccaaaaaaaaaaaaaaaaaaaaaaaaaaaaaaaaaaaaaaaaaaaaaaaaaaaaaaaaaaaaaaaaagaauu

SEQ ID NO: 27701 - RNA, 1655 nt, Artificial Sequence
  mRNA product Design i-3 (hSL-A64-N5) comprising derived and/or modified sequence from LASV(LASV1000-NIG-2009;Clade II)__AIT17782__GPCmut4 (opt1)
aggagaaagcuuaccaugggccagaucaucaccuucuuccaggaggugccccacgucaucgaggaggugaugaacaucgugcugaucgcccucagccugcuggccauccucaaggggaucuacaacgucgcgaccugcggccuguucgggcugguguccuuccuccugcugugcggccgcagcugcuccacgaccuacaaggggguguacgagcuccagacccuggagcuggacauggccagccucaacaugugcaugccgcuguccugcaccaagaacaacagccaccacuacaucauggucggcaacgagacgggccuggagcucacccugaccaacaccuccaucaucaaccacaaguucugcaaccugagcgacgcccacaagaagaaccucuacgaccacgcccugauguccaucaucagcacguuccaccuguccauccccaacuucaaccaguacgaggccaugagcugcgacuucaacgggggcaagaucuccgugcaguacaaccucagccacaccuacgcgguggacgccgccaaccacugcgggaccaucgccaacggcguccugcagaccuucaugcggauggcguggggcggguccuacaucgcccuggacagcggcaagggguccugggacugcaucaugacgagcuaccaguaccucaucauccagaacaccaccugggaggaccacugccaguucucccgccccagccccaucggcuaccuggggcugcucagccagcggacccgcgacaucuacaucucccggcgccggcgcggcacguucaccuggacccugagcgacuccgagggcaacgagacccccgggggcuacugccugacgcgguggaugcucaucgaggccgagcugaagugcuucgggaacaccgccguggccaagugcaacgagaagcacgacgaggaguucugcgacaugcugcgccucuucgacuucugcaagcaggcgaucaagcggcugaagaccccggcccagaugagcauccagcugaucaacaaggccgugaacgcccucaucaacgaccagcugaucaugaagaaccaccuccgcgacaucaugggcauccccuacugcaacuacuccaaguacugcuaccugaaccacaccgucacggggaagaccagccugccccggugcugccugguguccaacggcagcuaccucaacgagacccacuucuccgacgacaucgagcagcaggccgacaacaugaucaccgagcugcugcagaaggaguacaucgaccgccagggcaagacgccgcucgggcugguggaccuguucgucuucagcaccuccuucuaccugaucagcaucuuccuccaccuggugaagauccccacccaccggcacguggucggcaagcccugccccaagccgcaccgccugaaccacauggggaucugcuccugcggccucuacaagcaccccggggugcccgugaaguggaagcggugaggacuaguuauaagacugacuagcccgaugggccucccaacgggcccuccuccccuccuugcaccgagauuaaucaaaggcucuuuucagagccaccaaaaaaaaaaaaaaaaaaaaaaaaaaaaaaaaaaaaaaaaaaaaaaaaaaaaaaaaaaaaaaaaagaauu

SEQ ID NO: 27702 - RNA, 1655 nt, Artificial Sequence
  mRNA product Design i-3 (hSL-A64-N5) comprising derived and/or modified sequence from LASV(LASV221-NIG-2010;Clade II)__AIT17624__GPCmut4 (opt1)
aggagaaagcuuaccaugggccagaucaucaccuucuuccaggaggugccccacgucaucgaggaggugaugaacaucgugcugaucgcccucagccugcuggccauccucaaggggaucuacaacgucgcgaccugcggccuguucgggcugguguccuuccuccugcugugcggccgcagcugcuccacgaccuacaaggggguguacgagcuccagacccuggagcuggacauggccagccucaacaugugcaugccgcuguccugcaccaagaacaacagccaccacuacaucauggucggcaacgagacgggccuggagcucacccugaccaacaccuccaucaucaaccacaaguucugcaaccugagcgacgcccacaagaagaaccucuacgaccacgcccugauguccaucaucagcacguuccaccuguccauccccaacuucaaccaguacgaggccaugagcugcgacuucaacgggggcaagaucuccgugcaguacaaccucagccacaccuacgcgaucgacgccgccaaccacugcgggaccaucgccaacggcgugcugcagaccuucaugcggauggcguggggcggguccuacaucgcccuggacagcggcaagggguccugggacugcaucaugacgagcuaccaguaccucaucauccagaacaccaccugggaggaccacugccaguucucccgccccagccccaucggcuaccuggggcugcucagccagcggacccgcgacaucuacaucucccggcgccggcgcggcacguucaccuggacccugagcgacuccgagggcaacgagacccccgggggcuacugccugacgcgguggaugcucaucgaggccgagcugaagugcuucgggaacaccgccgucgccaagugcaacgagaagcacgacgaggaguucugcgacaugcugcgccucuucgacuucugcaagcaggcgauccggcgccugaagaccccggcccagaugagcauccagcugaucaacaaggccgugaacgcccucaucaacgaccagcugaucaugaagaaccaccuccgggacaucaugggcauccccuacugcaacuacuccaaguacugcuaccugaaccacaccgugacggggaagaccagccugccccgcugcugccuggucuccaacggcagcuaccucaacgagacccacuucuccgacgacaucgagcagcaggccgacaacaugaucaccgagaugcugcagaaggaguacauggaccggcagggcaagacgccgcuggggcucguggaccuguucguguucagcaccuccuucuaccugaucagcaucuuccugcaccucgucaagauccccacccaccgccacgugaucggcaagcccugccccaagccgcaccggcugaaccacauggggaucugcuccugcggccuguacaagcaccccggggugcccgucaaguggaagcgcugaggacuaguuauaagacugacuagcccgaugggccucccaacgggcccuccuccccuccuugcaccgagauuaaucaaaggcucuuuucagagccaccaaaaaaaaaaaaaaaaaaaaaaaaaaaaaaaaaaaaaaaaaaaaaaaaaaaaaaaaaaaaaaaaagaauu

SEQ ID NO: 27703 - RNA, 1655 nt, Artificial Sequence
  mRNA product Design i-3 (hSL-A64-N5) comprising derived and/or modified sequence from LASV(LASV237-NIG-2010;Clade II)__AIT17638__GPCmut4 (opt1)
aggagaaagcuuaccaugggccagaucaucaccuucuuccaggaggugccccacgucaucgaggaggugaugaacaucgugcugaucgcccucagccugcuggccauccucaaggggaucuacaacgucgcgaccugcggccuguucgggcugguguccuuccuccugcugugcggccgcagcugcuccacgaccuacaaggggguguacgagcuccagacccuggagcuggacauggccagccucaacaugugcaugccgcuguccugcaccaagaacaacagccaccacuacaucauggucggcaacgagacgggccuggagcucacccugaccaacaccuccaucaucaaccacaaguucugcaaccugagcgacgcccacaagaaggaccucuacgaccacgcccugauguccaucaucagcacguuccaccuguccauccccaacuucaaccaguacgaggccaugagcugcgacuucaacgggggcaagaucuccgugcaguacaaccucagccacaccuacgcgguggacgccgccaaccacugcgggaccaucgccaacggcguccugcagaccuucaugcggauggcguggggcggguccuacaucgcccuggacagcggcaagggguccugggacugcaucaugacgagcuaccaguaccucaucauccagaacaccaccugggaggaccacugccaguucucccgccccagccccaucggcuaccuggggcugcucagccagcggacccgcgacaucuacaucucccggcgccggcgcggcacguucaccuggacccugagcgacuccgagggcaacgagacccccgggggcuacugccugacgcgguggaugcucaucgaggccgagcugaagugcuucgggaacaccgccguggccaagugcaacgagaagcacgacgaggaguucugcgacaugcugcgccucuucgacuucugcaagcaggcgauccggcgccugaagaccccggcccagaugagcauccagcugaucaacaaggccgugaacgcccucaucaacgaccagcugaucaugaagaaccaccuccgggacaucaugggcauccccuacugcaacuacuccaaguacugcuaccugaaccacaccgucacggggaagaccagccugccccgcugcugccugguguccaacggcagcuaccucaacgagacccacuucuccgacgacaucgagcagcaggccgacaacaugaucaccgagcugcugcagaaggaguacauggaccggcagggcaagacgccgcucgggcugguggaccuguucgucuucagcaccuccuucuaccugaucagcaucuuccuccaccugaucaagauccccacccaccgccacaucaccggcaagcccugccccaagccgcaccggcugaaccacauggggaucugcuccugcggccucuacaagcaccccggggugcccgugaaguggaagcgcugaggacuaguuauaagacugacuagcccgaugggccucccaacgggcccuccuccccuccuugcaccgagauuaaucaaaggcucuuuucagagccaccaaaaaaaaaaaaaaaaaaaaaaaaaaaaaaaaaaaaaaaaaaaaaaaaaaaaaaaaaaaaaaaaagaauu

SEQ ID NO: 27704 - RNA, 1655 nt, Artificial Sequence
  mRNA product Design i-3 (hSL-A64-N5) comprising derived and/or modified sequence from LASV(LASV253-NIG-2011;Clade II)__AIT17670__GPCmut4 (opt1)
aggagaaagcuuaccaugggccagaucaucaccuucuuccaggaggugccccacgucaucgaggaggugaugaacaucgugcugaucgcccucagccugcuggccauccucaaggggaucuacaacgucgcgaccugcggccuguucgggcugguguccuuccuccugcugugcggccgcagcugcuccacgaccuacaaggggguguacgagcuccagacccuggagcuggacauggccagccucaacaugugcaugccgcuguccugcaccaagaacaacagccaccacuacaucauggucggcaacgagacgggccuggagcucacccugaccaacaccuccaucaucaaccacaaguucugcaaccugagcgacgcccacaagaagaaccucuacgaccacgcccugauguccaucaucagcacguuccaccuguccauccccaacuucaaccaguacgaggccaugagcugcgacuucaacgggggcaagaucuccgugcaguacaaccucagccacaccuacgcgguggacgccgccaaccacugcgggaccaucgccaacggcguccugcagaccuucaugcggauggcguggggcggguccuacaucgcccuggacagcggcaagggguccugggacugcaucaugacgagcuaccaguaccucaucauccagaacaccaccugggaggaccacugccaguucucccgccccagccccaucggcuaccuggggcugcucagccagcggacccgcgacaucuacaucucccggcgccggcgcggcacguucaccuggacccugagcgacuccgagggcaacgagacccccgggggcuacugccugacgcgguggaugcucaucgaggccgagcugaagugcuucgggaacaccgccguggccaagugcaacgagaagcacgacgaggaguucugcgacaugcugcgccucuucgacuucugcaagcaggcgauccggcgccugaaggccccggcccagaugagcauccagcugaucaacaaggccgugaacgcccucaucaacgaccagcugaucaugaagaaccaccuccgggacaucaugggcauccccuacugcaacuacuccaaguacugcuaccugaaccacaccgucaccgggcgcacgagccugccccggugcugccugguguccaacggcagcuaccucaacgagacccacuucuccgacgacaucgagcagcaggcggacaacaugaucaccgagcugcugcagaaggaguacaucgaccgccagggcaagaccccgcucgggcugguggaccuguucgucuucagcacguccuucuaccugaucagcaucuuccuccaccuggugaagauccccacccaccggcacaucaucggcaagcccugccccaagccgcaccgccugaaccacauggggaucugcuccugcggccucuacaagcaccccggggugcccgucaaguggaagcggugaggacuaguuauaagacugacuagcccgaugggccucccaacgggcccuccuccccuccuugcaccgagauuaaucaaaggcucuuuucagagccaccaaaaaaaaaaaaaaaaaaaaaaaaaaaaaaaaaaaaaaaaaaaaaaaaaaaaaaaaaaaaaaaaagaauu

SEQ ID NO: 27705 - RNA, 1655 nt, Artificial Sequence
  mRNA product Design i-3 (hSL-A64-N5) comprising derived and/or modified sequence from LASV(LASV254-NIG-2011;Clade II)__AIT17674__GPCmut4 (opt1)
aggagaaagcuuaccaugggccagaucaucaccuucuuccaggaggugccccacgucaucgaggaggugaugaacaucgugcugaucgcccucagccugcuggccauccucaaggggaucuacaacgucgcgaccugcggccuguucgggcugguguccuuccuccugcugugcggccgcagcugcuccacgaccuacaaggggguguacgagcuccagacccuggagcuggacaugaccaaccucaacaugugcaugccgcugagcugcacgaagaacaacucccaccacuacaucauggucggcaacgagaccggccuggagcucacccugaccaacacgagcaucaucaaccacaaguucugcaaccuguccgacgcccacaagaagaaccucuacaaccacgcccugaugagcaucaucuccaccuuccaccugagcauccccaacuucaaccaguacgaggccauguccugcgacuucaacgggggcaagaucagcgugcaguacaaccucucccacagcuacgccguggacgcggccaaccacugcgggaccaucgccaacggcguccugcagaccuucaugcggauggccuggggcggguccuacaucgcgcuggacagcggcaaggggaacugggacugcaucaugacguccuaccaguaccucaucauccagaacaccaccugggaggaccacugccaguucagccgccccucccccaucggcuaccuggggcugcucagccagcggacccgcgacaucuacaucagccggcgccggcgcggcacguucaccuggacccuguccgacagcgagggcaacgagacccccgggggcuacugccugacgcgguggaugcucaucgaggccgagcugaagugcuucgggaacaccgccguggccaagugcaacgagaagcacgacgaggaguucugcgacaugcugcgccucuucgacuucugcaagcaggccauccggcgccugaagaccccggcgcaggccaacauccagcugaucaacaaggccgugaacgcccucaucaacgaccagcugaucaugaagaaccaccuccgggacaucaugggcauccccuacugcaacuacuccaaguacugcuaccugaaccacaccgucacggggaagaccagccugccccgcugcugccugguguccaacggcagcuaccucaacgagacccacuucuccgacgacaucgagcagcaggccgacaacaugaucaccgagcugcugcagaaggaguacauggaccggcagggcaagacgccgcucgggcugguggaccuguucgucuucagcaccuccuucuaccugaucagcaucuuccuccaccuggugaagauccccacccaccgccacgugaucggcaagcccugccccaagccgcaccggcugaaccacauggggaucugcuccugcggccucuacaagcaccccgggguccccgugaaguggaagcgcugaggacuaguuauaagacugacuagcccgaugggccucccaacgggcccuccuccccuccuugcaccgagauuaaucaaaggcucuuuucagagccaccaaaaaaaaaaaaaaaaaaaaaaaaaaaaaaaaaaaaaaaaaaaaaaaaaaaaaaaaaaaaaaaaagaauu

SEQ ID NO: 27706 - RNA, 1655 nt, Artificial Sequence
  mRNA product Design i-3 (hSL-A64-N5) comprising derived and/or modified sequence from LASV(Nig08-A19;Clade III)__ADU56618__GPCmut4 (opt1)
aggagaaagcuuaccaugggccagaucgugaccuucuuccaggaggucccccacgugaucgaggaggugaugaacaucguccugaucgcccucagcauccuggccauccugaaggggcucuacaacaucgcgaccugcggccugaucgggcuggugacguuccuccugcuguccggccgcagcugcuccaugaccuacaaggggguguacgagcuccagacccuggagcugaacaugaacacccucaacaugugcaugccgcugagcugcacgaagaacaacucccaccacuacaucauggucggcaacgagaccggccuggagcucacccugaccaacacgagccugcuccaccacaaguucugcaaccuguccgacgcccacaagaagaaccuguacgaccacacccucaugagcaucaucuccaccuuccaccugagcauccccaacuucaaccaguacgaggccauguccugcgacuucaacgggggcaagaucaccgugcaguacaaccugagccacuccuacgccaucgacgccgcgaaccacugcgggacgguggccaacggcguccuccagaccuucaugcggauggccuggggcgggagcuacaucgcccuggacuccggccgcgggaagugggacugcaucaugaccagcuaccaguaccugaucauccagaacaccacgugggaggaccacugccaguucucccggcccagccccaucggcuaccucgggcugcugucccagcgcacccgggacaucuacaucagccgccggcgccggggcaccuucaccuggacgcucagcgacuccgagggcaacgagacccccgggggcuacugccugacccgcuggaugcugaucgaggcggagcucaagugcuucgggaacaccgccguggccaagugcaacgagaagcacgacgaggaguucugcgacaugcugcggcuguucgacuucugcaagcaggccauccgccggcucaaggccccggcgcagaugagcauccagcugaucaacaaggccgugaacgcccugaucaacgaccagcucaucaugaagaaccaccuccgcgacaucaugggcauccccuacugcaacuacuccaaguacugcuaccugaaccacacgagcaccgggcggaccucccugccccgcugcugccuggucagcaacggcuccuaccugaacgagacccacuucagcgacgacaucgagcagcaggccgacaacaugaucacggagaugcuccagaaggaguaccuggaccggcagggcaagaccccgcuggggcugguggaccucuucguguucuccaccagcuucuaccugaucuccaucuuccugcaccucgucaagauccccacccaccgccacaucgugggcaagcccugccccaagccgcaccggcugaaccacauggggaucugcagcugcggccuguacaagcagcccggggugcccguccgcuggaagcggugaggacuaguuauaagacugacuagcccgaugggccucccaacgggcccuccuccccuccuugcaccgagauuaaucaaaggcucuuuucagagccaccaaaaaaaaaaaaaaaaaaaaaaaaaaaaaaaaaaaaaaaaaaaaaaaaaaaaaaaaaaaaaaaaagaauu

SEQ ID NO: 27707 - RNA, 1658 nt, Artificial Sequence
  mRNA product Design i-3 (hSL-A64-N5) comprising derived and/or modified sequence from LASV(G1180-SLE-2010;Clade IV)__AIT17168__GPCmut4 (opt1)
aggagaaagcuuaccaugggccagaucgugaccuucuuccaggaggucccccacgugaucgaggaggugaugaacaucguccugaucgcccucagcauccuggccgugcugaaggggcucuacaacuucgcgaccugcggccugguggggcugcucacguuccugcugcucugcggccgcuccugcaccgccagccgguacaagggggucuacgagcugcagacccuggagcucaacauggagacccugaacaugugcaugccgcuguccugcacgaagaacaacagccaccacuacaucauggugggcaacgagaccggccucgagcugacccugaccaacacguccaucaucaaccacaaguucugcaaccucagcgacgcccacaagaagaaccuguacgaccacgcccugauguccaucaucagcaccuuccaccucuccauccccaacuucaaccaguacgaggccaugagcugcgacuucaacgggggcaagaucuccgugcaguacaaccugagccacuccuacgcgggggacgccgccaaccacugcggcaccgucgccaacggggugcugcagaccuucaugcgcauggcguggggcggcagcuacaucgcccucgacuccgggcacggcagcugggacugcaucaugacguccuaccaguaccugaucauccagaacaccaccugggaggaccacugccaguucagccggcccucccccaucggguaccugggccuccugagccagcgcacccgggacaucuacaucagccgccggcgccggggcacguucaccuggacccuguccgacagcgaggggaaggacaccccgggcggguacugccucacgcgcuggaugcugaucgaggccgagcugaagugcuucggcaacaccgccguggccaagugcaacgagaagcacgacgaggaguucugcgacaugcuccggcuguucgacuucugcaagcaggcgauccagcgccugaaggcccccgcccagauguccauccagcucaucaacaaggccgucaacgcccugaucaacgaccagcugaucaugaagaaccaccuccgggacaucauggggauccccuacugcaacuacagcaaguacugcuaccugaaccacaccaccacgggcaagaccucccugcccaagugcugccucgugagcaacggcuccuaccugaacgagacccacuucagcgacgacaucgagcagcaggcggacaacaugaucaccgagaugcugcagaaggaguacauggagcgccaggggaagacgccgcucggccugguggaccuguucgucuucuccaccagcuucuaccugaucuccaucuuccuccaccuggugaagauccccacccaccggcacaucgugggcaagagcugccccaagccccaccgccugaaccacauggggaucugcuccugcgggcucuacaagcagccgggcguccccgugaaguggaagcggugaggacuaguuauaagacugacuagcccgaugggccucccaacgggcccuccuccccuccuugcaccgagauuaaucaaaggcucuuuucagagccaccaaaaaaaaaaaaaaaaaaaaaaaaaaaaaaaaaaaaaaaaaaaaaaaaaaaaaaaaaaaaaaaaagaauu

SEQ ID NO: 27708 - RNA, 1658 nt, Artificial Sequence
  mRNA product Design i-3 (hSL-A64-N5) comprising derived and/or modified sequence from LASV(G1442-SLE-2011;Clade IV)__AIT17180__GPCmut4 (opt1)
aggagaaagcuuaccaugggccagaucgugaccuucuuccaggaggucccccacgugaucgaggaggugaugaacaucguccugaucgcccucagcauccuggccgugcugaaggggcucuacaacguggcgaccugcggccugaucgggcuggucacguuccuccugcugugcggccgcuccugcaccaccacccucuacaaggggguguacgagcugcagacgcuggagcucaacauggagacccugaacaugugcaugccgcugagcugcaccaagaacaacucccaccacuacauccgggugggcaacgagaccggccucgagcugacgcugaccaacaccagcaucaucaaccacaaguucugcaaccucuccgacgcccacaagaagaaccuguacgaccacgcccugaugagcaucaucuccaccuuccaccucagcauccccaacuucaaccaguacgaggccauguccugcgacuucaacgggggcaagaucagcguccaguacaaccugucccacagcuacgccggggacgcggccaaccacugcggcacgguggccaacggggugcugcagaccuucaugcgcauggccuggggcggcuccuacaucgcgcucgacagcgggcggggcaacugggacugcaucaugaccuccuaccaguaccugaucauccagaacaccacgugggacgaccacugccaguucagccgccccucccccaucggguaccugggccuccugagccagcggacccgcgacgucuacaucucccggcgccggcgcggcaccuucaccuggacgcugagcgacagcgaggggaaggacaccccgggcggguacugccucacccgguggaugcugaucgaggccgagcugaagugcuucggcaacaccgccguggccaagugcaacgagaagcacgacgaggaguucugcgacaugcuccgccuguucgacuucugcaagcaggccauccagcggcugaaggcgcccgcccagauguccauccagcucaucaacaaggccgugaacgcccugaucaacgaccagcugaucaugaagaaccaccuccgcgacaucauggggauccccuacugcaacuacagcaaguacugcuaccugaacaacacggccaccggcaagaccucccugcccaagugcugccucaucagcaacggcuccuaccugaacgagacccacuucagcgacgacaucgagcaggaggcggacaacaugaucacggagaugcugcagaaggaguacauggagcggcaggggaagaccccgcucggccuggucgaccuguucguguucuccaccagcuucuaccugaucuccaucuuccuccaccuggugaagauccccacccaccgccacaucgucggcaagagcugccccaagccccaccggcugaaccacauggggaucugcuccugcgggcucuacaagcagccgggcgugcccgugcgcuggaagcggugaggacuaguuauaagacugacuagcccgaugggccucccaacgggcccuccuccccuccuugcaccgagauuaaucaaaggcucuuuucagagccaccaaaaaaaaaaaaaaaaaaaaaaaaaaaaaaaaaaaaaaaaaaaaaaaaaaaaaaaaaaaaaaaaagaauu

SEQ ID NO: 27709 - RNA, 1658 nt, Artificial Sequence
  mRNA product Design i-3 (hSL-A64-N5) comprising derived and/or modified sequence from LASV(G3010-SLE-2013;Clade IV)__AIT17344__GPCmut4 (opt1)
aggagaaagcuuaccaugggccagaucgugaccuucuuccaggaggucccccacgugaucgaggaggugaugaacaucguccugaucgcccucagcauccuggccgugcugaaggggcucuacaacuucgcgaccugcggccugguggggcuggucacguuccuccugcugugcggccgcuccugcaccaccagccucuacaaggggguguacgagcugcagacccuggagcucaacauggagacgcugaacaugugcaugccgcuguccugcaccaagaacaacagccaccacuacaucauggugggcaacgagaccggccucgagcugacccugacgaacaccuccaucaucaaccacaaguucugcaaccucagcgacgcccacaagaagaaccuguacaaccacgcccugauguccaucaucagcaccuuccaccucuccauccccaacuucaaccaguacgaggccaugagcugcgacuucaacgggggcaagaucuccguccaguacaaccugagccacuccuacgccggggacgcggccagccacugcggcaccguggccaacggggugcugcagacguucaugcggauggccuggggcggcuccuacaucgcgcucgacagcggguacggcaagugggacugcaucaugaccuccuaccaguaccugaucauccagaacaccaccugggaggaccacugccaguucagccgccccucccccaucggguaccugggccuccugagccagcggacgcgcgacaucuacaucagccggcgccggcgcggcaccuucaccuggacccuguccgacagcgaggggaaggacacgccgggcggguacugccucacccgguggaugcugaucgaggccgagcugaagugcuucggcaacaccgccgucgccaagugcaacgagaagcacgacgaggaguucugcgacaugcuccgccuguucgacuucugcaagcaggccauccagcggcugaagacccccgcgcagauguccauccagcucaucaacaaggccgugaacgcccugaucaacgaccagcugaucaugaagaaccaccuccgcgacaucauggggauccccuacugcaacuacagcaaguacugcuaccugaaccacacgaccaccggcaagaccucccugcccaagugcugccucgugagcaacggcuccuaccugaacgagacgcacuucagcgacgacaucgagcagcaggccgacaacaugaucaccgagaugcugcagaaggaguacauggagcggcaggggaagaccccgcucggccuggucgaccuguucguguucuccaccagcuucuaccugaucuccaucuuccuccaccuggugaagauccccacgcaccgccacaucgucggcaagagcugccccaagccccaccggcugaaccacauggggaucugcuccugcgggcucuacaagcagccgggcgugcccgugcgcuggaagcggugaggacuaguuauaagacugacuagcccgaugggccucccaacgggcccuccuccccuccuugcaccgagauuaaucaaaggcucuuuucagagccaccaaaaaaaaaaaaaaaaaaaaaaaaaaaaaaaaaaaaaaaaaaaaaaaaaaaaaaaaaaaaaaaaagaauu

SEQ ID NO: 27710 - RNA, 1658 nt, Artificial Sequence
  mRNA product Design i-3 (hSL-A64-N5) comprising derived and/or modified sequence from LASV(G502-SLE-2009;Clade IV)__AIT17126__GPCmut4 (opt1)
aggagaaagcuuaccaugggccagaucgugaccuucuuccaggaggucccccacgugaucgaggaggugaugaacaucguccugaucgcccucagcauccuggccgugcugaaggggcucuacaacuucgcgaccugcggccugguggggcugcucacguuccugcugcucugcggccgcuccugcaccaccgggcuguacaagggcgucuacgagcugcagacccucgagcugaacauggagacgcugaacaugugcaugccgcucagcugcaccaagaacaacucccaccacuacaucauggugggcaacgagaccgggcuggagcugacccucacgaacaccagcaucaucaaccacaaguucugcaaccuguccgacgcccacaagaagaaccuguacgaccacgcccucaugagcaucaucuccaccuuccaccugagcauccccaacuucaaccaguacgaggccauguccugcgacuucaacggcgggaagaucagcgugcaguacaaccugucccacagcuacgccggcgacgcggccgaccacugcgggaccgucgccaacggcgugcuccagacguucaugcggauggccuggggcggguccuacaucgcgcuggacagcggccgcgggcggugggacugcaucaugaccuccuaccaguaccugaucauccagaacaccaccugggaggaccacugccaguucagccgccccucccccaucggcuaccucggccugcugagccagcggacgcgcgacaucuacaucucccggcgccggcgcgggaccuucaccuggacccucagcgacagcgagggcaaggacacgcccgggggcuacugccugacccgguggaugcugaucgaggccgagcucaagugcuucgggaacaccgccguggccaagugcaacgagaagcacgacgaggaguucugcgacaugcugcgccuguucgacuucugcaagcaggccauccagcggcucaaggcgccggcccagauguccauccagcugaucaacaaggccgucaacgcccugaucaacgaccagcucgugaugaagaaccaccuccgcgacaucaugggcauccccuacugcaacuacagccgguacugcuaccugaaccacaccacgaccggccgcaccucccugcccaagugcugccuggugagcaacggguccuaccugaacgagacccacuucagcgacgacaucgagcagcaggccgacaacaugaucacggagaugcuccagaaggaguacauggagcggcagggcaagaccccgcuggggcuggucgaccuguucguguucuccaccagcuucuaccucaucuccaucuuccugcaccuggugaagauccccacccaccgccacaucgucggcaagagcugccccaagccccaccggcucaaccacauggggaucugcuccugcggccuguacaagcagccgggcgugcccgugaaguggaagcgcugaggacuaguuauaagacugacuagcccgaugggccucccaacgggcccuccuccccuccuugcaccgagauuaaucaaaggcucuuuucagagccaccaaaaaaaaaaaaaaaaaaaaaaaaaaaaaaaaaaaaaaaaaaaaaaaaaaaaaaaaaaaaaaaaagaauu

SEQ ID NO: 27711 - RNA, 1658 nt, Artificial Sequence
  mRNA product Design i-3 (hSL-A64-N5) comprising derived and/or modified sequence from LASV(G733-SLE-2010;Clade IV)__AIT17154__GPCmut4 (opt1)
aggagaaagcuuaccaugggccagaucgugaccuucuuccaggaggucccccacgugaucgaggaggugaugaacaucguccugaucgcccucagcauccuggccgugcugaaggggcucuacaacuucgcgaccugcggcaucguggggcuggucuccuuccugcuccugugcggccgcagcugcacgaccucccuguacaaggggguguacgagcuccagacccuggagcugaacauggagacccucaacaugugcaugccgcugagcugcacgaagaacaacucccaccacuacaucauggugggcaacgagaccggccuggagcucacccugaccaacacgagcaucaucaaccacaaguucugcaaccuguccgacgcccacaagaagaaccucuacgaccacgcccugaugagcaucaucuccaccuuccaccugagcauccccaacuucaaccaguacgaggccauguccugcgacuucaacgggggcaagaucagcguccaguacaaccucucccacagcuacgccggggacgcggccaaccacugcggcaccaucgccaacggggugcugcagaccuucaugcggauggccuggggcggcuccuacaucgcgcuggacagcgggcgcgaccggugggacugcaucaugacguccuaccaguaccucaucauccagaacaccaccugggaggaccacugccaguucagccgccccucccccaucggcuaccuggggcugcucagccagcggacccgcgacaucuacaucagccggcgccggcgcggcacguucaccuggacccuguccgacagcgagggcaaggacacccccgggggcuacugccugacgcgguggaugcucaucgaggccgagcugaagugcuucgggaacaccgccguggccaagugcaacgagaagcacgacgaggaguucugcgacaugcugcgccucuucgacuucugcaagcaggccauccagcggcugaaggcgccggcccagauguccauccagcugaucaacaaggccgucaacgcccucaucaacgaccagcugaucaugaagaaccaccuccgcgacaucaugggcauccccuacugcaacuacagcaaguacugcuaccugaaccacaccaccacggggaagaccucccugcccaagugcugccuggugagcaacggcuccuaccucaacgagacccacuucagcgacgacaucgagcagcaggccgacaacaugaucaccgagaugcugcagaaggaguacauggagcggcagggcaagacgccgcuggggcucguggaccuguucgucuucuccaccagcuucuaccugaucuccaucuuccugcaccucgugaagauccccacccaccgccacguggucggcaagagcugccccaagccccaccggcugaaccacauggggaucugcuccugcggccuguacgggcagccgggcgugcccgugaaguggaagcgcugaggacuaguuauaagacugacuagcccgaugggccucccaacgggcccuccuccccuccuugcaccgagauuaaucaaaggcucuuuucagagccaccaaaaaaaaaaaaaaaaaaaaaaaaaaaaaaaaaaaaaaaaaaaaaaaaaaaaaaaaaaaaaaaaagaauu

SEQ ID NO: 27712 - RNA, 1658 nt, Artificial Sequence
  mRNA product Design i-3 (hSL-A64-N5) comprising derived and/or modified sequence from MOPV/LASV reassortant(IGS-1;Clade IV)__AFY05576__GPCmut4 (opt1)
aggagaaagcuuaccaugggccagaucgugaccuucuuccaggaggucccccacgugaucgaggaggugaugaacaucguccugaucgcccucagcgugcuggccgugcugaaggggcucuacaacuucgcgaccugcggccuggucgggcuggugacguuccuccugcugugcggccgcuccugcaccaccagccucuacaaggggguguacgagcugcagacccuggagcucaacauggagacgcugaacaugugcaugccgcuguccugcaccaagaacaacagccaccacuacaucauggucggcaacgagaccggccucgagcugacccugacgaacaccuccaucaucaaccacaaguucugcaaccucagcgacgcccacaagaagaaccuguacgaccacgcccugauguccaucaucagcaccuuccaccucuccauccccaacuucaaccaguacgaggccaugagcugcgacuucaacgggggcaagaucuccgugcaguacaaccugagccacuccuacgccggggacgcggccaaccacugcggcaccguggccaacgggguccugcagacguucaugcggauggccuggggcggcagcuacaucgcgcucgacuccgggcgcggcaacugggacugcaucaugaccagcuaccaguaccugaucauccagaacaccaccugggaggaccacugccaguucucccggcccagccccaucggguaccugggccuccugucccagcgcacgcgggacaucuacaucagccgccggcgccggggcaccuucaccuggacccugagcgacuccgagggggaggacacgccgggcggguacugccucacccgcuggaugcugaucgaggccgagcugaagugcuucggcaacaccgccguggccaagugcaacgagaagcacgacgaggaguucugcgacaugcuccggcuguucgacuucugcaagcaggccauccagcgccugaaggcgcccgcccagaugagcauccagcucaucaacaaggccgugaacgcccugaucaacgaccagcugaucaugaagaaccaccuccgggacaucauggggauccccuacugcaacuacuccaaguacugcuaccugaaccacaccacgaccggccgcaccagccugcccaagugcugccucgucuccaacggcagcuaccugaacgagacccacuucuccgacgacaucgagcagcaggccgacaacaugaucacggagaugcugcagaaggaguacauggagcggcaggggaagaccccgcucggccugguggaccuguucguguucagcaccuccuucuaccugaucagcaucuuccuccaccuggucaagauccccacccaccgccacaucguggggaaguccugccccaagccccaccggcugaaccacaugggcaucugcagcugcgggcucuacaagcagccgggcgugcccgucaaguggaagcgcugaggacuaguuauaagacugacuagcccgaugggccucccaacgggcccuccuccccuccuugcaccgagauuaaucaaaggcucuuuucagagccaccaaaaaaaaaaaaaaaaaaaaaaaaaaaaaaaaaaaaaaaaaaaaaaaaaaaaaaaaaaaaaaaaagaauu

SEQ ID NO: 27713 - RNA, 1658 nt, Artificial Sequence
  mRNA product Design i-3 (hSL-A64-N5) comprising derived and/or modified sequence from LASV(LM765-SLE-2012;Clade IV)__AIT17814__GPCmut4 (opt1)
aggagaaagcuuaccaugggccagaucgugaccuucuuccaggaggucccccacgugaucgaggaggugaugaacaucguccugaucgcccucagcauccuggccgugcugaaggggcucuacaacuucgcgaccugcggccugguggggcuggucacguuccuccugcugugcggccgcuccugcaccaccagccucuacaaggggguguacgagcugcagacccuggagcucaacauggagacgcugaacaugugcaugccgcuguccugcaccaagaacaacagccaccacuacaucauggugggcaacgagaccggccucgagcugacccugacgaacaccuccaucaucgaccacaaguucugcaaccucagcgacgcccaccggaagaaccuguacgaccacgcccugauguccaucaucagcaccuuccaccucuccauccccaacuucaaccaguacgaggccaugagcugcgacuucaacgggggcaagaucuccguccaguacaaccugagccacuccuacgccaaggacgcggccgaccacugcgggaccguggccaacggcgugcugcagacguucaugcgcauggccuggggcgggagcuacaucgcgcucgacuccggccgggggcgcugggacugcaucaugaccagcuaccaguaccugaucauccagaacaccaccugggaggaccacugccaguucucccggcccagccccaucggcuaccuggggcuccugucccagcgcacgcgggacaucuacaucagccgccggcgccggggcaccuucaccuggacccugagcgacuccgagggcaaggacacgcccgggggcuacugccucacccgcuggaugcugaucgaggccgagcugaagugcuucgggaacaccgccgucgccaagugcaacgagaagcacgacgaggaguucugcgacaugcuccggcuguucgacuucugcaagcaggccauccagcgccugaaggcgccggcccagaugagcauccagcucaucaacaaggccgugaacgcccugaucaacgaccagcugaucaugaagaaccaccuccgggacaucaugggcauccccuacugcaacuacuccaaguacugcuaccugaaccacaccacgaccgggaagaccagccugcccaagugcugccucguguccaacggcagcuaccugaacgagacccacuucuccgacgacaucgagcagcaggccgacaacaugaucacggagaugcugcagaaggaguacauggagcgccagggcaagaccccgcucgggcuggucgaccuguucguguucagcaccuccuucuaccugaucagcaucuuccuccaccuggugaagauccccacccaccggcacaucgucggcaagcccugccccaagccgcaccgccugaaccacauggggaucugcuccugcggccucuacaagcagcccggggugcccgugaaguggaagcggugaggacuaguuauaagacugacuagcccgaugggccucccaacgggcccuccuccccuccuugcaccgagauuaaucaaaggcucuuuucagagccaccaaaaaaaaaaaaaaaaaaaaaaaaaaaaaaaaaaaaaaaaaaaaaaaaaaaaaaaaaaaaaaaaagaauu

SEQ ID NO: 27714 - RNA, 1658 nt, Artificial Sequence
  mRNA product Design i-3 (hSL-A64-N5) comprising derived and/or modified sequence from LASV(LM776-SLE-2012;Clade IV)__AIT17824__GPCmut4 (opt1)
aggagaaagcuuaccaugggccagaucgugaccuucuuccaggaggucccccacgugaucgaggaggugaugaacaucguccugaucgcccucagcauccuggccgugcugaaggggcucuacaacuucgcgaccugcggccugguggggcuggucacguuccuccugcugugcggccgcuccugcaccaccagcguguacaaggggguguacgagcuccagacccuggagcugaacauggagacgcucaacaugugcaugccgcuguccugcaccaagaacaacagccaccacuacaucauggucggcaacgagaccggccuggagcucacccugacgaacaccuccaucaucaaccacaaguucugcaaccugagcgacgcccacaagaagaaccucuacgaccacgcccugauguccaucaucagcaccuuccaccuguccauccccaacuucaaccaguacgaggccaugagcugcgacuucaacgggggcaagaucuccgugcaguacaaccucagccacuccuacgccggggacgcggccaaccacugcggcaccguggccaacgggguccugcagacguucaugcggauggccuggggcggcagcuacaucgcgcuggacuccgggcacggcaagugggacugcaucaugaccagcuaccaguaccucaucauccagaacaccaccugggaggaccacugccaguucucccgccccagccccaucggguaccugggccugcucucccagcggacgcgcgacaucuacaucagccggcgccggcgcggcaccuucaccuggacccugagcgacuccgaggggaaggacacgccgggcggguacugccugacccgguggaugcucaucgaggccgagcugaagugcuucggcaacaccgccguggccaagugcaacgagaagcacgacgaggaguucugcgacaugcugcgccucuucgacuucugcaagcaggccauccagcggcugaaggcgcccgcccagaugagcauccagcugaucaacaaggccgugaacgcccucaucaacgaccagcugaucaugaagaaccaccuccgcgacaucauggggauccccuacugcaacuacuccaaguacugcuaccugaaccacaccacgaccggcaagaccagccugcccaagugcugccuggucuccaacggcagcuaccucaacgagacccacuucuccgacgacaucgagcagcaggccgacaacaugaucacggagaugcugcagaaggaguacauggagcggcaggggaagaccccgcugggccucguggaccuguucguguucagcaccuccuucuaccugaucagcaucuuccugcaccucgucaagauccccacccaccgccacaucguggggaaguccugccccaagccccaccggcugaaccacaugggcaucugcagcugcgggcuguacaagcagccgggcgugcccguccgcuggaagcggugaggacuaguuauaagacugacuagcccgaugggccucccaacgggcccuccuccccuccuugcaccgagauuaaucaaaggcucuuuucagagccaccaaaaaaaaaaaaaaaaaaaaaaaaaaaaaaaaaaaaaaaaaaaaaaaaaaaaaaaaaaaaaaaaagaauu

SEQ ID NO: 27715 - RNA, 1658 nt, Artificial Sequence
  mRNA product Design i-3 (hSL-A64-N5) comprising derived and/or modified sequence from LASV(Mad39;Clade IV)__ANH09722__GPCmut4 (opt1)
aggagaaagcuuaccaugggccagaucgugaccuucuuccaggaggucccccacgugaucgaggaggugaugaacaucguccugaucgcccucagcauccuggccgugcugaaggggcucuacaacguggcgaccugcggccugaucgggcuggucacguuccuccugcugugcggccgcuccugcaccaccacccucuacaaggggguguacgagcugcaggcccuggagcucaacauggagacgcugaacaugugcaugccgcugagcugcaccaagaacaacucccaccacuacauccgggugggcaacgagaccggccucgagcugacccugacgaacaccagccucaucaaccacaaguucugcaaccuguccgacgcccacaagaagaaccuguacgaccacgcccucaugagcaucaucuccaccuuccaccugagcauccccaacuucaaccaguacgaggccauguccugcgacuucaacgacgggaagaucagcguccaguacaaccugucccacaccuacgcgggcgacacggccaaccacugcgggaccguggccaacggcgugcuccagaccuucaugcgcauggccuggggcgggagcuacaucgcgcuggacuccggccgcgggggcugggacugcaucaugaccagcuaccaguaccugaucauccagaacacgaccugggaggaccacugccaguucucccggcccagccccaucggguaccucggccugcugucccagcggacccgcgacaucuacaucagccggcgccggcgcggcaccuucacguggacccucuccgacagcgaggggaaggacaccccgggcggguacugccugacccgguggaugcugaucgaggccgagcucaagugcuucggcaacacggccgucgccaagugcaacgagaagcacgacgaggaguucugcgacaugcugcgccuguucgacuucugcaagcaggccauccagcggcucaaggcgcccgcccagaugagcauccagcugaucaacaaggccgugaacgcccugaucaacgaccagcucaucaugaagaaccaccuccgcgacaucauggggauccccuacugcaacuacuccaaguacugcuaccugaaccacaccgugaccggcaagaccagccugcccaagugcugccuggucuccaacggcagcuaccugaacgagacgcacuucuccgacgacaucgagcagcaggccgacaacaugaucaccgagaugcuccagaaggaguacauggagcggcaggggaagaccccgcugggccugguggaccuguucguguucagcaccuccuucuaccucaucagcaucuuccugcaccuggucaagauccccacgcaccgccacgugguggggaagcccugccccaagccgcaccggcucaaccacaugggcaucugcuccugcggguucuacaagcagcccggcguccccgugcgcuggaagcggugaggacuaguuauaagacugacuagcccgaugggccucccaacgggcccuccuccccuccuugcaccgagauuaaucaaaggcucuuuucagagccaccaaaaaaaaaaaaaaaaaaaaaaaaaaaaaaaaaaaaaaaaaaaaaaaaaaaaaaaaaaaaaaaaagaauu

SEQ ID NO: 27716 - RNA, 1658 nt, Artificial Sequence
  mRNA product Design i-3 (hSL-A64-N5) comprising derived and/or modified sequence from LASV(Z0947-SLE-2011;Clade IV)__AIT17840__GPCmut4 (opt1)
aggagaaagcuuaccaugggccagaucgugaccuucuuccaggaggucccccacgugaucgaggaggugaugaacaucguccugaucgcccucagcauccuggccgugcugaaggggcucuacaacuucgcgaccugcggccugguggggcuggucacguuccuccugcugugcggccgcuccugcaccaucagccucuacaaggggguguacgagcugcagacccuggagcucaacauggagacccugaacaugugcaugccgcuguccugcacgaagaacaacagccaccacuacaucauggugggcaacgagaccggccucgagcugacccugaccaacacguccaucaucaaccacaaguucugcaaccucagcgacgcccacaagaagaaccuguacgaccacgcccugauguccaucaucagcaccuuccaccucuccauccccaacuucaaccaguacgaggccaugagcugcgacuucaacgggggcaagaucuccguccaguacaaccugagccacuccuacgccggggacgcggccaaccacugcggcaccguggccaacggggugcugcagaccuucaugcggauggccuggggcggcagcuacaucgcgcucgacuccgggcgcgaccggugggacugcaucaugacgagcuaccaguaccugaucauccagaacaccaccugggaggaccacugccaguucucccgccccagccccaucggcuaccuggggcuccugucccagcggacccgcgacaucuacaucagccggcgccggcgcggcacguucaccuggacccugagcgacuccgagggcaaggacacccccgggggcuacugccucacgcgguggaugcugaucgaggccgagcugaagugcuucgggaacaccgccgucgccaagugcaacgagaagcacgacgaggaguucugcgacaugcuccgccuguucgacuucugcaagcaggccauccagcggcugaaggcgccggcccagaugagcauccagcucaucaacaaggccgugaacgcccugaucaacgaccagcugaucaugaagaaccaccuccgcgacaucaugggcauccccuacugcaacuacuccaaguacugcuaccugaaccacaccaccacggggaagaccagccugcccaagugcugccucguguccaacggcagcuaccugaacgagacccacuucuccgacgacaucgagcagcaggccgacaacaugaucaccgagaugcugcagaaggaguacauggagcggcagggcaagacgccgcucgggcuggucgaccuguucguguucagcaccuccuucuaccugaucagcaucuuccuccaccuggugaagauccccacccaccgccacaucgucggcaagcccugccccaagccgcaccggcugaaccacauggggaucugcuccugcggccucuacaagcagcccggggugcccgugaaguggaagcgcugaggacuaguuauaagacugacuagcccgaugggccucccaacgggcccuccuccccuccuugcaccgagauuaaucaaaggcucuuuucagagccaccaaaaaaaaaaaaaaaaaaaaaaaaaaaaaaaaaaaaaaaaaaaaaaaaaaaaaaaaaaaaaaaaagaauu

SEQ ID NO: 27717 - RNA, 1658 nt, Artificial Sequence
  mRNA product Design i-3 (hSL-A64-N5) comprising derived and/or modified sequence from LASV(Josiah;Clade IV)__NP_694870__GPCmut4 (opt4)
aggagaaagcuuaccaugggccagaucgugaccuucuuccaggaggugccccacgugaucgaggaggugaugaacaucgugcugaucgcccugagcgugcuggccgugcugaagggccuguacaacuucgccaccugcggccuggugggccuggugaccuuccugcugcugugcggcagaagcugcaccaccagccuguacaagggcguguacgagcugcagacccuggagcugaacauggagacccugaacaugugcaugccccugagcugcaccaagaacaacagccaccacuacaucauggugggcaacgagaccggccuggagcugacccugaccaacaccagcaucaucaaccacaaguucugcaaccugagcgacgcccacaagaagaaccuguacgaccacgcccugaugagcaucaucagcaccuuccaccugagcauccccaacuucaaccaguacgaggccaugagcugcgacuucaacggcggcaagaucagcgugcaguacaaccugagccacagcuacgccggcgacgccgccaaccacugcggcaccguggccaacggcgugcugcagaccuucaugagaauggccuggggcggcagcuacaucgcccuggacagcggcagaggcaacugggacugcaucaugaccagcuaccaguaccugaucauccagaacaccaccugggaggaccacugccaguucagcagacccagccccaucggcuaccugggccugcugagccagagaaccagagacaucuacaucagcagaagaagaagaggcaccuucaccuggacccugagcgacagcgagggcaaggacacccccggcggcuacugccugaccagauggaugcugaucgaggccgagcugaagugcuucggcaacaccgccguggccaagugcaacgagaagcacgacgaggaguucugcgacaugcugagacuguucgacuucugcaagcaggccauccagagacugaaggcccccgcccagaugagcauccagcugaucaacaaggccgugaacgcccugaucaacgaccagcugaucaugaagaaccaccugagagacaucaugggcauccccuacugcaacuacagcaaguacugcuaccugaaccacaccaccaccggcagaaccagccugcccaagugcugccuggugagcaacggcagcuaccugaacgagacccacuucagcgacgacaucgagcagcaggccgacaacaugaucaccgagaugcugcagaaggaguacauggagagacagggcaagaccccccugggccugguggaccuguucguguucagcaccagcuucuaccugaucagcaucuuccugcaccuggugaagauccccacccacagacacaucgugggcaagagcugccccaagccccacagacugaaccacaugggcaucugcagcugcggccuguacaagcagcccggcgugcccgugaaguggaagagaugaggacuaguuauaagacugacuagcccgaugggccucccaacgggcccuccuccccuccuugcaccgagauuaaucaaaggcucuuuucagagccaccaaaaaaaaaaaaaaaaaaaaaaaaaaaaaaaaaaaaaaaaaaaaaaaaaaaaaaaaaaaaaaaaagaauu

SEQ ID NO: 27718 - RNA, 1655 nt, Artificial Sequence
  mRNA product Design i-3 (hSL-A64-N5) comprising derived and/or modified sequence from LASV(LP;Clade I)__AAF86701__GPCmut4 (opt4)
aggagaaagcuuaccaugggccagaucaucaccuucuuccaggaggugccccacgugaucgaggaggugaugaacaucgugcugaucgcccugagccugcuggccauccugaagggccuguacaacaucgccaccugcggcaucaucggccugguggccuuccuguuccugugcggcaagagcugcagccugacccugaagggcggcuacgagcugcagacccuggagcugaacauggagacccugaacaugugcaugccccugagcugcaccaagaacagcagccaccacuacaucagagugggcaacgagaccggccuggagcugacccugaccaacaccagcaucaucaaccacaaguucugcaaccugagcgacgcccacaagaagaaccuguacgaccacgcccugaugagcaucaucagcaccuuccaccugagcauccccaacuucaaccaguacgaggccaugagcugcgacuucaacggcggcaagaucagcgugcaguacaaccugagccacagcuacgccggcgacgccgccgagcacugcggcaccguggccaacggcgugcugcagaccuucaugagaauggccuggggcggcagauacaucgcccuggacagcggcaagggcaacugggacugcaucaugaccagcuaccaguaccugaucauccagaacaccaccugggaggaccacugccaguucagcagacccagccccaucggcuaccugggccugcugagccagagaaccagagacaucuacaucagcagaagaagaagaggcaccuucaccuggacccugagcgacagcgagggcaacgagacccccggcggcuacugccugaccagauggaugcugaucgaggccgagcugaagugcuucggcaacaccgccguggccaagugcaacgagaagcacgacgaggaguucugcgacaugcugagacuguucgacuucugcaagcaggccaucagaagacugaaggcccccgcccagaugagcauccagcugaucaacaaggccgugaacgcccugaucaacgaccagcugaucaugaagaaccaccugagagacaucaugggcauccccuacugcaacuacagcaaguacugcuaccugaaccacaccagcagcggcagaaccagccugcccaagugcugccugaucagcaacggcagcuaccugaacgagacccaguucagcgacgacaucgagcagcaggccgacaacaugaucaccgagaugcugcagaaggaguacaucgagagacagggcaagaccccccugggccugguggacaucuucaucuucagcaccagcuucuaccugaucagcaucuuccugcaccugaucaagauccccacccacagacacaucgugggcaagcccugccccaagccccacagacugaaccacaugggcgugugcagcugcggccuguacaagcaccccggcgugcccaccaaguggaagagaugaggacuaguuauaagacugacuagcccgaugggccucccaacgggcccuccuccccuccuugcaccgagauuaaucaaaggcucuuuucagagccaccaaaaaaaaaaaaaaaaaaaaaaaaaaaaaaaaaaaaaaaaaaaaaaaaaaaaaaaaaaaaaaaaagaauu

SEQ ID NO: 27719 - RNA, 1655 nt, Artificial Sequence
  mRNA product Design i-3 (hSL-A64-N5) comprising derived and/or modified sequence from LASV(803213;Clade II)__AAF86703__GPCmut4 (opt4)
aggagaaagcuuaccaugggccagaucaucaccuucuuccaggaggugccccacgugaucgaggaggugaugaacaucgugcugaucgcccugagccugcuggccauccugaagggcaucuacaacguggccaccugcggccuguucggccugaucagcuuccugcugcugugcggcagaagcugcagcgugaccuacaagggcguguacgagcugcagacccuggagcugaacauggccaaccugaacaugugcaugccccugagcugcaccaagaacaacagccaccacuacaucauggugggcaacgagaccggccuggagcugacccugaccaacaccagcaucaucaaccacaaguucugcaaccugagcgacgcccacaagaagaaccuguacgaccacgcccugaugagcaucaucagcaccuuccaccugagcauccccaacuucaaccaguacgaggccaugagcugcgacuucaacggcggcaagaucagcgugcaguacaaccugagccacagcuucgccguggacgccgccaaccacugcggcaccaucgccaacggcgugcugcagaccuucaugagaauggccuggggcggcagcuacaucgcccuggacagcggcaagggcaacugggacugcaucaugaccagcuaccaguaccugaucauccagaacaccaccugggaggaccacugccaguucagcagacccagccccaucggcuaccugggccugcugagccagagaaccagagacaucuacaucagcagaagaagaagaggcaccuucaccuggacccugagcgacagcgagggcaacgaggcccccggcggcuacugccugaccagauggaugcugaucgaggccgagcugaagugcuucggcaacaccgccguggccaagugcaacgagaagcacgacgaggaguucugcgacaugcugagacuguucgacuucugcaagcaggccaucaagagacugaagacccccgcccagaugagcauccagcugaucaacaaggccgugaacgcccugaucaacgaccagcugaucaugaagaaccaccugagagacaucaugggcauccccuacugcaacuacagcagauacugcuaccugaaccacaccgugaccggcaagaccagccugcccagaugcugccuggugagcaacggcagcuaccugaacgagacccacuucagcgacgacaucgagcagcaggccgacaacaugaucaccgagaugcugcagaaggaguacauggacagacagggcaagaccccccugggccugguggaccuguucguguucagcaccagcuucuaccugaucagcaucuuccugcaccuggugaagauccccacccacagacacaucgugggcaagcccugccccaagccccacagacugaaccacaugggcaucugcagcugcggccuguacaagcaccccggcgugcccgugaaguggaagagaugaggacuaguuauaagacugacuagcccgaugggccucccaacgggcccuccuccccuccuugcaccgagauuaaucaaaggcucuuuucagagccaccaaaaaaaaaaaaaaaaaaaaaaaaaaaaaaaaaaaaaaaaaaaaaaaaaaaaaaaaaaaaaaaaagaauu

SEQ ID NO: 27720 - RNA, 1655 nt, Artificial Sequence
  mRNA product Design i-3 (hSL-A64-N5) comprising derived and/or modified sequence from LASV(GA391;Clade III)__CAA36645__GPCmut4 (opt4)
aggagaaagcuuaccaugggccagaucgugaccuucuuccaggaggugccccacgugaucgaggaggugaugaacaucgugcugaucgcccugagcauccuggccauccugaagggccuguacaacguggccaccugcggccugaucggccuggugaccuuccugcugcugagcggcagaagcugcagccugaucuacaagggcaccuacgagcugcagacccuggagcugaacauggagacccugaacaugugcaugccccugagcugcaccaagaacaacagccaccacuacaucagagugggcaacgagaccggccuggagcugacccugaccaacaccagcauccugaaccacaaguucugcaaccugagcgacgcccacaagagaaaccuguacgaccacagccugaugagcaucaucagcaccuuccaccugagcauccccaacuucaaccaguacgaggccaugagcugcgacuucaacggcggcaagaucaccgugcaguacaaccugagccacagcuucgccguggacgccgccggccacugcggcacccuggccaacggcgugcugcagaccuucaugagaauggccuggggcggcagcuacaucgcccuggacagcggcagaggcaacugggacugcaucaugaccagcuaccaguaccugaucauccagaacaccaccugggacgaccacugccaguucagcagacccagccccaucggcuaccugggccugcugagccagagaaccagagacaucuacaucagcagaagaagaagaggcaccuucaccuggacccugagcgacagcgagggcaacgagacccccggcggcuacugccugaccagauggaugcugaucgaggccgagcugaagugcuucggcaacaccgccguggccaagugcaacgagaagcacgacgaggaguucugcgacaugcugagacuguucgacuucugcaagcaggccaucagaagacugaagacccccgcccagaugagcauccagcugaucaacaaggccgugaacgcccugaucaacgaccagcugaucaugaagaaccaccugagagacaucaugggcauccccuacugcaacuacagcagauacugcuaccugaaccacaccagcaccggcaagaccagccugcccagaugcugccugaucagcaacggcagcuaccugaacgagaccaaguucagcgacgacaucgagcagcaggccgacaacaugaucaccgagaugcugcagaaggaguacaucgacagacagggcaagaccccccugggccugguggaccuguucguguucagcaccagcuucuaccugaucagcaucuuccugcaccuggugaagauccccacccacagacacaucgugggcaagcccugccccaagccccacagacugaaccacaugggcaucugcagcugcggccuguacaagcagcccggcgugcccgugagauggaagagaugaggacuaguuauaagacugacuagcccgaugggccucccaacgggcccuccuccccuccuugcaccgagauuaaucaaaggcucuuuucagagccaccaaaaaaaaaaaaaaaaaaaaaaaaaaaaaaaaaaaaaaaaaaaaaaaaaaaaaaaaaaaaaaaaagaauu

SEQ ID NO: 27721 - RNA, 1658 nt, Artificial Sequence
  mRNA product Design i-3 (hSL-A64-N5) comprising derived and/or modified sequence from LASV(AV;Clade V)__CCA30314__GPCmut4 (opt4)
aggagaaagcuuaccaugggccagaucgugaccuucuuccaggaggugccccacgugaucgaggaggugaugaacaucgugcugaucgcccugagcauccuggccgugcugaagggccuguacaacaucgccaccugcggccugaucggccugaucaccuuccugcugcugugcggcagaagcugcagcagcaaccuguacaagggcguguacgagcugcagagccuggaccugaacauggagacccugaacaugugcaugccccugagcugcaccaagaacaacagccaccacuacaucagagugggcaacgacaccggccuggagcugacccugaccaacaccagcauccugaaccacaaguucugcaaccugagcgacgcccacaagaaggaccuguacgaccacgcccugaugagcaucaucagcaccuuccaccugagcauccccaacuucaaccaguacgaggccaugagcugcgacuucaacggcggcaagaucagcgugcaguacaaccugagccacagcuacgccaucgacgccgccaaccacugcggcaccguggccaacggcauccugcagaccuucaugagaauggccuggggcggcagcuacaucgcccuggacagcggcagaggcaacugggacugcaucaugaccagcuaccaguaccugaucauccagaacaccaccugggagaaccacugccaguucagcagacccagccccaucggcuaccugggccugcugagccagagaaccagagacaucuacaucagcagaagaagaagaggcaccuucaccuggacccugagcgacagcgagggcaacgccacccccggcggcuacugccugaccagauggaugcugaucgaggccgagcugaagugcuucggcaacaccgccguggccaagugcaacgagaagcacgacgaggaguucugcgacaugcugagacuguucgacuucugcaagcaggccaucagcagacugaagagccccgcccagaugagcauccagcugaucaacaaggccgugaacgcccugaucaacgaccagcugaucaugaagaaccaccugagagacaucaugggcauccccuacugcaacuacagcaaguacugcuaccugaaccacaccaucaccggcaagaccagccugcccaagugcugccuggugagcaacggcagcuaccugaacgagacccacuucagcgacgacaucgagcagcaggccgacaacaugaucaccgagaugcugcagaaggaguacauggagagacagggcaagaccccccugggccugguggaccuguucguguucagcaccagcuucuaccugaucagcaucuuccugagacuggugaagauccccacccacagacacaucgugggcaagcccugccccaagccccacagacugaaccacaugggcaucugcagcugcggccuguacaagcagcccggcgugcccgugagauggaagagaugaggacuaguuauaagacugacuagcccgaugggccucccaacgggcccuccuccccuccuugcaccgagauuaaucaaaggcucuuuucagagccaccaaaaaaaaaaaaaaaaaaaaaaaaaaaaaaaaaaaaaaaaaaaaaaaaaaaaaaaaaaaaaaaaagaauu

SEQ ID NO: 27722 - RNA, 1655 nt, Artificial Sequence
  mRNA product Design i-3 (hSL-A64-N5) comprising derived and/or modified sequence from LASV(Togo/2016/7082;Clade VI)__AMR44577__GPCmut4 (opt4)
aggagaaagcuuaccaugggccagaucaucaccuucuuccaggaggugccccacgugaucgaggaggugaugaacaucgugcugaucgcccugagccugcuggccauccugaagggcguguacaacguggccaccugcggcaucaucggccuggugaccuuccuguuccugugcggcagaagcugcagccugaucuacaagggcagcuacgagcugcagacccuggagcugaacauggagacccugaacaugugcaugccccugagcugcaccaagaacagcagccaccacuacaucagagugggcaacgagaccggccuggagcugacccugaccaacaccagcaucaucaaccacaaguucugcaaccugagcgacgcccacaagagaaaccuguacgaccacgcccugaugagcauccugagcaccuuccaccugagcauccccaacuucaaccaguacgaggccaugagcugcgacuucaacggcggcaagaucagcgugcaguacaaccugagccacgccuacgccguggacgccgccgagcacugcggcaccguggccaacggcgugcugcagaccuucaugagaauggccuggggcggcagcuacaucgcccuggacagcggcagaggcaacugggacugcaucaugaccagcuaccaguaccugaucauccagaacaccaccugggaggaccacugccaguucagcagacccagccccaucggcuaccugggccugcugagccagagaaccagagacaucuacaucagcagaagaagaagaggcaccuucaccuggacccugagcgacagcgagggcaacgagacccccggcggcuacugccugaccagauggaugcugaucgaggccgagcugaagugcuucggcaacaccgccguggccaagugcaacgagaagcacgacgaggaguucugcgacaugcugagacuguucgacuucugcaagcaggccauccagagacugaagagccccgcccagaugagcauccagcugaucaacaaggccgugaacgcccugaucaacgaccagcugaucaugaagaaccaccugagagacaugaugggcauccccuacugcaacuacagcaaguacugcuaccugaaccacaccagcagcggcagaaccagccugcccaagugcugccuggugagcaacggcagcuaccugaacgagacccacuucagcgacgacaucgagcagcaggccgacaacaugaucaccgagaugcugcagaaggaguacaucgacagacagggcaagaccccccugggccugguggaccuguucguguucagcaccagcuucuaccugaucagcaucuuccugcaccugaucaagauccccacccacagacacaucgugggcaagcccugccccaagccccacagacugaaccacaugggcaucugcagcugcggccuguacaagcagcccggcgugcccaccagauggaagagaugaggacuaguuauaagacugacuagcccgaugggccucccaacgggcccuccuccccuccuugcaccgagauuaaucaaaggcucuuuucagagccaccaaaaaaaaaaaaaaaaaaaaaaaaaaaaaaaaaaaaaaaaaaaaaaaaaaaaaaaaaaaaaaaaagaauu

SEQ ID NO: 27723 - RNA, 1655 nt, Artificial Sequence
  mRNA product Design i-3 (hSL-A64-N5) comprising derived and/or modified sequence from LASV(KAK-428;Clade n.d. (VII))__ANH09740__GPCmut4 (opt4)
aggagaaagcuuaccaugggccagaucgugaccuucuuccaggaggugccccacgugaucgaggaggugaugaacaucgugcugaucgcccugagccugcuggccauccugaagggccuguacaacuucgccaccugcggcgugaucggccugaucaccuuccugcugcugugcggcagaagcugcagcgccaccuacaagggccaguacgagcugcagacccuggagcugaacauggagagccugaacaugugcaugccccugagcugcaccaagaacaacagccaccacuacaucagagccggcaacaacaccggccuggagcugacccugaccaacaccagcaucaucagccacaaguucugcaaccugagcgacgcccacaagaagaaccuguacgaccacacccugaugagcaucaucaccaccuuccaccugagcauccccaacuucaaccaguacgaggccaugagcugcgacuucaacggcggcaagaucagcauccaguacaaccugagccacagcuacgccggcgacgccgcccagcacugcggcaccguggccaacggcgugcugcagaccuucaugagaauggccuggggcggcagcuaccuggcccuggacagcggcagaagaggcugggacugcaucaucagcagcuaccaguaccugaucauccagaacaccaccugggacgaccacugccaguucagcagacccagccccaucggcuaccugggcuucgugagccagaagaccagagacaucuacaucagcagaagaagaagaggcaccuucaccuggacccugagcgacagcgagggccacgacaugcccggcggcuacugccugaccagauggaugcugaucgaggccgaccugaagugcuucggcaacaccgccguggccaagugcaacgagaagcacgacgaggaguucugcgacauguggagacuguucgacuucugcaagcaggccauccagagacugaaggcccccgcccagaugaacauccagcugaucaacaaggccgugaacgcccugaucaacgaccagcugaugaugaagaaccaccugagagacaucaugggcauccccuacugcaacuacagcaaguucugcuaccugaacaacaccaccaccggcagaaccagccugcccagaugcugccugaucagcaacggcagcuaccugaacgagacccacuucagcgacgacaucgagcagcaggccgacaacaugaucaccgagaugcugcagaaggaguacauggacagacagggcaagaccccccugggccugguggaccuguucguguucagcaccagcuucuaccugaucaccaucuuccugcaccuggugaagauccccacccacagacacaucgugggcaagcccugccccaagccccacagacugaaccacaugggcaucugcagcugcggccuguacaagcagcccggcgugcccgugagauggaagagaugaggacuaguuauaagacugacuagcccgaugggccucccaacgggcccuccuccccuccuugcaccgagauuaaucaaaggcucuuuucagagccaccaaaaaaaaaaaaaaaaaaaaaaaaaaaaaaaaaaaaaaaaaaaaaaaaaaaaaaaaaaaaaaaaagaauu

SEQ ID NO: 27724 - RNA, 1655 nt, Artificial Sequence; identical to SEQ ID NO: 27718
  mRNA product Design i-3 (hSL-A64-N5) comprising derived and/or modified sequence from LASV(Pinneo-NIG-1969;Clade I)__AIT17836__GPCmut4 (opt4)

SEQ ID NO: 27725 - RNA, 1655 nt, Artificial Sequence
  mRNA product Design i-3 (hSL-A64-N5) comprising derived and/or modified sequence from LASV(ISTH0009-NIG-2011;Clade II)__AIT17404__GPCmut4 (opt4)
aggagaaagcuuaccaugggccagaucaucaccuucuuccaggaggugccccacgugaucgaggaggugaugaacaucgugcugaucgcccugagccugcuggccauccugaagggcaucuacaacguggccaccugcggccuguucggccuggugagcuuccugcugcugugcggcagaagcugcagcaccaccuacaagggcguguacgagcugcagacccuggagcuggacauggccagccugaacaugugcaugccccugagcugcaccaagaacaacagccaccacuacaucauggugggcaacgagaccggccuggagcugacccugaccaacaccagcaucaucaaccacaaguucugcaaccugagcgacgcccacaagaagaaccuguacgaccacgcccugaugagcaucaucagcaccuuccaccugagcauccccaacuucaaccaguacgaggccaugagcugcgacuucaacggcggcaagaucagcgugcaguacaaccugagccacgccuacgccguggacgccgccaaccacugcggcaccaucgccaacggcgugcugcagaccuucaugagaauggccuggggcggcagcuacaucgcccuggacagcggcaagggcagcugggacugcaucaugaccagcuaccaguaccugaucauccagaacaccaccugggaggaccacugccaguucagcagacccagccccaucggcuaccugggccugcugagccagagaaccagagacaucuacaucagcagaagaagaagaggcaccuucaccuggacccugagcgacagcgagggcaacgagacccccggcggcuacugccugaccagauggaugcugaucgaggccgagcugaagugcuucggcaacaccgccguggccaagugcaacgagaagcacgacgaggaguucugcgacaugcugagacuguucgacuucugcaagcaggccaucagaagacugaagacccccgcccagaugagcauccagcugaucaacaaggccgugaacgcccugaucaacgaccagcugaucaugaagaaccaccugagagacaucaugggcauccccuacugcaacuacagcaaguacugcuaccugaaccacaccgugaccggcaagaccagccugcccagaugcugccuggugagcaacggcagcuaccugaacgagacccacuucagcgacgacaucgagcagcaggccgacaacaugaucaccgagcugcugcagaaggaguacauggacagacagggcaagaccccccugggccugguggaccuguucguguucagcaccagcuucuaccugaucagcaucuuccugcaccugaucaagauccccacccacagacacaucaccggcaagcccugccccaagccccacagacugaaccacaugggcaucugcagcugcggccuguacaagcaccccggcgugcccgugaaguggaagagaugaggacuaguuauaagacugacuagcccgaugggccucccaacgggcccuccuccccuccuugcaccgagauuaaucaaaggcucuuuucagagccaccaaaaaaaaaaaaaaaaaaaaaaaaaaaaaaaaaaaaaaaaaaaaaaaaaaaaaaaaaaaaaaaaagaauu

SEQ ID NO: 27726 - RNA, 1655 nt, Artificial Sequence
  mRNA product Design i-3 (hSL-A64-N5) comprising derived and/or modified sequence from LASV(ISTH2010-NIG-2012;Clade II)__AIT17482__GPCmut4 (opt4)
aggagaaagcuuaccaugggccagaucaucaccuucuuccaggaggugccccacgugaucgaggaggugaugaacaucgugcugaucgcccugagccugcuggccauccugaagggcaucuacaacguggccaccugcggccuguucggccuggugagcuuccugcugcugugcggcagaagcugcagcaccaccuacaagggcguguacgagcugcagacccuggagcuggacauggccagccugaacaugugcaugccccugagcugcaccaagaacaacagccaccacuacaucauggugggcaacgagaccggccuggagcugacccugaccaacaccagcaucaucaaccacaaguucugcaaccugagcgacgcccacaagaagaaccuguacgaccacgcccugaugagcaucaucagcaccuuccaccugagcauccccaacuucaaccaguacgaggccaugagcugcgacuucaacggcggcaagaucagcgugcaguacaaccugagccacgccuacgccguggacgccgccaaccacugcggcaccaucgccaacggcgugcugcagaccuucaugagaauggccuggggcggcagcuacaucgcccuggacagcggcaagggcagcugggacugcaucaugaccagcuaccaguaccugaucauccagaacaucaccugggaggaccacugccaguucagcagacccagccccaucggcuaccugggccugcugagccagagaaccagagacaucuacaucagcagaagaagaagaggcaccuucaccuggacccugagcgacagcgagggcaacgagacccccggcggcuacugccugaccagauggaugcugaucgaggccgagcugaagugcuucggcaacaccgccguggccaagugcaacgagaagcacgacgaggaguucugcgacaugcugagacuguucgacuucugcaagcaggccaucagaagacugaagacccccgcccagaugagcauccagcugaucaacaaggccgugaacgcccugaucaacgaccagcugaucaugaagaaccaccugagagacaucaugggcauccccuacugcaacuacagcaaguacugcuaccugaaccacaccgugaccggcaagaccagccugcccagaugcugccuggugagcaacggcagcuaccugaacgagacccacuucagcgacgacaucgagcagcaggccgacaacaugaucaccgagcugcugcagaaggaguacaucgacagacagggcaagaccccccugggccugguggaccuguucguguucagcaccagcuucuaccugaucagcaucuuccugcaccuggugaagauccccacccacagacacguggugggcaagcccugccccaagccccacagacugaaccacaugggcaucugcagcugcggccuguacaagcaccccggcgugcccgugaaguggaagagaugaggacuaguuauaagacugacuagcccgaugggccucccaacgggcccuccuccccuccuugcaccgagauuaaucaaaggcucuuuucagagccaccaaaaaaaaaaaaaaaaaaaaaaaaaaaaaaaaaaaaaaaaaaaaaaaaaaaaaaaaaaaaaaaaagaauu

SEQ ID NO: 27727 - RNA, 1655 nt, Artificial Sequence
  mRNA product Design i-3 (hSL-A64-N5) comprising derived and/or modified sequence from LASV(Lassa virus/H.sapiens-wt/NGA/2015/ISTH_0543;Clade II)__AVO03639__GPCmut4 (opt4)
aggagaaagcuuaccaugggccagaucaucaccuucuuccaggaggugccccacgugaucgaggaggugaugaacaucgugcugaucgcccugagccugcuggccauccugaagggcaucuacaacguggccaccugcggccuguucggccuggugagcuuccugcugcugugcggcagaagcugcagcaccaccuacaagggcguguacgagcugcagacccuggagcuggacauggccaaccugaacaugugcaugccccugagcugcaccaagaacaacagccaccacuacaucauggugggcaacgagaccggccuggagcugacccugaccaacaccagcaucaucaaccacaaguucugcaaccugagcgacgcccacaagaagaaccuguacgaccacgcccugaugagcaucaucagcaccuuccaccugagcauccccaacuucaaccaguacgaggccaugagcugcgacuucaacggcggcaagaucagcgugcaguacaaccugagccacaccuacgccguggacgccgccaaccacugcggcaccaucgccaacggcgugcugcagaccuucaugagaauggccuggggcggcagcuacaucgcccuggacagcggcaagggcagcugggacugcaucaugaccagcuaccaguaccuggugauccagaacaccaccugggaggaccacugccaguucagcagacccagccccaucggcuaccugggccugcugagccagagaaccagagacaucuacaucagcagaagaagaagaggcaccuucaccuggacccugagcgacagcgagggcaacgagacccccggcggcuacugccugaccagauggaugcugaucgaggccgagcugaagugcuucggcaacaccgccguggccaagugcaacgagaagcacgacgaggaguucugcgacaugcugagacuguucgacuucugcaagcaggccaucagaagacugaagacccccgcccagaugagcauccagcugaucaacaaggccgugaacgcccugaucaacgaccagcugaucaugaagaaccaccugagagacaucaugggcauccccuacugcaacuacagcaaguacugcuaccugaaccacaccgugaccggcaagaccagccugcccagaugcugccuggugagcaacggcagcuaccugaacgagacccacuucagcgacgacaucgagcagcaggccgacaacaugaucaccgagcugcugcagaaggaguacaucgacagacagggcaagaccccccugggccugguggaccuguucguguucagcaccagcuucuaccugaucagcaucuuccugcaccuggugaagauccccacccacagacacaucaccggcaagcccugccccaagccccacagacugaaccacaugggcaucugcagcugcggccuguacaagcaccccggcgugcccgugaaguggaagagaugaggacuaguuauaagacugacuagcccgaugggccucccaacgggcccuccuccccuccuugcaccgagauuaaucaaaggcucuuuucagagccaccaaaaaaaaaaaaaaaaaaaaaaaaaaaaaaaaaaaaaaaaaaaaaaaaaaaaaaaaaaaaaaaaagaauu

SEQ ID NO: 27728 - RNA, 1655 nt, Artificial Sequence
  mRNA product Design i-3 (hSL-A64-N5) comprising derived and/or modified sequence from LASV(Lassa virus/H.sapiens-wt/NGA/2016/ISTH_0009;Clade II)__AVO03571__GPCmut4 (opt4)
aggagaaagcuuaccaugggccagaucaucaccuucuuccaggaggugccccacgugaucgaggaggugaugaacaucgugcugaucgcccugagccugcuggccauccugaagggcaucuacaacguggccaccugcggccugcugggccuggugagcuuccugcugcugugcggcagaagcugcagcaccaccuacaagggcguguacgagcugcagacccuggagcuggacauggccagccugaacaugugcaugccccugagcugcaccaagaacaacagccaccacuacaucauggugggcaacgagaccggccuggagcugacccugaccaacaccagcaucaucaaccacaaguucugcaaccugagcgacgcccacaagaagaaccuguacgaccacgcccugaugagcaucaucagcaccuuccaccugagcauccccaacuucaaccaguacgaggccaugagcugcgacuucaacggcggcagaaucagcgugcaguacaaccugagccacagcuacgccguggacgccgccaaccacugcggcaccaucgccaacggcgugcugcagaccuucaugagaauggccuggggcggcagcuacaucgcccuggacagcggcaagggcagcugggacugcaucaugaccagcuaccaguaccugaucauccagaacaccaccugggaggaccacugccaguucagcagacccagccccaucggcuaccugggccugcugagccagagaaccagagacaucuacaucagcagaagaagaagaggcaccuucaccuggacccugagcgacagcgagggcaacgagacccccggcggcuacugccugaccagauggaugcugaucgaggccgagcugaagugcuucggcaacaccgccguggccaagugcaacgagaagcacgacgaggaguucugcgacaugcugagacuguucgacuucugcaagcaggccaucagaagacugaagacccccgcccagaugagcauccagcugaucaacaaggccgugaacgcccugaucaacgaccagcugaucaugaagaaccaccugagagacaucaugggcauccccuacugcaacuacagcaaguacugcuaccugaaccacaccgugaccggcaagaccagccugcccagaugcugccuggugagcaacggcagcuaccugaacgagacccacuucagcgacgacaucgagcagcaggccgacaacaugaucaccgagcugcugcagaaggaguacaucgacagacagggcaagaccccccugggccugguggaccuguucguguucagcaccagcuucuaccugaucagcaucuuccugcaccuggugaagauccccacccacagacacaucaccggcaagcccugccccaagccccacagacugaaccacaugggcaucugcagcugcggccuguacaaccaccccggcgugcccgugaaguggaagagaugaggacuaguuauaagacugacuagcccgaugggccucccaacgggcccuccuccccuccuugcaccgagauuaaucaaaggcucuuuucagagccaccaaaaaaaaaaaaaaaaaaaaaaaaaaaaaaaaaaaaaaaaaaaaaaaaaaaaaaaaaaaaaaaaagaauu

SEQ ID NO: 27729 - RNA, 1655 nt, Artificial Sequence
  mRNA product Design i-3 (hSL-A64-N5) comprising derived and/or modified sequence from LASV(Lassa virus/H.sapiens-wt/NGA/2016/ISTH_0017;Clade II)__AVO03567__GPCmut4 (opt4)
aggagaaagcuuaccaugggccagaucaucaccuucuuccaggaggugccccacgugaucgaggaggugaugaacaucgugcugaucgcccugagccugcuggccauccugaagggcaucuacaacguggccaccugcggccuguucggccuggugagcuuccugcugcugugcggcagaagcugcagcaccaccuacaagggcguguacgagcugcagacccuggagcuggacauggccagccugaacaugugcaugccccugagcugcaccaagaacaacagccaccacuacaucauggugggcaacgagaccggccuggagcugacccugaccaacaccagcaucaucaaccacaaguucugcaaccugagcgacgcccacaagaagaaccuguacgaccacgcccugaugagcaucaucagcaccuuccaccugagcauccccaacuucaaccaguacgaggccaugagcugcgacuucaacggcggcaagaucagcgugcaguacaaccugagccacaccuacgccaucgacgccgccaaccacugcggcaccaucgccaacggcgugcugcagaccuucaugagaauggccuggggcggcagcuacaucgcccuggacagcggcaagggcagcugggacugcaucaugaccagcuaccaguaccugaucauccagaacaccaccugggaggaccacugccaguucagcagacccagccccaucggcuaccugggccugcugagccagagaaccagagacaucuacaucagcagaagaagaagaggcaccuucaccuggacccugagcgacagcgagggcaacgagacccccggcggcuacugccugaccagauggaugcugaucgaggccgagcugaagugcuucggcaacaccgccguggccaagugcaacgagaagcacgacgaggaguucugcgacaugcugagacuguucgacuucugcaagcaggccaucagaagacugaagacccccgcccagaugagcauccagcugaucaacaaggccgugaacgcccugaucaacgaccagcugaucaugaagaaccaccugagagacaucaugggcauccccuacugcaacuacagcaaguacugcuaccugaaccacaccgugaccggcaagaccagccugcccagaugcugccuggugagcaacggcagcuaccugaacgagacccacuucagcgacgacaucgagcagcaggccgacaacaugaucaccgagcugcugcagaaggaguacauggacagacagggcaagaccccccugggccugguggaccuguucguguucagcaccagcuucuaccugaucagcaucuuccugcaccuggugagaauccccacccacagacacgugaucggcaagcccugccccaagccccacagacugaaccacaugggcaucugcagcugcggccuguacaagcaccccggcgugcccgugaaguggaagagaugaggacuaguuauaagacugacuagcccgaugggccucccaacgggcccuccuccccuccuugcaccgagauuaaucaaaggcucuuuucagagccaccaaaaaaaaaaaaaaaaaaaaaaaaaaaaaaaaaaaaaaaaaaaaaaaaaaaaaaaaaaaaaaaaagaauu

SEQ ID NO: 27730 - RNA, 1655 nt, Artificial Sequence
  mRNA product Design i-3 (hSL-A64-N5) comprising derived and/or modified sequence from LASV(Lassa virus/H.sapiens-wt/NGA/2018/ISTH_0959;Clade II)__AVV65099__GPCmut4 (opt4)
aggagaaagcuuaccaugggccagaucaucaccuucuuccaggaggugccccacgugaucgaggaggugaugaacaucgugcugaucgcccugagccugcuggccauccugaagggcaucuacaacguggugaccugcggccuguucggccuggugagcuuccugcugcugugcggcagaagcugcagcaccaccuacaagggcguguacgagcugcagacccuggagcuggacauggccagccugaacaugugcaugccccugagcugcaccaagaacaacagccaccacuacaucauggugggcaacgagaccggccuggagcugacccugaccaacaccagcaucaucaaccacaaguucugcaaccugagcgacgcccacaagaagaaccuguacgaccacgcccugaugagcaucaucagcaccuuccaccugagcauccccaacuucaaccaguacgaggccaugagcugcgacuucaacggcggcaagaucagcgugcaguacaaccugagccacgccuacgccaucgacgccgccaaccacugcggcaccaucgccaacggcgugcugcagaccuucaugagaauggccuggggcggcagcuacaucgcccuggacagcggcaagggcagcugggacugcaucaugaccagcuaccaguaccugaucauccagaacaccaccugggaggaccacugccaguucagcagacccagccccaucggcuaccugggccugcugagccagagaaccagagacaucuacaucagcagaagaagaagaggcaccuucaccuggacccugagcgacagcgagggcaacgagacccccggcggcuacugccugaccagauggaugcugaucgaggccgagcugaagugcuucggcaacaccgccguggccaagugcaacgagaagcacgacgaggaguucugcgacaugcugagacuguucgacuucugcaagcaggccaucagaagacugaagacccccgcccagaugagcauccagcugaucaacaaggccgugaacgcccugaucaacgaccagcugaucaugaagaaccaccugagagacaucaugggcauccccuacugcaacuacagcaaguacugcuaccugaaccacaccgugaccggcaagaccagccugcccagaugcugccuggugagcaacggcagcuaccugaacgagacccacuucagcgacgacaucgagcagcaggccgacaacaugaucaccgagcugcugcagaaggaguacaucgacagacagggcaagaccccccugggccugguggaccuguucguguucagcaccagcuucuaccugaucagcaucuuccugcaccuggugaagauccccacccacagacacgugaucggcaagcccugccccaagccccacagacugaaccacaugggcaucugcagcugcggccuguacaagcaccccggcgugcccgugaaguggaagagaugaggacuaguuauaagacugacuagcccgaugggccucccaacgggcccuccuccccuccuugcaccgagauuaaucaaaggcucuuuucagagccaccaaaaaaaaaaaaaaaaaaaaaaaaaaaaaaaaaaaaaaaaaaaaaaaaaaaaaaaaaaaaaaaaagaauu

SEQ ID NO: 27731 - RNA, 1655 nt, Artificial Sequence
  mRNA product Design i-3 (hSL-A64-N5) comprising derived and/or modified sequence from LASV(LASV003-NIG-2008;Clade II)__AIT17580__GPCmut4 (opt4)
aggagaaagcuuaccaugggccagaucaucaccuucuuccaggaggugccccacgugaucgaggaggugaugaacaucgugcugaucgcccugagccugcuggccauccugaagggcaucuacaacguggccaccugcggccuguucggccuggugagcuuccugcugcugugcggcagaagcugcagcaccaccuacaagggcguguacgagcugcagacccuggagcuggacauggccagccugaacaugugcaugccccugagcugcaccaagaacaacagccaccacuacaucauggugggcaacgagaccggccuggagcugacccugaccaacaccagcaucaucaaccacaaguucugcaaccugagcgacgcccacaagaagaaccuguacgaccacgcccugaugagcaucaucagcaccuuccaccugagcauccccaacuucaaccaguacgaggccaugagcugcgacuucaacggcggcaagaucagcgugcaguacaaccugagccacaccuacgccguggacgccgccaaccacugcggcaccaucgccaacggcgugcugcagaccuucaugagaauggccuggggcggcagcuacaucgcccuggacagcggcaagggcagcugggacugcaucaugaccagcuaccaguaccugaucauccagaacaccaccugggaggaccacugccaguucagcagacccagccccaucggcuaccugggccugcugagccagagaaccagagacaucuacaucagcagaagaagaagaggcaccuucaccuggacccugagcgacagcgagagcaacgagacccccggcggcuacugccugaccagauggaugcugaucgaggccgagcugaagugcuucggcaacaccgccguggccaagugcaacgagaagcacgacgaggaguucugcgacaugcugagacuguucgacuucugcaagcaggccaucagaagacugaaggcccccgcccagaugagcauccagcugaucaacaaggccgugaacgcccugaucaacgaccagcugaucaugaagaaccaccugagagacaucaugggcauccccuacugcaacuacagcaaguacugcuaccugaaccacaccgugaccggcagaaccagccugcccagaugcugccuggugagcaacggcagcuaccugaacgagacccacuucagcgacgacaucgagcagcaggccgacaacaugaucaccgagcugcugcagaaggaguacauggacagacagggcaagaccccccugggccugguggaccuguucguguucagcaccagcuucuaccugaucagcaucuuccugcaccuggugaagauccccacccacagacacgugaucggcaagcccugccccaagccccacagacugaaccacaugggcaucugcagcugcggccuguacaagcaccccggcgugcccgugaaguggaagagaugaggacuaguuauaagacugacuagcccgaugggccucccaacgggcccuccuccccuccuugcaccgagauuaaucaaaggcucuuuucagagccaccaaaaaaaaaaaaaaaaaaaaaaaaaaaaaaaaaaaaaaaaaaaaaaaaaaaaaaaaaaaaaaaaagaauu

SEQ ID NO: 27732 - RNA, 1655 nt, Artificial Sequence
  mRNA product Design i-3 (hSL-A64-N5) comprising derived and/or modified sequence from LASV(LASV035-NIG-2009;Clade II)__AIT17588__GPCmut4 (opt4)
aggagaaagcuuaccaugggccagaucaucaccuucuuccaggaggugccccacgugaucgaggaggugaugaacaucgugcugaucgcccugagccugcuggccauccugaagggcaucuacaacguggccaccugcggccuguucggccuggugagcuuccugcugcugugcggcagaagcugcagcaccaccuacaagggcguguacgagcugcagacccuggagcuggacauggccagccugaacaugugcaugccccugagcugcaccaagaacaacagccaccacuacaucauggugggcaacgagaccggccuggagcugacccugaccaacaccagcaucaucaaccacaaguucugcaaccugagcgacgcccacaagaagaaccuguacgaccacgcccugaugagcaucaucagcaccuuccaccugagcauccccaacuucaaccaguacgaggccaugagcugcgacuucaacggcggcaagaucagcgugcaguacaaccugagccacgccuacgccguggacgccgccaaccacugcggcaccaucgccaacggcgugcugcagaccuucaugagaauggccuggggcggcagcuacaucgcccuggacagcggcaagggcagcugggacugcaucaugaccagcuaccaguaccugaucauccagaacaccaccugggaggaccacugccaguucagcagacccagccccaucggcuaccugggccugcugagccagagaaccagagacaucuacaucagcagaagaagaagaggcaccuucaccuggacccugagcgacagcgagggcaacgagacccccggcggcuacugccugaccagauggaugcugaucgaggccgagcugaagugcuucggcaacaccgccguggccaagugcaacgagaagcacgacgaggaguucugcgacaugcugagacuguucgacuucugcaagcaggccaucagaagacugaaggcccccgcccagaugagcauccagcugaucaacaaggccgugaacgcccugaucaacgaccagcugaucaugaagaaccaccugagagacaucaugggcauccccuacugcaacuacagcaaguacugcuaccugaaccacaccgugaccggcaagaccagccugcccagaugcugccuggugagcaacggcagcuaccugaacgagacccacuucagcgacgacaucgagcagcaggccgacaacaugaucaccgagcugcugcagaaggaguacaucgacagacagggcaagaccccccugggccugguggaccuguucguguucagcaccagcuucuaccugaucagcaucuuccugcaccuggugaagauccccacccacagacacgugaucggcaagcccugccccaagccccacagacugaaccacaugggcaucugcagcugcggccuguacaagcaccccggcgugcccgugaaguggaagagaugaggacuaguuauaagacugacuagcccgaugggccucccaacgggcccuccuccccuccuugcaccgagauuaaucaaaggcucuuuucagagccaccaaaaaaaaaaaaaaaaaaaaaaaaaaaaaaaaaaaaaaaaaaaaaaaaaaaaaaaaaaaaaaaaagaauu

SEQ ID NO: 27733 - RNA, 1655 nt, Artificial Sequence
  mRNA product Design i-3 (hSL-A64-N5) comprising derived and/or modified sequence from LASV(LASV1000-NIG-2009;Clade II)__AIT17782__GPCmut4 (opt4)
aggagaaagcuuaccaugggccagaucaucaccuucuuccaggaggugccccacgugaucgaggaggugaugaacaucgugcugaucgcccugagccugcuggccauccugaagggcaucuacaacguggccaccugcggccuguucggccuggugagcuuccugcugcugugcggcagaagcugcagcaccaccuacaagggcguguacgagcugcagacccuggagcuggacauggccagccugaacaugugcaugccccugagcugcaccaagaacaacagccaccacuacaucauggugggcaacgagaccggccuggagcugacccugaccaacaccagcaucaucaaccacaaguucugcaaccugagcgacgcccacaagaagaaccuguacgaccacgcccugaugagcaucaucagcaccuuccaccugagcauccccaacuucaaccaguacgaggccaugagcugcgacuucaacggcggcaagaucagcgugcaguacaaccugagccacaccuacgccguggacgccgccaaccacugcggcaccaucgccaacggcgugcugcagaccuucaugagaauggccuggggcggcagcuacaucgcccuggacagcggcaagggcagcugggacugcaucaugaccagcuaccaguaccugaucauccagaacaccaccugggaggaccacugccaguucagcagacccagccccaucggcuaccugggccugcugagccagagaaccagagacaucuacaucagcagaagaagaagaggcaccuucaccuggacccugagcgacagcgagggcaacgagacccccggcggcuacugccugaccagauggaugcugaucgaggccgagcugaagugcuucggcaacaccgccguggccaagugcaacgagaagcacgacgaggaguucugcgacaugcugagacuguucgacuucugcaagcaggccaucaagagacugaagacccccgcccagaugagcauccagcugaucaacaaggccgugaacgcccugaucaacgaccagcugaucaugaagaaccaccugagagacaucaugggcauccccuacugcaacuacagcaaguacugcuaccugaaccacaccgugaccggcaagaccagccugcccagaugcugccuggugagcaacggcagcuaccugaacgagacccacuucagcgacgacaucgagcagcaggccgacaacaugaucaccgagcugcugcagaaggaguacaucgacagacagggcaagaccccccugggccugguggaccuguucguguucagcaccagcuucuaccugaucagcaucuuccugcaccuggugaagauccccacccacagacacguggugggcaagcccugccccaagccccacagacugaaccacaugggcaucugcagcugcggccuguacaagcaccccggcgugcccgugaaguggaagagaugaggacuaguuauaagacugacuagcccgaugggccucccaacgggcccuccuccccuccuugcaccgagauuaaucaaaggcucuuuucagagccaccaaaaaaaaaaaaaaaaaaaaaaaaaaaaaaaaaaaaaaaaaaaaaaaaaaaaaaaaaaaaaaaaagaauu

SEQ ID NO: 27734 - RNA, 1655 nt, Artificial Sequence
  mRNA product Design i-3 (hSL-A64-N5) comprising derived and/or modified sequence from LASV(LASV221-NIG-2010;Clade II)__AIT17624__GPCmut4 (opt4)
aggagaaagcuuaccaugggccagaucaucaccuucuuccaggaggugccccacgugaucgaggaggugaugaacaucgugcugaucgcccugagccugcuggccauccugaagggcaucuacaacguggccaccugcggccuguucggccuggugagcuuccugcugcugugcggcagaagcugcagcaccaccuacaagggcguguacgagcugcagacccuggagcuggacauggccagccugaacaugugcaugccccugagcugcaccaagaacaacagccaccacuacaucauggugggcaacgagaccggccuggagcugacccugaccaacaccagcaucaucaaccacaaguucugcaaccugagcgacgcccacaagaagaaccuguacgaccacgcccugaugagcaucaucagcaccuuccaccugagcauccccaacuucaaccaguacgaggccaugagcugcgacuucaacggcggcaagaucagcgugcaguacaaccugagccacaccuacgccaucgacgccgccaaccacugcggcaccaucgccaacggcgugcugcagaccuucaugagaauggccuggggcggcagcuacaucgcccuggacagcggcaagggcagcugggacugcaucaugaccagcuaccaguaccugaucauccagaacaccaccugggaggaccacugccaguucagcagacccagccccaucggcuaccugggccugcugagccagagaaccagagacaucuacaucagcagaagaagaagaggcaccuucaccuggacccugagcgacagcgagggcaacgagacccccggcggcuacugccugaccagauggaugcugaucgaggccgagcugaagugcuucggcaacaccgccguggccaagugcaacgagaagcacgacgaggaguucugcgacaugcugagacuguucgacuucugcaagcaggccaucagaagacugaagacccccgcccagaugagcauccagcugaucaacaaggccgugaacgcccugaucaacgaccagcugaucaugaagaaccaccugagagacaucaugggcauccccuacugcaacuacagcaaguacugcuaccugaaccacaccgugaccggcaagaccagccugcccagaugcugccuggugagcaacggcagcuaccugaacgagacccacuucagcgacgacaucgagcagcaggccgacaacaugaucaccgagaugcugcagaaggaguacauggacagacagggcaagaccccccugggccugguggaccuguucguguucagcaccagcuucuaccugaucagcaucuuccugcaccuggugaagauccccacccacagacacgugaucggcaagcccugccccaagccccacagacugaaccacaugggcaucugcagcugcggccuguacaagcaccccggcgugcccgugaaguggaagagaugaggacuaguuauaagacugacuagcccgaugggccucccaacgggcccuccuccccuccuugcaccgagauuaaucaaaggcucuuuucagagccaccaaaaaaaaaaaaaaaaaaaaaaaaaaaaaaaaaaaaaaaaaaaaaaaaaaaaaaaaaaaaaaaaagaauu

SEQ ID NO: 27735 - RNA, 1655 nt, Artificial Sequence
  mRNA product Design i-3 (hSL-A64-N5) comprising derived and/or modified sequence from LASV(LASV237-NIG-2010;Clade II)__AIT17638__GPCmut4 (opt4)
aggagaaagcuuaccaugggccagaucaucaccuucuuccaggaggugccccacgugaucgaggaggugaugaacaucgugcugaucgcccugagccugcuggccauccugaagggcaucuacaacguggccaccugcggccuguucggccuggugagcuuccugcugcugugcggcagaagcugcagcaccaccuacaagggcguguacgagcugcagacccuggagcuggacauggccagccugaacaugugcaugccccugagcugcaccaagaacaacagccaccacuacaucauggugggcaacgagaccggccuggagcugacccugaccaacaccagcaucaucaaccacaaguucugcaaccugagcgacgcccacaagaaggaccuguacgaccacgcccugaugagcaucaucagcaccuuccaccugagcauccccaacuucaaccaguacgaggccaugagcugcgacuucaacggcggcaagaucagcgugcaguacaaccugagccacaccuacgccguggacgccgccaaccacugcggcaccaucgccaacggcgugcugcagaccuucaugagaauggccuggggcggcagcuacaucgcccuggacagcggcaagggcagcugggacugcaucaugaccagcuaccaguaccugaucauccagaacaccaccugggaggaccacugccaguucagcagacccagccccaucggcuaccugggccugcugagccagagaaccagagacaucuacaucagcagaagaagaagaggcaccuucaccuggacccugagcgacagcgagggcaacgagacccccggcggcuacugccugaccagauggaugcugaucgaggccgagcugaagugcuucggcaacaccgccguggccaagugcaacgagaagcacgacgaggaguucugcgacaugcugagacuguucgacuucugcaagcaggccaucagaagacugaagacccccgcccagaugagcauccagcugaucaacaaggccgugaacgcccugaucaacgaccagcugaucaugaagaaccaccugagagacaucaugggcauccccuacugcaacuacagcaaguacugcuaccugaaccacaccgugaccggcaagaccagccugcccagaugcugccuggugagcaacggcagcuaccugaacgagacccacuucagcgacgacaucgagcagcaggccgacaacaugaucaccgagcugcugcagaaggaguacauggacagacagggcaagaccccccugggccugguggaccuguucguguucagcaccagcuucuaccugaucagcaucuuccugcaccugaucaagauccccacccacagacacaucaccggcaagcccugccccaagccccacagacugaaccacaugggcaucugcagcugcggccuguacaagcaccccggcgugcccgugaaguggaagagaugaggacuaguuauaagacugacuagcccgaugggccucccaacgggcccuccuccccuccuugcaccgagauuaaucaaaggcucuuuucagagccaccaaaaaaaaaaaaaaaaaaaaaaaaaaaaaaaaaaaaaaaaaaaaaaaaaaaaaaaaaaaaaaaaagaauu

SEQ ID NO: 27736 - RNA, 1655 nt, Artificial Sequence
  mRNA product Design i-3 (hSL-A64-N5) comprising derived and/or modified sequence from LASV(LASV253-NIG-2011;Clade II)__AIT17670__GPCmut4 (opt4)
aggagaaagcuuaccaugggccagaucaucaccuucuuccaggaggugccccacgugaucgaggaggugaugaacaucgugcugaucgcccugagccugcuggccauccugaagggcaucuacaacguggccaccugcggccuguucggccuggugagcuuccugcugcugugcggcagaagcugcagcaccaccuacaagggcguguacgagcugcagacccuggagcuggacauggccagccugaacaugugcaugccccugagcugcaccaagaacaacagccaccacuacaucauggugggcaacgagaccggccuggagcugacccugaccaacaccagcaucaucaaccacaaguucugcaaccugagcgacgcccacaagaagaaccuguacgaccacgcccugaugagcaucaucagcaccuuccaccugagcauccccaacuucaaccaguacgaggccaugagcugcgacuucaacggcggcaagaucagcgugcaguacaaccugagccacaccuacgccguggacgccgccaaccacugcggcaccaucgccaacggcgugcugcagaccuucaugagaauggccuggggcggcagcuacaucgcccuggacagcggcaagggcagcugggacugcaucaugaccagcuaccaguaccugaucauccagaacaccaccugggaggaccacugccaguucagcagacccagccccaucggcuaccugggccugcugagccagagaaccagagacaucuacaucagcagaagaagaagaggcaccuucaccuggacccugagcgacagcgagggcaacgagacccccggcggcuacugccugaccagauggaugcugaucgaggccgagcugaagugcuucggcaacaccgccguggccaagugcaacgagaagcacgacgaggaguucugcgacaugcugagacuguucgacuucugcaagcaggccaucagaagacugaaggcccccgcccagaugagcauccagcugaucaacaaggccgugaacgcccugaucaacgaccagcugaucaugaagaaccaccugagagacaucaugggcauccccuacugcaacuacagcaaguacugcuaccugaaccacaccgugaccggcagaaccagccugcccagaugcugccuggugagcaacggcagcuaccugaacgagacccacuucagcgacgacaucgagcagcaggccgacaacaugaucaccgagcugcugcagaaggaguacaucgacagacagggcaagaccccccugggccugguggaccuguucguguucagcaccagcuucuaccugaucagcaucuuccugcaccuggugaagauccccacccacagacacaucaucggcaagcccugccccaagccccacagacugaaccacaugggcaucugcagcugcggccuguacaagcaccccggcgugcccgugaaguggaagagaugaggacuaguuauaagacugacuagcccgaugggccucccaacgggcccuccuccccuccuugcaccgagauuaaucaaaggcucuuuucagagccaccaaaaaaaaaaaaaaaaaaaaaaaaaaaaaaaaaaaaaaaaaaaaaaaaaaaaaaaaaaaaaaaaagaauu

SEQ ID NO: 27737 - RNA, 1655 nt, Artificial Sequence
  mRNA product Design i-3 (hSL-A64-N5) comprising derived and/or modified sequence from LASV(LASV254-NIG-2011;Clade II)__AIT17674__GPCmut4 (opt4)
aggagaaagcuuaccaugggccagaucaucaccuucuuccaggaggugccccacgugaucgaggaggugaugaacaucgugcugaucgcccugagccugcuggccauccugaagggcaucuacaacguggccaccugcggccuguucggccuggugagcuuccugcugcugugcggcagaagcugcagcaccaccuacaagggcguguacgagcugcagacccuggagcuggacaugaccaaccugaacaugugcaugccccugagcugcaccaagaacaacagccaccacuacaucauggugggcaacgagaccggccuggagcugacccugaccaacaccagcaucaucaaccacaaguucugcaaccugagcgacgcccacaagaagaaccuguacaaccacgcccugaugagcaucaucagcaccuuccaccugagcauccccaacuucaaccaguacgaggccaugagcugcgacuucaacggcggcaagaucagcgugcaguacaaccugagccacagcuacgccguggacgccgccaaccacugcggcaccaucgccaacggcgugcugcagaccuucaugagaauggccuggggcggcagcuacaucgcccuggacagcggcaagggcaacugggacugcaucaugaccagcuaccaguaccugaucauccagaacaccaccugggaggaccacugccaguucagcagacccagccccaucggcuaccugggccugcugagccagagaaccagagacaucuacaucagcagaagaagaagaggcaccuucaccuggacccugagcgacagcgagggcaacgagacccccggcggcuacugccugaccagauggaugcugaucgaggccgagcugaagugcuucggcaacaccgccguggccaagugcaacgagaagcacgacgaggaguucugcgacaugcugagacuguucgacuucugcaagcaggccaucagaagacugaagacccccgcccaggccaacauccagcugaucaacaaggccgugaacgcccugaucaacgaccagcugaucaugaagaaccaccugagagacaucaugggcauccccuacugcaacuacagcaaguacugcuaccugaaccacaccgugaccggcaagaccagccugcccagaugcugccuggugagcaacggcagcuaccugaacgagacccacuucagcgacgacaucgagcagcaggccgacaacaugaucaccgagcugcugcagaaggaguacauggacagacagggcaagaccccccugggccugguggaccuguucguguucagcaccagcuucuaccugaucagcaucuuccugcaccuggugaagauccccacccacagacacgugaucggcaagcccugccccaagccccacagacugaaccacaugggcaucugcagcugcggccuguacaagcaccccggcgugcccgugaaguggaagagaugaggacuaguuauaagacugacuagcccgaugggccucccaacgggcccuccuccccuccuugcaccgagauuaaucaaaggcucuuuucagagccaccaaaaaaaaaaaaaaaaaaaaaaaaaaaaaaaaaaaaaaaaaaaaaaaaaaaaaaaaaaaaaaaaagaauu

SEQ ID NO: 27738 - RNA, 1655 nt, Artificial Sequence
  mRNA product Design i-3 (hSL-A64-N5) comprising derived and/or modified sequence from LASV(Nig08-A19;Clade III)__ADU56618__GPCmut4 (opt4)
aggagaaagcuuaccaugggccagaucgugaccuucuuccaggaggugccccacgugaucgaggaggugaugaacaucgugcugaucgcccugagcauccuggccauccugaagggccuguacaacaucgccaccugcggccugaucggccuggugaccuuccugcugcugagcggcagaagcugcagcaugaccuacaagggcguguacgagcugcagacccuggagcugaacaugaacacccugaacaugugcaugccccugagcugcaccaagaacaacagccaccacuacaucauggugggcaacgagaccggccuggagcugacccugaccaacaccagccugcugcaccacaaguucugcaaccugagcgacgcccacaagaagaaccuguacgaccacacccugaugagcaucaucagcaccuuccaccugagcauccccaacuucaaccaguacgaggccaugagcugcgacuucaacggcggcaagaucaccgugcaguacaaccugagccacagcuacgccaucgacgccgccaaccacugcggcaccguggccaacggcgugcugcagaccuucaugagaauggccuggggcggcagcuacaucgcccuggacagcggcagaggcaagugggacugcaucaugaccagcuaccaguaccugaucauccagaacaccaccugggaggaccacugccaguucagcagacccagccccaucggcuaccugggccugcugagccagagaaccagagacaucuacaucagcagaagaagaagaggcaccuucaccuggacccugagcgacagcgagggcaacgagacccccggcggcuacugccugaccagauggaugcugaucgaggccgagcugaagugcuucggcaacaccgccguggccaagugcaacgagaagcacgacgaggaguucugcgacaugcugagacuguucgacuucugcaagcaggccaucagaagacugaaggcccccgcccagaugagcauccagcugaucaacaaggccgugaacgcccugaucaacgaccagcugaucaugaagaaccaccugagagacaucaugggcauccccuacugcaacuacagcaaguacugcuaccugaaccacaccagcaccggcagaaccagccugcccagaugcugccuggugagcaacggcagcuaccugaacgagacccacuucagcgacgacaucgagcagcaggccgacaacaugaucaccgagaugcugcagaaggaguaccuggacagacagggcaagaccccccugggccugguggaccuguucguguucagcaccagcuucuaccugaucagcaucuuccugcaccuggugaagauccccacccacagacacaucgugggcaagcccugccccaagccccacagacugaaccacaugggcaucugcagcugcggccuguacaagcagcccggcgugcccgugagauggaagagaugaggacuaguuauaagacugacuagcccgaugggccucccaacgggcccuccuccccuccuugcaccgagauuaaucaaaggcucuuuucagagccaccaaaaaaaaaaaaaaaaaaaaaaaaaaaaaaaaaaaaaaaaaaaaaaaaaaaaaaaaaaaaaaaaagaauu

SEQ ID NO: 27739 - RNA, 1658 nt, Artificial Sequence
  mRNA product Design i-3 (hSL-A64-N5) comprising derived and/or modified sequence from LASV(G1180-SLE-2010;Clade IV)__AIT17168__GPCmut4 (opt4)
aggagaaagcuuaccaugggccagaucgugaccuucuuccaggaggugccccacgugaucgaggaggugaugaacaucgugcugaucgcccugagcauccuggccgugcugaagggccuguacaacuucgccaccugcggccuggugggccugcugaccuuccugcugcugugcggcagaagcugcaccgccagcagauacaagggcguguacgagcugcagacccuggagcugaacauggagacccugaacaugugcaugccccugagcugcaccaagaacaacagccaccacuacaucauggugggcaacgagaccggccuggagcugacccugaccaacaccagcaucaucaaccacaaguucugcaaccugagcgacgcccacaagaagaaccuguacgaccacgcccugaugagcaucaucagcaccuuccaccugagcauccccaacuucaaccaguacgaggccaugagcugcgacuucaacggcggcaagaucagcgugcaguacaaccugagccacagcuacgccggcgacgccgccaaccacugcggcaccguggccaacggcgugcugcagaccuucaugagaauggccuggggcggcagcuacaucgcccuggacagcggccacggcagcugggacugcaucaugaccagcuaccaguaccugaucauccagaacaccaccugggaggaccacugccaguucagcagacccagccccaucggcuaccugggccugcugagccagagaaccagagacaucuacaucagcagaagaagaagaggcaccuucaccuggacccugagcgacagcgagggcaaggacacccccggcggcuacugccugaccagauggaugcugaucgaggccgagcugaagugcuucggcaacaccgccguggccaagugcaacgagaagcacgacgaggaguucugcgacaugcugagacuguucgacuucugcaagcaggccauccagagacugaaggcccccgcccagaugagcauccagcugaucaacaaggccgugaacgcccugaucaacgaccagcugaucaugaagaaccaccugagagacaucaugggcauccccuacugcaacuacagcaaguacugcuaccugaaccacaccaccaccggcaagaccagccugcccaagugcugccuggugagcaacggcagcuaccugaacgagacccacuucagcgacgacaucgagcagcaggccgacaacaugaucaccgagaugcugcagaaggaguacauggagagacagggcaagaccccccugggccugguggaccuguucguguucagcaccagcuucuaccugaucagcaucuuccugcaccuggugaagauccccacccacagacacaucgugggcaagagcugccccaagccccacagacugaaccacaugggcaucugcagcugcggccuguacaagcagcccggcgugcccgugaaguggaagagaugaggacuaguuauaagacugacuagcccgaugggccucccaacgggcccuccuccccuccuugcaccgagauuaaucaaaggcucuuuucagagccaccaaaaaaaaaaaaaaaaaaaaaaaaaaaaaaaaaaaaaaaaaaaaaaaaaaaaaaaaaaaaaaaaagaauu

SEQ ID NO: 27740 - RNA, 1658 nt, Artificial Sequence
  mRNA product Design i-3 (hSL-A64-N5) comprising derived and/or modified sequence from LASV(G1442-SLE-2011;Clade IV)__AIT17180__GPCmut4 (opt4)
aggagaaagcuuaccaugggccagaucgugaccuucuuccaggaggugccccacgugaucgaggaggugaugaacaucgugcugaucgcccugagcauccuggccgugcugaagggccuguacaacguggccaccugcggccugaucggccuggugaccuuccugcugcugugcggcagaagcugcaccaccacccuguacaagggcguguacgagcugcagacccuggagcugaacauggagacccugaacaugugcaugccccugagcugcaccaagaacaacagccaccacuacaucagagugggcaacgagaccggccuggagcugacccugaccaacaccagcaucaucaaccacaaguucugcaaccugagcgacgcccacaagaagaaccuguacgaccacgcccugaugagcaucaucagcaccuuccaccugagcauccccaacuucaaccaguacgaggccaugagcugcgacuucaacggcggcaagaucagcgugcaguacaaccugagccacagcuacgccggcgacgccgccaaccacugcggcaccguggccaacggcgugcugcagaccuucaugagaauggccuggggcggcagcuacaucgcccuggacagcggcagaggcaacugggacugcaucaugaccagcuaccaguaccugaucauccagaacaccaccugggacgaccacugccaguucagcagacccagccccaucggcuaccugggccugcugagccagagaaccagagacguguacaucagcagaagaagaagaggcaccuucaccuggacccugagcgacagcgagggcaaggacacccccggcggcuacugccugaccagauggaugcugaucgaggccgagcugaagugcuucggcaacaccgccguggccaagugcaacgagaagcacgacgaggaguucugcgacaugcugagacuguucgacuucugcaagcaggccauccagagacugaaggcccccgcccagaugagcauccagcugaucaacaaggccgugaacgcccugaucaacgaccagcugaucaugaagaaccaccugagagacaucaugggcauccccuacugcaacuacagcaaguacugcuaccugaacaacaccgccaccggcaagaccagccugcccaagugcugccugaucagcaacggcagcuaccugaacgagacccacuucagcgacgacaucgagcaggaggccgacaacaugaucaccgagaugcugcagaaggaguacauggagagacagggcaagaccccccugggccugguggaccuguucguguucagcaccagcuucuaccugaucagcaucuuccugcaccuggugaagauccccacccacagacacaucgugggcaagagcugccccaagccccacagacugaaccacaugggcaucugcagcugcggccuguacaagcagcccggcgugcccgugagauggaagagaugaggacuaguuauaagacugacuagcccgaugggccucccaacgggcccuccuccccuccuugcaccgagauuaaucaaaggcucuuuucagagccaccaaaaaaaaaaaaaaaaaaaaaaaaaaaaaaaaaaaaaaaaaaaaaaaaaaaaaaaaaaaaaaaaagaauu

SEQ ID NO: 27741 - RNA, 1658 nt, Artificial Sequence
  mRNA product Design i-3 (hSL-A64-N5) comprising derived and/or modified sequence from LASV(G3010-SLE-2013;Clade IV)__AIT17344__GPCmut4 (opt4)
aggagaaagcuuaccaugggccagaucgugaccuucuuccaggaggugccccacgugaucgaggaggugaugaacaucgugcugaucgcccugagcauccuggccgugcugaagggccuguacaacuucgccaccugcggccuggugggccuggugaccuuccugcugcugugcggcagaagcugcaccaccagccuguacaagggcguguacgagcugcagacccuggagcugaacauggagacccugaacaugugcaugccccugagcugcaccaagaacaacagccaccacuacaucauggugggcaacgagaccggccuggagcugacccugaccaacaccagcaucaucaaccacaaguucugcaaccugagcgacgcccacaagaagaaccuguacaaccacgcccugaugagcaucaucagcaccuuccaccugagcauccccaacuucaaccaguacgaggccaugagcugcgacuucaacggcggcaagaucagcgugcaguacaaccugagccacagcuacgccggcgacgccgccagccacugcggcaccguggccaacggcgugcugcagaccuucaugagaauggccuggggcggcagcuacaucgcccuggacagcggcuacggcaagugggacugcaucaugaccagcuaccaguaccugaucauccagaacaccaccugggaggaccacugccaguucagcagacccagccccaucggcuaccugggccugcugagccagagaaccagagacaucuacaucagcagaagaagaagaggcaccuucaccuggacccugagcgacagcgagggcaaggacacccccggcggcuacugccugaccagauggaugcugaucgaggccgagcugaagugcuucggcaacaccgccguggccaagugcaacgagaagcacgacgaggaguucugcgacaugcugagacuguucgacuucugcaagcaggccauccagagacugaagacccccgcccagaugagcauccagcugaucaacaaggccgugaacgcccugaucaacgaccagcugaucaugaagaaccaccugagagacaucaugggcauccccuacugcaacuacagcaaguacugcuaccugaaccacaccaccaccggcaagaccagccugcccaagugcugccuggugagcaacggcagcuaccugaacgagacccacuucagcgacgacaucgagcagcaggccgacaacaugaucaccgagaugcugcagaaggaguacauggagagacagggcaagaccccccugggccugguggaccuguucguguucagcaccagcuucuaccugaucagcaucuuccugcaccuggugaagauccccacccacagacacaucgugggcaagagcugccccaagccccacagacugaaccacaugggcaucugcagcugcggccuguacaagcagcccggcgugcccgugagauggaagagaugaggacuaguuauaagacugacuagcccgaugggccucccaacgggcccuccuccccuccuugcaccgagauuaaucaaaggcucuuuucagagccaccaaaaaaaaaaaaaaaaaaaaaaaaaaaaaaaaaaaaaaaaaaaaaaaaaaaaaaaaaaaaaaaaagaauu

SEQ ID NO: 27742 - RNA, 1658 nt, Artificial Sequence
  mRNA product Design i-3 (hSL-A64-N5) comprising derived and/or modified sequence from LASV(G502-SLE-2009;Clade IV)__AIT17126__GPCmut4 (opt4)
aggagaaagcuuaccaugggccagaucgugaccuucuuccaggaggugccccacgugaucgaggaggugaugaacaucgugcugaucgcccugagcauccuggccgugcugaagggccuguacaacuucgccaccugcggccuggugggccugcugaccuuccugcugcugugcggcagaagcugcaccaccggccuguacaagggcguguacgagcugcagacccuggagcugaacauggagacccugaacaugugcaugccccugagcugcaccaagaacaacagccaccacuacaucauggugggcaacgagaccggccuggagcugacccugaccaacaccagcaucaucaaccacaaguucugcaaccugagcgacgcccacaagaagaaccuguacgaccacgcccugaugagcaucaucagcaccuuccaccugagcauccccaacuucaaccaguacgaggccaugagcugcgacuucaacggcggcaagaucagcgugcaguacaaccugagccacagcuacgccggcgacgccgccgaccacugcggcaccguggccaacggcgugcugcagaccuucaugagaauggccuggggcggcagcuacaucgcccuggacagcggcagaggcagaugggacugcaucaugaccagcuaccaguaccugaucauccagaacaccaccugggaggaccacugccaguucagcagacccagccccaucggcuaccugggccugcugagccagagaaccagagacaucuacaucagcagaagaagaagaggcaccuucaccuggacccugagcgacagcgagggcaaggacacccccggcggcuacugccugaccagauggaugcugaucgaggccgagcugaagugcuucggcaacaccgccguggccaagugcaacgagaagcacgacgaggaguucugcgacaugcugagacuguucgacuucugcaagcaggccauccagagacugaaggcccccgcccagaugagcauccagcugaucaacaaggccgugaacgcccugaucaacgaccagcuggugaugaagaaccaccugagagacaucaugggcauccccuacugcaacuacagcagauacugcuaccugaaccacaccaccaccggcagaaccagccugcccaagugcugccuggugagcaacggcagcuaccugaacgagacccacuucagcgacgacaucgagcagcaggccgacaacaugaucaccgagaugcugcagaaggaguacauggagagacagggcaagaccccccugggccugguggaccuguucguguucagcaccagcuucuaccugaucagcaucuuccugcaccuggugaagauccccacccacagacacaucgugggcaagagcugccccaagccccacagacugaaccacaugggcaucugcagcugcggccuguacaagcagcccggcgugcccgugaaguggaagagaugaggacuaguuauaagacugacuagcccgaugggccucccaacgggcccuccuccccuccuugcaccgagauuaaucaaaggcucuuuucagagccaccaaaaaaaaaaaaaaaaaaaaaaaaaaaaaaaaaaaaaaaaaaaaaaaaaaaaaaaaaaaaaaaaagaauu

SEQ ID NO: 27743 - RNA, 1658 nt, Artificial Sequence
  mRNA product Design i-3 (hSL-A64-N5) comprising derived and/or modified sequence from LASV(G733-SLE-2010;Clade IV)__AIT17154__GPCmut4 (opt4)
aggagaaagcuuaccaugggccagaucgugaccuucuuccaggaggugccccacgugaucgaggaggugaugaacaucgugcugaucgcccugagcauccuggccgugcugaagggccuguacaacuucgccaccugcggcaucgugggccuggugagcuuccugcugcugugcggcagaagcugcaccaccagccuguacaagggcguguacgagcugcagacccuggagcugaacauggagacccugaacaugugcaugccccugagcugcaccaagaacaacagccaccacuacaucauggugggcaacgagaccggccuggagcugacccugaccaacaccagcaucaucaaccacaaguucugcaaccugagcgacgcccacaagaagaaccuguacgaccacgcccugaugagcaucaucagcaccuuccaccugagcauccccaacuucaaccaguacgaggccaugagcugcgacuucaacggcggcaagaucagcgugcaguacaaccugagccacagcuacgccggcgacgccgccaaccacugcggcaccaucgccaacggcgugcugcagaccuucaugagaauggccuggggcggcagcuacaucgcccuggacagcggcagagacagaugggacugcaucaugaccagcuaccaguaccugaucauccagaacaccaccugggaggaccacugccaguucagcagacccagccccaucggcuaccugggccugcugagccagagaaccagagacaucuacaucagcagaagaagaagaggcaccuucaccuggacccugagcgacagcgagggcaaggacacccccggcggcuacugccugaccagauggaugcugaucgaggccgagcugaagugcuucggcaacaccgccguggccaagugcaacgagaagcacgacgaggaguucugcgacaugcugagacuguucgacuucugcaagcaggccauccagagacugaaggcccccgcccagaugagcauccagcugaucaacaaggccgugaacgcccugaucaacgaccagcugaucaugaagaaccaccugagagacaucaugggcauccccuacugcaacuacagcaaguacugcuaccugaaccacaccaccaccggcaagaccagccugcccaagugcugccuggugagcaacggcagcuaccugaacgagacccacuucagcgacgacaucgagcagcaggccgacaacaugaucaccgagaugcugcagaaggaguacauggagagacagggcaagaccccccugggccugguggaccuguucguguucagcaccagcuucuaccugaucagcaucuuccugcaccuggugaagauccccacccacagacacguggugggcaagagcugccccaagccccacagacugaaccacaugggcaucugcagcugcggccuguacggccagcccggcgugcccgugaaguggaagagaugaggacuaguuauaagacugacuagcccgaugggccucccaacgggcccuccuccccuccuugcaccgagauuaaucaaaggcucuuuucagagccaccaaaaaaaaaaaaaaaaaaaaaaaaaaaaaaaaaaaaaaaaaaaaaaaaaaaaaaaaaaaaaaaaagaauu

SEQ ID NO: 27744 - RNA, 1658 nt, Artificial Sequence
  mRNA product Design i-3 (hSL-A64-N5) comprising derived and/or modified sequence from MOPV/LASV reassortant(IGS-1;Clade IV)__AFY05576__GPCmut4 (opt4)
aggagaaagcuuaccaugggccagaucgugaccuucuuccaggaggugccccacgugaucgaggaggugaugaacaucgugcugaucgcccugagcgugcuggccgugcugaagggccuguacaacuucgccaccugcggccuggugggccuggugaccuuccugcugcugugcggcagaagcugcaccaccagccuguacaagggcguguacgagcugcagacccuggagcugaacauggagacccugaacaugugcaugccccugagcugcaccaagaacaacagccaccacuacaucauggugggcaacgagaccggccuggagcugacccugaccaacaccagcaucaucaaccacaaguucugcaaccugagcgacgcccacaagaagaaccuguacgaccacgcccugaugagcaucaucagcaccuuccaccugagcauccccaacuucaaccaguacgaggccaugagcugcgacuucaacggcggcaagaucagcgugcaguacaaccugagccacagcuacgccggcgacgccgccaaccacugcggcaccguggccaacggcgugcugcagaccuucaugagaauggccuggggcggcagcuacaucgcccuggacagcggcagaggcaacugggacugcaucaugaccagcuaccaguaccugaucauccagaacaccaccugggaggaccacugccaguucagcagacccagccccaucggcuaccugggccugcugagccagagaaccagagacaucuacaucagcagaagaagaagaggcaccuucaccuggacccugagcgacagcgagggcgaggacacccccggcggcuacugccugaccagauggaugcugaucgaggccgagcugaagugcuucggcaacaccgccguggccaagugcaacgagaagcacgacgaggaguucugcgacaugcugagacuguucgacuucugcaagcaggccauccagagacugaaggcccccgcccagaugagcauccagcugaucaacaaggccgugaacgcccugaucaacgaccagcugaucaugaagaaccaccugagagacaucaugggcauccccuacugcaacuacagcaaguacugcuaccugaaccacaccaccaccggcagaaccagccugcccaagugcugccuggugagcaacggcagcuaccugaacgagacccacuucagcgacgacaucgagcagcaggccgacaacaugaucaccgagaugcugcagaaggaguacauggagagacagggcaagaccccccugggccugguggaccuguucguguucagcaccagcuucuaccugaucagcaucuuccugcaccuggugaagauccccacccacagacacaucgugggcaagagcugccccaagccccacagacugaaccacaugggcaucugcagcugcggccuguacaagcagcccggcgugcccgugaaguggaagagaugaggacuaguuauaagacugacuagcccgaugggccucccaacgggcccuccuccccuccuugcaccgagauuaaucaaaggcucuuuucagagccaccaaaaaaaaaaaaaaaaaaaaaaaaaaaaaaaaaaaaaaaaaaaaaaaaaaaaaaaaaaaaaaaaagaauu

SEQ ID NO: 27745 - RNA, 1658 nt, Artificial Sequence
  mRNA product Design i-3 (hSL-A64-N5) comprising derived and/or modified sequence from LASV(LM765-SLE-2012;Clade IV)__AIT17814__GPCmut4 (opt4)
aggagaaagcuuaccaugggccagaucgugaccuucuuccaggaggugccccacgugaucgaggaggugaugaacaucgugcugaucgcccugagcauccuggccgugcugaagggccuguacaacuucgccaccugcggccuggugggccuggugaccuuccugcugcugugcggcagaagcugcaccaccagccuguacaagggcguguacgagcugcagacccuggagcugaacauggagacccugaacaugugcaugccccugagcugcaccaagaacaacagccaccacuacaucauggugggcaacgagaccggccuggagcugacccugaccaacaccagcaucaucgaccacaaguucugcaaccugagcgacgcccacagaaagaaccuguacgaccacgcccugaugagcaucaucagcaccuuccaccugagcauccccaacuucaaccaguacgaggccaugagcugcgacuucaacggcggcaagaucagcgugcaguacaaccugagccacagcuacgccaaggacgccgccgaccacugcggcaccguggccaacggcgugcugcagaccuucaugagaauggccuggggcggcagcuacaucgcccuggacagcggcagaggcagaugggacugcaucaugaccagcuaccaguaccugaucauccagaacaccaccugggaggaccacugccaguucagcagacccagccccaucggcuaccugggccugcugagccagagaaccagagacaucuacaucagcagaagaagaagaggcaccuucaccuggacccugagcgacagcgagggcaaggacacccccggcggcuacugccugaccagauggaugcugaucgaggccgagcugaagugcuucggcaacaccgccguggccaagugcaacgagaagcacgacgaggaguucugcgacaugcugagacuguucgacuucugcaagcaggccauccagagacugaaggcccccgcccagaugagcauccagcugaucaacaaggccgugaacgcccugaucaacgaccagcugaucaugaagaaccaccugagagacaucaugggcauccccuacugcaacuacagcaaguacugcuaccugaaccacaccaccaccggcaagaccagccugcccaagugcugccuggugagcaacggcagcuaccugaacgagacccacuucagcgacgacaucgagcagcaggccgacaacaugaucaccgagaugcugcagaaggaguacauggagagacagggcaagaccccccugggccugguggaccuguucguguucagcaccagcuucuaccugaucagcaucuuccugcaccuggugaagauccccacccacagacacaucgugggcaagcccugccccaagccccacagacugaaccacaugggcaucugcagcugcggccuguacaagcagcccggcgugcccgugaaguggaagagaugaggacuaguuauaagacugacuagcccgaugggccucccaacgggcccuccuccccuccuugcaccgagauuaaucaaaggcucuuuucagagccaccaaaaaaaaaaaaaaaaaaaaaaaaaaaaaaaaaaaaaaaaaaaaaaaaaaaaaaaaaaaaaaaaagaauu

SEQ ID NO: 27746 - RNA, 1658 nt, Artificial Sequence
  mRNA product Design i-3 (hSL-A64-N5) comprising derived and/or modified sequence from LASV(LM776-SLE-2012;Clade IV)__AIT17824__GPCmut4 (opt4)
aggagaaagcuuaccaugggccagaucgugaccuucuuccaggaggugccccacgugaucgaggaggugaugaacaucgugcugaucgcccugagcauccuggccgugcugaagggccuguacaacuucgccaccugcggccuggugggccuggugaccuuccugcugcugugcggcagaagcugcaccaccagcguguacaagggcguguacgagcugcagacccuggagcugaacauggagacccugaacaugugcaugccccugagcugcaccaagaacaacagccaccacuacaucauggugggcaacgagaccggccuggagcugacccugaccaacaccagcaucaucaaccacaaguucugcaaccugagcgacgcccacaagaagaaccuguacgaccacgcccugaugagcaucaucagcaccuuccaccugagcauccccaacuucaaccaguacgaggccaugagcugcgacuucaacggcggcaagaucagcgugcaguacaaccugagccacagcuacgccggcgacgccgccaaccacugcggcaccguggccaacggcgugcugcagaccuucaugagaauggccuggggcggcagcuacaucgcccuggacagcggccacggcaagugggacugcaucaugaccagcuaccaguaccugaucauccagaacaccaccugggaggaccacugccaguucagcagacccagccccaucggcuaccugggccugcugagccagagaaccagagacaucuacaucagcagaagaagaagaggcaccuucaccuggacccugagcgacagcgagggcaaggacacccccggcggcuacugccugaccagauggaugcugaucgaggccgagcugaagugcuucggcaacaccgccguggccaagugcaacgagaagcacgacgaggaguucugcgacaugcugagacuguucgacuucugcaagcaggccauccagagacugaaggcccccgcccagaugagcauccagcugaucaacaaggccgugaacgcccugaucaacgaccagcugaucaugaagaaccaccugagagacaucaugggcauccccuacugcaacuacagcaaguacugcuaccugaaccacaccaccaccggcaagaccagccugcccaagugcugccuggugagcaacggcagcuaccugaacgagacccacuucagcgacgacaucgagcagcaggccgacaacaugaucaccgagaugcugcagaaggaguacauggagagacagggcaagaccccccugggccugguggaccuguucguguucagcaccagcuucuaccugaucagcaucuuccugcaccuggugaagauccccacccacagacacaucgugggcaagagcugccccaagccccacagacugaaccacaugggcaucugcagcugcggccuguacaagcagcccggcgugcccgugagauggaagagaugaggacuaguuauaagacugacuagcccgaugggccucccaacgggcccuccuccccuccuugcaccgagauuaaucaaaggcucuuuucagagccaccaaaaaaaaaaaaaaaaaaaaaaaaaaaaaaaaaaaaaaaaaaaaaaaaaaaaaaaaaaaaaaaaagaauu

SEQ ID NO: 27747 - RNA, 1658 nt, Artificial Sequence
  mRNA product Design i-3 (hSL-A64-N5) comprising derived and/or modified sequence from LASV(Mad39;Clade IV)__ANH09722__GPCmut4 (opt4)
aggagaaagcuuaccaugggccagaucgugaccuucuuccaggaggugccccacgugaucgaggaggugaugaacaucgugcugaucgcccugagcauccuggccgugcugaagggccuguacaacguggccaccugcggccugaucggccuggugaccuuccugcugcugugcggcagaagcugcaccaccacccuguacaagggcguguacgagcugcaggcccuggagcugaacauggagacccugaacaugugcaugccccugagcugcaccaagaacaacagccaccacuacaucagagugggcaacgagaccggccuggagcugacccugaccaacaccagccugaucaaccacaaguucugcaaccugagcgacgcccacaagaagaaccuguacgaccacgcccugaugagcaucaucagcaccuuccaccugagcauccccaacuucaaccaguacgaggccaugagcugcgacuucaacgacggcaagaucagcgugcaguacaaccugagccacaccuacgccggcgacaccgccaaccacugcggcaccguggccaacggcgugcugcagaccuucaugagaauggccuggggcggcagcuacaucgcccuggacagcggcagaggcggcugggacugcaucaugaccagcuaccaguaccugaucauccagaacaccaccugggaggaccacugccaguucagcagacccagccccaucggcuaccugggccugcugagccagagaaccagagacaucuacaucagcagaagaagaagaggcaccuucaccuggacccugagcgacagcgagggcaaggacacccccggcggcuacugccugaccagauggaugcugaucgaggccgagcugaagugcuucggcaacaccgccguggccaagugcaacgagaagcacgacgaggaguucugcgacaugcugagacuguucgacuucugcaagcaggccauccagagacugaaggcccccgcccagaugagcauccagcugaucaacaaggccgugaacgcccugaucaacgaccagcugaucaugaagaaccaccugagagacaucaugggcauccccuacugcaacuacagcaaguacugcuaccugaaccacaccgugaccggcaagaccagccugcccaagugcugccuggugagcaacggcagcuaccugaacgagacccacuucagcgacgacaucgagcagcaggccgacaacaugaucaccgagaugcugcagaaggaguacauggagagacagggcaagaccccccugggccugguggaccuguucguguucagcaccagcuucuaccugaucagcaucuuccugcaccuggugaagauccccacccacagacacguggugggcaagcccugccccaagccccacagacugaaccacaugggcaucugcagcugcggcuucuacaagcagcccggcgugcccgugagauggaagagaugaggacuaguuauaagacugacuagcccgaugggccucccaacgggcccuccuccccuccuugcaccgagauuaaucaaaggcucuuuucagagccaccaaaaaaaaaaaaaaaaaaaaaaaaaaaaaaaaaaaaaaaaaaaaaaaaaaaaaaaaaaaaaaaaagaauu

SEQ ID NO: 27748 - RNA, 1658 nt, Artificial Sequence
  mRNA product Design i-3 (hSL-A64-N5) comprising derived and/or modified sequence from LASV(Z0947-SLE-2011;Clade IV)__AIT17840__GPCmut4 (opt4)
aggagaaagcuuaccaugggccagaucgugaccuucuuccaggaggugccccacgugaucgaggaggugaugaacaucgugcugaucgcccugagcauccuggccgugcugaagggccuguacaacuucgccaccugcggccuggugggccuggugaccuuccugcugcugugcggcagaagcugcaccaucagccuguacaagggcguguacgagcugcagacccuggagcugaacauggagacccugaacaugugcaugccccugagcugcaccaagaacaacagccaccacuacaucauggugggcaacgagaccggccuggagcugacccugaccaacaccagcaucaucaaccacaaguucugcaaccugagcgacgcccacaagaagaaccuguacgaccacgcccugaugagcaucaucagcaccuuccaccugagcauccccaacuucaaccaguacgaggccaugagcugcgacuucaacggcggcaagaucagcgugcaguacaaccugagccacagcuacgccggcgacgccgccaaccacugcggcaccguggccaacggcgugcugcagaccuucaugagaauggccuggggcggcagcuacaucgcccuggacagcggcagagacagaugggacugcaucaugaccagcuaccaguaccugaucauccagaacaccaccugggaggaccacugccaguucagcagacccagccccaucggcuaccugggccugcugagccagagaaccagagacaucuacaucagcagaagaagaagaggcaccuucaccuggacccugagcgacagcgagggcaaggacacccccggcggcuacugccugaccagauggaugcugaucgaggccgagcugaagugcuucggcaacaccgccguggccaagugcaacgagaagcacgacgaggaguucugcgacaugcugagacuguucgacuucugcaagcaggccauccagagacugaaggcccccgcccagaugagcauccagcugaucaacaaggccgugaacgcccugaucaacgaccagcugaucaugaagaaccaccugagagacaucaugggcauccccuacugcaacuacagcaaguacugcuaccugaaccacaccaccaccggcaagaccagccugcccaagugcugccuggugagcaacggcagcuaccugaacgagacccacuucagcgacgacaucgagcagcaggccgacaacaugaucaccgagaugcugcagaaggaguacauggagagacagggcaagaccccccugggccugguggaccuguucguguucagcaccagcuucuaccugaucagcaucuuccugcaccuggugaagauccccacccacagacacaucgugggcaagcccugccccaagccccacagacugaaccacaugggcaucugcagcugcggccuguacaagcagcccggcgugcccgugaaguggaagagaugaggacuaguuauaagacugacuagcccgaugggccucccaacgggcccuccuccccuccuugcaccgagauuaaucaaaggcucuuuucagagccaccaaaaaaaaaaaaaaaaaaaaaaaaaaaaaaaaaaaaaaaaaaaaaaaaaaaaaaaaaaaaaaaaagaauu

SEQ ID NO: 27749 - RNA, 1658 nt, Artificial Sequence
  mRNA product Design i-3 (hSL-A64-N5) comprising derived and/or modified sequence from LASV(Josiah;Clade IV)__NP_694870__GPCmut4 (opt5)
aggagaaagcuuaccaugggccagaucgugaccuucuuucaagaggucccccacguuauugaagaggugaugaacaucgugcugauugcccucagcguccuggcugugcuuaaggggcuguacaauuucgccacaugcggacucguuggccuggugacguuucuucugcucugugggagauccugcaccacaucucuguauaaaggagucuacgaacugcagacccucgagcugaacauggaaacacuuaauauguguaugccucugagcugcaccaagaacaauucccaucacuauaucauggugggcaacgagacagggcucgagcugacccuuacgaauaccucuauuaucaaccauaaauucuguaaucugagcgacgcgcacaagaaaaaccucuacgaucaugcucugauguccaucauuucuacauuucaccugagcaucccgaauuucaaccaguaugaagccauguccugcgacuuuaauggaggcaagauuagcguucaguacaaccucucucacuccuaugccggcgaugcugccaaucauugugggaccguggcuaacggaguccugcaaacauucaugcggauggccuggggcgggagcuacaucgcgcuugacucuggacgcggcaacugggauugcauuaugaccuccuaccaguaucugaucauucagaauacgacaugggaggaccacugucaguuuagcagacccucuccuaucggguaccucggacugcuuucccaacggacccgcgauaucuauauuagcagacggcgcagaggcacauucaccuggacccuguccgacucugaaggcaaggauacacccgggggauacugccucacgcgguggaugcugaucgaggccgagcugaaauguuuuggcaacaccgcuguggccaagugcaaugaaaaacaugacgaggaguucugcgauaugcuccgccuguuugacuucuguaagcaggcuauucagagacuuaaagccccugcgcagaugagcauccaacugauuaacaaggccgugaaugcucucaucaacgaucagcugaucaugaagaaucaccuucgggacauuauggggauccccuauugcaacuacuccaaauauuguuaccugaaucacacaaccacaggacgcaccagccucccuaagugcugucuggucucuaacggcuccuaccugaaugaaacgcauuucagcgacgauauugaacagcaagccgacaacaugaucacagagaugcuccagaaagaguauauggaaagacaggggaagaccccgcugggacuuguugaucuguuuguguucucuaccagcuuuuaccucauuuccaucuuccugcaccuggugaaaauccccacacaucggcacauugucggcaagucuugcccuaaaccccaucgccuuaaucacaugggcaucuguagcugcgggcucuauaagcagccuggagugcccguuaaguggaaaagaugaggacuaguuauaagacugacuagcccgaugggccucccaacgggcccuccuccccuccuugcaccgagauuaaucaaaggcucuuuucagagccaccaaaaaaaaaaaaaaaaaaaaaaaaaaaaaaaaaaaaaaaaaaaaaaaaaaaaaaaaaaaaaaaaagaauu

SEQ ID NO: 27750 - RNA, 1655 nt, Artificial Sequence
  mRNA product Design i-3 (hSL-A64-N5) comprising derived and/or modified sequence from LASV(LP;Clade I)__AAF86701__GPCmut4 (opt5)
aggagaaagcuuaccaugggccagaucauuaccuucuuucaagaggugccccacgucaucgaagagguuaugaacauugugcugaucgcccucagccugcuugcuauucugaaggggcucuacaauaucgccacaugcggaaucauuggccugguggcguuccuuuuucugugugggaaauccugcucucucacgcugaagggaggcuaugaacugcagacccucgagcugaacauggaaacacuuaauauguguaugccucugagcugcaccaaaaacuccucucaucacuacaucagagucgggaaugagacaggacucgagcugacccuuacaaacaccagcauuaucaaucauaaguucuguaaccuguccgacgcucacaaaaagaaucucuaugaucaugcccugaugucuauuaucagcacguuucaccuguccauuccgaacuucaaucaguacgaagccaugagcugcgacuuuaacggcggcaagaucucugugcaguauaaucucucccacagcuacgcuggggaugccgcugagcauuguggaaccguugccaacggcgugcugcaaacauucaugcggauggcguggggagggcgcuauaucgcccuugacucuggcaaagggaauugggauugcauuaugaccuccuaccaguaccugaucauucagaacacaaccugggaagaccacugucaguuuagcagacccucuccuaucggauaucucggccugcuuucccaacggacgcgcgauauuuacaucagcagacggcgcagaggcacauucaccuggacacuguccgacucugaggggaacgagacccccggaggcuauugccucacccgguggaugcugaucgaagcugagcugaaguguuuugggaauacagccgucgcuaaaugcaacgaaaagcaugaugaggaguucugcgacaugcuccgccuguuugauuucuguaaacaggccauuagacggcuuaaggcgccugcccagaugagcauccagcugauuaauaaggcugugaacgcccucaucaaugaccaacugauuaugaaaaaccaccuucgcgauaucaugggaauccccuacugcaauuauuccaaguacuguuaucugaaccacacgagcucuggcagaaccucccucccuaaaugcugucugauuagcaaugggucuuaccugaacgaaacacaguucagcgacgacaucgagcagcaagcugauaauaugauuaccgaaaugcuccagaaggaguacaucgaacggcagggaaaaacaccgcugggccuuguugacauuuuuaucuucuccaccucuuuuuaucugauuagcaucuuccuccaucugaucaagauucccacgcaccgccauaucgugggcaaaccuugccccaagccucacagacugaaccauaugggggucuguuccugcggacuuuacaagcaccccggcgugccgacaaaauggaagcggugaggacuaguuauaagacugacuagcccgaugggccucccaacgggcccuccuccccuccuugcaccgagauuaaucaaaggcucuuuucagagccaccaaaaaaaaaaaaaaaaaaaaaaaaaaaaaaaaaaaaaaaaaaaaaaaaaaaaaaaaaaaaaaaaagaauu

SEQ ID NO: 27751 - RNA, 1655 nt, Artificial Sequence
  mRNA product Design i-3 (hSL-A64-N5) comprising derived and/or modified sequence from LASV(803213;Clade II)__AAF86703__GPCmut4 (opt5)
aggagaaagcuuaccaugggccagaucauuaccuucuuucaagaggugccccacgucaucgaagagguuaugaacauugugcugaucgcccucagccugcuugcuauucugaaggggaucuacaauguggccacaugcggacucuucggccugaucuccuuucuucugcucugugggagaucuugcagcgucacguauaaaggaguguacgaacugcagacccuggagcucaacauggcgaaucugaacauguguaugccucuuuccugcacaaagaauaacucucaucacuauauuaugguuggcaaugaaaccgggcuggagcucacacugaccaacacaagcaucauuaaucauaaauucuguaaccuuuccgacgcucacaagaaaaaucuguacgaucaugcccucaugucuaucauuagcaccuuucaccuguccaucccgaacuucaaucaguaugaggccaugagcugcgacuuuaacggaggcaagauuucugugcaguacaaucugucccacagcuucgcugucgaugccgcuaaccauuguggcacgaucgccaacggggugcuccaaaccuuuaugcggauggcguggggaggcucuuauaucgcccuggacuccgggaagggaaauugggauugcauuaugacaagcuaccaguaccuuaucauucagaacaccacaugggaagaccacugucaguucucucgccccuccccuaucggcuaucuggggcuccugagccaaagaacccgggauauuuacaucucccgcagacggcgcggaacguuuacauggacccuuucugacagcgagggcaaugaagcucccggcggguauugccugacaagauggaugcucaucgaggccgagcugaaauguuucggaaacaccgcuguugccaagugcaaugaaaaacaugaugaggaauuuugcgacaugcugcgccucuucgauuucuguaagcaggcgauuaaacggcugaagaccccugcccagauguccauccagcuuauuaacaaggcugugaaugcccugaucaacgaccaacucauuaugaaaaaucaccugagagauaucaugggcauccccuacugcaacuauagccgguacuguuaucuuaaucacacagucacggggaagaccucucugccucgcugcugucucguguccaacggaagcuaccugaaugagacacauuuuucugacgacauugaacagcaggcugauaacaugaucaccgagaugcugcaaaaagaguacauggacagacagggcaagacaccgcucgggcugguggaucuuuucgucuuuagcaccuccuucuaucugauuucuaucuuucuccaccugguuaaaauucccacgcaucggcacaucgugggaaagccuugccccaaaccucaucgccugaaucacaugggcauuuguagcugcggccuuuacaagcaccccggggugccggucaaguggaaaagaugaggacuaguuauaagacugacuagcccgaugggccucccaacgggcccuccuccccuccuugcaccgagauuaaucaaaggcucuuuucagagccaccaaaaaaaaaaaaaaaaaaaaaaaaaaaaaaaaaaaaaaaaaaaaaaaaaaaaaaaaaaaaaaaaagaauu

SEQ ID NO: 27752 - RNA, 1655 nt, Artificial Sequence
  mRNA product Design i-3 (hSL-A64-N5) comprising derived and/or modified sequence from LASV(GA391;Clade III)__CAA36645__GPCmut4 (opt5)
aggagaaagcuuaccaugggccagaucgugaccuucuuucaagaggucccccacguuauugaagaggugaugaacaucgugcugauugcccucagcauccuggcuauucuuaaggggcuguacaaugucgccacaugcggacucaucggccuggugacguuccuucugcucuccgggagaucuuguagccugaucuauaaaggaaccuacgaacugcagacacucgagcugaacauggaaacccuuaauaugugcaugccucuguccuguacaaagaacaauucucaucacuauauucggguuggcaacgagaccgggcucgagcugacacuuaccaauacgagcauccugaaccauaaauuuugcaaucucuccgacgcgcacaagcgcaaccuguacgaucauucucugaugagcauuaucuccaccuuccaccucagcauuccgaauuuuaaccaguaugaagcuaugucuugugacuucaauggaggcaaaaucacagugcaguacaaccugucccacagcuuugccgucgaugccgcuggccauugcgggacccuugccaauggagugcugcaaacauucaugagaauggcuuggggcgggucuuauauugcccucgacuccggacggggcaacugggauuguaucaugaccagcuaccaguaccugaucauucagaacacgacaugggacgaucacugccaguuuucucgccccuccccuaucggguaucuuggacugcucagccaaagaacccgggacauuuacaucucccgcagacggcgcggcacauucaccuggacccugucugauagcgagggcaaugaaacacccgggggauauugucugacgagauggaugcucauugaggcggagcugaagugcuuuggcaacaccgccguugcuaaguguaaugaaaaacaugacgaggaguucugcgauaugcuucggcuguuugacuucugcaagcaggccauccgcagacucaaaaccccugcucagauguccauccagcugauuaacaaggccgugaaugcgcuuaucaacgaucaacugauuaugaaaaaucaccuccgggacaucauggggauucccuacuguaacuauagccgcuacugcuaucugaaucacacaucuacaggaaagaccucccugccuagauguugccucaucagcaacggcucuuaccugaaugaaacgaaguucagcgacgauaucgaacagcaggccgacaacaugauuacagagaugcuucaaaaagaguacaucgaucggcaggggaagaccccgcugggacucgucgaccuguuuguguucuccaccucuuuuuaucugauuagcaucuuccuucaucucgugaaaauucccacacacagacauaucgucggcaagccuugucccaaaccucaccgccugaaucauaugggcauuugcuccugugggcuguacaagcagcccggaguuccggugcgguggaaaagaugaggacuaguuauaagacugacuagcccgaugggccucccaacgggcccuccuccccuccuugcaccgagauuaaucaaaggcucuuuucagagccaccaaaaaaaaaaaaaaaaaaaaaaaaaaaaaaaaaaaaaaaaaaaaaaaaaaaaaaaaaaaaaaaaagaauu

SEQ ID NO: 27753 - RNA, 1658 nt, Artificial Sequence
  mRNA product Design i-3 (hSL-A64-N5) comprising derived and/or modified sequence from LASV(AV;Clade V)__CCA30314__GPCmut4 (opt5)
aggagaaagcuuaccaugggccagaucgugaccuucuuucaagaggucccccacguuauugaagaggugaugaacaucgugcugauugcccucagcauccuggcuguccuuaaggggcuguacaauauugccacaugcggacucaucggccugaucacguuccuucugcucugugggagauccugcucuagcaaccuguauaaaggaguguacgaacugcagucccucgaccugaauauggagacccuuaacauguguaugccucugucuugcacaaagaauaacagccaucacuauauucggguuggcaaugauaccgggcucgaacugacacuuaccaacacauccauccugaaucauaaauuuuguaaccucucugacgcgcacaagaaagaucuguacgaccaugcucugaugagcauuaucuccaccuuccaccucagcauuccgaauuuuaaccaguaugaggccaugucuugcgauuucaauggaggcaagaucuccgugcaguacaaccugagccacucuuaugccauugacgcugccaaucauuguggcacggucgcuaacgggauccuucaaaccuuuaugcgcauggccuggggaggcuccuacaucgcgcuggauagcgggagaggaaacugggacugcauuaugacaucuuaccaguaucucaucauucagaauaccacaugggagaaccacugucaguucucccggcccagcccuaucggcuaccuggggcuucugucccaacgcaccagagauauuuauaucucucggcgcagacggggaacguuuacauggacccucagcgacuccgaaggcaaugccacacccggcggguacugccugacccgcuggaugcugaucgaggcugaacucaaguguuucggaaacaccgccguggcuaaaugcaaugagaagcaugaugaggaauuuugcgacaugcugagacuuuucgauuuuuguaaacaggccauuagccggcugaagucuccugcgcagauguccauccagcucauuaacaaagccguuaaugcucugaucaacgaccaacuuauuaugaagaaucaucugcgcgacaucaugggcauccccuauugcaacuacagcaaguauuguuaccucaaucacacaauuacggggaaaaccucucugccuaagugcugucuggugagcaacggauccuaccucaaugagacacacuucucugaugacaucgaacagcaggccgauaacaugauuaccgagaugcugcaaaaagaauauauggagagacagggcaagacaccgcuugggcuggucgaccucuucguguuuagcaccuccuucuaccugaucagcauuuuucugcggcuugugaaaauccccacgcaccgccauauugucggaaagccuugccccaaaccucacagacucaaucauaugggcaucuguucuugcggccuguauaagcagcccgggguuccggugcgguggaagagaugaggacuaguuauaagacugacuagcccgaugggccucccaacgggcccuccuccccuccuugcaccgagauuaaucaaaggcucuuuucagagccaccaaaaaaaaaaaaaaaaaaaaaaaaaaaaaaaaaaaaaaaaaaaaaaaaaaaaaaaaaaaaaaaaagaauu

SEQ ID NO: 27754 - RNA, 1655 nt, Artificial Sequence
  mRNA product Design i-3 (hSL-A64-N5) comprising derived and/or modified sequence from LASV(Togo/2016/7082;Clade VI)__AMR44577__GPCmut4 (opt5)
aggagaaagcuuaccaugggccagaucauuaccuucuuucaagaggugccccacgucaucgaagagguuaugaacauugugcugaucgcccucagccugcuugcuauucugaaggggguguacaaugucgccacaugcggaaucaucggccucgugacguuccuguuucuuugugggagauccugcucucugauuuauaaaggaagcuacgaacuccagacccuggagcugaacauggaaacacucaauauguguaugccucuguccugcaccaagaacucuagccaucacuauauccggguuggcaaugagacagggcuugagcugacccucacaaacaccuccauuaucaaucauaaauucuguaaccugucugacgcgcacaagcgcaaucuuuacgaucaugcucugaugagcauucucuccacguuucaccugagcaucccgaacuucaaucaguaugaagccaugucuugcgacuuuaacggaggcaaaauuuccgugcaguacaaucugagccacgccuaugcugucgaugccgcugagcauuguggcaccguggccaacgggguucuccaaacauucaugagaauggcguggggaggcucuuacaucgcccuggacuccgggcggggaaauugggauugcaucaugaccagcuaccaguaucuuauuauccagaacacaaccugggaagaccacugucaguuuucucgccccuccccuauuggcuaccuggggcuccugagccaaagaacgcgggauaucuauauuucccgcagacggcgcggaacauucaccuggacacuuucugacagcgagggcaacgagacccccggcggguacugccugaccagauggaugcucaucgaagcugagcugaaguguuuuggaaauacagccguggcuaagugcaacgaaaaacaugaugaggaguucugcgacaugcugcggcucuuugauuucuguaagcaggccauccagcgccugaaauccccugcgcagaugagcauucaacuuaucaauaaggccgucaacgcucugauuaaugaccagcucaucaugaaaaaccaccugagagauaugaugggcauucccuauugcaauuacucuaaguauuguuaccuuaaccacacguccagcgggcggaccucucugccuaagugcugucucgugagcaauggauccuaccugaacgaaacacauuucucugacgacaucgagcagcaagccgauaauaugaucaccgaaaugcugcagaaagaguauauugaccgccagggcaagacaccgcucgggcugguggaucuuuuugucuucagcaccuccuuuuaccugaucagcauuuuccuccaccugaucaaaauucccacgcauagacacaucguuggaaagccuugccccaaaccucaucggcugaaccacaugggcauuuguucuugcggccuuuauaagcagcccggggugccgacaagauggaaacgcugaggacuaguuauaagacugacuagcccgaugggccucccaacgggcccuccuccccuccuugcaccgagauuaaucaaaggcucuuuucagagccaccaaaaaaaaaaaaaaaaaaaaaaaaaaaaaaaaaaaaaaaaaaaaaaaaaaaaaaaaaaaaaaaaagaauu

SEQ ID NO: 27755 - RNA, 1655 nt, Artificial Sequence
  mRNA product Design i-3 (hSL-A64-N5) comprising derived and/or modified sequence from LASV(KAK-428;Clade n.d. (VII))__ANH09740__GPCmut4 (opt5)
aggagaaagcuuaccaugggccagaucgugaccuucuuucaagaggucccccacguuauugaagaggugaugaacaucgugcugauugcccucagccugcuugcuauccugaaggggcucuacaauuucgccacaugcggagucauuggccugaucacguuucuucugcucugugggagauccugcucugcgaccuauaaaggacaguacgaacugcagacacuggagcucaacauggaaagccugaauauguguaugccucuuuccugcaccaagaacaauucucaucacuauauccgggcuggcaacaauacagggcuggagcucacccugacaaacaccagcauuaucucccauaaauucuguaaucuuucugacgcccacaagaaaaaccuguacgaucauacgcucaugagcauuaucaccacauuucaccuguccauuccgaauuucaaccaguaugaggccaugagcugcgacuuuaauggaggcaagaucucuauucaauacaaccugucccacagcuaugcuggcgaugccgcucagcauugugggaccguggccaauggaguucuccagacauucaugcgcauggcguggggcgggucuuaccuggcccuugacuccggaagacggggcugggauugcaucaucagcucuuaccaguaucugauuauccaaaacaccacgugggacgaucacugucaguuuucccgccccagcccuauuggguaccucggauucgugucccagaagacaagagacaucuauauuucucggcgcagacggggcaccuuuacauggacccugagcgauuccgaaggccaugacaugcccgggggauacugccuuacccgcuggaugcugaucgaggcugaucucaaauguuucggcaacacagccgucgcuaagugcaaugaaaaacacgacgaggaguuuugcgauauguggagacuguucgacuucuguaagcaggccauccaacggcugaaagcgccugcccagaugaacauucagcucaucaauaaggcugugaacgcccugauuaaugaccaacuuaugaugaagaaccaucugcgcgauaucauggggauucccuauugcaauuacagcaaauuuuguuaucucaacaauacgaccacaggaagaaccucucugccucggugcugucuuaucuccaacggcagcuaccugaaugaaacacacuucucugacgauaucgagcagcaggcugacaacaugauuaccgaaaugcuccagaaggaguacauggaucgccaagggaaaacgccgcugggacugguugaccucuuuguguucagcacauccuuuuaucugaucaccauuuuccuucaccuggucaagauccccacccauagacacauugugggcaaaccuugccccaagccucaucggcucaaucacaugggcaucuguucuugcgggcuguacaaacagcccggagugccggucagauggaagcgcugaggacuaguuauaagacugacuagcccgaugggccucccaacgggcccuccuccccuccuugcaccgagauuaaucaaaggcucuuuucagagccaccaaaaaaaaaaaaaaaaaaaaaaaaaaaaaaaaaaaaaaaaaaaaaaaaaaaaaaaaaaaaaaaaagaauu

SEQ ID NO: 27756 - RNA, 1655 nt, Artificial Sequence; identical to SEQ ID NO: 27750
  mRNA product Design i-3 (hSL-A64-N5) comprising derived and/or modified sequence from LASV(Pinneo-NIG-1969;Clade I)__AIT17836__GPCmut4 (opt5)

SEQ ID NO: 27757 - RNA, 1655 nt, Artificial Sequence
  mRNA product Design i-3 (hSL-A64-N5) comprising derived and/or modified sequence from LASV(ISTH0009-NIG-2011;Clade II)__AIT17404__GPCmut4 (opt5)
aggagaaagcuuaccaugggccagaucauuaccuucuuucaagaggugccccacgucaucgaagagguuaugaacauugugcugaucgcccucagccugcuugcuauucugaaggggaucuacaauguggccacaugcggacucuucggccuggucuccuuucuucugcucugugggagaucuugcagcacgaccuauaaaggaguguacgaacugcagacacuggagcucgacauggcgucccugaacauguguaugccucuuucuugcaccaagaauaacagccaucacuauaucaugguuggcaaugaaacagggcuggagcucacccugacaaacaccuccauuaucaaucauaaauucuguaaccuuucugaugcucacaagaaaaaucuguacgaccaugcccucaugagcauuaucuccacguuucaccugagcauuccgaacuucaaucaguaugaggccaugucuugcgauuuuaacggaggcaagaucuccgugcaguacaaucugagccacgcuuaugccgucgacgcugccaaccauuguggcaccauugcgaauggggugcuccaaacauucaugcggauggccuggggaggcucuuacaucgcucuggauuccgggaagggaagcugggacugcaucaugaccucuuaccaguaucuuauuauccagaacacaaccugggaagaucacugucaguuuucccgccccagcccuauuggcuaccuggggcuccugucccaaagaacgcgggacaucuauauuucucgcagacggcgcggaacauucaccuggacacuuagcgauuccgagggcaacgaaacccccggcggguacugccugaccagauggaugcucaucgaggccgagcugaaauguuuuggaaauacagcuguugccaagugcaacgaaaaacaugacgaggaguucugcgauaugcugcggcucuuugacuucuguaagcaggcgauccgcagacugaaaacgccugcccagaugagcauucagcuuaucaauaaggcugugaacgcccugauuaaugaucaacucaucaugaagaaccaucugcgggacauuaugggcauccccuauugcaauuacucuaaauauuguuaccuuaaccacaccgucacagggaagaccucccugccucgcugcugucucgugagcaauggaucuuaccugaacgaaacacacuucagcgacgauaucgaacagcaggcugacaauaugauuaccgagcugcuccaaaaagaguauauggauagacagggcaagacgccgcuggggcuuguggaccuguuugucuucuccacaucuuuuuaccucaucagcauuuuccugcaccugaucaaaauucccacccaucggcacaucaccggaaagccuugccccaaaccucaucgccuuaaccacaugggcauuuguuccugcggccucuauaagcaccccgggguuccggugaaguggaaaagaugaggacuaguuauaagacugacuagcccgaugggccucccaacgggcccuccuccccuccuugcaccgagauuaaucaaaggcucuuuucagagccaccaaaaaaaaaaaaaaaaaaaaaaaaaaaaaaaaaaaaaaaaaaaaaaaaaaaaaaaaaaaaaaaaagaauu

SEQ ID NO: 27758 - RNA, 1655 nt, Artificial Sequence
  mRNA product Design i-3 (hSL-A64-N5) comprising derived and/or modified sequence from LASV(ISTH2010-NIG-2012;Clade II)__AIT17482__GPCmut4 (opt5)
aggagaaagcuuaccaugggccagaucauuaccuucuuucaagaggugccccacgucaucgaagagguuaugaacauugugcugaucgcccucagccugcuugcuauucugaaggggaucuacaauguggccacaugcggacucuucggccuggucuccuuucuucugcucugugggagaucuugcagcacgaccuauaaaggaguguacgaacugcagacacuggagcucgacauggcgucccugaacauguguaugccucuuucuugcaccaagaauaacagccaucacuauaucaugguuggcaaugaaacagggcuggagcucacccugacaaacaccuccauuaucaaucauaaauucuguaaccuuucugaugcucacaagaaaaaucuguacgaccaugcccucaugagcauuaucuccacguuucaccugagcauuccgaacuucaaucaguaugaggccaugucuugcgauuuuaacggaggcaagaucuccgugcaguacaaucugagccacgcuuaugccgucgacgcugccaaccauuguggcaccauugcgaauggggugcuccaaacauucaugcggauggccuggggaggcucuuacaucgcucuggauuccgggaagggaagcugggacugcaucaugaccucuuaccaguaucuuauuauccagaacauuacaugggaagaucacugucaguuuucccgccccagcccuaucggcuaccuggggcuccugucccaaagaacccgggacauuuauaucucucgcagacggcgcggaacguucacauggacccuuagcgauuccgagggcaacgaaacacccggcggguacugccugaccagauggaugcucaucgaggccgagcugaaauguuuuggaaauaccgcuguugccaagugcaacgaaaaacaugacgaggaguucugcgauaugcugcggcucuuugacuucuguaagcaggcgauucgcagacugaaaacgccugcccagaugagcauccagcuuauuaauaaggcugugaacgcccugaucaaugaucaacucauuaugaagaaccaucugcgggacaucaugggcauccccuauugcaauuacucuaaauauuguuaccuuaaccacacagucaccgggaagacaucccugccucgcugcugucucgugagcaauggaucuuaccugaacgaaacccacuucagcgacgauauugaacagcaggcugacaauaugaucacagagcugcuccaaaaagaguauauugauagacagggcaagaccccgcuggggcuuguggaccuguuugucuucuccacgucuuuuuaccucaucagcauuuuccugcaccugguuaaaauccccacacaucggcacguggugggaaagccuugccccaaaccucaucgccuuaaccacaugggcauuuguuccugcggccucuauaagcaccccggggucccggugaaguggaaaagaugaggacuaguuauaagacugacuagcccgaugggccucccaacgggcccuccuccccuccuugcaccgagauuaaucaaaggcucuuuucagagccaccaaaaaaaaaaaaaaaaaaaaaaaaaaaaaaaaaaaaaaaaaaaaaaaaaaaaaaaaaaaaaaaaagaauu

SEQ ID NO: 27759 - RNA, 1655 nt, Artificial Sequence
  mRNA product Design i-3 (hSL-A64-N5) comprising derived and/or modified sequence from LASV(Lassa virus/H.sapiens-wt/NGA/2015/ISTH_0543;Clade II)__AVO03639__GPCmut4 (opt5)
aggagaaagcuuaccaugggccagaucauuaccuucuuucaagaggugccccacgucaucgaagagguuaugaacauugugcugaucgcccucagccugcuugcuauucugaaggggaucuacaauguggccacaugcggacucuucggccuggucuccuuucuucugcucugugggagaucuugcagcacgaccuauaaaggaguguacgaacugcagacacuggagcucgacauggcgaaccugaauauguguaugccucuuuccugcaccaagaacaauucucaucacuauaucaugguuggcaacgaaacagggcuggagcucacccugacaaauaccagcauuaucaaccauaaauucuguaaucuuuccgaugcucacaagaaaaaccuguacgaccaugcccucaugucuauuaucagcacguuucaccuguccauuccgaauuucaaccaguaugaggccaugagcugcgauuuuaauggaggcaagaucucugugcaguacaaccugucccacaccuaugcugucgacgccgcuaaucauuguggcacaauugccaacggggugcuccaaaccuucaugcggauggcguggggaggcagcuacaucgcccuggauucugggaagggauccugggacugcaucaugacaagcuaccaguaucuuguuauucagaacaccacgugggaagaucacugucaguuuucucgccccuccccuaucggcuaccuggggcuccugagccaaagaacacgggacauuuauaucucccgcagacggcgcggaaccuucacauggacccuuucugauagcgagggcaaugaaacccccggcggguacugccugacaagauggaugcucauugaggcugagcugaaauguuuuggaaacacggccguggcuaagugcaaugaaaaacaugacgaggaguucugcgauaugcugcggcucuuugacuucuguaagcaggccauccgcagacugaaaaccccugcgcagauguccauccagcuuauuaacaaggccgucaaugcucugaucaacgaucaacucauuaugaagaaucaucugcgggacaucaugggcauucccuauugcaacuacagcaaauauuguuaccuuaaucacacagugaccgggaagacaucucugccucgcugcugucucguguccaacggaagcuaccugaaugaaacccacuucucugacgauaucgaacagcaggccgacaacaugaucacggagcugcuccaaaaagaguauauugauagacagggcaagacaccgcuggggcuugucgaccuguuuguuuucagcaccuccuuuuaccucaucucuauuuuccugcaccuggugaaaauccccacccaucggcacauuacaggaaagccuugccccaaaccucaucgccuuaaucacaugggcaucuguagcugcggccucuauaagcaccccggggugccggucaaguggaaaagaugaggacuaguuauaagacugacuagcccgaugggccucccaacgggcccuccuccccuccuugcaccgagauuaaucaaaggcucuuuucagagccaccaaaaaaaaaaaaaaaaaaaaaaaaaaaaaaaaaaaaaaaaaaaaaaaaaaaaaaaaaaaaaaaaagaauu

SEQ ID NO: 27760 - RNA, 1655 nt, Artificial Sequence
  mRNA product Design i-3 (hSL-A64-N5) comprising derived and/or modified sequence from LASV(Lassa virus/H.sapiens-wt/NGA/2016/ISTH_0009;Clade II)__AVO03571__GPCmut4 (opt5)
aggagaaagcuuaccaugggccagaucauuaccuucuuucaagaggugccccacgucaucgaagagguuaugaacauugugcugaucgcccucagccugcuugcuauucugaaggggaucuacaauguggccacaugcggacuccugggccuugucuccuuccugcuccugugugggagaucuugcagcacgaccuauaaaggaguguacgaacugcagacacucgagcuggacauggcgucccuuaacauguguaugccucugucuugcaccaagaauaacagccaucacuauaucaugguuggcaaugaaacagggcucgagcugacccuuacaaacaccuccauuaucaaucauaaauuuuguaaccugucugaugcucacaagaaaaaucucuacgaccaugcccugaugagcauuaucuccacguuccaccugagcauuccgaacuuuaaucaguaugaggccaugucuugcgauuucaacggaggccggaucuccgugcaguacaaucucagccacucuuaugcugucgacgccgcuaaccauuguggcaccauugccaauggggugcugcaaacauuuaugcgcauggcguggggaggcuccuacaucgcccuugauagcgggaagggaucuugggacugcaucaugaccuccuaccaguaucugauuauccagaacacaaccugggaagaucacugucaguucagcagacccuccccuauuggcuaccucgggcugcuuucucaacggacgcgcgacaucuauauuagcagacggcgcagaggaacauuuaccuggacacuguccgauagcgagggcaacgaaacccccggcggguacugccucacccgguggaugcugaucgaggcugagcugaaguguuucggaaauacagccguugcuaaaugcaacgaaaagcaugacgaggaauuuugcgauaugcuccgccuguucgacuuuuguaaacaggccaucagacggcuuaagacgccugcgcagaugucuauucagcugaucaauaaagccgugaacgcucucauuaaugaucaacugaucaugaagaaccaccuucgcgacauuaugggcauccccuauugcaauuacuccaaguauuguuaccugaaccacaccgucacagggaaaaccagccucccuagaugcugucuggugucuaauggaagcuaccugaacgagacacauuucuccgacgauaucgaacagcaggccgacaauaugauuaccgagcuccugcaaaaggaguauaucgaucggcagggcaaaacgccgcuugggcugguggaccucuucgucuuuucuaccagcuucuaccugauuuccaucuuucugcaccuuguuaagauucccacacaucgccacaucaccggaaaaccuugccccaagccucauagacucaaccacaugggcauuuguagcugcggccuguauaaucaccccggggugccggugaaauggaagcggugaggacuaguuauaagacugacuagcccgaugggccucccaacgggcccuccuccccuccuugcaccgagauuaaucaaaggcucuuuucagagccaccaaaaaaaaaaaaaaaaaaaaaaaaaaaaaaaaaaaaaaaaaaaaaaaaaaaaaaaaaaaaaaaaagaauu

SEQ ID NO: 27761 - RNA, 1655 nt, Artificial Sequence
  mRNA product Design i-3 (hSL-A64-N5) comprising derived and/or modified sequence from LASV(Lassa virus/H.sapiens-wt/NGA/2016/ISTH_0017;Clade II)__AVO03567__GPCmut4 (opt5)
aggagaaagcuuaccaugggccagaucauuaccuucuuucaagaggugccccacgucaucgaagagguuaugaacauugugcugaucgcccucagccugcuugcuauucugaaggggaucuacaauguggccacaugcggacucuucggccuggucuccuuucuucugcucugugggagaucuugcagcacgaccuauaaaggaguguacgaacugcagacacuggagcucgacauggcgucccugaacauguguaugccucuuucuugcaccaagaauaacagccaucacuauaucaugguuggcaaugaaacagggcuggagcucacccugacaaacaccuccauuaucaaucauaaauucuguaaccuuucugaugcucacaagaaaaaucuguacgaccaugcccucaugagcauuaucuccacguuucaccugagcauuccgaacuucaaucaguaugaggccaugucuugcgauuuuaacggaggcaagaucuccgugcaguacaaucugagccacaccuaugcuauugacgccgcuaaccauuguggcacaaucgccaaugggguccuccaaaccuucaugcggauggcguggggaggcucuuacaucgcccuggauuccgggaagggaagcugggacugcauuaugacaucuuaccaguaucuuaucauucagaacaccacgugggaagaucacugucaguuuucccgccccagcccuaucggcuaccuggggcuccugucccaaagaacacgggacauuuauaucucucgcagacggcgcggaaccuucacauggacccuuagcgauuccgagggcaacgaaacccccggcggguacugccugacaagauggaugcucaucgaggcugagcugaaauguuuuggaaauacggccguggcuaagugcaacgaaaaacaugacgaggaguucugcgauaugcugcggcucuuugacuucuguaagcaggccauucgcagacugaaaaccccugcgcagaugagcauccagcuuauuaauaaggccguuaacgcucugaucaaugaucaacucauuaugaagaaccaucugcgggacaucaugggcauccccuauugcaauuacucuaaauauuguuaccuuaaccacacagugaccgggaagacaucccugccucgcugcugucucgucagcaauggaucuuaccugaacgaaacccacuucagcgacgauauugaacagcaggccgacaauaugaucacggagcugcuccaaaaagaguauauggauagacagggcaagacaccgcuggggcuuguggaccuguuuguguucuccaccucuuuuuaccucauuagcaucuuccugcaccugguccggauucccacccaucgccacguuaucggaaaaccuugccccaagccucauagacuuaaccacaugggcauuuguuccugcggccucuauaaacaccccggggugccggugaaguggaagcggugaggacuaguuauaagacugacuagcccgaugggccucccaacgggcccuccuccccuccuugcaccgagauuaaucaaaggcucuuuucagagccaccaaaaaaaaaaaaaaaaaaaaaaaaaaaaaaaaaaaaaaaaaaaaaaaaaaaaaaaaaaaaaaaaagaauu

SEQ ID NO: 27762 - RNA, 1655 nt, Artificial Sequence
  mRNA product Design i-3 (hSL-A64-N5) comprising derived and/or modified sequence from LASV(Lassa virus/H.sapiens-wt/NGA/2018/ISTH_0959;Clade II)__AVV65099__GPCmut4 (opt5)
aggagaaagcuuaccaugggccagaucauuaccuucuuucaagaggugccccacgucaucgaagagguuaugaacauugugcugaucgcccucagccugcuugcuauucugaaggggaucuacaauguggucacaugcggacucuucggccugguguccuuucuucugcucugugggagaucuugcagcacgaccuauaaaggaguuuacgaacugcagacacuggagcucgacauggccucccugaacauguguaugccucuuucuugcaccaagaauaacagccaucacuauaucauggugggcaaugaaacagggcuggagcucacccugacaaacaccuccauuaucaaucauaaauucuguaaccuuucugaugcgcacaagaaaaaucuguacgaccaugcucucaugagcauuaucuccacguuucaccugagcauuccgaacuucaaucaguaugaggccaugucuugcgauuuuaacggaggcaagaucuccguccaguacaaucugagccacgccuaugcuauugacgccgcuaaccauuguggcaccaucgccaauggggugcuccaaacauucaugcggauggcguggggaggcucuuacaucgcccuggauuccgggaagggaagcugggacugcauuaugaccucuuaccaguaucuuaucauucagaacacaaccugggaagaucacugucaguuuucccgccccagcccuaucggcuaccuggggcuccugucccaaagaacgcgggacauuuauaucucucgcagacggcgcggaacauucaccuggacacuuagcgauuccgagggcaacgaaacccccggcggguacugccugaccagauggaugcucaucgaggcugagcugaaauguuuuggaaauacagccguugcuaagugcaacgaaaaacaugacgaggaguucugcgauaugcugcggcucuuugacuucuguaagcaggccauucgcagacugaaaacgccugcgcagaugagcauccagcuuauuaauaaggccgugaacgcucugaucaaugaucaacucauuaugaagaaccaucugcgggacaucaugggcauccccuauugcaauuacucuaaauauuguuaccuuaaccacaccgucacagggaagaccucccugccucgcugcugucucgugagcaauggaucuuaccugaacgaaacacacuucagcgacgauauugaacagcaggccgacaauaugaucaccgagcugcuccaaaaagaguauauugauagacagggcaagacgccgcuggggcuuguggaccuguuugucuucuccacaucuuuuuaccucaucagcauuuuccugcaccugguuaaaauccccacccaucggcacgugauuggaaagccuugccccaaaccucaucgccuuaaccacaugggcaucuguuccugcggccucuauaagcaccccggggugccggucaaguggaaaagaugaggacuaguuauaagacugacuagcccgaugggccucccaacgggcccuccuccccuccuugcaccgagauuaaucaaaggcucuuuucagagccaccaaaaaaaaaaaaaaaaaaaaaaaaaaaaaaaaaaaaaaaaaaaaaaaaaaaaaaaaaaaaaaaaagaauu

SEQ ID NO: 27763 - RNA, 1655 nt, Artificial Sequence
  mRNA product Design i-3 (hSL-A64-N5) comprising derived and/or modified sequence from LASV(LASV003-NIG-2008;Clade II)__AIT17580__GPCmut4 (opt5)
aggagaaagcuuaccaugggccagaucauuaccuucuuucaagaggugccccacgucaucgaagagguuaugaacauugugcugaucgcccucagccugcuugcuauucugaaggggaucuacaauguggccacaugcggacucuucggccuggucuccuuucuucugcucugugggagaucuugcagcacgaccuauaaaggaguguacgaacugcagacacuggagcucgacauggcgucccugaacauguguaugccucuuucuugcaccaagaauaacagccaucacuauaucaugguuggcaaugaaacagggcuggagcucacccugacaaacaccuccauuaucaaucauaaauucuguaaccuuucugaugcucacaagaaaaaucuguacgaccaugcccucaugagcauuaucuccacguuucaccugagcauuccgaacuucaaucaguaugaggccaugucuugcgauuuuaacggaggcaagaucuccgugcaguacaaucugagccacaccuaugcugucgacgccgcuaaccauuguggcacaauugccaauggggugcuccaaaccuucaugcggauggcguggggaggcucuuacaucgcccuggauuccgggaagggaagcugggacugcaucaugacaucuuaccaguaucuuauuauccagaacaccacgugggaagaucacugucaguuuucccgccccagcccuauuggcuaccuggggcuccugucccaaagaacacgggacaucuauauuucucgcagacggcgcggaaccuucacauggacccuuagcgauuccgagagcaacgaaacccccggcggcuacugccugacaagauggaugcucaucgaggcugagcugaaauguuuugggaauacggccguugcuaagugcaacgaaaaacaugacgaggaguucugcgauaugcugcggcucuuugacuucuguaagcaggccauccgcagacugaaagcgccugcccagaugucuauucagcuuaucaauaaggcugugaacgcccugauuaaugaucaacucaucaugaagaaccaucugcgggacauuaugggaauccccuauugcaauuacuccaaauauuguuaccuuaaccacaccgucacaggccgcaccagccugccuagaugcugucucgugucuaaugggagcuaccugaacgaaacacacuucuccgacgauaucgaacagcaggcugacaauaugauuaccgagcugcuccaaaaggaguauauggaucggcagggaaaaacgccgcugggccuuguggaccuguuugucuucucuaccagcuuuuaccucaucuccauuuuccugcaccugguuaagauccccacacaucgccacgugauugggaaaccuugccccaagccucauagacuuaaccacaugggaaucuguagcugcggccucuauaaacaccccggcgugccggucaaguggaagcggugaggacuaguuauaagacugacuagcccgaugggccucccaacgggcccuccuccccuccuugcaccgagauuaaucaaaggcucuuuucagagccaccaaaaaaaaaaaaaaaaaaaaaaaaaaaaaaaaaaaaaaaaaaaaaaaaaaaaaaaaaaaaaaaaagaauu

SEQ ID NO: 27764 - RNA, 1655 nt, Artificial Sequence
  mRNA product Design i-3 (hSL-A64-N5) comprising derived and/or modified sequence from LASV(LASV035-NIG-2009;Clade II)__AIT17588__GPCmut4 (opt5)
aggagaaagcuuaccaugggccagaucauuaccuucuuucaagaggugccccacgucaucgaagagguuaugaacauugugcugaucgcccucagccugcuugcuauucugaaggggaucuacaauguggccacaugcggacucuucggccuggucuccuuucuucugcucugugggagaucuugcagcacgaccuauaaaggaguguacgaacugcagacacuggagcucgacauggcgucccugaacauguguaugccucuuucuugcaccaagaauaacagccaucacuauaucaugguuggcaaugaaacagggcuggagcucacccugacaaacaccuccauuaucaaucauaaauucuguaaccuuucugaugcucacaagaaaaaucuguacgaccaugcccucaugagcauuaucuccacguuucaccugagcauuccgaacuucaaucaguaugaggccaugucuugcgauuuuaacggaggcaagaucuccgugcaguacaaucugagccacgcuuaugccgucgacgcugccaaccauuguggcaccauugcgaauggggugcuccaaacauucaugcggauggccuggggaggcucuuacaucgcucuggauuccgggaagggaagcugggacugcaucaugaccucuuaccaguaucuuauuauccagaacacaaccugggaagaucacugucaguuuucccgccccagcccuauuggcuaccuggggcuccugucccaaagaacgcgggacaucuauauuucucgcagacggcgcggaacauucaccuggacacuuagcgauuccgagggcaacgaaacccccggcggguacugccugaccagauggaugcucaucgaggccgagcugaaauguuuuggaaauacagcuguugccaagugcaacgaaaaacaugacgaggaguucugcgauaugcugcggcucuuugacuucuguaagcaggcgauccgcagacugaaagccccugcucagaugagcauucagcuuaucaauaaggccgugaacgcucugauuaaugaucaacucaucaugaagaaccaucugcgggacauuaugggcauccccuauugcaauuacucuaaauauuguuaccuuaaccacacggucaccgggaagacaucccugccucgcugcugucucgugagcaauggaucuuaccugaacgaaacccacuucagcgacgauaucgaacagcaggccgacaauaugauuacagagcugcuccaaaaagaguauaucgauagacagggcaagaccccgcuggggcuuguggaccuguuugucuucuccacgucuuuuuaccucauuagcaucuuccugcaccugguuaaaauucccacacaucggcacgugaucggaaagccuugccccaaaccucaucgccuuaaccacaugggcauuuguuccugcggccucuauaagcaccccggggugccggucaaguggaaaagaugaggacuaguuauaagacugacuagcccgaugggccucccaacgggcccuccuccccuccuugcaccgagauuaaucaaaggcucuuuucagagccaccaaaaaaaaaaaaaaaaaaaaaaaaaaaaaaaaaaaaaaaaaaaaaaaaaaaaaaaaaaaaaaaaagaauu

SEQ ID NO: 27765 - RNA, 1655 nt, Artificial Sequence
  mRNA product Design i-3 (hSL-A64-N5) comprising derived and/or modified sequence from LASV(LASV1000-NIG-2009;Clade II)__AIT17782__GPCmut4 (opt5)
aggagaaagcuuaccaugggccagaucauuaccuucuuucaagaggugccccacgucaucgaagagguuaugaacauugugcugaucgcccucagccugcuugcuauucugaaggggaucuacaauguggccacaugcggacucuucggccuggucuccuuucuucugcucugugggagaucuugcagcacgaccuauaaaggaguguacgaacugcagacacuggagcucgacauggcgucccugaacauguguaugccucuuucuugcaccaagaauaacagccaucacuauaucaugguuggcaaugaaacagggcuggagcucacccugacaaacaccuccauuaucaaucauaaauucuguaaccuuucugaugcucacaagaaaaaucuguacgaccaugcccucaugagcauuaucuccacguuucaccugagcauuccgaacuucaaucaguaugaggccaugucuugcgauuuuaacggaggcaagaucuccgugcaguacaaucugagccacaccuaugcugucgacgccgcuaaccauuguggcacaauugccaauggggugcuccaaaccuucaugcggauggcguggggaggcucuuacaucgcccuggauuccgggaagggaagcugggacugcaucaugacaucuuaccaguaucuuauuauccagaacaccacgugggaagaucacugucaguuuucccgccccagcccuauuggcuaccuggggcuccugucccaaagaacacgggacaucuauauuucucgcagacggcgcggaaccuucacauggacccuuagcgauuccgagggcaacgaaacccccggcggguacugccugacaagauggaugcucaucgaggcugagcugaaauguuuuggaaauacggccguugcuaagugcaacgaaaaacaugacgaggaguucugcgauaugcugcggcucuuugacuucuguaagcaggccaucaaacgccugaagaccccugcgcagaugagcauucagcuuaucaauaaggccgugaacgcucugauuaaugaucaacucaucaugaaaaaccaccugagagacauuaugggcauccccuauugcaauuacucuaaguauuguuaccuuaaccacacagucaccgggaaaacaucccugccucggugcugucucgugagcaauggaucuuaccugaacgaaacccauuucagcgacgauaucgaacagcaggccgacaauaugauuacggagcugcuccaaaaggaguauaucgaucgccagggcaaaacaccgcuggggcuuguggaccuguuugucuucuccaccucuuuuuaccucauuagcaucuuccugcaccugguuaagauucccacccauagacacguggugggaaaaccuugccccaagccucaucggcuuaaccacaugggcaucuguuccugcggccucuauaagcaccccggggucccggugaaauggaagcgcugaggacuaguuauaagacugacuagcccgaugggccucccaacgggcccuccuccccuccuugcaccgagauuaaucaaaggcucuuuucagagccaccaaaaaaaaaaaaaaaaaaaaaaaaaaaaaaaaaaaaaaaaaaaaaaaaaaaaaaaaaaaaaaaaagaauu

SEQ ID NO: 27766 - RNA, 1655 nt, Artificial Sequence
  mRNA product Design i-3 (hSL-A64-N5) comprising derived and/or modified sequence from LASV(LASV221-NIG-2010;Clade II)__AIT17624__GPCmut4 (opt5)
aggagaaagcuuaccaugggccagaucauuaccuucuuucaagaggugccccacgucaucgaagagguuaugaacauugugcugaucgcccucagccugcuugcuauucugaaggggaucuacaauguggccacaugcggacucuucggccuggucuccuuucuucugcucugugggagaucuugcagcacgaccuauaaaggaguguacgaacugcagacacuggagcucgacauggcgucccugaacauguguaugccucuuucuugcaccaagaauaacagccaucacuauaucaugguuggcaaugaaacagggcuggagcucacccugacaaacaccuccauuaucaaucauaaauucuguaaccuuucugaugcucacaagaaaaaucuguacgaccaugcccucaugagcauuaucuccacguuucaccugagcauuccgaacuucaaucaguaugaggccaugucuugcgauuuuaacggaggcaagaucuccgugcaguacaaucugagccacaccuaugcuauugacgccgcuaaccauuguggcacaaucgccaaugggguccuccaaaccuucaugcggauggcguggggaggcucuuacaucgcccuggauuccgggaagggaagcugggacugcauuaugacaucuuaccaguaucuuaucauucagaacaccacgugggaagaucacugucaguuuucccgccccagcccuaucggcuaccuggggcuccugucccaaagaacacgggacauuuauaucucucgcagacggcgcggaaccuucacauggacccuuagcgauuccgagggcaacgaaacccccggcggguacugccugacaagauggaugcucaucgaggcugagcugaaauguuuuggaaauacggccguggcuaagugcaacgaaaaacaugacgaggaguucugcgauaugcugcggcucuuugacuucuguaagcaggccauucgcagacugaaaaccccugcgcagaugagcauccagcuuauuaauaaggccguuaacgcucugaucaaugaucaacucauuaugaagaaccaucugcgggacaucaugggcauccccuauugcaauuacucuaaauauuguuaccuuaaccacacagugaccgggaagacaucccugccucgcugcugucucgucagcaauggaucuuaccugaacgaaacccacuucagcgacgauauugaacagcaggccgacaauaugaucacggagaugcugcaaaaagaguauauggauagacagggcaagacaccgcucgggcugguggaccuuuuuguguucuccaccucuuuuuaccugauuagcaucuuccuccaccuggucaaaauucccacccaucggcacguuaucggaaagccuugccccaaaccucaucgccugaaccacaugggcauuuguuccugcggccuuuauaagcaccccggggugccggugaaguggaaaagaugaggacuaguuauaagacugacuagcccgaugggccucccaacgggcccuccuccccuccuugcaccgagauuaaucaaaggcucuuuucagagccaccaaaaaaaaaaaaaaaaaaaaaaaaaaaaaaaaaaaaaaaaaaaaaaaaaaaaaaaaaaaaaaaaagaauu

SEQ ID NO: 27767 - RNA, 1655 nt, Artificial Sequence
  mRNA product Design i-3 (hSL-A64-N5) comprising derived and/or modified sequence from LASV(LASV237-NIG-2010;Clade II)__AIT17638__GPCmut4 (opt5)
aggagaaagcuuaccaugggccagaucauuaccuucuuucaagaggugccccacgucaucgaagagguuaugaacauugugcugaucgcccucagccugcuugcuauucugaaggggaucuacaauguggccacaugcggacucuucggccuggucuccuuucuucugcucugugggagaucuugcagcacgaccuauaaaggaguguacgaacugcagacacuggagcucgacauggcgucccugaacauguguaugccucuuucuugcaccaagaauaacagccaucacuauaucaugguuggcaaugaaacagggcuggagcucacccugacaaacaccuccauuaucaaucauaaauucuguaaccuuucugaugcucacaagaaagaccuguacgaucaugcccucaugagcauuaucuccacguuucaccugagcauuccgaauuucaaccaguaugaggccaugucuugcgacuuuaauggaggcaagaucuccgugcaguacaaccugagccacaccuaugcugucgaugccgcuaaucauuguggcacaauugccaacggggugcuccaaaccuucaugcggauggcguggggaggcucuuacaucgcccuggacuccgggaagggaagcugggauugcaucaugacaucuuaccaguaucuuauuauccagaauaccacgugggaagaccacugucaguuuucccgccccagcccuauuggcuaccuggggcuccugucccaaagaacacgggauaucuauauuucucgcagacggcgcggaaccuucacauggacccuuagcgacuccgagggcaacgaaacccccggcggguacugccugacaagauggaugcucaucgaggcugagcugaaauguuuuggaaacacggccguugcuaagugcaaugaaaaacaugaugaggaguucugcgacaugcugcggcucuuugauuucuguaagcaggccauccgcagacugaaaaccccugcgcagaugagcauucagcuuaucaacaaggccgugaaugcucugauuaacgaccaacucaucaugaagaaucaucugcgggacauuaugggcauccccuauugcaacuacucuaaauauuguuaccuuaaucacacagucaccgggaagacaucccugccucgcugcugucucgugagcaacggaucuuaccugaaugaaacccacuucagcgaugacaucgaacagcaggccgauaacaugauuacggagcugcuccaaaaagaguauauggacagacagggcaagacaccgcuggggcuuguggaucuguuugucuucuccaccucuuuuuaccucaucagcauuuuccugcaccugaucaaaauucccacccaucggcacaucacaggaaagccuugccccaaaccucaucgccuuaaucacaugggcauuuguuccugcggccucuauaagcaccccgggguuccggugaaguggaaaagaugaggacuaguuauaagacugacuagcccgaugggccucccaacgggcccuccuccccuccuugcaccgagauuaaucaaaggcucuuuucagagccaccaaaaaaaaaaaaaaaaaaaaaaaaaaaaaaaaaaaaaaaaaaaaaaaaaaaaaaaaaaaaaaaaagaauu

SEQ ID NO: 27768 - RNA, 1655 nt, Artificial Sequence
  mRNA product Design i-3 (hSL-A64-N5) comprising derived and/or modified sequence from LASV(LASV253-NIG-2011;Clade II)__AIT17670__GPCmut4 (opt5)
aggagaaagcuuaccaugggccagaucauuaccuucuuucaagaggugccccacgucaucgaagagguuaugaacauugugcugaucgcccucagccugcuugcuauucugaaggggaucuacaauguggccacaugcggacucuucggccuggucuccuuucuucugcucugugggagaucuugcagcacgaccuauaaaggaguguacgaacugcagacacuggagcucgacauggcgucccugaacauguguaugccucuuucuugcaccaagaauaacagccaucacuauaucaugguuggcaaugaaacagggcuggagcucacccugacaaacaccuccauuaucaaucauaaauucuguaaccuuucugaugcucacaagaaaaaucuguacgaccaugcccucaugagcauuaucuccacguuucaccugagcauuccgaacuucaaucaguaugaggccaugucuugcgauuuuaacggaggcaagaucuccgugcaguacaaucugagccacaccuaugcugucgacgccgcuaaccauuguggcacaauugccaauggggugcuccaaaccuucaugcggauggcguggggaggcucuuacaucgcccuggauuccgggaagggaagcugggacugcaucaugacaucuuaccaguaucuuauuauccagaacaccacgugggaagaucacugucaguuuucccgccccagcccuauuggcuaccuggggcuccugucccaaagaacacgggacaucuauauuucucgcagacggcgcggaaccuucacauggacccuuagcgauuccgagggcaacgaaacccccggcggguacugccugacaagauggaugcucaucgaggcugagcugaaauguuuuggaaauacggccguugcuaagugcaacgaaaaacaugacgaggaguucugcgauaugcugcggcucuuugacuucuguaagcaggccauccgcagacugaaagcgccugcccagaugagcauucagcuuaucaauaaggcugugaacgcccugauuaaugaucaacucaucaugaagaaccaucugcgggacauuaugggcauccccuauugcaauuacucuaaauauuguuaccuuaaccacaccgucacagggcgcaccucccugccuagaugcugucucgugagcaauggaucuuaccugaacgaaacacacuucagcgacgauaucgaacagcaggcugacaauaugauuaccgagcugcuccaaaaggaguauaucgaucggcagggcaaaacgccgcuggggcuuguggaccuguuugucuucuccacaucuuuuuaccucauuagcaucuuccugcaccugguuaagauucccacccaucgccacaucauuggaaaaccuugccccaagccucauagacuuaaccacaugggcaucuguuccugcggccucuauaaacaccccggggugccggugaaguggaagcggugaggacuaguuauaagacugacuagcccgaugggccucccaacgggcccuccuccccuccuugcaccgagauuaaucaaaggcucuuuucagagccaccaaaaaaaaaaaaaaaaaaaaaaaaaaaaaaaaaaaaaaaaaaaaaaaaaaaaaaaaaaaaaaaaagaauu

SEQ ID NO: 27769 - RNA, 1655 nt, Artificial Sequence
  mRNA product Design i-3 (hSL-A64-N5) comprising derived and/or modified sequence from LASV(LASV254-NIG-2011;Clade II)__AIT17674__GPCmut4 (opt5)
aggagaaagcuuaccaugggccagaucauuaccuucuuucaagaggugccccacgucaucgaagagguuaugaacauugugcugaucgcccucagccugcuugcuauucugaaggggaucuacaauguggccacaugcggacucuucggccuggucuccuuucuucugcucugugggagaucuugcagcacgaccuauaaaggaguguacgaacugcagacacuggagcucgacaugaccaaccugaauauguguaugccucuuuccugcacaaagaacaauucucaucacuauaucaugguuggcaacgaaaccgggcuggagcucacacugaccaauacgagcauuaucaaccauaaauucuguaaucuuuccgaugcgcacaagaaaaaccuguacaaucaugcucucaugucuauuaucagcaccuuucaccuguccauuccgaacuucaaucaguaugaggccaugagcugcgacuuuaacggaggcaagaucucugugcaguacaaucugucccacagcuaugccgucgaugcugccaaccauuguggcacaauugcuaacggggugcuccaaaccuucaugcggauggccuggggaggcucuuacaucgcgcuggacuccgggaagggaaauugggauugcaucaugacaagcuaccaguaucuuauuauccagaacaccacgugggaagaccacugucaguuuucucgccccuccccuauuggcuaccuggggcuccugagccaaagaacacgggauaucuauauuucccgcagacggcgcggaaccuucacauggacccuuucugacagcgagggcaaugaaacccccggcggguacugccugacaagauggaugcucaucgaggccgagcugaaauguuuuggaaacacggcuguugccaagugcaaugaaaaacaugaugaggaguucugcgacaugcugcggcucuuugauuucuguaagcaggcuauccgcagacugaaaaccccugcccaggcgaacauucagcuuaucaauaaggccgugaacgcucugauuaaugaccaacucaucaugaagaaccaucugcgggauauuaugggcauccccuauugcaauuacuccaaauauuguuaccuuaaccacacagucaccgggaagacaagccugccucgcugcugucucgugucuaauggauccuaccugaacgaaacccacuucagcgacgacaucgaacagcaggccgauaauaugauuacggagcugcuccaaaaagaguauauggacagacagggcaagacaccgcuggggcuuguggaucuguuugucuucucuaccagcuuuuaccucaucuccauuuuccugcaccugguuaaaauccccacccaucggcacgugauuggaaagccuugccccaaaccucaucgccuuaaccacaugggcaucuguucuugcggccucuauaagcaccccggggugccggucaaguggaaaagaugaggacuaguuauaagacugacuagcccgaugggccucccaacgggcccuccuccccuccuugcaccgagauuaaucaaaggcucuuuucagagccaccaaaaaaaaaaaaaaaaaaaaaaaaaaaaaaaaaaaaaaaaaaaaaaaaaaaaaaaaaaaaaaaaagaauu

SEQ ID NO: 27770 - RNA, 1655 nt, Artificial Sequence
  mRNA product Design i-3 (hSL-A64-N5) comprising derived and/or modified sequence from LASV(Nig08-A19;Clade III)__ADU56618__GPCmut4 (opt5)
aggagaaagcuuaccaugggccagaucgugaccuucuuucaagaggucccccacguuauugaagaggugaugaacaucgugcugauugcccucagcauccuggcuauucuuaaggggcuguacaauaucgccacaugcggacucaucggccuggucacguuccuucugcucuccgggagaucuuguagcaugaccuauaaaggaguguacgaacugcagacacuggagcucaacaugaauacccugaacaugugcaugccucuuuccuguacaaagaauaacucucaucacuauauuaugguuggcaaugaaaccgggcuggagcucacacugaccaacacgagccuucugcaucacaaauuuugcaaucucuccgacgcgcauaagaaaaaccuguacgaucacacccugaugucuaucauuagcacauuccaccucuccaucccgaauuuuaaccaguaugaggcuaugagcugugacuucaauggaggcaagauuaccgugcaguacaaccugucucauuccuaugccaucgaugccgcuaaucacugcggcacagucgccaacggggugcuucaaaccuuuaugcggauggcuuggggaggcagcuacauugcccuggacucugggcgcggaaagugggauuguaucaugacguccuaccaguaucucaucauucagaacacaaccugggaagaccauugccaguucagcagacccucuccuaucggcuaccuggggcuucugucccaacggacacgcgauauuuauaucagcagacggcgcagaggaaccuuuaccuggacacucuccgacucugagggcaaugaaacgcccggcggguacugucugacccgguggaugcugauugaggcggagcucaaaugcuucggaaacacagccguugcuaaguguaaugaaaaacacgaugaggaauuuugcgacaugcugcgccuuuucgauuuuugcaagcaggccaucagacggcugaaagcuccugcccagaugagcauccagcucauuaacaaggcggugaaugcccugaucaacgaccaacuuauuaugaagaaucaucugcgcgauaucaugggcauucccuauuguaacuacuccaaauauugcuaccucaaucacaccagcacagggagaaccucucugccucgguguugccuggucuccaacggaagcuaccucaaugagacgcacuucucugacgacaucgaacagcaggcugauaacaugaucacagagaugcugcaaaaggaguaucuugaccgccagggcaaaaccccgcuggggcucguggaucuguucguguuuagcaccuccuucuaccugauuucuaucuuucuucaucucgucaagauucccacacacagacauaucguuggaaaaccuugucccaagccucaccggcugaaucacaugggcauuugcagcuguggccuguauaaacagcccggggugccggugagauggaagcgcugaggacuaguuauaagacugacuagcccgaugggccucccaacgggcccuccuccccuccuugcaccgagauuaaucaaaggcucuuuucagagccaccaaaaaaaaaaaaaaaaaaaaaaaaaaaaaaaaaaaaaaaaaaaaaaaaaaaaaaaaaaaaaaaaagaauu

SEQ ID NO: 27771 - RNA, 1658 nt, Artificial Sequence
  mRNA product Design i-3 (hSL-A64-N5) comprising derived and/or modified sequence from LASV(G1180-SLE-2010;Clade IV)__AIT17168__GPCmut4 (opt5)
aggagaaagcuuaccaugggccagaucgugaccuucuuucaagaggucccccacguuauugaagaggugaugaacaucgugcugauugcccucagcauccuggcuguccuuaaggggcuguacaauuucgccacaugcggacucgugggccugcuuacguuucugcuccugugugggagauccugcaccgcgucucgguauaaaggaguuuacgaacugcagacacucgagcugaacauggaaacccuuaauauguguaugccucugagcugcacaaagaacaauucccaucacuauauuauggugggcaacgagaccgggcucgagcugacacuuaccaauacgucuaucaucaaccauaaauucuguaaucugagcgacgcucacaagaaaaaccucuacgaucaugcccugauguccauuaucucuaccuuucaccugagcauuccgaauuucaaccaguaugaagccauguccugcgacuuuaauggaggcaagaucagcguccaguacaaccucucucacuccuaugcuggcgaugccgcuaaucauugugggacaguggccaacggaguucugcaaaccuucaugcgcauggcguggggcgggagcuacauugcccuugacucuggacacggcuccugggauugcaucaugacaagcuaccaguaucugauuauccagaacaccacgugggaggaccauugucaguuuucuagacccuccccuaucggguaccucggacugcuuagccaacggacacgcgauauuuauaucuccagacggcgcagaggcaccuucacauggacccugucugacagcgaaggcaaggauacccccgggggauacugccucacacgguggaugcugauugaggcugagcugaaauguuuuggcaauacggccguggcuaagugcaacgaaaaacacgacgaggaguucugcgauaugcuccgccuguuugacuucuguaagcaggccauccagagacuuaaagcgccugcccagauguccauucaacugaucaauaaggcugucaacgcccucaucaaugaucagcugauuaugaagaaccaccuucgggacaucauggggauucccuauugcaauuacagcaaauauuguuaccugaaccauaccacaaccggaaagacaucucucccuaaaugcugucugguguccaauggcagcuaccugaacgaaacccacuucucugacgauaucgaacagcaagcugacaauaugauuacggagaugcuccagaaggaguauauggaacgccaggggaaaacaccgcugggacuuguggaucuguuugucuucagcaccuccuuuuaccucaucucuaucuuccugcaucugguuaagauucccacccacagacauaucgugggcaaaagcugcccuaagccccaccggcuuaaccacaugggcauuuguuccugcgggcucuauaagcagccuggagugcccgucaaauggaagcgcugaggacuaguuauaagacugacuagcccgaugggccucccaacgggcccuccuccccuccuugcaccgagauuaaucaaaggcucuuuucagagccaccaaaaaaaaaaaaaaaaaaaaaaaaaaaaaaaaaaaaaaaaaaaaaaaaaaaaaaaaaaaaaaaaagaauu

SEQ ID NO: 27772 - RNA, 1658 nt, Artificial Sequence
  mRNA product Design i-3 (hSL-A64-N5) comprising derived and/or modified sequence from LASV(G1442-SLE-2011;Clade IV)__AIT17180__GPCmut4 (opt5)
aggagaaagcuuaccaugggccagaucgugaccuucuuucaagaggucccccacguuauugaagaggugaugaacaucgugcugauugcccucagcauccuggcuguccuuaaggggcuguacaauguggccacaugcggacucauuggccugguuacguuccuucugcucugugggagauccugcaccacaacccuguauaaaggaguguacgaacugcagacacucgagcugaacauggaaacccuuaauauguguaugccucugucuugcacaaagaacaauagccaucacuauauccgggucggcaacgagaccgggcucgagcugacgcuuaccaauacauccaucauuaaccauaaauuuuguaaucugucugacgcgcacaagaaaaaccucuacgaucaugcucugaugagcaucauuuccaccuuccaccugucuaucccgaauuuuaaccaguaugaagccaugagcugcgacuucaauggaggcaagauuuccgugcaguacaaccucagccacucuuaugccggcgaugcugccaaucauugugggacaguugcuaacggagugcugcaaaccuuuaugcgcauggccuggggcggguccuacaucgcgcuugacagcggaagaggcaacugggauugcauuaugacgucuuaccaguaucugaucauccagaauacaaccugggacgaucacugucaguucucccggcccagcccuauuggguaccucggacugcuuucucaacgcacaagagacgucuauaucucccggcgcagacggggcaccuuuaccuggacacugagcgauuccgagggcaaggacacgcccgggggauacugccucacccgcuggaugcugauugaagccgagcugaaauguuucggcaacacagcuguggccaagugcaaugagaaacaugaugaagaguuuugcgacaugcucagacuguucgauuuuuguaagcaggcuauccagcggcuuaaagccccugcgcagaugucuauucaacugaucaacaaggccgugaaugcucucaucaacgaccagcugauuaugaagaaucaccuucgcgacaucauggggauucccuauugcaacuacagcaaauauuguuaccugaauaacaccgccacaggaaagaccucccucccuaaaugcugucugaucagcaauggcucuuaccugaacgaaacgcacuucuccgaugacauugagcaggaagcugauaauaugaucacagagaugcuccaaaaggaguauauggaaagacaggggaaaaccccgcugggacuugucgaccuguucguuuuuagcaccucuuucuaccucaucagcauuuuucugcaucuggugaagauccccacacaccggcauauugugggcaaauccugcccuaagccccaccgccuuaaccauaugggcaucuguucuugcgggcucuauaagcagccuggaguccccgugagauggaaacggugaggacuaguuauaagacugacuagcccgaugggccucccaacgggcccuccuccccuccuugcaccgagauuaaucaaaggcucuuuucagagccaccaaaaaaaaaaaaaaaaaaaaaaaaaaaaaaaaaaaaaaaaaaaaaaaaaaaaaaaaaaaaaaaaagaauu

SEQ ID NO: 27773 - RNA, 1658 nt, Artificial Sequence
  mRNA product Design i-3 (hSL-A64-N5) comprising derived and/or modified sequence from LASV(G3010-SLE-2013;Clade IV)__AIT17344__GPCmut4 (opt5)
aggagaaagcuuaccaugggccagaucgugaccuucuuucaagaggucccccacguuauugaagaggugaugaacaucgugcugauugcccucagcauccuggcuguccuuaaggggcuguacaauuucgccacaugcggacucgugggccugguuacguuucuucugcucugugggagauccugcaccacaucucuguauaaaggaguguacgaacugcagacccucgagcugaacauggaaacacuuaauauguguaugccucugagcugcaccaagaacaauucccaucacuauauuauggucggcaacgagacagggcucgagcugacccuuacgaauaccucuaucaucaaccauaaauucuguaaucugagcgacgcgcacaagaaaaaccucuacaaucaugcucugauguccauuaucucuacauuucaccugagcauuccgaacuucaaucaguaugaagccauguccugcgauuuuaacggaggcaagaucagcgugcaguacaaucucucucacuccuaugccggcgacgcugccagccauugugggaccguugcuaacggagugcugcaaacauucaugcggauggccuggggcgggucuuacauugcgcuugauuccggauacggcaagugggacugcaucaugaccagcuaucaguaccugauuauccagaacacgacaugggaggaucacugucaguuuucucgccccuccccuaucggguaucucggacugcuuagccaaagaacccgggacauuuacaucucccgcagacggcgcggcacauucaccuggacccugucugauagcgaaggcaaagacacacccgggggauauugccucacgagauggaugcugauugaggccgagcugaaguguuuuggcaauaccgcugucgccaaaugcaacgaaaagcaugaugaggaguucugcgacaugcuccggcuguuugauuucuguaaacaggcuauccagcgccuuaagaccccugcccagauguccauucaacugaucaauaaggcggugaacgcccucaucaaugaccagcugauuaugaaaaaccaccuuagagauaucauggggauucccuacugcaauuauagcaaguacuguuaccugaaccacacaacaaccggaaaaacgucucucccuaagugcugucugguguccaauggcagcuaucugaacgaaacacauuucucugacgacaucgaacagcaagcugauaauaugauuaccgagaugcuccagaaagaguacauggaacggcaggggaagaccccgcugggacuugucgaccuguuuguuuucagcacauccuuuuaucucaucucuaucuuccugcaccuggugaaaauucccacccaucgccacaucgugggcaagagcugcccuaagccccauagacuuaaccacaugggcauuuguuccugcgggcucuacaaacagccuggaguccccgugcgguggaagcgcugaggacuaguuauaagacugacuagcccgaugggccucccaacgggcccuccuccccuccuugcaccgagauuaaucaaaggcucuuuucagagccaccaaaaaaaaaaaaaaaaaaaaaaaaaaaaaaaaaaaaaaaaaaaaaaaaaaaaaaaaaaaaaaaaagaauu

SEQ ID NO: 27774 - RNA, 1658 nt, Artificial Sequence
  mRNA product Design i-3 (hSL-A64-N5) comprising derived and/or modified sequence from LASV(G502-SLE-2009;Clade IV)__AIT17126__GPCmut4 (opt5)
aggagaaagcuuaccaugggccagaucgugaccuucuuucaagaggucccccacguuauugaagaggugaugaacaucgugcugauugcccucagcauccuggcuguccuuaaggggcuguacaauuucgccacaugcggacucgugggccugcuuacguuucugcuccugugugggagauccugcaccacaggacuguauaaaggcguuuacgaacuccagacccuggagcuuaacauggaaacacugaauauguguaugccucucucuugcaccaagaacaauagccaucacuauauuaugguggggaacgagacaggacuggagcuuacccugacgaauaccuccaucaucaaccauaaauucuguaaucucucugacgcgcacaagaaaaaccuguacgaucaugcucugaugagcauuaucuccacauuucaccucucuauuccgaauuucaaccaguaugaagccaugagcugcgacuuuaauggcggcaagaucuccguccaguacaaccugagccacucuuaugccggggaugcugccgaccauuguggaaccguggcuaauggcguucuucaaacauucaugcggauggccuggggaggguccuacauugcgcuggauagcggccgcgggagaugggacugcaucaugaccucuuaccaguaucucauuauccagaacacgacaugggaggaucacugucaguuuucccggcccagcccuaucggauaccugggccuucugucucaacgcaccagagacauuuauaucucccggcgcagacggggcacauucaccuggacccucagcgauuccgaagggaaggacacacccggaggcuacugccugacgcgcuggaugcugauugaggccgagcucaaauguuuugggaacaccgcuguggccaagugcaaugaaaaacaugaugaggaguucugcgacaugcugagacuuuuugauuucuguaagcaggcuauccagcggcugaaagccccugcgcagaugucuauucaacucaucaacaaggccgucaaugcucugaucaacgaccagcuugugaugaagaaucaucugcgcgacauuaugggaauccccuauugcaacuacagcagauauuguuaccucaaucacacaaccacaggccggaccucccugccuaaaugcugucuggugagcaacgggucuuaccucaaugaaacgcacuucuccgaugacauugaacagcaagccgauaacaugaucacagagaugcugcagaaggaguauauggaacgccagggaaaaaccccgcuuggccuggucgaccucuuuguuuucagcaccucuuuuuaccugauuagcaucuuccugcaccuugugaagauccccacacauagacacauugugggcaaauccugcccuaagccccaucggcucaaucacauggggaucuguucuugcggacuguauaaacagccuggcguccccgugaaguggaagagaugaggacuaguuauaagacugacuagcccgaugggccucccaacgggcccuccuccccuccuugcaccgagauuaaucaaaggcucuuuucagagccaccaaaaaaaaaaaaaaaaaaaaaaaaaaaaaaaaaaaaaaaaaaaaaaaaaaaaaaaaaaaaaaaaagaauu

SEQ ID NO: 27775 - RNA, 1658 nt, Artificial Sequence
  mRNA product Design i-3 (hSL-A64-N5) comprising derived and/or modified sequence from LASV(G733-SLE-2010;Clade IV)__AIT17154__GPCmut4 (opt5)
aggagaaagcuuaccaugggccagaucgugaccuucuuucaagaggucccccacguuauugaagaggugaugaacaucgugcugauugcccucagcauccuggcuguccuuaaggggcuguacaauuucgccacaugcggaauugugggccucguuuccuuucugcuucugugugggagaucuugcacgaccagccucuauaaaggaguguacgaacugcagacacuggagcucaacauggaaacccugaauauguguaugccucuuuccugcacaaagaacaauucucaucacuauaucauggucggcaacgagaccgggcuggagcucacacugaccaauacgagcaucauuaaccauaaauucuguaaucuuuccgacgcgcacaagaaaaaccuguacgaucaugcucucaugucuaucauuagcaccuuucaccuguccaucccgaauuucaaccaguaugaagccaugagcugcgacuuuaauggaggcaagauuucugugcaguacaaccugucccacagcuaugccggcgaugcugccaaucauugugggacaaucgcuaacggaguucuccaaaccuucaugcggauggccuggggcgggucuuacauugcgcuggacuccggacgcgauagaugggacugcaucaugacaagcuaccaguaucuuaucauucagaacaccacgugggaggaucacugucaguuuucucggcccuccccuaucggcuaccuggggcuccugagccaacgcacaagagacauuuauaucucccggcgcagacggggaaccuucacauggacccuuucugauagcgaaggcaaggacacccccggcggguacugccugacacgcuggaugcucauugaggccgagcugaaauguuuuggaaauacggcuguggccaagugcaacgaaaaacaugaugaggaguucugcgacaugcugagacucuuugauuucuguaagcaggcuauccagcggcugaaagccccugcgcagauguccauccaacuuauuaauaaggccgucaacgcucugaucaaugaccagcucauuaugaagaaccaucugcgcgacaucaugggcauucccuauugcaauuacagcaaauauuguuaccuuaaccacaccacaaccgggaagacaucucugccuaaaugcugucucguguccaauggaagcuaccugaacgaaacccacuucucugaugacaucgaacagcaagccgauaauaugaucacggagaugcugcagaaggaguauauggaaagacagggcaaaacaccgcucgggcugguggaccuuuuugucuucagcaccuccuuuuaccugauuucuaucuuccuccaccugguuaagauucccacccaucggcacguggugggaaaaagcugcccuaagccccaucgccugaaccacaugggcaucuguuccugcggccuuuaugggcagccuggaguccccgugaaguggaaaagaugaggacuaguuauaagacugacuagcccgaugggccucccaacgggcccuccuccccuccuugcaccgagauuaaucaaaggcucuuuucagagccaccaaaaaaaaaaaaaaaaaaaaaaaaaaaaaaaaaaaaaaaaaaaaaaaaaaaaaaaaaaaaaaaaagaauu

SEQ ID NO: 27776 - RNA, 1658 nt, Artificial Sequence
  mRNA product Design i-3 (hSL-A64-N5) comprising derived and/or modified sequence from MOPV/LASV reassortant(IGS-1;Clade IV)__AFY05576__GPCmut4 (opt5)
aggagaaagcuuaccaugggccagaucgugaccuucuuucaagaggucccccacguuauugaagaggugaugaacaucgugcugauugcccucagcguccuggcugugcuuaaggggcuguacaauuucgccacaugcggacucguuggccuggugacguuucuucugcucugugggagauccugcaccacaucucuguauaaaggagucuacgaacugcagacccucgagcugaacauggaaacacuuaauauguguaugccucugagcugcaccaagaacaauucccaucacuauaucauggugggcaacgagacagggcucgagcugacccuuacgaauaccucuauuaucaaccauaaauucuguaaucugagcgacgcgcacaagaaaaaccucuacgaucaugcucugauguccaucauuucuacauuucaccugagcaucccgaauuucaaccaguaugaagccauguccugcgacuuuaauggaggcaagauuagcguucaguacaaccucucucacuccuaugccggcgaugcugccaaucauugugggaccguggcuaacggaguccugcaaacauucaugcggauggccuggggcgggagcuacaucgcgcuugacucuggacgcggcaacugggauugcauuaugaccuccuaccaguaucugaucauucagaauacgacaugggaggaccacugucaguuuagcagacccucuccuaucggguaccucggacugcuuucccaacggacccgcgauaucuauauuagcagacggcgcagaggcacauucaccuggacccuguccgacucugaaggcgaggauacacccgggggauacugccucacgcgguggaugcugaucgaggccgaacugaaguguuuuggcaacaccgcuguggccaaaugcaaugagaagcaugacgaagaguucugcgauaugcuccgccuguuugacuucuguaaacaggcuauucagagacuuaaggccccugcgcagaugagcauccaacugauuaacaaagccgugaaugcucucaucaacgaucagcugaucaugaagaaucaccuucgggacauuauggggauccccuauugcaacuacuccaaguauuguuaccugaaucacacaaccacaggacgcaccagccucccuaaaugcugucuggucucuaacggcuccuaccugaaugaaacgcauuucagcgacgauauugagcagcaagccgacaacaugaucacagagaugcuccagaaggaauauauggagagacaggggaaaaccccgcugggacuuguugaucuguuuguguucucuaccagcuuuuaccucauuuccaucuuccugcaccuggugaagauccccacacaucggcacauugucggcaaaucuugcccuaagccccaucgccuuaaucacaugggcaucuguagcugcgggcucuauaaacagccuggagugcccguuaaguggaagagaugaggacuaguuauaagacugacuagcccgaugggccucccaacgggcccuccuccccuccuugcaccgagauuaaucaaaggcucuuuucagagccaccaaaaaaaaaaaaaaaaaaaaaaaaaaaaaaaaaaaaaaaaaaaaaaaaaaaaaaaaaaaaaaaaagaauu

SEQ ID NO: 27777 - RNA, 1658 nt, Artificial Sequence
  mRNA product Design i-3 (hSL-A64-N5) comprising derived and/or modified sequence from LASV(LM765-SLE-2012;Clade IV)__AIT17814__GPCmut4 (opt5)
aggagaaagcuuaccaugggccagaucgugaccuucuuucaagaggucccccacguuauugaagaggugaugaacaucgugcugauugcccucagcauccuggcuguccuuaaggggcuguacaauuucgccacaugcggacucgugggccugguuacguuucuucugcucugugggagauccugcaccacaucucuguauaaaggaguguacgaacugcagacccucgagcugaacauggaaacacuuaauauguguaugccucugagcugcaccaagaacaauucccaucacuauauuauggucggcaacgagacagggcucgagcugacccuuacgaauaccucuaucaucgaccauaaauucuguaaccugagcgaugcgcaccggaagaaucucuacgaccaugcucugauguccauuaucucuacauuucaccugagcauuccgaacuucaaucaguaugaagccauguccugcgauuuuaacggaggcaaaaucagcgugcaguacaaucucucucacuccuaugccaaggacgcugccgaucauuguggcaccguugcuaacggggugcugcaaacauucaugcgcauggccuggggaggcagcuacauugcgcuugacucugggagaggacggugggauugcaucaugaccuccuaccaguaucugauuauccagaauacgacaugggaggaccacugucaguuuagccgccccucuccuaucggcuaccucgggcugcuuucccaaagaacccgggauauuuauaucagccgcagacggcgcggaacauucaccuggacccuguccgacucugaaggcaaggauacacccggcggguacugccucacgagauggaugcugauugaggccgagcugaaauguuuuggaaacaccgcugucgccaagugcaacgaaaaacaugacgaggaguucugcgauaugcuccggcuguuugacuucuguaagcaggcuauccagcgccuuaaagccccugcgcagaugagcauucaacugaucaauaaggccgugaacgcucucaucaaugaccagcugauuaugaagaaccaccuuagagauaucaugggcauucccuauugcaauuacuccaaauauuguuaccugaaccacacaaccacagggaagaccagccucccuaaaugcugucuggugucuaauggauccuaccugaacgaaacgcauuucagcgacgauaucgaacagcaagccgacaauaugauuacagagaugcuccagaaggaguauauggaacggcagggcaaaaccccgcuggggcuugucgaucuguuuguuuucucuaccagcuuuuaccucaucuccaucuuccugcaccuggugaagauucccacacaucgccacaucgugggaaaaccuugccccaagccucauagacuuaaccacaugggcauuuguucuugcggccucuauaagcagcccggggucccggugaaauggaagcggugaggacuaguuauaagacugacuagcccgaugggccucccaacgggcccuccuccccuccuugcaccgagauuaaucaaaggcucuuuucagagccaccaaaaaaaaaaaaaaaaaaaaaaaaaaaaaaaaaaaaaaaaaaaaaaaaaaaaaaaaaaaaaaaaagaauu

SEQ ID NO: 27778 - RNA, 1658 nt, Artificial Sequence
  mRNA product Design i-3 (hSL-A64-N5) comprising derived and/or modified sequence from LASV(LM776-SLE-2012;Clade IV)__AIT17824__GPCmut4 (opt5)
aggagaaagcuuaccaugggccagaucgugaccuucuuucaagaggucccccacguuauugaagaggugaugaacaucgugcugauugcccucagcauccuggcuguccuuaaggggcuguacaauuucgccacaugcggacucgugggccugguuacguuucuucugcucugugggagauccugcaccacaucuguguauaaaggagucuacgaacugcagacccuggagcucaacauggaaacacugaauauguguaugccucuuagcugcaccaagaacaauucccaucacuauauuauggugggcaacgagacagggcuggagcucacccugacgaauaccucuaucaucaaccauaaauucuguaaucuuagcgacgcgcacaagaaaaaccuguacgaucaugcucucauguccauuaucucuacauuucaccugagcauuccgaauuucaaccaguaugaagccauguccugcgacuuuaauggaggcaagaucagcguucaguacaaccugucucacuccuaugccggcgaugcugccaaucauugugggaccguggcuaacggaguccuccaaacauucaugcggauggccuggggcgggagcuacauugcgcuggacucuggacacggcaagugggauugcaucaugaccuccuaccaguaucuuauuauccagaacacgacaugggaggaccauugucaguuuagccgccccucuccuaucggguaccugggacuccugucccaaagaacccgggauauuuauaucagccgcagacggcgcggcacauucaccuggacccuuuccgacucugaaggcaaagauacacccgggggauacugccugacgagauggaugcucauugaggccgagcugaaguguuuuggcaauaccgcuguggccaaaugcaacgaaaagcacgacgaggaguucugcgauaugcugcggcucuuugacuucuguaaacaggcuauccagcgccugaaggccccugcgcagaugagcauucaacuuaucaauaaggccgugaacgcucugaucaaugaucagcucauuaugaaaaaccaccugagagacaucauggggauucccuauugcaauuacuccaaguauuguuaccuuaaccauacaaccacaggaaaaaccagccugccuaagugcugucucgucucuaauggcuccuaccugaacgaaacgcacuucagcgacgauaucgaacagcaagccgacaauaugauuacagagaugcugcagaaagaguauauggaacggcaggggaagaccccgcucggacugguugaucuuuuuguguucucuaccagcuuuuaccugaucuccaucuuccuccaucuggugaaaauucccacacaccgccauaucgucggcaagucuugcccuaagccccacagacugaaccacaugggcauuuguagcugcgggcuuuauaaacagccuggagugcccguucgguggaagcgcugaggacuaguuauaagacugacuagcccgaugggccucccaacgggcccuccuccccuccuugcaccgagauuaaucaaaggcucuuuucagagccaccaaaaaaaaaaaaaaaaaaaaaaaaaaaaaaaaaaaaaaaaaaaaaaaaaaaaaaaaaaaaaaaaagaauu

SEQ ID NO: 27779 - RNA, 1658 nt, Artificial Sequence
  mRNA product Design i-3 (hSL-A64-N5) comprising derived and/or modified sequence from LASV(Mad39;Clade IV)__ANH09722__GPCmut4 (opt5)
aggagaaagcuuaccaugggccagaucgugaccuucuuucaagaggucccccacguuauugaagaggugaugaacaucgugcugauugcccucagcauccuggcuguccuuaaggggcuguacaauguggccacaugcggacucauuggccugguuacguuccuucugcucugugggagauccugcaccacaacccuguauaaaggaguguacgaacugcaggcgcucgagcugaacauggaaacacuuaauauguguaugccucugucuugcaccaagaacaauagccaucacuauauccgggucggcaacgagacagggcucgagcugacccuuacgaauaccucccugaucaaccauaaauuuuguaaucucucugacgcucacaagaaaaaccuguacgaucaugcccugaugagcauuaucuccacauuccaccucucuauuccgaauuuuaaccaguaugaagccaugagcugcgacuucaaugauggaaagaucuccgugcaguacaaccugagccacaccuaugcuggcgacacagccaaucauuguggcaccguugcuaacggggugcuucaaacguuuaugcgcauggccuggggaggcucuuacauugcgcuggauuccgggagaggaggcugggacugcaucaugacaagcuaccaguaucucauuauccagaacaccacaugggaggaucacugucaguucucucggcccuccccuaucggguaccugggacuucugagccaacgcaccagagacauuuauaucucucggcgcagacggggcaccuuuacauggacgcucuccgauagcgaaggcaaggacacccccgggggauacugccugacacgcuggaugcugauugaggccgagcucaaauguuucggcaauaccgcugucgccaagugcaacgaaaaacaugaugaggaauuuugcgacaugcugagacuuuucgauuuuuguaagcaggcuauccagcggcugaaagccccugcgcagauguccauucaacucaucaauaaggccgugaacgcucugaucaaugaccagcuuauuaugaagaaccaucugcgcgacaucauggggauucccuauugcaauuacucuaaauauuguuaccucaaccacacagugaccggaaagacgagccugccuaaaugcugucuggucuccaauggcagcuaccucaacgagacacacuucucugaugacaucgaacagcaagccgauaauaugauuaccgagaugcugcagaaggaguauauggaaagacaggggaaaaccccgcuuggacugguugaccucuucguguuuuccaccagcuucuaccugaucucuaucuuucugcaccuugugaagauucccacacaucggcacgucgugggcaaaccuugccccaagccucaucgccucaaccacaugggcaucuguagcugcggguucuauaagcagcccggaguuccggugagauggaaacggugaggacuaguuauaagacugacuagcccgaugggccucccaacgggcccuccuccccuccuugcaccgagauuaaucaaaggcucuuuucagagccaccaaaaaaaaaaaaaaaaaaaaaaaaaaaaaaaaaaaaaaaaaaaaaaaaaaaaaaaaaaaaaaaaagaauu

SEQ ID NO: 27780 - RNA, 1658 nt, Artificial Sequence
  mRNA product Design i-3 (hSL-A64-N5) comprising derived and/or modified sequence from LASV(Z0947-SLE-2011;Clade IV)__AIT17840__GPCmut4 (opt5)
aggagaaagcuuaccaugggccagaucgugaccuucuuucaagaggucccccacguuauugaagaggugaugaacaucgugcugauugcccucagcauccuggcuguccuuaaggggcuguacaauuucgccacaugcggacucgugggccugguuacguuucuucugcucugugggagauccugcaccauuucucuguauaaaggaguguacgaacugcagacacucgagcugaacauggaaacccuuaauauguguaugccucugagcugcacaaagaacaauucccaucacuauaucauggucggcaacgagaccgggcucgagcugacacuuaccaauacgucuaucauuaaccauaaauucuguaaucugagcgacgcgcacaagaaaaaccucuacgaucaugcucugauguccaucauuucuaccuuucaccugagcaucccgaauuucaaccaguaugaagccauguccugcgacuuuaauggaggcaagauuagcgugcaguacaaccucucucacuccuaugccggcgaugcugccaaucauugugggacaguugcuaacggagugcugcaaaccuucaugcggauggccuggggcgggagcuacaucgcgcuugacucuggacgcgauagaugggacugcauuaugacauccuaccaguaucugaucauccagaacaccacgugggaggaucacugucaguuuagccggcccucuccuauuggcuaccucgggcugcuuucccaacgcacaagagacaucuauauuagccggcgcagacggggaaccuucacauggacccuguccgauucugaaggcaaggacacccccggcggguacugccucacacgcuggaugcugaucgaggccgagcugaaauguuuuggaaauacggcugucgccaagugcaacgaaaaacaugaugaggaguucugcgacaugcucagacuguuugauuucuguaagcaggcuauucagcggcuuaaagccccugcgcagaugagcauccaacugaucaauaaggccgugaacgcucucauuaaugaccagcugaucaugaagaaccaccuucgcgacauuaugggcauccccuauugcaauuacuccaaauauuguuaccugaaccacaccacaaccgggaagacaagccucccuaaaugcugucuggugucuaauggauccuaccugaacgaaacccauuucagcgaugacauugaacagcaagccgauaauaugaucacggagaugcuccagaaggaguauauggaaagacagggcaaaacaccgcuggggcuugucgaccuguuuguuuucucuaccagcuuuuaccucaucuccauuuuccugcaccuggugaagauccccacccaucggcacauugugggaaaaccuugccccaagccucaucgccuuaaccacaugggcaucuguucuugcggccucuauaagcagcccggggucccggugaaauggaagagaugaggacuaguuauaagacugacuagcccgaugggccucccaacgggcccuccuccccuccuugcaccgagauuaaucaaaggcucuuuucagagccaccaaaaaaaaaaaaaaaaaaaaaaaaaaaaaaaaaaaaaaaaaaaaaaaaaaaaaaaaaaaaaaaaagaauu

SEQ ID NO: 27781 - RNA, 1689 nt, Artificial Sequence
  mRNA product Design i-3 (hSL-A100) comprising derived and/or modified sequence from LASV(Josiah;Clade IV)__NP_694870__GPCmut4 (opt1)
aggagaaagcuuaccaugggccagaucgugaccuucuuccaggaggucccccacgugaucgaggaggugaugaacaucguccugaucgcccucagcgugcuggccgugcugaaggggcucuacaacuucgcgaccugcggccuggucgggcuggugacguuccuccugcugugcggccgcuccugcaccaccagccucuacaaggggguguacgagcugcagacccuggagcucaacauggagacgcugaacaugugcaugccgcuguccugcaccaagaacaacagccaccacuacaucauggucggcaacgagaccggccucgagcugacgcugaccaacaccuccaucaucaaccacaaguucugcaaccucagcgacgcccacaagaagaaccuguacgaccacgcccugauguccaucaucagcaccuuccaccucuccauccccaacuucaaccaguacgaggccaugagcugcgacuucaacgggggcaagaucuccgugcaguacaaccugagccacuccuacgccggggacgcggccaaccacugcggcacgguggccaacgggguccugcagaccuucaugcggauggccuggggcggcagcuacaucgcgcucgacuccgggcgcggcaacugggacugcaucaugaccagcuaccaguaccugaucauccagaacaccacgugggaggaccacugccaguucucccggcccagccccaucggguaccugggccuccugucccagcgcacccgggacaucuacaucagccgccggcgccggggcaccuucaccuggacgcugagcgacuccgaggggaaggacaccccgggcggguacugccugacccgcuggaugcucaucgaggccgagcugaagugcuucggcaacaccgccguggccaagugcaacgagaagcacgacgaggaguucugcgacaugcugcggcuguucgacuucugcaagcaggccauccagcgccugaaggcgcccgcccagaugagcauccagcugaucaacaaggccgugaacgcccucaucaacgaccagcugaucaugaagaaccaccuccgggacaucauggggauccccuacugcaacuacuccaaguacugcuaccucaaccacacgaccaccggccgcaccagccugcccaagugcugccuggucuccaacggcagcuaccucaacgagacgcacuucuccgacgacaucgagcagcaggccgacaacaugaucaccgagaugcugcagaaggaguacauggagcggcaggggaagacgccccugggccucguggaccuguucguguucagcaccuccuucuaccugaucagcaucuuccugcaccucgucaagaucccgacccaccgccacaucguggggaaguccugccccaagccccaccggcugaaccacaugggcaucugcagcugcgggcuguacaagcagcccggcgugccggucaaguggaagcgcugaggacuaguuauaagacugacuagcccgaugggccucccaacgggcccuccuccccuccuugcaccgagauuaaucaaaggcucuuuucagagccaccaaaaaaaaaaaaaaaaaaaaaaaaaaaaaaaaaaaaaaaaaaaaaaaaaaaaaaaaaaaaaaaaaaaaaaaaaaaaaaaaaaaaaaaaaaaaaaaaaaaaa

SEQ ID NO: 27782 - RNA, 1686 nt, Artificial Sequence
  mRNA product Design i-3 (hSL-A100) comprising derived and/or modified sequence from LASV(LP;Clade I)__AAF86701__GPCmut4 (opt1)
aggagaaagcuuaccaugggccagaucaucaccuucuuccaggaggugccccacgucaucgaggaggugaugaacaucgugcugaucgcccucagccugcuggccauccucaaggggcuguacaacaucgcgaccugcggcaucaucgggcuggucgccuuccucuuccugugcggcaaguccugcagccugacgcucaagggcggguacgagcugcagacccuggagcucaacauggagacccugaacaugugcaugccgcuguccugcacgaagaacagcucccaccacuacauccgcgugggcaacgagaccgggcucgagcugacccugaccaacacgagcaucaucaaccacaaguucugcaaccucuccgacgcccacaagaagaaccuguacgaccacgcccugaugagcaucaucuccaccuuccaccucagcauccccaacuucaaccaguacgaggccauguccugcgacuucaacggcgggaagaucagcgugcaguacaaccugucccacagcuacgcgggcgacgccgccgagcacugcgggaccgucgccaacggcgugcugcagaccuucaugcggauggcguggggcgggcgcuacaucgcccucgacuccggcaaggggaacugggacugcaucaugacgagcuaccaguaccugaucauccagaacaccaccugggaggaccacugccaguucucccggcccagccccaucggcuaccugggccuccugucccagcgcacccgggacaucuacaucagccgccggcgccgggggacguucaccuggacccugagcgacuccgagggcaacgagacccccgggggcuacugccugacgcgcuggaugcucaucgaggccgagcugaagugcuucgggaacaccgccguggccaagugcaacgagaagcacgacgaggaguucugcgacaugcugcggcuguucgacuucugcaagcaggcgauccgccggcugaaggcccccgcccagaugagcauccagcugaucaacaaggccgucaacgcccucaucaacgaccagcugaucaugaagaaccaccuccgcgacaucaugggcauccccuacugcaacuacuccaaguacugcuaccucaaccacaccagcuccggccggaccagccugcccaagugcugccugaucuccaacgggagcuaccucaacgagacgcaguucuccgacgacaucgagcagcaggcggacaacaugaucaccgagaugcugcagaaggaguacaucgagcgccagggcaagaccccgcuggggcucguggacaucuucaucuucagcaccuccuucuaccugaucagcaucuuccugcaccugaucaagaucccgacgcaccggcacaucgugggcaagcccugccccaagccccaccgccucaaccacaugggggucugcuccugcggccuguacaagcacccgggcgugcccaccaaguggaagcggugaggacuaguuauaagacugacuagcccgaugggccucccaacgggcccuccuccccuccuugcaccgagauuaaucaaaggcucuuuucagagccaccaaaaaaaaaaaaaaaaaaaaaaaaaaaaaaaaaaaaaaaaaaaaaaaaaaaaaaaaaaaaaaaaaaaaaaaaaaaaaaaaaaaaaaaaaaaaaaaaaaaaa

SEQ ID NO: 27783 - RNA, 1686 nt, Artificial Sequence
  mRNA product Design i-3 (hSL-A100) comprising derived and/or modified sequence from LASV(803213;Clade II)__AAF86703__GPCmut4 (opt1)
aggagaaagcuuaccaugggccagaucaucaccuucuuccaggaggugccccacgucaucgaggaggugaugaacaucgugcugaucgcccucagccugcuggccauccucaaggggaucuacaacgucgcgaccugcggccuguucgggcugaucuccuuccuccugcugugcggccgcagcugcuccgugacguacaaggggguguacgagcuccagacccuggagcugaacauggccaaccucaacaugugcaugccgcugagcugcaccaagaacaacucccaccacuacaucauggucggcaacgagacgggccuggagcucacccugaccaacaccagcaucaucaaccacaaguucugcaaccuguccgacgcccacaagaagaaccucuacgaccacgcccugaugagcaucaucuccacguuccaccugagcauccccaacuucaaccaguacgaggccauguccugcgacuucaacgggggcaagaucagcgugcaguacaaccucucccacagcuucgcgguggacgccgccaaccacugcgggaccaucgccaacggcguccugcagaccuucaugcggauggcguggggcggguccuacaucgcccuggacagcggcaaggggaacugggacugcaucaugaccuccuaccaguaccucaucauccagaacacgaccugggaggaccacugccaguucagccgccccucccccaucggcuaccuggggcugcucagccagcggacccgcgacaucuacaucagccggcgccgccggggcaccuucacguggacccucuccgacagcgagggcaacgaggcccccgggggcuacugccugacccgguggaugcugaucgaggccgagcucaagugcuucgggaacaccgccguggcgaagugcaacgagaagcacgacgaggaguucugcgacaugcugcgccuguucgacuucugcaagcaggccaucaagcggcucaagacgcccgcccagauguccauccagcugaucaacaaggccgugaacgcccugaucaacgaccagcucaucaugaagaaccaccuccgcgacaucaugggcauccccuacugcaacuacagccgguacugcuaccugaaccacaccgucaccgggaagaccucccugccccgcugcugccuggugagcaacggcuccuaccugaacgagacgcacuucagcgacgacaucgagcagcaggcggacaacaugaucaccgagaugcuccagaaggaguacauggaccggcagggcaagaccccgcuggggcugguggaccucuucgucuucuccaccagcuucuaccugaucuccaucuuccugcaccuggugaagaucccgacgcaccgccacaucgugggcaagcccugccccaagccccaccggcucaaccacauggggaucugcagcugcggccuguacaagcacccggggguccccgugaaguggaagcgcugaggacuaguuauaagacugacuagcccgaugggccucccaacgggcccuccuccccuccuugcaccgagauuaaucaaaggcucuuuucagagccaccaaaaaaaaaaaaaaaaaaaaaaaaaaaaaaaaaaaaaaaaaaaaaaaaaaaaaaaaaaaaaaaaaaaaaaaaaaaaaaaaaaaaaaaaaaaaaaaaaaaaa

SEQ ID NO: 27784 - RNA, 1686 nt, Artificial Sequence
  mRNA product Design i-3 (hSL-A100) comprising derived and/or modified sequence from LASV(GA391;Clade III)__CAA36645__GPCmut4 (opt1)
aggagaaagcuuaccaugggccagaucgugaccuucuuccaggaggucccccacgugaucgaggaggugaugaacaucguccugaucgcccucagcauccuggccauccugaaggggcucuacaacguggcgaccugcggccugaucgggcuggugacguuccuccugcuguccggccgcagcugcucccucaucuacaaggggaccuacgagcugcagacccuggagcucaacauggagacccugaacaugugcaugccgcugagcugcaccaagaacaacucccaccacuacauccgggucggcaacgagaccggccucgagcugacccugacgaacaccagcauccucaaccacaaguucugcaaccuguccgacgcccacaagcgcaaccuguacgaccacagccucauguccaucaucagcaccuuccaccuguccauccccaacuucaaccaguacgaggccaugagcugcgacuucaacgggggcaagaucaccgugcaguacaaccugucccacagcuucgccguggacgccgcggggcacugcggcacgcucgccaacgggguccugcagaccuucaugcggauggccuggggcggcuccuacaucgcccuggacagcgggcgcggcaacugggacugcaucaugaccuccuaccaguaccucaucauccagaacaccacgugggacgaccacugccaguucagccggcccucccccaucggguaccugggccugcucagccagcgcacccgggacaucuacaucagccgccggcgccggggcaccuucaccuggacgcucuccgacagcgaggggaacgagaccccgggcggguacugccugacccgcuggaugcugaucgaggcggagcucaagugcuucggcaacaccgccguggccaagugcaacgagaagcacgacgaggaguucugcgacaugcugcggcuguucgacuucugcaagcaggccauccgccggcucaagacgcccgcccagauguccauccagcugaucaacaaggcggugaacgcccugaucaacgaccagcucaucaugaagaaccaccuccgcgacaucauggggauccccuacugcaacuacagccgguacugcuaccugaaccacaccuccaccggcaagaccagccugccccgcugcugccugaucuccaacggcagcuaccugaacgagacgaaguucuccgacgacaucgagcagcaggccgacaacaugaucaccgagaugcuccagaaggaguacaucgaccggcaggggaagacgccccugggccuggucgaccuguucguguucagcaccuccuucuaccucaucagcaucuuccugcaccuggugaagaucccgacccaccgccacaucgucgggaagcccugccccaagccccaccggcucaaccacaugggcaucugcuccugcgggcuguacaagcagccgggcgugcccgugcgcuggaagcggugaggacuaguuauaagacugacuagcccgaugggccucccaacgggcccuccuccccuccuugcaccgagauuaaucaaaggcucuuuucagagccaccaaaaaaaaaaaaaaaaaaaaaaaaaaaaaaaaaaaaaaaaaaaaaaaaaaaaaaaaaaaaaaaaaaaaaaaaaaaaaaaaaaaaaaaaaaaaaaaaaaaaa

SEQ ID NO: 27785 - RNA, 1689 nt, Artificial Sequence
  mRNA product Design i-3 (hSL-A100) comprising derived and/or modified sequence from LASV(AV;Clade V)__CCA30314__GPCmut4 (opt1)
aggagaaagcuuaccaugggccagaucgugaccuucuuccaggaggucccccacgugaucgaggaggugaugaacaucguccugaucgcccucagcauccuggccgugcugaaggggcucuacaacaucgcgaccugcggccugaucgggcugaucacguuccuccugcugugcggccgcuccugcagcuccaaccucuacaaggggguguacgagcugcagagccuggaccucaacauggagacccugaacaugugcaugccgcuguccugcaccaagaacaacagccaccacuacauccgggucggcaacgacacgggccucgagcugacccugaccaacaccuccauccucaaccacaaguucugcaaccugagcgacgcccacaagaaggaccuguacgaccacgcccucauguccaucaucagcacguuccaccuguccauccccaacuucaaccaguacgaggccaugagcugcgacuucaacgggggcaagaucuccgugcaguacaaccugagccacuccuacgccaucgacgcggccaaccacugcgggaccguggccaacggcauccuccagaccuucaugcgcauggccuggggcgggagcuacaucgcgcuggacuccggccgggggaacugggacugcaucaugaccagcuaccaguaccugaucauccagaacacgaccugggagaaccacugccaguucucccgccccagccccaucggcuaccucgggcugcugagccagcggacccgcgacaucuacaucucccggcgccgccggggcaccuucacguggacccugagcgacuccgagggcaacgccacccccgggggcuacugccucacccgguggaugcugaucgaggccgagcugaagugcuucgggaacacggccgucgccaagugcaacgagaagcacgacgaggaguucugcgacaugcuccgccuguucgacuucugcaagcaggcgaucagccggcugaagucccccgcccagaugagcauccagcucaucaacaaggccgugaacgcccugaucaacgaccagcugaucaugaagaaccaccuccgcgacaucaugggcauccccuacugcaacuacuccaaguacugcuaccugaaccacaccaucaccgggaagaccagccugcccaagugcugccucguguccaacggcagcuaccugaacgagacgcacuucuccgacgacaucgagcagcaggccgacaacaugaucaccgagaugcugcagaaggaguacauggagcggcagggcaagaccccgcucgggcuggucgaccuguucguguucagcaccuccuucuaccugaucagcaucuuccuccgccuggugaagaucccgacgcaccggcacaucgucggcaagcccugccccaagccccaccgccugaaccacauggggaucugcuccugcggccucuacaagcagccgggggugcccgugcgguggaagcgcugaggacuaguuauaagacugacuagcccgaugggccucccaacgggcccuccuccccuccuugcaccgagauuaaucaaaggcucuuuucagagccaccaaaaaaaaaaaaaaaaaaaaaaaaaaaaaaaaaaaaaaaaaaaaaaaaaaaaaaaaaaaaaaaaaaaaaaaaaaaaaaaaaaaaaaaaaaaaaaaaaaaaa

SEQ ID NO: 27786 - RNA, 1686 nt, Artificial Sequence
  mRNA product Design i-3 (hSL-A100) comprising derived and/or modified sequence from LASV(Togo/2016/7082;Clade VI)__AMR44577__GPCmut4 (opt1)
aggagaaagcuuaccaugggccagaucaucaccuucuuccaggaggugccccacgucaucgaggaggugaugaacaucgugcugaucgcccucagccugcuggccauccucaagggggucuacaacguggcgaccugcggcaucaucgggcuggugacguuccuguuccucugcggccgcuccugcagccugaucuacaagggguccuacgagcugcagacccucgagcugaacauggagacccugaacaugugcaugccgcucagcugcacgaagaacuccagccaccacuacauccgggucggcaacgagaccggccuggagcugacccucaccaacacguccaucaucaaccacaaguucugcaaccugagcgacgcccacaagcgcaaccuguacgaccacgcccucauguccauccugagcaccuuccaccuguccauccccaacuucaaccaguacgaggccaugagcugcgacuucaacgggggcaagaucuccgugcaguacaaccucagccacgccuacgcgguggacgccgccgagcacugcgggaccgucgccaacggcgugcugcagaccuucaugcggauggcguggggcggguccuacaucgcccuggacagcggccgcgggaacugggacugcaucaugacguccuaccaguaccucaucauccagaacaccaccugggaggaccacugccaguucagccggcccucccccaucggcuaccuggggcugcucagccagcgcacccgggacaucuacaucagccgccggcgccggggcacguucaccuggacccucuccgacagcgagggcaacgagacccccgggggcuacugccugacgcgcuggaugcugaucgaggccgagcucaagugcuucgggaacaccgccguggccaagugcaacgagaagcacgacgaggaguucugcgacaugcugcggcuguucgacuucugcaagcaggcgauccagcgccucaagucccccgcccagaugagcauccagcugaucaacaaggccgucaacgcccugaucaacgaccagcucaucaugaagaaccaccuccgggacaugaugggcauccccuacugcaacuacuccaaguacugcuaccugaaccacaccagcuccgggcgcaccagccugcccaagugcugccugguguccaacggcagcuaccugaacgagacgcacuucuccgacgacaucgagcagcaggccgacaacaugaucaccgagaugcuccagaaggaguacaucgaccggcagggcaagaccccgcuggggcugguggaccucuucgucuucagcaccuccuucuaccugaucagcaucuuccugcaccugaucaagaucccgacgcaccgccacaucgugggcaagcccugccccaagccccaccggcucaaccacauggggaucugcuccugcggccuguacaagcagccgggggugcccacccgcuggaagcggugaggacuaguuauaagacugacuagcccgaugggccucccaacgggcccuccuccccuccuugcaccgagauuaaucaaaggcucuuuucagagccaccaaaaaaaaaaaaaaaaaaaaaaaaaaaaaaaaaaaaaaaaaaaaaaaaaaaaaaaaaaaaaaaaaaaaaaaaaaaaaaaaaaaaaaaaaaaaaaaaaaaaa

SEQ ID NO: 27787 - RNA, 1686 nt, Artificial Sequence
  mRNA product Design i-3 (hSL-A100) comprising derived and/or modified sequence from LASV(KAK-428;Clade n.d. (VII))__ANH09740__GPCmut4 (opt1)
aggagaaagcuuaccaugggccagaucgugaccuucuuccaggaggucccccacgugaucgaggaggugaugaacaucguccugaucgcccucagccugcuggccauccucaaggggcuguacaacuucgcgaccugcggcgugaucgggcugaucacguuccuccugcugugcggccgcuccugcagcgccaccuacaaggggcaguacgagcuccagacccuggagcugaacauggagucccucaacaugugcaugccgcugagcugcacgaagaacaacucccaccacuacauccgggccggcaacaacaccggccuggagcucacccugaccaacacgagcaucaucucccacaaguucugcaaccugagcgacgcccacaagaagaaccucuacgaccacacccugauguccaucaucaccaccuuccaccugagcauccccaacuucaaccaguacgaggccauguccugcgacuucaacgggggcaagaucagcauccaguacaaccucucccacagcuacgcgggggacgccgcccagcacugcggcacgguggccaacgggguccugcagaccuucaugcgcauggcguggggcggcuccuaccuggcccucgacagcgggcggcgcggcugggacugcaucaucuccagcuaccaguaccugaucauccagaacaccaccugggacgaccacugccaguucucccggcccagccccaucggguaccugggcuucgugagccagaagacgcgcgacaucuacaucucccggcgccgccggggcaccuucaccuggacccugagcgacuccgaggggcacgacaugccgggcggguacugccucacgcgguggaugcugaucgaggccgaccugaagugcuucggcaacaccgccguggccaagugcaacgagaagcacgacgaggaguucugcgacauguggcgccucuucgacuucugcaagcaggcgauccagcggcugaaggcccccgcccagaugaacauccagcugaucaacaaggccgucaacgcccucaucaacgaccagcugaugaugaagaaccaccuccgcgacaucauggggauccccuacugcaacuacagcaaguucugcuaccugaacaacaccaccacgggccggaccucccugccccgcugcugccugaucagcaacggcuccuaccucaacgagacccacuucagcgacgacaucgagcagcaggcggacaacaugaucaccgagaugcugcagaaggaguacauggaccggcaggggaagacgccccugggccucguggaccuguucguguucuccaccagcuucuaccugaucaccaucuuccuccaccuggucaagaucccgacccaccgccacaucguggggaagcccugccccaagccccaccggcugaaccacaugggcaucugcuccugcgggcuguacaagcagccgggcgugcccguccgcuggaagcggugaggacuaguuauaagacugacuagcccgaugggccucccaacgggcccuccuccccuccuugcaccgagauuaaucaaaggcucuuuucagagccaccaaaaaaaaaaaaaaaaaaaaaaaaaaaaaaaaaaaaaaaaaaaaaaaaaaaaaaaaaaaaaaaaaaaaaaaaaaaaaaaaaaaaaaaaaaaaaaaaaaaaa

SEQ ID NO: 27788 - RNA, 1686 nt, Artificial Sequence; identical to SEQ ID NO: 27782
  mRNA product Design i-3 (hSL-A100) comprising derived and/or modified sequence from LASV(Pinneo-NIG-1969;Clade I)__AIT17836__GPCmut4 (opt1)

SEQ ID NO: 27789 - RNA, 1686 nt, Artificial Sequence
  mRNA product Design i-3 (hSL-A100) comprising derived and/or modified sequence from LASV(ISTH0009-NIG-2011;Clade II)__AIT17404__GPCmut4 (opt1)
aggagaaagcuuaccaugggccagaucaucaccuucuuccaggaggugccccacgucaucgaggaggugaugaacaucgugcugaucgcccucagccugcuggccauccucaaggggaucuacaacgucgcgaccugcggccuguucgggcugguguccuuccuccugcugugcggccgcagcugcuccacgaccuacaaggggguguacgagcuccagacccuggagcuggacauggccagccucaacaugugcaugccgcuguccugcacgaagaacaacagccaccacuacaucauggucggcaacgagaccggccuggagcucacccugaccaacacguccaucaucaaccacaaguucugcaaccugagcgacgcccacaagaagaaccucuacgaccacgcccugauguccaucaucagcaccuuccaccuguccauccccaacuucaaccaguacgaggccaugagcugcgacuucaacgggggcaagaucuccgugcaguacaaccucagccacgcguacgccguggacgccgccaaccacugcgggaccaucgcgaacggcguccugcagaccuucaugcggauggccuggggcggguccuacaucgcccuggacagcggcaagggguccugggacugcaucaugacgagcuaccaguaccucaucauccagaacaccaccugggaggaccacugccaguucucccgccccagccccaucggcuaccuggggcugcucagccagcggacccgcgacaucuacaucucccggcgccgccggggcacguucaccuggacccucagcgacuccgagggcaacgagacccccgggggcuacugccugacgcgguggaugcugaucgaggccgagcucaagugcuucgggaacaccgccguggcgaagugcaacgagaagcacgacgaggaguucugcgacaugcugcgccuguucgacuucugcaagcaggccauccggcgccucaagacccccgcccagaugagcauccagcugaucaacaaggccgugaacgcccugaucaacgaccagcucaucaugaagaaccaccuccgggacaucaugggcaucccguacugcaacuacuccaaguacugcuaccugaaccacaccgucacggggaagaccagccugccccgcugcugccugguguccaacggcagcuaccugaacgagacccacuucuccgacgacaucgagcagcaggcggacaacaugaucaccgagcuccugcagaaggaguacauggaccggcagggcaagacgccccuggggcucguggaccuguucgucuucagcaccuccuucuaccugaucagcaucuuccugcaccucaucaagaucccgacccaccgccacaucaccggcaagcccugccccaagccccaccggcugaaccacauggggaucugcuccugcggccuguacaagcacccgggggugcccgugaaguggaagcgcugaggacuaguuauaagacugacuagcccgaugggccucccaacgggcccuccuccccuccuugcaccgagauuaaucaaaggcucuuuucagagccaccaaaaaaaaaaaaaaaaaaaaaaaaaaaaaaaaaaaaaaaaaaaaaaaaaaaaaaaaaaaaaaaaaaaaaaaaaaaaaaaaaaaaaaaaaaaaaaaaaaaaa

SEQ ID NO: 27790 - RNA, 1686 nt, Artificial Sequence
  mRNA product Design i-3 (hSL-A100) comprising derived and/or modified sequence from LASV(ISTH2010-NIG-2012;Clade II)__AIT17482__GPCmut4 (opt1)
aggagaaagcuuaccaugggccagaucaucaccuucuuccaggaggugccccacgucaucgaggaggugaugaacaucgugcugaucgcccucagccugcuggccauccucaaggggaucuacaacgucgcgaccugcggccuguucgggcugguguccuuccuccugcugugcggccgcagcugcuccacgaccuacaaggggguguacgagcuccagacccuggagcuggacauggccagccucaacaugugcaugccgcuguccugcacgaagaacaacagccaccacuacaucauggucggcaacgagaccggccuggagcucacccugaccaacacguccaucaucaaccacaaguucugcaaccugagcgacgcccacaagaagaaccucuacgaccacgcccugauguccaucaucagcaccuuccaccuguccauccccaacuucaaccaguacgaggccaugagcugcgacuucaacgggggcaagaucuccgugcaguacaaccucagccacgcguacgccguggacgccgccaaccacugcgggaccaucgcgaacggcguccugcagaccuucaugcggauggccuggggcggguccuacaucgcccuggacagcggcaagggguccugggacugcaucaugacgagcuaccaguaccucaucauccagaacaucaccugggaggaccacugccaguucucccgccccagccccaucggcuaccuggggcugcucagccagcggacccgcgacaucuacaucucccggcgccgccggggcaccuucacguggacccucagcgacuccgagggcaacgagacccccgggggcuacugccugacccgguggaugcugaucgaggccgagcucaagugcuucgggaacacggccguggcgaagugcaacgagaagcacgacgaggaguucugcgacaugcugcgccuguucgacuucugcaagcaggccauccggcgccucaagacccccgcccagaugagcauccagcugaucaacaaggccgugaacgcccugaucaacgaccagcucaucaugaagaaccaccuccgggacaucaugggcauccccuacugcaacuacuccaaguacugcuaccugaaccacaccgucaccgggaagacgagccugccccgcugcugccugguguccaacggcagcuaccugaacgagacccacuucuccgacgacaucgagcagcaggcggacaacaugaucaccgagcuccugcagaaggaguacaucgaccggcagggcaagaccccgcuggggcucguggaccuguucgucuucagcacguccuucuaccugaucagcaucuuccugcaccucgugaagaucccgacccaccgccacguggucggcaagcccugccccaagccccaccggcugaaccacauggggaucugcuccugcggccuguacaagcacccgggggugcccgugaaguggaagcgcugaggacuaguuauaagacugacuagcccgaugggccucccaacgggcccuccuccccuccuugcaccgagauuaaucaaaggcucuuuucagagccaccaaaaaaaaaaaaaaaaaaaaaaaaaaaaaaaaaaaaaaaaaaaaaaaaaaaaaaaaaaaaaaaaaaaaaaaaaaaaaaaaaaaaaaaaaaaaaaaaaaaaa

SEQ ID NO: 27791 - RNA, 1686 nt, Artificial Sequence
  mRNA product Design i-3 (hSL-A100) comprising derived and/or modified sequence from LASV(Lassa virus/H.sapiens-wt/NGA/2015/ISTH_0543;Clade II)__AVO03639__GPCmut4 (opt1)
aggagaaagcuuaccaugggccagaucaucaccuucuuccaggaggugccccacgucaucgaggaggugaugaacaucgugcugaucgcccucagccugcuggccauccucaaggggaucuacaacgucgcgaccugcggccuguucgggcugguguccuuccuccugcugugcggccgcagcugcuccacgaccuacaaggggguguacgagcuccagacccuggagcuggacauggccaaccucaacaugugcaugccgcugagcugcacgaagaacaacucccaccacuacaucauggucggcaacgagaccggccuggagcucacccugaccaacacgagcaucaucaaccacaaguucugcaaccuguccgacgcccacaagaagaaccucuacgaccacgcccugaugagcaucaucuccaccuuccaccugagcauccccaacuucaaccaguacgaggccauguccugcgacuucaacgggggcaagaucagcgugcaguacaaccucucccacaccuacgcgguggacgccgccaaccacugcgggaccaucgccaacggcguccugcagacguucaugcggauggcguggggcgggagcuacaucgcccuggacuccggcaaggggagcugggacugcaucaugaccuccuaccaguaccucgugauccagaacaccaccugggaggaccacugccaguucagccgccccucccccaucggcuaccuggggcugcucagccagcggacgcgcgacaucuacaucagccggcgccgccggggcaccuucaccuggacccucuccgacagcgagggcaacgagacgcccgggggcuacugccugacccgguggaugcugaucgaggccgagcucaagugcuucgggaacaccgccguggccaagugcaacgagaagcacgacgaggaguucugcgacaugcugcgccuguucgacuucugcaagcaggcgauccggcgccucaagacccccgcccagauguccauccagcugaucaacaaggccgucaacgcccugaucaacgaccagcucaucaugaagaaccaccuccgggacaucaugggcauccccuacugcaacuacagcaaguacugcuaccugaaccacacggugaccgggaagaccucccugccccgcugcugccuggugagcaacggcuccuaccugaacgagacccacuucagcgacgacaucgagcagcaggccgacaacaugaucacggagcuccugcagaaggaguacaucgaccggcagggcaagaccccgcuggggcucgucgaccuguucguguucuccaccagcuucuaccugaucuccaucuuccugcaccucgugaagaucccgacccaccgccacaucacgggcaagcccugccccaagccccaccggcugaaccacauggggaucugcagcugcggccuguacaagcacccggggguccccgugaaguggaagcgcugaggacuaguuauaagacugacuagcccgaugggccucccaacgggcccuccuccccuccuugcaccgagauuaaucaaaggcucuuuucagagccaccaaaaaaaaaaaaaaaaaaaaaaaaaaaaaaaaaaaaaaaaaaaaaaaaaaaaaaaaaaaaaaaaaaaaaaaaaaaaaaaaaaaaaaaaaaaaaaaaaaaaa

SEQ ID NO: 27792 - RNA, 1686 nt, Artificial Sequence
  mRNA product Design i-3 (hSL-A100) comprising derived and/or modified sequence from LASV(Lassa virus/H.sapiens-wt/NGA/2016/ISTH_0009;Clade II)__AVO03571__GPCmut4 (opt1)
aggagaaagcuuaccaugggccagaucaucaccuucuuccaggaggugccccacgucaucgaggaggugaugaacaucgugcugaucgcccucagccugcuggccauccucaaggggaucuacaacgucgcgaccugcggccugcuggggcucguguccuuccugcugcucugcggccgcagcugcuccacgaccuacaaggggguguacgagcugcagacccuggagcucgacauggccagccugaacaugugcaugccgcuguccugcacgaagaacaacagccaccacuacaucauggucggcaacgagaccggccucgagcugacccugaccaacacguccaucaucaaccacaaguucugcaaccucagcgacgcccacaagaagaaccuguacgaccacgcccugauguccaucaucagcaccuuccaccucuccauccccaacuucaaccaguacgaggccaugagcugcgacuucaacgggggccggaucuccgugcaguacaaccugagccacuccuacgcgguggacgccgccaaccacugcgggaccaucgccaacggcguccugcagaccuucaugcgcauggcguggggcgggagcuacaucgcccucgacuccggcaaggggagcugggacugcaucaugacguccuaccaguaccugaucauccagaacaccaccugggaggaccacugccaguucagccggcccagccccaucggcuaccuggggcuccugucccagcgcacccgggacaucuacaucagccgccggcgccggggcacguucaccuggacccuguccgacagcgagggcaacgagacccccgggggcuacugccugacgcgcuggaugcucaucgaggccgagcugaagugcuucgggaacaccgccguggccaagugcaacgagaagcacgacgaggaguucugcgacaugcugcggcuguucgacuucugcaagcaggcgauccgccggcugaagacccccgcccagauguccauccagcugaucaacaaggccgugaacgcccucaucaacgaccagcugaucaugaagaaccaccuccgcgacaucaugggcaucccguacugcaacuacagcaaguacugcuaccucaaccacaccgucacggggaagaccucccugccccggugcugccuggugagcaacggcuccuaccucaacgagacccacuucagcgacgacaucgagcagcaggccgacaacaugaucaccgagcugcugcagaaggaguacaucgaccgccagggcaagacgccccucgggcugguggaccuguucgucuucuccaccagcuucuaccugaucuccaucuuccuccaccuggugaagaucccgacccaccggcacaucaccggcaagcccugccccaagccccaccgccugaaccacauggggaucugcagcugcggccucuacaaccacccgggggugcccgucaaguggaagcggugaggacuaguuauaagacugacuagcccgaugggccucccaacgggcccuccuccccuccuugcaccgagauuaaucaaaggcucuuuucagagccaccaaaaaaaaaaaaaaaaaaaaaaaaaaaaaaaaaaaaaaaaaaaaaaaaaaaaaaaaaaaaaaaaaaaaaaaaaaaaaaaaaaaaaaaaaaaaaaaaaaaaa

SEQ ID NO: 27793 - RNA, 1686 nt, Artificial Sequence
  mRNA product Design i-3 (hSL-A100) comprising derived and/or modified sequence from LASV(Lassa virus/H.sapiens-wt/NGA/2016/ISTH_0017;Clade II)__AVO03567__GPCmut4 (opt1)
aggagaaagcuuaccaugggccagaucaucaccuucuuccaggaggugccccacgucaucgaggaggugaugaacaucgugcugaucgcccucagccugcuggccauccucaaggggaucuacaacgucgcgaccugcggccuguucgggcugguguccuuccuccugcugugcggccgcagcugcuccacgaccuacaaggggguguacgagcuccagacccuggagcuggacauggccagccucaacaugugcaugccgcuguccugcacgaagaacaacagccaccacuacaucauggucggcaacgagaccggccuggagcucacccugaccaacacguccaucaucaaccacaaguucugcaaccugagcgacgcccacaagaagaaccucuacgaccacgcccugauguccaucaucagcaccuuccaccuguccauccccaacuucaaccaguacgaggccaugagcugcgacuucaacgggggcaagaucuccgugcaguacaaccucagccacaccuacgcgaucgacgccgccaaccacugcgggaccaucgccaacggcgugcugcagacguucaugcggauggcguggggcggguccuacaucgcccuggacagcggcaagggguccugggacugcaucaugaccagcuaccaguaccucaucauccagaacaccaccugggaggaccacugccaguucucccgccccagccccaucggcuaccuggggcugcucagccagcggacgcgcgacaucuacaucucccggcgccgccggggcaccuucaccuggacccucagcgacuccgagggcaacgagacgcccgggggcuacugccugacccgguggaugcugaucgaggccgagcucaagugcuucgggaacaccgccgucgccaagugcaacgagaagcacgacgaggaguucugcgacaugcugcgccuguucgacuucugcaagcaggcgauccggcgccucaagacccccgcccagaugagcauccagcugaucaacaaggccgugaacgcccugaucaacgaccagcucaucaugaagaaccaccuccgggacaucaugggcauccccuacugcaacuacuccaaguacugcuaccugaaccacacggugaccgggaagaccagccugccccgcugcugccuggucuccaacggcagcuaccugaacgagacccacuucuccgacgacaucgagcagcaggccgacaacaugaucacggagcuccugcagaaggaguacauggaccggcagggcaagaccccgcuggggcucguggaccuguucguguucagcaccuccuucuaccugaucagcaucuuccugcaccucguccgcaucccgacccaccggcacgugaucggcaagcccugccccaagccccaccgccugaaccacauggggaucugcuccugcggccuguacaagcacccgggggugcccgucaaguggaagcggugaggacuaguuauaagacugacuagcccgaugggccucccaacgggcccuccuccccuccuugcaccgagauuaaucaaaggcucuuuucagagccaccaaaaaaaaaaaaaaaaaaaaaaaaaaaaaaaaaaaaaaaaaaaaaaaaaaaaaaaaaaaaaaaaaaaaaaaaaaaaaaaaaaaaaaaaaaaaaaaaaaaaa

SEQ ID NO: 27794 - RNA, 1686 nt, Artificial Sequence
  mRNA product Design i-3 (hSL-A100) comprising derived and/or modified sequence from LASV(Lassa virus/H.sapiens-wt/NGA/2018/ISTH_0959;Clade II)__AVV65099__GPCmut4 (opt1)
aggagaaagcuuaccaugggccagaucaucaccuucuuccaggaggugccccacgucaucgaggaggugaugaacaucgugcugaucgcccucagccugcuggccauccucaaggggaucuacaacgucgugaccugcggccuguucgggcugguguccuuccuccugcugugcggccgcagcugcuccacgaccuacaagggggucuacgagcuccagacccuggagcuggacauggcgagccucaacaugugcaugccgcuguccugcacgaagaacaacagccaccacuacaucauggugggcaacgagaccggccuggagcucacccugaccaacacguccaucaucaaccacaaguucugcaaccugagcgacgcccacaagaagaaccucuacgaccacgcccugauguccaucaucagcaccuuccaccuguccauccccaacuucaaccaguacgaggccaugagcugcgacuucaacgggggcaagaucuccgugcaguacaaccucagccacgccuacgcgaucgacgccgccaaccacugcgggaccaucgccaacggcguccugcagaccuucaugcggauggcguggggcggguccuacaucgcccuggacagcggcaagggguccugggacugcaucaugacgagcuaccaguaccucaucauccagaacaccaccugggaggaccacugccaguucucccgccccagccccaucggcuaccuggggcugcucagccagcggacccgcgacaucuacaucucccggcgccgccggggcacguucaccuggacccucagcgacuccgagggcaacgagacccccgggggcuacugccugacgcgguggaugcugaucgaggccgagcucaagugcuucgggaacaccgccguggccaagugcaacgagaagcacgacgaggaguucugcgacaugcugcgccuguucgacuucugcaagcaggcgauccggcgccucaagacccccgcccagaugagcauccagcugaucaacaaggccgugaacgcccugaucaacgaccagcucaucaugaagaaccaccuccgggacaucaugggcaucccguacugcaacuacuccaaguacugcuaccugaaccacaccgucacggggaagaccagccugccccgcugcugccugguguccaacggcagcuaccugaacgagacccacuucuccgacgacaucgagcagcaggccgacaacaugaucaccgagcuccugcagaaggaguacaucgaccggcagggcaagacgccccuggggcucguggaccuguucgucuucagcaccuccuucuaccugaucagcaucuuccugcaccucgugaagaucccgacccaccgccacgugaucggcaagcccugccccaagccccaccggcugaaccacauggggaucugcuccugcggccuguacaagcacccggggguccccgugaaguggaagcgcugaggacuaguuauaagacugacuagcccgaugggccucccaacgggcccuccuccccuccuugcaccgagauuaaucaaaggcucuuuucagagccaccaaaaaaaaaaaaaaaaaaaaaaaaaaaaaaaaaaaaaaaaaaaaaaaaaaaaaaaaaaaaaaaaaaaaaaaaaaaaaaaaaaaaaaaaaaaaaaaaaaaaa

SEQ ID NO: 27795 - RNA, 1686 nt, Artificial Sequence
  mRNA product Design i-3 (hSL-A100) comprising derived and/or modified sequence from LASV(LASV003-NIG-2008;Clade II)__AIT17580__GPCmut4 (opt1)
aggagaaagcuuaccaugggccagaucaucaccuucuuccaggaggugccccacgucaucgaggaggugaugaacaucgugcugaucgcccucagccugcuggccauccucaaggggaucuacaacgucgcgaccugcggccuguucgggcugguguccuuccuccugcugugcggccgcagcugcuccacgaccuacaaggggguguacgagcuccagacccuggagcuggacauggccagccucaacaugugcaugccgcuguccugcacgaagaacaacagccaccacuacaucauggucggcaacgagaccggccuggagcucacccugaccaacacguccaucaucaaccacaaguucugcaaccugagcgacgcccacaagaagaaccucuacgaccacgcccugauguccaucaucagcaccuuccaccuguccauccccaacuucaaccaguacgaggccaugagcugcgacuucaacgggggcaagaucuccgugcaguacaaccucagccacaccuacgcgguggacgccgccaaccacugcgggaccaucgccaacggcguccugcagacguucaugcggauggcguggggcggguccuacaucgcccuggacagcggcaagggguccugggacugcaucaugaccagcuaccaguaccucaucauccagaacaccaccugggaggaccacugccaguucucccgccccagccccaucggcuaccuggggcugcucagccagcggacgcgcgacaucuacaucucccggcgccgccggggcaccuucaccuggacccucagcgacuccgagagcaacgagacgccgggcggguacugccugacccgguggaugcugaucgaggccgagcucaagugcuucggcaacaccgccguggccaagugcaacgagaagcacgacgaggaguucugcgacaugcugcgccuguucgacuucugcaagcaggcgauccggcgccucaaggcccccgcccagauguccauccagcugaucaacaaggccgugaacgcccugaucaacgaccagcucaucaugaagaaccaccuccgggacaucauggggauccccuacugcaacuacagcaaguacugcuaccugaaccacaccgucacgggccgcaccucccugccccggugcugccuggugagcaacggguccuaccugaacgagacccacuucagcgacgacaucgagcagcaggcggacaacaugaucaccgagcuccugcagaaggaguacauggaccgccagggcaagacgccccugggccucguggaccuguucgucuucuccaccagcuucuaccugaucuccaucuuccugcaccucgugaagaucccgacccaccggcacgugaucgggaagcccugccccaagccccaccgccugaaccacaugggcaucugcagcugcgggcuguacaagcacccgggcguccccgugaaguggaagcggugaggacuaguuauaagacugacuagcccgaugggccucccaacgggcccuccuccccuccuugcaccgagauuaaucaaaggcucuuuucagagccaccaaaaaaaaaaaaaaaaaaaaaaaaaaaaaaaaaaaaaaaaaaaaaaaaaaaaaaaaaaaaaaaaaaaaaaaaaaaaaaaaaaaaaaaaaaaaaaaaaaaaa

SEQ ID NO: 27796 - RNA, 1686 nt, Artificial Sequence
  mRNA product Design i-3 (hSL-A100) comprising derived and/or modified sequence from LASV(LASV035-NIG-2009;Clade II)__AIT17588__GPCmut4 (opt1)
aggagaaagcuuaccaugggccagaucaucaccuucuuccaggaggugccccacgucaucgaggaggugaugaacaucgugcugaucgcccucagccugcuggccauccucaaggggaucuacaacgucgcgaccugcggccuguucgggcugguguccuuccuccugcugugcggccgcagcugcuccacgaccuacaaggggguguacgagcuccagacccuggagcuggacauggccagccucaacaugugcaugccgcuguccugcacgaagaacaacagccaccacuacaucauggucggcaacgagaccggccuggagcucacccugaccaacacguccaucaucaaccacaaguucugcaaccugagcgacgcccacaagaagaaccucuacgaccacgcccugauguccaucaucagcaccuuccaccuguccauccccaacuucaaccaguacgaggccaugagcugcgacuucaacgggggcaagaucuccgugcaguacaaccucagccacgcguacgccguggacgccgccaaccacugcgggaccaucgcgaacggcguccugcagaccuucaugcggauggccuggggcggguccuacaucgcccuggacagcggcaagggguccugggacugcaucaugacgagcuaccaguaccucaucauccagaacaccaccugggaggaccacugccaguucucccgccccagccccaucggcuaccuggggcugcucagccagcggacccgcgacaucuacaucucccggcgccgccggggcacguucaccuggacccucagcgacuccgagggcaacgagacccccgggggcuacugccugacgcgguggaugcugaucgaggccgagcucaagugcuucgggaacaccgccguggcgaagugcaacgagaagcacgacgaggaguucugcgacaugcugcgccuguucgacuucugcaagcaggccauccggcgccucaaggcccccgcccagaugagcauccagcugaucaacaaggccgugaacgcgcugaucaacgaccagcucaucaugaagaaccaccuccgggacaucaugggcauccccuacugcaacuacuccaaguacugcuaccugaaccacaccgucaccgggaagacgagccugccccgcugcugccugguguccaacggcagcuaccugaacgagacccacuucuccgacgacaucgagcagcaggccgacaacaugaucaccgagcuccugcagaaggaguacaucgaccggcagggcaagaccccgcuggggcucguggaccuguucgucuucagcacguccuucuaccugaucagcaucuuccugcaccucgugaagaucccgacccaccgccacgugaucggcaagcccugccccaagccccaccggcugaaccacauggggaucugcuccugcggccuguacaagcacccggggguccccgugaaguggaagcgcugaggacuaguuauaagacugacuagcccgaugggccucccaacgggcccuccuccccuccuugcaccgagauuaaucaaaggcucuuuucagagccaccaaaaaaaaaaaaaaaaaaaaaaaaaaaaaaaaaaaaaaaaaaaaaaaaaaaaaaaaaaaaaaaaaaaaaaaaaaaaaaaaaaaaaaaaaaaaaaaaaaaaa

SEQ ID NO: 27797 - RNA, 1686 nt, Artificial Sequence
  mRNA product Design i-3 (hSL-A100) comprising derived and/or modified sequence from LASV(LASV1000-NIG-2009;Clade II)__AIT17782__GPCmut4 (opt1)
aggagaaagcuuaccaugggccagaucaucaccuucuuccaggaggugccccacgucaucgaggaggugaugaacaucgugcugaucgcccucagccugcuggccauccucaaggggaucuacaacgucgcgaccugcggccuguucgggcugguguccuuccuccugcugugcggccgcagcugcuccacgaccuacaaggggguguacgagcuccagacccuggagcuggacauggccagccucaacaugugcaugccgcuguccugcacgaagaacaacagccaccacuacaucauggucggcaacgagaccggccuggagcucacccugaccaacacguccaucaucaaccacaaguucugcaaccugagcgacgcccacaagaagaaccucuacgaccacgcccugauguccaucaucagcaccuuccaccuguccauccccaacuucaaccaguacgaggccaugagcugcgacuucaacgggggcaagaucuccgugcaguacaaccucagccacaccuacgcgguggacgccgccaaccacugcgggaccaucgccaacggcguccugcagacguucaugcggauggcguggggcggguccuacaucgcccuggacagcggcaagggguccugggacugcaucaugaccagcuaccaguaccucaucauccagaacaccaccugggaggaccacugccaguucucccgccccagccccaucggcuaccuggggcugcucagccagcggacgcgcgacaucuacaucucccggcgccgccggggcaccuucaccuggacccucagcgacuccgagggcaacgagacgcccgggggcuacugccugacccgguggaugcugaucgaggccgagcucaagugcuucgggaacaccgccguggccaagugcaacgagaagcacgacgaggaguucugcgacaugcugcgccuguucgacuucugcaagcaggcgaucaagcggcucaagacccccgcccagaugagcauccagcugaucaacaaggccgugaacgcccugaucaacgaccagcucaucaugaagaaccaccuccgcgacaucaugggcauccccuacugcaacuacuccaaguacugcuaccugaaccacacggucaccgggaagaccagccugccccggugcugccugguguccaacggcagcuaccugaacgagacccacuucuccgacgacaucgagcagcaggccgacaacaugaucacggagcuccugcagaaggaguacaucgaccgccagggcaagaccccgcuggggcucguggaccuguucgucuucagcaccuccuucuaccugaucagcaucuuccugcaccucgugaagaucccgacccaccggcacguggucggcaagcccugccccaagccccaccgccugaaccacauggggaucugcuccugcggccuguacaagcacccgggggugcccgugaaguggaagcggugaggacuaguuauaagacugacuagcccgaugggccucccaacgggcccuccuccccuccuugcaccgagauuaaucaaaggcucuuuucagagccaccaaaaaaaaaaaaaaaaaaaaaaaaaaaaaaaaaaaaaaaaaaaaaaaaaaaaaaaaaaaaaaaaaaaaaaaaaaaaaaaaaaaaaaaaaaaaaaaaaaaaa

SEQ ID NO: 27798 - RNA, 1686 nt, Artificial Sequence
  mRNA product Design i-3 (hSL-A100) comprising derived and/or modified sequence from LASV(LASV221-NIG-2010;Clade II)__AIT17624__GPCmut4 (opt1)
aggagaaagcuuaccaugggccagaucaucaccuucuuccaggaggugccccacgucaucgaggaggugaugaacaucgugcugaucgcccucagccugcuggccauccucaaggggaucuacaacgucgcgaccugcggccuguucgggcugguguccuuccuccugcugugcggccgcagcugcuccacgaccuacaaggggguguacgagcuccagacccuggagcuggacauggccagccucaacaugugcaugccgcuguccugcacgaagaacaacagccaccacuacaucauggucggcaacgagaccggccuggagcucacccugaccaacacguccaucaucaaccacaaguucugcaaccugagcgacgcccacaagaagaaccucuacgaccacgcccugauguccaucaucagcaccuuccaccuguccauccccaacuucaaccaguacgaggccaugagcugcgacuucaacgggggcaagaucuccgugcaguacaaccucagccacaccuacgcgaucgacgccgccaaccacugcgggaccaucgccaacggcgugcugcagacguucaugcggauggcguggggcggguccuacaucgcccuggacagcggcaagggguccugggacugcaucaugaccagcuaccaguaccucaucauccagaacaccaccugggaggaccacugccaguucucccgccccagccccaucggcuaccuggggcugcucagccagcggacgcgcgacaucuacaucucccggcgccgccggggcaccuucaccuggacccucagcgacuccgagggcaacgagacgcccgggggcuacugccugacccgguggaugcugaucgaggccgagcucaagugcuucgggaacaccgccgucgccaagugcaacgagaagcacgacgaggaguucugcgacaugcugcgccuguucgacuucugcaagcaggcgauccggcgccucaagacccccgcccagaugagcauccagcugaucaacaaggccgugaacgcccugaucaacgaccagcucaucaugaagaaccaccuccgggacaucaugggcauccccuacugcaacuacuccaaguacugcuaccugaaccacacggugaccgggaagaccagccugccccgcugcugccuggucuccaacggcagcuaccugaacgagacccacuucuccgacgacaucgagcagcaggccgacaacaugaucacggagaugcuccagaaggaguacauggaccggcagggcaagaccccgcuggggcugguggaccucuucguguucagcaccuccuucuaccugaucagcaucuuccugcaccuggucaagaucccgacccaccgccacgugaucggcaagcccugccccaagccccaccggcucaaccacauggggaucugcuccugcggccuguacaagcacccgggggugcccgucaaguggaagcgcugaggacuaguuauaagacugacuagcccgaugggccucccaacgggcccuccuccccuccuugcaccgagauuaaucaaaggcucuuuucagagccaccaaaaaaaaaaaaaaaaaaaaaaaaaaaaaaaaaaaaaaaaaaaaaaaaaaaaaaaaaaaaaaaaaaaaaaaaaaaaaaaaaaaaaaaaaaaaaaaaaaaaa

SEQ ID NO: 27799 - RNA, 1686 nt, Artificial Sequence
  mRNA product Design i-3 (hSL-A100) comprising derived and/or modified sequence from LASV(LASV237-NIG-2010;Clade II)__AIT17638__GPCmut4 (opt1)
aggagaaagcuuaccaugggccagaucaucaccuucuuccaggaggugccccacgucaucgaggaggugaugaacaucgugcugaucgcccucagccugcuggccauccucaaggggaucuacaacgucgcgaccugcggccuguucgggcugguguccuuccuccugcugugcggccgcagcugcuccacgaccuacaaggggguguacgagcuccagacccuggagcuggacauggccagccucaacaugugcaugccgcuguccugcacgaagaacaacagccaccacuacaucauggucggcaacgagaccggccuggagcucacccugaccaacacguccaucaucaaccacaaguucugcaaccugagcgacgcccacaagaaggaccucuacgaccacgcccugauguccaucaucagcaccuuccaccuguccauccccaacuucaaccaguacgaggccaugagcugcgacuucaacgggggcaagaucuccgugcaguacaaccucagccacaccuacgcgguggacgccgccaaccacugcgggaccaucgccaacggcguccugcagacguucaugcggauggcguggggcggguccuacaucgcccuggacagcggcaagggguccugggacugcaucaugaccagcuaccaguaccucaucauccagaacaccaccugggaggaccacugccaguucucccgccccagccccaucggcuaccuggggcugcucagccagcggacgcgcgacaucuacaucucccggcgccgccggggcaccuucaccuggacccucagcgacuccgagggcaacgagacgcccgggggcuacugccugacccgguggaugcugaucgaggccgagcucaagugcuucgggaacaccgccguggccaagugcaacgagaagcacgacgaggaguucugcgacaugcugcgccuguucgacuucugcaagcaggcgauccggcgccucaagacccccgcccagaugagcauccagcugaucaacaaggccgugaacgcccugaucaacgaccagcucaucaugaagaaccaccuccgggacaucaugggcauccccuacugcaacuacuccaaguacugcuaccugaaccacacggucaccgggaagaccagccugccccgcugcugccugguguccaacggcagcuaccugaacgagacccacuucuccgacgacaucgagcagcaggccgacaacaugaucacggagcuccugcagaaggaguacauggaccggcagggcaagaccccgcuggggcucguggaccuguucgucuucagcaccuccuucuaccugaucagcaucuuccugcaccucaucaagaucccgacccaccgccacaucacgggcaagcccugccccaagccccaccggcugaaccacauggggaucugcuccugcggccuguacaagcacccgggggugcccgugaaguggaagcgcugaggacuaguuauaagacugacuagcccgaugggccucccaacgggcccuccuccccuccuugcaccgagauuaaucaaaggcucuuuucagagccaccaaaaaaaaaaaaaaaaaaaaaaaaaaaaaaaaaaaaaaaaaaaaaaaaaaaaaaaaaaaaaaaaaaaaaaaaaaaaaaaaaaaaaaaaaaaaaaaaaaaaa

SEQ ID NO: 27800 - RNA, 1686 nt, Artificial Sequence
  mRNA product Design i-3 (hSL-A100) comprising derived and/or modified sequence from LASV(LASV253-NIG-2011;Clade II)__AIT17670__GPCmut4 (opt1)
aggagaaagcuuaccaugggccagaucaucaccuucuuccaggaggugccccacgucaucgaggaggugaugaacaucgugcugaucgcccucagccugcuggccauccucaaggggaucuacaacgucgcgaccugcggccuguucgggcugguguccuuccuccugcugugcggccgcagcugcuccacgaccuacaaggggguguacgagcuccagacccuggagcuggacauggccagccucaacaugugcaugccgcuguccugcacgaagaacaacagccaccacuacaucauggucggcaacgagaccggccuggagcucacccugaccaacacguccaucaucaaccacaaguucugcaaccugagcgacgcccacaagaagaaccucuacgaccacgcccugauguccaucaucagcaccuuccaccuguccauccccaacuucaaccaguacgaggccaugagcugcgacuucaacgggggcaagaucuccgugcaguacaaccucagccacaccuacgcgguggacgccgccaaccacugcgggaccaucgccaacggcguccugcagacguucaugcggauggcguggggcggguccuacaucgcccuggacagcggcaagggguccugggacugcaucaugaccagcuaccaguaccucaucauccagaacaccaccugggaggaccacugccaguucucccgccccagccccaucggcuaccuggggcugcucagccagcggacgcgcgacaucuacaucucccggcgccgccggggcaccuucaccuggacccucagcgacuccgagggcaacgagacgcccgggggcuacugccugacccgguggaugcugaucgaggccgagcucaagugcuucgggaacaccgccguggccaagugcaacgagaagcacgacgaggaguucugcgacaugcugcgccuguucgacuucugcaagcaggcgauccggcgccucaaggcccccgcccagaugagcauccagcugaucaacaaggccgugaacgcccugaucaacgaccagcucaucaugaagaaccaccuccgggacaucaugggcaucccguacugcaacuacuccaaguacugcuaccugaaccacaccgucacggggcgcaccagccugccccggugcugccugguguccaacggcagcuaccugaacgagacccacuucuccgacgacaucgagcagcaggcggacaacaugaucaccgagcuccugcagaaggaguacaucgaccgccagggcaagacgccccuggggcucguggaccuguucgucuucagcaccuccuucuaccugaucagcaucuuccugcaccucgugaagaucccgacccaccggcacaucaucggcaagcccugccccaagccccaccgccugaaccacauggggaucugcuccugcggccuguacaagcacccgggggugcccgucaaguggaagcggugaggacuaguuauaagacugacuagcccgaugggccucccaacgggcccuccuccccuccuugcaccgagauuaaucaaaggcucuuuucagagccaccaaaaaaaaaaaaaaaaaaaaaaaaaaaaaaaaaaaaaaaaaaaaaaaaaaaaaaaaaaaaaaaaaaaaaaaaaaaaaaaaaaaaaaaaaaaaaaaaaaaaa

SEQ ID NO: 27801 - RNA, 1686 nt, Artificial Sequence
  mRNA product Design i-3 (hSL-A100) comprising derived and/or modified sequence from LASV(LASV254-NIG-2011;Clade II)__AIT17674__GPCmut4 (opt1)
aggagaaagcuuaccaugggccagaucaucaccuucuuccaggaggugccccacgucaucgaggaggugaugaacaucgugcugaucgcccucagccugcuggccauccucaaggggaucuacaacgucgcgaccugcggccuguucgggcugguguccuuccuccugcugugcggccgcagcugcuccacgaccuacaaggggguguacgagcuccagacccuggagcuggacaugaccaaccucaacaugugcaugccgcugagcugcaccaagaacaacucccaccacuacaucauggucggcaacgagaccggccuggagcucacccugacgaacaccagcaucaucaaccacaaguucugcaaccuguccgacgcccacaagaagaaccucuacaaccacgcccugaugagcaucaucuccaccuuccaccugagcauccccaacuucaaccaguacgaggccauguccugcgacuucaacgggggcaagaucagcgugcaguacaaccucucccacagcuacgccguggacgcggccaaccacugcgggaccaucgccaacggcguccugcagacguucaugcggauggccuggggcggguccuacaucgcgcuggacagcggcaaggggaacugggacugcaucaugaccuccuaccaguaccucaucauccagaacaccaccugggaggaccacugccaguucagccgccccucccccaucggcuaccuggggcugcucagccagcggacgcgcgacaucuacaucagccggcgccgccggggcaccuucaccuggacccucuccgacagcgagggcaacgagacgcccgggggcuacugccugacccgguggaugcugaucgaggccgagcucaagugcuucgggaacaccgccguggccaagugcaacgagaagcacgacgaggaguucugcgacaugcugcgccuguucgacuucugcaagcaggccauccggcgccucaagacccccgcgcaggccaacauccagcugaucaacaaggccgugaacgcccugaucaacgaccagcucaucaugaagaaccaccuccgggacaucaugggcauccccuacugcaacuacuccaaguacugcuaccugaaccacacggucaccgggaagaccagccugccccgcugcugccugguguccaacggcagcuaccugaacgagacccacuucuccgacgacaucgagcagcaggccgacaacaugaucacggagcuccugcagaaggaguacauggaccggcagggcaagaccccgcuggggcucguggaccuguucgucuucagcaccuccuucuaccugaucagcaucuuccugcaccucgugaagaucccgacccaccgccacgugaucggcaagcccugccccaagccccaccggcugaaccacauggggaucugcuccugcggccuguacaagcacccggggguccccgugaaguggaagcgcugaggacuaguuauaagacugacuagcccgaugggccucccaacgggcccuccuccccuccuugcaccgagauuaaucaaaggcucuuuucagagccaccaaaaaaaaaaaaaaaaaaaaaaaaaaaaaaaaaaaaaaaaaaaaaaaaaaaaaaaaaaaaaaaaaaaaaaaaaaaaaaaaaaaaaaaaaaaaaaaaaaaaa

SEQ ID NO: 27802 - RNA, 1686 nt, Artificial Sequence
  mRNA product Design i-3 (hSL-A100) comprising derived and/or modified sequence from LASV(Nig08-A19;Clade III)__ADU56618__GPCmut4 (opt1)
aggagaaagcuuaccaugggccagaucgugaccuucuuccaggaggucccccacgugaucgaggaggugaugaacaucguccugaucgcccucagcauccuggccauccugaaggggcucuacaacaucgcgaccugcggccugaucgggcuggugacguuccuccugcuguccggccgcagcugcuccaugaccuacaaggggguguacgagcuccagacccuggagcugaacaugaacacccucaacaugugcaugccgcugagcugcaccaagaacaacucccaccacuacaucauggucggcaacgagaccggccuggagcucacccugacgaacaccagccugcuccaccacaaguucugcaaccuguccgacgcccacaagaagaaccuguacgaccacacccucaugagcaucaucuccaccuuccaccugagcauccccaacuucaaccaguacgaggccauguccugcgacuucaacgggggcaagaucacggugcaguacaaccugagccacuccuacgccaucgacgccgcgaaccacugcgggaccguggccaacggcguccuccagaccuucaugcggauggccuggggcgggagcuacaucgcccuggacuccggccgcgggaagugggacugcaucaugaccagcuaccaguaccugaucauccagaacacgaccugggaggaccacugccaguucucccggcccagccccaucggcuaccucgggcugcugucccagcgcacccgggacaucuacaucagccgccggcgccggggcaccuucacguggacccugagcgacuccgagggcaacgagacccccgggggcuacugccucacccgcuggaugcugaucgaggcggagcugaagugcuucgggaacacggccguggccaagugcaacgagaagcacgacgaggaguucugcgacaugcuccggcuguucgacuucugcaagcaggccauccgccggcugaaggcccccgcgcagaugagcauccagcucaucaacaaggccgugaacgcccugaucaacgaccagcugaucaugaagaaccaccuccgcgacaucaugggcauccccuacugcaacuacuccaaguacugcuaccugaaccacaccagcaccgggcggaccucccugccccgcugcugccucgucagcaacggcuccuaccugaacgagacgcacuucagcgacgacaucgagcagcaggccgacaacaugaucaccgagaugcugcagaaggaguaccucgaccggcagggcaagaccccgcuggggcugguggaccuguucguguucuccaccagcuucuaccucaucuccaucuuccugcaccuggucaagaucccgacgcaccgccacaucgugggcaagcccugccccaagccccaccggcucaaccacauggggaucugcagcugcggccuguacaagcagccgggggugcccguccgcuggaagcggugaggacuaguuauaagacugacuagcccgaugggccucccaacgggcccuccuccccuccuugcaccgagauuaaucaaaggcucuuuucagagccaccaaaaaaaaaaaaaaaaaaaaaaaaaaaaaaaaaaaaaaaaaaaaaaaaaaaaaaaaaaaaaaaaaaaaaaaaaaaaaaaaaaaaaaaaaaaaaaaaaaaaa

SEQ ID NO: 27803 - RNA, 1689 nt, Artificial Sequence
  mRNA product Design i-3 (hSL-A100) comprising derived and/or modified sequence from LASV(G1180-SLE-2010;Clade IV)__AIT17168__GPCmut4 (opt1)
aggagaaagcuuaccaugggccagaucgugaccuucuuccaggaggucccccacgugaucgaggaggugaugaacaucguccugaucgcccucagcauccuggccgugcugaaggggcucuacaacuucgcgaccugcggccugguggggcugcucaccuuccugcugcucugcggccgcuccugcaccgccagccgguacaagggggucuacgagcugcagacccuggagcucaacauggagacccugaacaugugcaugccgcuguccugcaccaagaacaacagccaccacuacaucauggugggcaacgagaccggccucgagcugacccugacgaacaccuccaucaucaaccacaaguucugcaaccucagcgacgcccacaagaagaaccuguacgaccacgcccugauguccaucaucagcaccuuccaccucuccauccccaacuucaaccaguacgaggccaugagcugcgacuucaacgggggcaagaucuccgugcaguacaaccugagccacuccuacgcgggggacgccgccaaccacugcggcaccgucgccaacggggugcugcagacguucaugcgcauggcguggggcggcagcuacaucgcccucgacuccgggcacggcagcugggacugcaucaugaccuccuaccaguaccugaucauccagaacaccaccugggaggaccacugccaguucagccggcccucccccaucggguaccugggccuccugagccagcgcacgcgggacaucuacaucagccgccggcgccggggcaccuucaccuggacccuguccgacagcgaggggaaggacacgccgggcggguacugccugacccgcuggaugcucaucgaggccgagcugaagugcuucggcaacaccgccguggccaagugcaacgagaagcacgacgaggaguucugcgacaugcugcggcuguucgacuucugcaagcaggcgauccagcgccugaaggcccccgcccagauguccauccagcugaucaacaaggccgucaacgcccucaucaacgaccagcugaucaugaagaaccaccuccgggacaucauggggauccccuacugcaacuacagcaaguacugcuaccucaaccacaccacgaccggcaagaccucccugcccaagugcugccuggugagcaacggcuccuaccucaacgagacccacuucagcgacgacaucgagcagcaggcggacaacaugaucacggagaugcugcagaaggaguacauggagcgccaggggaagacgccccugggccucguggaccuguucgucuucuccaccagcuucuaccugaucuccaucuuccugcaccucgugaagaucccgacccaccggcacaucgugggcaagagcugccccaagccccaccgccugaaccacauggggaucugcuccugcgggcuguacaagcagcccggcgucccggugaaguggaagcggugaggacuaguuauaagacugacuagcccgaugggccucccaacgggcccuccuccccuccuugcaccgagauuaaucaaaggcucuuuucagagccaccaaaaaaaaaaaaaaaaaaaaaaaaaaaaaaaaaaaaaaaaaaaaaaaaaaaaaaaaaaaaaaaaaaaaaaaaaaaaaaaaaaaaaaaaaaaaaaaaaaaaa

SEQ ID NO: 27804 - RNA, 1689 nt, Artificial Sequence
  mRNA product Design i-3 (hSL-A100) comprising derived and/or modified sequence from LASV(G1442-SLE-2011;Clade IV)__AIT17180__GPCmut4 (opt1)
aggagaaagcuuaccaugggccagaucgugaccuucuuccaggaggucccccacgugaucgaggaggugaugaacaucguccugaucgcccucagcauccuggccgugcugaaggggcucuacaacguggcgaccugcggccugaucgggcuggucacguuccuccugcugugcggccgcuccugcaccaccacccucuacaaggggguguacgagcugcagacgcuggagcucaacauggagacccugaacaugugcaugccgcugagcugcaccaagaacaacucccaccacuacauccgggugggcaacgagacgggccucgagcugacccugaccaacaccagcaucaucaaccacaaguucugcaaccucuccgacgcccacaagaagaaccuguacgaccacgcccugaugagcaucaucuccacguuccaccucagcauccccaacuucaaccaguacgaggccauguccugcgacuucaacgggggcaagaucagcguccaguacaaccugucccacagcuacgccggggacgcggccaaccacugcggcaccguggccaacggggugcugcagaccuucaugcgcauggccuggggcggcuccuacaucgcgcucgacagcgggcggggcaacugggacugcaucaugaccuccuaccaguaccugaucauccagaacacgaccugggacgaccacugccaguucagccgccccucccccaucggguaccugggccuccugagccagcggacccgcgacgucuacaucucccggcgccgccggggcaccuucacguggacccugagcgacagcgaggggaaggacaccccgggcggguacugccugacccgguggaugcucaucgaggccgagcugaagugcuucggcaacacggccguggccaagugcaacgagaagcacgacgaggaguucugcgacaugcugcgccucuucgacuucugcaagcaggccauccagcggcugaaggcgcccgcccagauguccauccagcugaucaacaaggccgugaacgcccucaucaacgaccagcugaucaugaagaaccaccuccgcgacaucauggggauccccuacugcaacuacagcaaguacugcuaccugaacaacaccgccaccggcaagaccucccugcccaagugcugccugaucagcaacggcuccuaccucaacgagacgcacuucagcgacgacaucgagcaggaggcggacaacaugaucaccgagaugcugcagaaggaguacauggagcggcaggggaagacgccccugggccucgucgaccuguucguguucuccaccagcuucuaccugaucuccaucuuccugcaccucgugaagaucccgacccaccgccacaucgucggcaagagcugccccaagccccaccggcugaaccacauggggaucugcuccugcgggcuguacaagcagcccggcgugccggugcgcuggaagcggugaggacuaguuauaagacugacuagcccgaugggccucccaacgggcccuccuccccuccuugcaccgagauuaaucaaaggcucuuuucagagccaccaaaaaaaaaaaaaaaaaaaaaaaaaaaaaaaaaaaaaaaaaaaaaaaaaaaaaaaaaaaaaaaaaaaaaaaaaaaaaaaaaaaaaaaaaaaaaaaaaaaaa

SEQ ID NO: 27805 - RNA, 1689 nt, Artificial Sequence
  mRNA product Design i-3 (hSL-A100) comprising derived and/or modified sequence from LASV(G3010-SLE-2013;Clade IV)__AIT17344__GPCmut4 (opt1)
aggagaaagcuuaccaugggccagaucgugaccuucuuccaggaggucccccacgugaucgaggaggugaugaacaucguccugaucgcccucagcauccuggccgugcugaaggggcucuacaacuucgcgaccugcggccugguggggcuggucacguuccuccugcugugcggccgcuccugcaccaccagccucuacaaggggguguacgagcugcagacccuggagcucaacauggagacgcugaacaugugcaugccgcuguccugcaccaagaacaacagccaccacuacaucauggugggcaacgagaccggccucgagcugacgcugaccaacaccuccaucaucaaccacaaguucugcaaccucagcgacgcccacaagaagaaccuguacaaccacgcccugauguccaucaucagcaccuuccaccucuccauccccaacuucaaccaguacgaggccaugagcugcgacuucaacgggggcaagaucuccguccaguacaaccugagccacuccuacgccggggacgcggccagccacugcggcacgguggccaacggggugcugcagaccuucaugcggauggccuggggcggcuccuacaucgcgcucgacagcggguacggcaagugggacugcaucaugaccuccuaccaguaccugaucauccagaacaccacgugggaggaccacugccaguucagccgccccucccccaucggguaccugggccuccugagccagcggacccgcgacaucuacaucagccggcgccgccggggcaccuucaccuggacgcuguccgacagcgaggggaaggacaccccgggcggguacugccugacccgguggaugcucaucgaggccgagcugaagugcuucggcaacaccgccgucgccaagugcaacgagaagcacgacgaggaguucugcgacaugcugcgccucuucgacuucugcaagcaggccauccagcggcugaagacgcccgcgcagauguccauccagcugaucaacaaggccgugaacgcccucaucaacgaccagcugaucaugaagaaccaccuccgcgacaucauggggauccccuacugcaacuacagcaaguacugcuaccugaaccacaccaccaccggcaagacgucccugcccaagugcugccuggugagcaacggcuccuaccucaacgagacccacuucagcgacgacaucgagcagcaggccgacaacaugaucaccgagaugcugcagaaggaguacauggagcggcaggggaagacgccccugggccucgucgaccuguucguguucuccaccagcuucuaccugaucuccaucuuccugcaccucgugaagaucccgacccaccgccacaucgucggcaagagcugccccaagccccaccggcugaaccacauggggaucugcuccugcgggcuguacaagcagcccggcgugccggugcgcuggaagcggugaggacuaguuauaagacugacuagcccgaugggccucccaacgggcccuccuccccuccuugcaccgagauuaaucaaaggcucuuuucagagccaccaaaaaaaaaaaaaaaaaaaaaaaaaaaaaaaaaaaaaaaaaaaaaaaaaaaaaaaaaaaaaaaaaaaaaaaaaaaaaaaaaaaaaaaaaaaaaaaaaaaaa

SEQ ID NO: 27806 - RNA, 1689 nt, Artificial Sequence
  mRNA product Design i-3 (hSL-A100) comprising derived and/or modified sequence from LASV(G502-SLE-2009;Clade IV)__AIT17126__GPCmut4 (opt1)
aggagaaagcuuaccaugggccagaucgugaccuucuuccaggaggucccccacgugaucgaggaggugaugaacaucguccugaucgcccucagcauccuggccgugcugaaggggcucuacaacuucgcgaccugcggccugguggggcugcucacguuccugcugcucugcggccgcuccugcaccaccgggcuguacaagggcgucuacgagcugcagacccucgagcugaacauggagacgcugaacaugugcaugccgcucagcugcaccaagaacaacucccaccacuacaucauggugggcaacgagaccgggcuggagcugacgcucaccaacaccagcaucaucaaccacaaguucugcaaccuguccgacgcccacaagaagaaccuguacgaccacgcccucaugagcaucaucuccaccuuccaccugagcauccccaacuucaaccaguacgaggccauguccugcgacuucaacggcgggaagaucagcgugcaguacaaccugucccacagcuacgccggcgacgcggccgaccacugcgggacggucgccaacggcgugcuccagaccuucaugcggauggccuggggcggguccuacaucgcgcuggacagcggccgcgggcggugggacugcaucaugaccuccuaccaguaccugaucauccagaacaccacgugggaggaccacugccaguucagccgccccucccccaucggcuaccucggccugcugagccagcggacccgcgacaucuacaucucccggcgccgccgggggaccuucaccuggacgcugagcgacagcgagggcaaggacacccccgggggcuacugccucacccgguggaugcugaucgaggccgagcugaagugcuucgggaacaccgccguggccaagugcaacgagaagcacgacgaggaguucugcgacaugcuccgccuguucgacuucugcaagcaggccauccagcggcugaaggcgcccgcccagauguccauccagcucaucaacaaggccgucaacgcccugaucaacgaccagcuggugaugaagaaccaccuccgcgacaucaugggcauccccuacugcaacuacagccgguacugcuaccugaaccacacgaccaccggccgcaccucccugcccaagugcugccucgugagcaacggguccuaccugaacgagacgcacuucagcgacgacaucgagcagcaggccgacaacaugaucaccgagaugcugcagaaggaguacauggagcggcagggcaagaccccgcucgggcuggucgaccuguucguguucuccaccagcuucuaccugaucuccaucuuccuccaccuggugaagaucccgacgcaccgccacaucgucggcaagagcugccccaagccccaccggcugaaccacauggggaucugcuccugcggccucuacaagcagcccggcgugccggugaaguggaagcgcugaggacuaguuauaagacugacuagcccgaugggccucccaacgggcccuccuccccuccuugcaccgagauuaaucaaaggcucuuuucagagccaccaaaaaaaaaaaaaaaaaaaaaaaaaaaaaaaaaaaaaaaaaaaaaaaaaaaaaaaaaaaaaaaaaaaaaaaaaaaaaaaaaaaaaaaaaaaaaaaaaaaaa

SEQ ID NO: 27807 - RNA, 1689 nt, Artificial Sequence
  mRNA product Design i-3 (hSL-A100) comprising derived and/or modified sequence from LASV(G733-SLE-2010;Clade IV)__AIT17154__GPCmut4 (opt1)
aggagaaagcuuaccaugggccagaucgugaccuucuuccaggaggucccccacgugaucgaggaggugaugaacaucguccugaucgcccucagcauccuggccgugcugaaggggcucuacaacuucgcgaccugcggcaucguggggcuggucuccuuccugcuccugugcggccgcagcugcacgaccucccuguacaaggggguguacgagcuccagacccuggagcugaacauggagacccucaacaugugcaugccgcugagcugcaccaagaacaacucccaccacuacaucauggugggcaacgagaccggccuggagcucacccugacgaacaccagcaucaucaaccacaaguucugcaaccuguccgacgcccacaagaagaaccucuacgaccacgcccugaugagcaucaucuccaccuuccaccugagcauccccaacuucaaccaguacgaggccauguccugcgacuucaacgggggcaagaucagcguccaguacaaccucucccacagcuacgccggggacgcggccaaccacugcggcaccaucgccaacggggugcugcagacguucaugcggauggccuggggcggcuccuacaucgcgcuggacagcgggcgcgaccggugggacugcaucaugaccuccuaccaguaccucaucauccagaacaccaccugggaggaccacugccaguucagccgccccucccccaucggcuaccuggggcugcucagccagcggacgcgcgacaucuacaucagccggcgccgccggggcaccuucaccuggacccucuccgacagcgagggcaaggacacgcccgggggcuacugccugacccgguggaugcugaucgaggccgagcucaagugcuucgggaacaccgccguggccaagugcaacgagaagcacgacgaggaguucugcgacaugcugcgccuguucgacuucugcaagcaggccauccagcggcucaaggcgcccgcccagauguccauccagcugaucaacaaggccgucaacgcccugaucaacgaccagcucaucaugaagaaccaccuccgcgacaucaugggcauccccuacugcaacuacagcaaguacugcuaccugaaccacaccacgaccgggaagaccucccugcccaagugcugccuggugagcaacggcuccuaccugaacgagacccacuucagcgacgacaucgagcagcaggccgacaacaugaucacggagaugcuccagaaggaguacauggagcggcagggcaagaccccgcuggggcugguggaccucuucgucuucuccaccagcuucuaccugaucuccaucuuccugcaccuggugaagaucccgacccaccgccacguggucggcaagagcugccccaagccccaccggcucaaccacauggggaucugcuccugcggccuguacgggcagcccggcgugccggugaaguggaagcgcugaggacuaguuauaagacugacuagcccgaugggccucccaacgggcccuccuccccuccuugcaccgagauuaaucaaaggcucuuuucagagccaccaaaaaaaaaaaaaaaaaaaaaaaaaaaaaaaaaaaaaaaaaaaaaaaaaaaaaaaaaaaaaaaaaaaaaaaaaaaaaaaaaaaaaaaaaaaaaaaaaaaaa

SEQ ID NO: 27808 - RNA, 1689 nt, Artificial Sequence
  mRNA product Design i-3 (hSL-A100) comprising derived and/or modified sequence from MOPV/LASV reassortant(IGS-1;Clade IV)__AFY05576__GPCmut4 (opt1)
aggagaaagcuuaccaugggccagaucgugaccuucuuccaggaggucccccacgugaucgaggaggugaugaacaucguccugaucgcccucagcgugcuggccgugcugaaggggcucuacaacuucgcgaccugcggccuggucgggcuggugacguuccuccugcugugcggccgcuccugcaccaccagccucuacaaggggguguacgagcugcagacccuggagcucaacauggagacgcugaacaugugcaugccgcuguccugcaccaagaacaacagccaccacuacaucauggucggcaacgagaccggccucgagcugacgcugaccaacaccuccaucaucaaccacaaguucugcaaccucagcgacgcccacaagaagaaccuguacgaccacgcccugauguccaucaucagcaccuuccaccucuccauccccaacuucaaccaguacgaggccaugagcugcgacuucaacgggggcaagaucuccgugcaguacaaccugagccacuccuacgccggggacgcggccaaccacugcggcacgguggccaacgggguccugcagaccuucaugcggauggccuggggcggcagcuacaucgcgcucgacuccgggcgcggcaacugggacugcaucaugaccagcuaccaguaccugaucauccagaacaccacgugggaggaccacugccaguucucccggcccagccccaucggguaccugggccuccugucccagcgcacccgggacaucuacaucagccgccggcgccggggcaccuucaccuggacgcugagcgacuccgagggggaggacaccccgggcggguacugccugacccgcuggaugcucaucgaggccgagcugaagugcuucggcaacaccgccguggccaagugcaacgagaagcacgacgaggaguucugcgacaugcugcggcuguucgacuucugcaagcaggccauccagcgccugaaggcgcccgcccagaugagcauccagcugaucaacaaggccgugaacgcccucaucaacgaccagcugaucaugaagaaccaccuccgggacaucauggggauccccuacugcaacuacuccaaguacugcuaccucaaccacacgaccaccggccgcaccagccugcccaagugcugccuggucuccaacggcagcuaccucaacgagacgcacuucuccgacgacaucgagcagcaggccgacaacaugaucaccgagaugcugcagaaggaguacauggagcggcaggggaagacgccccugggccucguggaccuguucguguucagcaccuccuucuaccugaucagcaucuuccugcaccucgucaagaucccgacccaccgccacaucguggggaaguccugccccaagccccaccggcugaaccacaugggcaucugcagcugcgggcuguacaagcagcccggcgugccggucaaguggaagcgcugaggacuaguuauaagacugacuagcccgaugggccucccaacgggcccuccuccccuccuugcaccgagauuaaucaaaggcucuuuucagagccaccaaaaaaaaaaaaaaaaaaaaaaaaaaaaaaaaaaaaaaaaaaaaaaaaaaaaaaaaaaaaaaaaaaaaaaaaaaaaaaaaaaaaaaaaaaaaaaaaaaaaa

SEQ ID NO: 27809 - RNA, 1689 nt, Artificial Sequence
  mRNA product Design i-3 (hSL-A100) comprising derived and/or modified sequence from LASV(LM765-SLE-2012;Clade IV)__AIT17814__GPCmut4 (opt1)
aggagaaagcuuaccaugggccagaucgugaccuucuuccaggaggucccccacgugaucgaggaggugaugaacaucguccugaucgcccucagcauccuggccgugcugaaggggcucuacaacuucgcgaccugcggccugguggggcuggucacguuccuccugcugugcggccgcuccugcaccaccagccucuacaaggggguguacgagcugcagacccuggagcucaacauggagacgcugaacaugugcaugccgcuguccugcaccaagaacaacagccaccacuacaucauggugggcaacgagaccggccucgagcugacgcugaccaacaccuccaucaucgaccacaaguucugcaaccucagcgacgcccaccggaagaaccuguacgaccacgcccugauguccaucaucagcaccuuccaccucuccauccccaacuucaaccaguacgaggccaugagcugcgacuucaacgggggcaagaucuccguccaguacaaccugagccacuccuacgccaaggacgcggccgaccacugcgggacgguggccaacggcgugcugcagaccuucaugcgcauggccuggggcgggagcuacaucgcgcucgacuccggccgggggcgcugggacugcaucaugaccagcuaccaguaccugaucauccagaacaccacgugggaggaccacugccaguucucccggcccagccccaucggcuaccuggggcuccugucccagcgcacccgggacaucuacaucagccgccggcgccggggcaccuucaccuggacgcugagcgacuccgagggcaaggacacccccgggggcuacugccugacccgcuggaugcucaucgaggccgagcugaagugcuucgggaacaccgccgucgccaagugcaacgagaagcacgacgaggaguucugcgacaugcugcggcuguucgacuucugcaagcaggccauccagcgccugaaggcgcccgcccagaugagcauccagcugaucaacaaggccgugaacgcccucaucaacgaccagcugaucaugaagaaccaccuccgggacaucaugggcauccccuacugcaacuacuccaaguacugcuaccucaaccacacgaccaccgggaagaccagccugcccaagugcugccugguguccaacggcagcuaccucaacgagacgcacuucuccgacgacaucgagcagcaggccgacaacaugaucaccgagaugcugcagaaggaguacauggagcgccagggcaagaccccgcuggggcucgucgaccuguucguguucagcaccuccuucuaccugaucagcaucuuccugcaccucgugaagaucccgacgcaccggcacaucgucggcaagcccugccccaagccccaccgccugaaccacauggggaucugcuccugcggccuguacaagcagccgggggugcccgugaaguggaagcggugaggacuaguuauaagacugacuagcccgaugggccucccaacgggcccuccuccccuccuugcaccgagauuaaucaaaggcucuuuucagagccaccaaaaaaaaaaaaaaaaaaaaaaaaaaaaaaaaaaaaaaaaaaaaaaaaaaaaaaaaaaaaaaaaaaaaaaaaaaaaaaaaaaaaaaaaaaaaaaaaaaaaa

SEQ ID NO: 27810 - RNA, 1689 nt, Artificial Sequence
  mRNA product Design i-3 (hSL-A100) comprising derived and/or modified sequence from LASV(LM776-SLE-2012;Clade IV)__AIT17824__GPCmut4 (opt1)
aggagaaagcuuaccaugggccagaucgugaccuucuuccaggaggucccccacgugaucgaggaggugaugaacaucguccugaucgcccucagcauccuggccgugcugaaggggcucuacaacuucgcgaccugcggccugguggggcuggucacguuccuccugcugugcggccgcuccugcaccaccagcguguacaaggggguguacgagcuccagacccuggagcugaacauggagacgcucaacaugugcaugccgcuguccugcaccaagaacaacagccaccacuacaucauggucggcaacgagaccggccuggagcucacgcugaccaacaccuccaucaucaaccacaaguucugcaaccugagcgacgcccacaagaagaaccucuacgaccacgcccugauguccaucaucagcaccuuccaccuguccauccccaacuucaaccaguacgaggccaugagcugcgacuucaacgggggcaagaucuccgugcaguacaaccucagccacuccuacgccggggacgcggccaaccacugcggcacgguggccaacgggguccugcagaccuucaugcggauggccuggggcggcagcuacaucgcgcuggacuccgggcacggcaagugggacugcaucaugaccagcuaccaguaccucaucauccagaacaccacgugggaggaccacugccaguucucccgccccagccccaucggguaccugggccugcucucccagcggacccgcgacaucuacaucagccggcgccgccggggcaccuucaccuggacgcucagcgacuccgaggggaaggacaccccgggcggguacugccugacccgguggaugcugaucgaggccgagcucaagugcuucggcaacaccgccguggccaagugcaacgagaagcacgacgaggaguucugcgacaugcugcgccuguucgacuucugcaagcaggccauccagcggcucaaggcgcccgcccagaugagcauccagcugaucaacaaggccgugaacgcccugaucaacgaccagcucaucaugaagaaccaccuccgcgacaucauggggauccccuacugcaacuacuccaaguacugcuaccugaaccacacgaccaccggcaagaccagccugcccaagugcugccuggucuccaacggcagcuaccugaacgagacgcacuucuccgacgacaucgagcagcaggccgacaacaugaucaccgagaugcuccagaaggaguacauggagcggcaggggaagacgccccugggccugguggaccucuucguguucagcaccuccuucuaccugaucagcaucuuccugcaccuggucaagaucccgacccaccgccacaucguggggaaguccugccccaagccccaccggcucaaccacaugggcaucugcagcugcgggcuguacaagcagcccggcgugccgguccgcuggaagcggugaggacuaguuauaagacugacuagcccgaugggccucccaacgggcccuccuccccuccuugcaccgagauuaaucaaaggcucuuuucagagccaccaaaaaaaaaaaaaaaaaaaaaaaaaaaaaaaaaaaaaaaaaaaaaaaaaaaaaaaaaaaaaaaaaaaaaaaaaaaaaaaaaaaaaaaaaaaaaaaaaaaaa

SEQ ID NO: 27811 - RNA, 1689 nt, Artificial Sequence
  mRNA product Design i-3 (hSL-A100) comprising derived and/or modified sequence from LASV(Mad39;Clade IV)__ANH09722__GPCmut4 (opt1)
aggagaaagcuuaccaugggccagaucgugaccuucuuccaggaggucccccacgugaucgaggaggugaugaacaucguccugaucgcccucagcauccuggccgugcugaaggggcucuacaacguggcgaccugcggccugaucgggcuggucacguuccuccugcugugcggccgcuccugcaccaccacccucuacaaggggguguacgagcugcaggcccuggagcucaacauggagacgcugaacaugugcaugccgcugagcugcaccaagaacaacucccaccacuacauccgggugggcaacgagaccggccucgagcugacgcugaccaacaccagccucaucaaccacaaguucugcaaccuguccgacgcccacaagaagaaccuguacgaccacgcccucaugagcaucaucuccaccuuccaccugagcauccccaacuucaaccaguacgaggccauguccugcgacuucaacgacgggaagaucagcguccaguacaaccugucccacacguacgcgggcgacaccgccaaccacugcgggaccguggccaacggcgugcuccagaccuucaugcgcauggccuggggcgggagcuacaucgcgcuggacuccggccgcgggggcugggacugcaucaugacgagcuaccaguaccugaucauccagaacaccaccugggaggaccacugccaguucucccggcccagccccaucggguaccucggccugcugucccagcggacccgcgacaucuacaucagccggcgccgccggggcacguucaccuggacccuguccgacagcgaggggaaggacaccccgggcggguacugccucacgcgguggaugcugaucgaggccgagcugaagugcuucggcaacaccgccgucgccaagugcaacgagaagcacgacgaggaguucugcgacaugcuccgccuguucgacuucugcaagcaggccauccagcggcugaaggcgcccgcccagaugagcauccagcucaucaacaaggccgugaacgcccugaucaacgaccagcugaucaugaagaaccaccuccgcgacaucauggggauccccuacugcaacuacuccaaguacugcuaccugaaccacaccgugaccggcaagacgagccugcccaagugcugccucgucuccaacggcagcuaccugaacgagacccacuucuccgacgacaucgagcagcaggccgacaacaugaucaccgagaugcugcagaaggaguacauggagcggcaggggaagacgccccucggccugguggaccuguucguguucagcaccuccuucuaccugaucagcaucuuccuccaccuggucaagaucccgacccaccgccacgugguggggaagcccugccccaagccccaccggcugaaccacaugggcaucugcuccugcggguucuacaagcagccgggcguccccgugcgcuggaagcggugaggacuaguuauaagacugacuagcccgaugggccucccaacgggcccuccuccccuccuugcaccgagauuaaucaaaggcucuuuucagagccaccaaaaaaaaaaaaaaaaaaaaaaaaaaaaaaaaaaaaaaaaaaaaaaaaaaaaaaaaaaaaaaaaaaaaaaaaaaaaaaaaaaaaaaaaaaaaaaaaaaaaa

SEQ ID NO: 27812 - RNA, 1689 nt, Artificial Sequence
  mRNA product Design i-3 (hSL-A100) comprising derived and/or modified sequence from LASV(Z0947-SLE-2011;Clade IV)__AIT17840__GPCmut4 (opt1)
aggagaaagcuuaccaugggccagaucgugaccuucuuccaggaggucccccacgugaucgaggaggugaugaacaucguccugaucgcccucagcauccuggccgugcugaaggggcucuacaacuucgcgaccugcggccugguggggcuggucacguuccuccugcugugcggccgcuccugcaccaucagccucuacaaggggguguacgagcugcagacccuggagcucaacauggagacccugaacaugugcaugccgcuguccugcaccaagaacaacagccaccacuacaucauggugggcaacgagaccggccucgagcugacccugacgaacaccuccaucaucaaccacaaguucugcaaccucagcgacgcccacaagaagaaccuguacgaccacgcccugauguccaucaucagcaccuuccaccucuccauccccaacuucaaccaguacgaggccaugagcugcgacuucaacgggggcaagaucuccguccaguacaaccugagccacuccuacgccggggacgcggccaaccacugcggcaccguggccaacggggugcugcagacguucaugcggauggccuggggcggcagcuacaucgcgcucgacuccgggcgcgaccggugggacugcaucaugaccagcuaccaguaccugaucauccagaacaccaccugggaggaccacugccaguucucccgccccagccccaucggcuaccuggggcuccugucccagcggacgcgcgacaucuacaucagccggcgccgccggggcaccuucaccuggacccugagcgacuccgagggcaaggacacgcccgggggcuacugccugacccgguggaugcucaucgaggccgagcugaagugcuucgggaacaccgccgucgccaagugcaacgagaagcacgacgaggaguucugcgacaugcugcgccucuucgacuucugcaagcaggccauccagcggcugaaggcgcccgcccagaugagcauccagcugaucaacaaggccgugaacgcccucaucaacgaccagcugaucaugaagaaccaccuccgcgacaucaugggcauccccuacugcaacuacuccaaguacugcuaccugaaccacaccacgaccgggaagaccagccugcccaagugcugccugguguccaacggcagcuaccucaacgagacccacuucuccgacgacaucgagcagcaggccgacaacaugaucacggagaugcugcagaaggaguacauggagcggcagggcaagaccccgcuggggcucgucgaccuguucguguucagcaccuccuucuaccugaucagcaucuuccugcaccucgugaagaucccgacccaccgccacaucgucggcaagcccugccccaagccccaccggcugaaccacauggggaucugcuccugcggccuguacaagcagccgggggugcccgugaaguggaagcgcugaggacuaguuauaagacugacuagcccgaugggccucccaacgggcccuccuccccuccuugcaccgagauuaaucaaaggcucuuuucagagccaccaaaaaaaaaaaaaaaaaaaaaaaaaaaaaaaaaaaaaaaaaaaaaaaaaaaaaaaaaaaaaaaaaaaaaaaaaaaaaaaaaaaaaaaaaaaaaaaaaaaaa

SEQ ID NO: 27813 - RNA, 1689 nt, Artificial Sequence
  mRNA product Design i-3 (hSL-A100) comprising derived and/or modified sequence from LASV(Josiah;Clade IV)__NP_694870__GPCmut4 (opt1)
aggagaaagcuuaccaugggccagaucgugaccuucuuccaggaggucccccacgugaucgaggaggugaugaacaucguccugaucgcccucagcgugcuggccgugcugaaggggcucuacaacuucgcgaccugcggccuggucgggcuggugacguuccuccugcugugcggccgcuccugcaccaccagccucuacaaggggguguacgagcugcagacccuggagcucaacauggagacgcugaacaugugcaugccgcuguccugcaccaagaacaacagccaccacuacaucauggucggcaacgagaccggccucgagcugacccugacgaacaccuccaucaucaaccacaaguucugcaaccucagcgacgcccacaagaagaaccuguacgaccacgcccugauguccaucaucagcaccuuccaccucuccauccccaacuucaaccaguacgaggccaugagcugcgacuucaacgggggcaagaucuccgugcaguacaaccugagccacuccuacgccggggacgcggccaaccacugcggcaccguggccaacgggguccugcagacguucaugcggauggccuggggcggcagcuacaucgcgcucgacuccgggcgcggcaacugggacugcaucaugaccagcuaccaguaccugaucauccagaacaccaccugggaggaccacugccaguucucccggcccagccccaucggguaccugggccuccugucccagcgcacgcgggacaucuacaucagccgccggcgccggggcaccuucaccuggacccugagcgacuccgaggggaaggacacgccgggcggguacugccucacccgcuggaugcugaucgaggccgagcugaagugcuucggcaacaccgccguggccaagugcaacgagaagcacgacgaggaguucugcgacaugcuccggcuguucgacuucugcaagcaggccauccagcgccugaaggcgcccgcccagaugagcauccagcucaucaacaaggccgugaacgcccugaucaacgaccagcugaucaugaagaaccaccuccgggacaucauggggauccccuacugcaacuacuccaaguacugcuaccugaaccacaccacgaccggccgcaccagccugcccaagugcugccucgucuccaacggcagcuaccugaacgagacccacuucuccgacgacaucgagcagcaggccgacaacaugaucacggagaugcugcagaaggaguacauggagcggcaggggaagaccccgcucggccugguggaccuguucguguucagcaccuccuucuaccugaucagcaucuuccuccaccuggucaagauccccacccaccgccacaucguggggaaguccugccccaagccccaccggcugaaccacaugggcaucugcagcugcgggcucuacaagcagccgggcgugcccgucaaguggaagcgcugaggacuaguuauaagacugacuagcccgaugggccucccaacgggcccuccuccccuccuugcaccgagauuaaucaaaggcucuuuucagagccaccaaaaaaaaaaaaaaaaaaaaaaaaaaaaaaaaaaaaaaaaaaaaaaaaaaaaaaaaaaaaaaaaaaaaaaaaaaaaaaaaaaaaaaaaaaaaaaaaaaaaa

SEQ ID NO: 27814 - RNA, 1686 nt, Artificial Sequence
  mRNA product Design i-3 (hSL-A100) comprising derived and/or modified sequence from LASV(LP;Clade I)__AAF86701__GPCmut4 (opt1)
aggagaaagcuuaccaugggccagaucaucaccuucuuccaggaggugccccacgucaucgaggaggugaugaacaucgugcugaucgcccucagccugcuggccauccucaaggggcuguacaacaucgcgaccugcggcaucaucgggcuggucgccuuccucuuccugugcggcaaguccugcagccugacgcucaagggcggguacgagcugcagacccuggagcucaacauggagacccugaacaugugcaugccgcuguccugcaccaagaacagcucccaccacuacauccgcgugggcaacgagacggggcucgagcugacccugaccaacaccagcaucaucaaccacaaguucugcaaccucuccgacgcccacaagaagaaccuguacgaccacgcccugaugagcaucaucuccacguuccaccucagcauccccaacuucaaccaguacgaggccauguccugcgacuucaacggcgggaagaucagcgugcaguacaaccugucccacagcuacgcgggcgacgccgccgagcacugcgggaccgucgccaacggcgugcugcagaccuucaugcggauggcguggggcgggcgcuacaucgcccucgacuccggcaaggggaacugggacugcaucaugaccagcuaccaguaccugaucauccagaacacgaccugggaggaccacugccaguucucccggcccagccccaucggcuaccugggccuccugucccagcgcacccgggacaucuacaucagccgccggcgccgggggaccuucacguggacccugagcgacuccgagggcaacgagacccccgggggcuacugccucacccgcuggaugcugaucgaggccgagcugaagugcuucgggaacacggccguggccaagugcaacgagaagcacgacgaggaguucugcgacaugcuccggcuguucgacuucugcaagcaggcgauccgccggcugaaggccccggcccagaugagcauccagcucaucaacaaggccgucaacgcccugaucaacgaccagcugaucaugaagaaccaccuccgcgacaucaugggcauccccuacugcaacuacuccaaguacugcuaccugaaccacaccagcuccggccggaccagccugcccaagugcugccucaucuccaacgggagcuaccugaacgagacccaguucuccgacgacaucgagcagcaggcggacaacaugaucacggagaugcugcagaaggaguacaucgagcgccagggcaagaccccgcucgggcugguggacaucuucaucuucagcaccuccuucuaccugaucagcaucuuccugcaccucaucaagauccccacccaccggcacaucgugggcaagcccugccccaagccgcaccgccugaaccacaugggggucugcuccugcggccuguacaagcaccccggcgugcccacgaaguggaagcggugaggacuaguuauaagacugacuagcccgaugggccucccaacgggcccuccuccccuccuugcaccgagauuaaucaaaggcucuuuucagagccaccaaaaaaaaaaaaaaaaaaaaaaaaaaaaaaaaaaaaaaaaaaaaaaaaaaaaaaaaaaaaaaaaaaaaaaaaaaaaaaaaaaaaaaaaaaaaaaaaaaaaa

SEQ ID NO: 27815 - RNA, 1686 nt, Artificial Sequence
  mRNA product Design i-3 (hSL-A100) comprising derived and/or modified sequence from LASV(803213;Clade II)__AAF86703__GPCmut4 (opt1)
aggagaaagcuuaccaugggccagaucaucaccuucuuccaggaggugccccacgucaucgaggaggugaugaacaucgugcugaucgcccucagccugcuggccauccucaaggggaucuacaacgucgcgaccugcggccuguucgggcugaucuccuuccuccugcugugcggccgcagcugcuccgugacguacaaggggguguacgagcuccagacccuggagcugaacauggccaaccucaacaugugcaugccgcugagcugcaccaagaacaacucccaccacuacaucauggucggcaacgagaccggccuggagcucacgcugaccaacaccagcaucaucaaccacaaguucugcaaccuguccgacgcccacaagaagaaccucuacgaccacgcccugaugagcaucaucuccaccuuccaccugagcauccccaacuucaaccaguacgaggccauguccugcgacuucaacgggggcaagaucagcgugcaguacaaccucucccacagcuucgcgguggacgccgccaaccacugcgggacgaucgccaacggcguccugcagaccuucaugcggauggcguggggcggguccuacaucgcccuggacagcggcaaggggaacugggacugcaucaugaccuccuaccaguaccucaucauccagaacaccacgugggaggaccacugccaguucagccgccccucccccaucggcuaccuggggcugcucagccagcggacccgcgacaucuacaucagccggcgccggcgcggcaccuucaccuggacgcuguccgacagcgagggcaacgaggcccccgggggcuacugccugacccgguggaugcucaucgaggccgagcugaagugcuucgggaacaccgccguggcgaagugcaacgagaagcacgacgaggaguucugcgacaugcugcgccucuucgacuucugcaagcaggccaucaagcggcugaagaccccggcccagauguccauccagcugaucaacaaggccgugaacgcccucaucaacgaccagcugaucaugaagaaccaccuccgcgacaucaugggcauccccuacugcaacuacagccgguacugcuaccugaaccacacggucaccgggaagaccucccugccccgcugcugccuggugagcaacggcuccuaccucaacgagacccacuucagcgacgacaucgagcagcaggcggacaacaugaucacggagaugcugcagaaggaguacauggaccggcagggcaagaccccgcuggggcucguggaccuguucgucuucuccaccagcuucuaccugaucuccaucuuccugcaccucgugaagauccccacccaccgccacaucgugggcaagcccugccccaagccgcaccggcugaaccacauggggaucugcagcugcggccuguacaagcaccccgggguccccgugaaguggaagcgcugaggacuaguuauaagacugacuagcccgaugggccucccaacgggcccuccuccccuccuugcaccgagauuaaucaaaggcucuuuucagagccaccaaaaaaaaaaaaaaaaaaaaaaaaaaaaaaaaaaaaaaaaaaaaaaaaaaaaaaaaaaaaaaaaaaaaaaaaaaaaaaaaaaaaaaaaaaaaaaaaaaaaa

SEQ ID NO: 27816 - RNA, 1686 nt, Artificial Sequence
  mRNA product Design i-3 (hSL-A100) comprising derived and/or modified sequence from LASV(GA391;Clade III)__CAA36645__GPCmut4 (opt1)
aggagaaagcuuaccaugggccagaucgugaccuucuuccaggaggucccccacgugaucgaggaggugaugaacaucguccugaucgcccucagcauccuggccauccugaaggggcucuacaacguggcgaccugcggccugaucgggcuggugacguuccuccugcuguccggccgcagcugcucccucaucuacaaggggaccuacgagcugcagacccuggagcucaacauggagacccugaacaugugcaugccgcugagcugcacgaagaacaacucccaccacuacauccgggucggcaacgagaccggccucgagcugacccugaccaacacgagcauccucaaccacaaguucugcaaccuguccgacgcccacaagcgcaaccuguacgaccacagccucauguccaucaucagcaccuuccaccuguccauccccaacuucaaccaguacgaggccaugagcugcgacuucaacgggggcaagaucaccgugcaguacaaccugucccacagcuucgccguggacgccgcggggcacugcggcacccucgccaacgggguccugcagacguucaugcggauggccuggggcggcuccuacaucgcccuggacagcgggcgcggcaacugggacugcaucaugaccuccuaccaguaccucaucauccagaacaccaccugggacgaccacugccaguucagccggcccucccccaucggguaccugggccugcucagccagcgcacgcgggacaucuacaucagccgccggcgccggggcaccuucaccuggacccuguccgacagcgaggggaacgagacgccgggcggguacugccugacccgcuggaugcucaucgaggcggagcugaagugcuucggcaacaccgccguggccaagugcaacgagaagcacgacgaggaguucugcgacaugcugcggcuguucgacuucugcaagcaggccauccgccggcugaagacccccgcccagauguccauccagcugaucaacaaggcggugaacgcccucaucaacgaccagcugaucaugaagaaccaccuccgcgacaucauggggauccccuacugcaacuacagccgguacugcuaccucaaccacacguccaccggcaagaccagccugccccgcugcugccugaucuccaacggcagcuaccucaacgagaccaaguucuccgacgacaucgagcagcaggccgacaacaugaucacggagaugcugcagaaggaguacaucgaccggcaggggaagaccccgcugggccuggucgaccucuucguguucagcaccuccuucuaccugaucagcaucuuccugcaccucgugaagauccccacccaccgccacaucgucgggaagcccugccccaagccgcaccggcugaaccacaugggcaucugcuccugcgggcuguacaagcagcccggcgugcccgugcgcuggaagcgcugaggacuaguuauaagacugacuagcccgaugggccucccaacgggcccuccuccccuccuugcaccgagauuaaucaaaggcucuuuucagagccaccaaaaaaaaaaaaaaaaaaaaaaaaaaaaaaaaaaaaaaaaaaaaaaaaaaaaaaaaaaaaaaaaaaaaaaaaaaaaaaaaaaaaaaaaaaaaaaaaaaaaa

SEQ ID NO: 27817 - RNA, 1689 nt, Artificial Sequence
  mRNA product Design i-3 (hSL-A100) comprising derived and/or modified sequence from LASV(AV;Clade V)__CCA30314__GPCmut4 (opt1)
aggagaaagcuuaccaugggccagaucgugaccuucuuccaggaggucccccacgugaucgaggaggugaugaacaucguccugaucgcccucagcauccuggccgugcugaaggggcucuacaacaucgcgaccugcggccugaucgggcugaucacguuccuccugcugugcggccgcuccugcagcuccaaccucuacaaggggguguacgagcugcagagccuggaccucaacauggagacccugaacaugugcaugccgcuguccugcaccaagaacaacagccaccacuacauccgggucggcaacgacaccggccucgagcugacgcugaccaacaccuccauccucaaccacaaguucugcaaccugagcgacgcccacaagaaggaccuguacgaccacgcccucauguccaucaucagcaccuuccaccuguccauccccaacuucaaccaguacgaggccaugagcugcgacuucaacgggggcaagaucuccgugcaguacaaccugagccacuccuacgccaucgacgcggccaaccacugcgggacgguggccaacggcauccuccagaccuucaugcgcauggccuggggcgggagcuacaucgcgcuggacuccggccgggggaacugggacugcaucaugaccagcuaccaguaccugaucauccagaacaccacgugggagaaccacugccaguucucccgccccagccccaucggcuaccucgggcugcugagccagcggacccgcgacaucuacaucucccggcgccggcgcggcaccuucaccuggacgcucagcgacuccgagggcaacgccacccccgggggcuacugccugacccgguggaugcugaucgaggccgagcucaagugcuucgggaacaccgccgucgccaagugcaacgagaagcacgacgaggaguucugcgacaugcugcgccuguucgacuucugcaagcaggcgaucagccggcucaaguccccggcccagaugagcauccagcugaucaacaaggccgugaacgcccugaucaacgaccagcucaucaugaagaaccaccuccgcgacaucaugggcauccccuacugcaacuacuccaaguacugcuaccugaaccacacgaucaccgggaagaccagccugcccaagugcugccugguguccaacggcagcuaccugaacgagacccacuucuccgacgacaucgagcagcaggccgacaacaugaucacggagaugcuccagaaggaguacauggagcggcagggcaagaccccgcuggggcuggucgaccuguucguguucagcaccuccuucuaccucaucagcaucuuccugcgccuggugaagauccccacccaccggcacaucgucggcaagcccugccccaagccgcaccgccucaaccacauggggaucugcuccugcggccuguacaagcagcccggggugcccgugcgguggaagcgcugaggacuaguuauaagacugacuagcccgaugggccucccaacgggcccuccuccccuccuugcaccgagauuaaucaaaggcucuuuucagagccaccaaaaaaaaaaaaaaaaaaaaaaaaaaaaaaaaaaaaaaaaaaaaaaaaaaaaaaaaaaaaaaaaaaaaaaaaaaaaaaaaaaaaaaaaaaaaaaaaaaaaa

SEQ ID NO: 27818 - RNA, 1686 nt, Artificial Sequence
  mRNA product Design i-3 (hSL-A100) comprising derived and/or modified sequence from LASV(Togo/2016/7082;Clade VI)__AMR44577__GPCmut4 (opt1)
aggagaaagcuuaccaugggccagaucaucaccuucuuccaggaggugccccacgucaucgaggaggugaugaacaucgugcugaucgcccucagccugcuggccauccucaagggggucuacaacguggcgaccugcggcaucaucgggcuggugacguuccuguuccucugcggccgcuccugcagccugaucuacaagggguccuacgagcugcagacccucgagcugaacauggagacccugaacaugugcaugccgcucagcugcaccaagaacuccagccaccacuacauccgggucggcaacgagacgggccuggagcugacccucaccaacaccuccaucaucaaccacaaguucugcaaccugagcgacgcccacaagcgcaaccuguacgaccacgcccucauguccauccugagcacguuccaccuguccauccccaacuucaaccaguacgaggccaugagcugcgacuucaacgggggcaagaucuccgugcaguacaaccucagccacgccuacgcgguggacgccgccgagcacugcgggaccgucgccaacggcgugcugcagaccuucaugcggauggcguggggcggguccuacaucgcccuggacagcggccgcgggaacugggacugcaucaugaccuccuaccaguaccucaucauccagaacacgaccugggaggaccacugccaguucagccggcccucccccaucggcuaccuggggcugcucagccagcgcacccgggacaucuacaucagccgccggcgccggggcaccuucacguggacccuguccgacagcgagggcaacgagacccccgggggcuacugccugacccgcuggaugcucaucgaggccgagcugaagugcuucgggaacacggccguggccaagugcaacgagaagcacgacgaggaguucugcgacaugcugcggcuguucgacuucugcaagcaggcgauccagcgccugaaguccccggcccagaugagcauccagcugaucaacaaggccgucaacgcccucaucaacgaccagcugaucaugaagaaccaccuccgggacaugaugggcauccccuacugcaacuacuccaaguacugcuaccucaaccacaccagcuccgggcgcaccagccugcccaagugcugccugguguccaacggcagcuaccucaacgagacccacuucuccgacgacaucgagcagcaggccgacaacaugaucacggagaugcugcagaaggaguacaucgaccggcagggcaagaccccgcuggggcucguggaccuguucgucuucagcaccuccuucuaccugaucagcaucuuccugcaccucaucaagauccccacccaccgccacaucgugggcaagcccugccccaagccgcaccggcugaaccacauggggaucugcuccugcggccuguacaagcagcccggggugcccacgcgcuggaagcggugaggacuaguuauaagacugacuagcccgaugggccucccaacgggcccuccuccccuccuugcaccgagauuaaucaaaggcucuuuucagagccaccaaaaaaaaaaaaaaaaaaaaaaaaaaaaaaaaaaaaaaaaaaaaaaaaaaaaaaaaaaaaaaaaaaaaaaaaaaaaaaaaaaaaaaaaaaaaaaaaaaaaa

SEQ ID NO: 27819 - RNA, 1686 nt, Artificial Sequence
  mRNA product Design i-3 (hSL-A100) comprising derived and/or modified sequence from LASV(KAK-428;Clade n.d. (VII))__ANH09740__GPCmut4 (opt1)
aggagaaagcuuaccaugggccagaucgugaccuucuuccaggaggucccccacgugaucgaggaggugaugaacaucguccugaucgcccucagccugcuggccauccucaaggggcuguacaacuucgcgaccugcggcgugaucgggcugaucacguuccuccugcugugcggccgcuccugcagcgccaccuacaaggggcaguacgagcuccagacccuggagcugaacauggagucccucaacaugugcaugccgcugagcugcaccaagaacaacucccaccacuacauccgggccggcaacaacacgggccuggagcucacccugaccaacaccagcaucaucucccacaaguucugcaaccugagcgacgcccacaagaagaaccucuacgaccacacgcugauguccaucaucaccaccuuccaccugagcauccccaacuucaaccaguacgaggccauguccugcgacuucaacgggggcaagaucagcauccaguacaaccucucccacagcuacgcgggggacgccgcccagcacugcggcaccguggccaacgggguccugcagacguucaugcgcauggcguggggcggcuccuaccuggcccucgacagcgggcggcgcggcugggacugcaucaucuccagcuaccaguaccugaucauccagaacaccaccugggacgaccacugccaguucucccggcccagccccaucggguaccugggcuucgugagccagaagacccgcgacaucuacaucucccggcgccggcgcggcacguucaccuggacccucagcgacuccgaggggcacgacaugccgggcggguacugccugacccgguggaugcugaucgaggccgaccucaagugcuucggcaacacggccguggccaagugcaacgagaagcacgacgaggaguucugcgacauguggcgccuguucgacuucugcaagcaggcgauccagcggcugaaggcccccgcccagaugaacauccagcucaucaacaaggccgucaacgcccugaucaacgaccagcugaugaugaagaaccaccuccgcgacaucauggggauccccuacugcaacuacagcaaguucugcuaccugaacaacaccaccaccggccggacgucccugccccgcugcugccucaucagcaacggcuccuaccugaacgagacccacuucagcgacgacaucgagcagcaggcggacaacaugaucaccgagaugcugcagaaggaguacauggaccggcaggggaagaccccgcucggccugguggaccuguucguguucuccacgagcuucuaccucaucaccaucuuccugcaccuggucaagauccccacccaccgccacaucguggggaagcccugccccaagccgcaccggcugaaccacaugggcaucugcuccugcgggcucuacaagcagcccggcgugcccguccgcuggaagcggugaggacuaguuauaagacugacuagcccgaugggccucccaacgggcccuccuccccuccuugcaccgagauuaaucaaaggcucuuuucagagccaccaaaaaaaaaaaaaaaaaaaaaaaaaaaaaaaaaaaaaaaaaaaaaaaaaaaaaaaaaaaaaaaaaaaaaaaaaaaaaaaaaaaaaaaaaaaaaaaaaaaaa

SEQ ID NO: 27820 - RNA, 1686 nt, Artificial Sequence; identical to SEQ ID NO: 27814
  mRNA product Design i-3 (hSL-A100) comprising derived and/or modified sequence from LASV(Pinneo-NIG-1969;Clade I)__AIT17836__GPCmut4 (opt1)

SEQ ID NO: 27821 - RNA, 1686 nt, Artificial Sequence
  mRNA product Design i-3 (hSL-A100) comprising derived and/or modified sequence from LASV(ISTH0009-NIG-2011;Clade II)__AIT17404__GPCmut4 (opt1)
aggagaaagcuuaccaugggccagaucaucaccuucuuccaggaggugccccacgucaucgaggaggugaugaacaucgugcugaucgcccucagccugcuggccauccucaaggggaucuacaacgucgcgaccugcggccuguucgggcugguguccuuccuccugcugugcggccgcagcugcuccacgaccuacaaggggguguacgagcuccagacccuggagcuggacauggccagccucaacaugugcaugccgcuguccugcaccaagaacaacagccaccacuacaucauggucggcaacgagacgggccuggagcucacccugaccaacaccuccaucaucaaccacaaguucugcaaccugagcgacgcccacaagaagaaccucuacgaccacgcccugauguccaucaucagcacguuccaccuguccauccccaacuucaaccaguacgaggccaugagcugcgacuucaacgggggcaagaucuccgugcaguacaaccucagccacgcguacgccguggacgccgccaaccacugcgggaccaucgcgaacggcguccugcagaccuucaugcggauggccuggggcggguccuacaucgcccuggacagcggcaagggguccugggacugcaucaugaccagcuaccaguaccucaucauccagaacacgaccugggaggaccacugccaguucucccgccccagccccaucggcuaccuggggcugcucagccagcggacccgcgacaucuacaucucccggcgccggcgcggcaccuucacguggacccugagcgacuccgagggcaacgagacccccgggggcuacugccugacccgguggaugcucaucgaggccgagcugaagugcuucgggaacacggccguggcgaagugcaacgagaagcacgacgaggaguucugcgacaugcugcgccucuucgacuucugcaagcaggccauccggcgccugaagaccccggcccagaugagcauccagcugaucaacaaggccgugaacgcccucaucaacgaccagcugaucaugaagaaccaccuccgggacaucaugggcauccccuacugcaacuacuccaaguacugcuaccugaaccacaccgucaccgggaagacgagccugccccgcugcugccugguguccaacggcagcuaccucaacgagacccacuucuccgacgacaucgagcagcaggcggacaacaugaucaccgagcugcugcagaaggaguacauggaccggcagggcaagaccccgcucgggcugguggaccuguucgucuucagcacguccuucuaccugaucagcaucuuccuccaccugaucaagauccccacccaccgccacaucaccggcaagcccugccccaagccgcaccggcugaaccacauggggaucugcuccugcggccucuacaagcaccccggggugcccgugaaguggaagcgcugaggacuaguuauaagacugacuagcccgaugggccucccaacgggcccuccuccccuccuugcaccgagauuaaucaaaggcucuuuucagagccaccaaaaaaaaaaaaaaaaaaaaaaaaaaaaaaaaaaaaaaaaaaaaaaaaaaaaaaaaaaaaaaaaaaaaaaaaaaaaaaaaaaaaaaaaaaaaaaaaaaaaa

SEQ ID NO: 27822 - RNA, 1686 nt, Artificial Sequence
  mRNA product Design i-3 (hSL-A100) comprising derived and/or modified sequence from LASV(ISTH2010-NIG-2012;Clade II)__AIT17482__GPCmut4 (opt1)
aggagaaagcuuaccaugggccagaucaucaccuucuuccaggaggugccccacgucaucgaggaggugaugaacaucgugcugaucgcccucagccugcuggccauccucaaggggaucuacaacgucgcgaccugcggccuguucgggcugguguccuuccuccugcugugcggccgcagcugcuccacgaccuacaaggggguguacgagcuccagacccuggagcuggacauggccagccucaacaugugcaugccgcuguccugcaccaagaacaacagccaccacuacaucauggucggcaacgagacgggccuggagcucacccugaccaacaccuccaucaucaaccacaaguucugcaaccugagcgacgcccacaagaagaaccucuacgaccacgcccugauguccaucaucagcacguuccaccuguccauccccaacuucaaccaguacgaggccaugagcugcgacuucaacgggggcaagaucuccgugcaguacaaccucagccacgcguacgccguggacgccgccaaccacugcgggaccaucgcgaacggcguccugcagaccuucaugcggauggccuggggcggguccuacaucgcccuggacagcggcaagggguccugggacugcaucaugaccagcuaccaguaccucaucauccagaacaucacgugggaggaccacugccaguucucccgccccagccccaucggcuaccuggggcugcucagccagcggacccgcgacaucuacaucucccggcgccggcgcggcaccuucaccuggacgcugagcgacuccgagggcaacgagacccccgggggcuacugccugacccgguggaugcucaucgaggccgagcugaagugcuucgggaacaccgccguggcgaagugcaacgagaagcacgacgaggaguucugcgacaugcugcgccucuucgacuucugcaagcaggccauccggcgccugaagacgccggcccagaugagcauccagcugaucaacaaggccgugaacgcccucaucaacgaccagcugaucaugaagaaccaccuccgggacaucaugggcauccccuacugcaacuacuccaaguacugcuaccugaaccacaccgucaccgggaagaccagccugccccgcugcugccugguguccaacggcagcuaccucaacgagacgcacuucuccgacgacaucgagcagcaggcggacaacaugaucaccgagcugcugcagaaggaguacaucgaccggcagggcaagaccccgcucgggcugguggaccuguucgucuucagcaccuccuucuaccugaucagcaucuuccuccaccuggugaagauccccacgcaccgccacguggucggcaagcccugccccaagccgcaccggcugaaccacauggggaucugcuccugcggccucuacaagcaccccggggugcccgugaaguggaagcgcugaggacuaguuauaagacugacuagcccgaugggccucccaacgggcccuccuccccuccuugcaccgagauuaaucaaaggcucuuuucagagccaccaaaaaaaaaaaaaaaaaaaaaaaaaaaaaaaaaaaaaaaaaaaaaaaaaaaaaaaaaaaaaaaaaaaaaaaaaaaaaaaaaaaaaaaaaaaaaaaaaaaaa

SEQ ID NO: 27823 - RNA, 1686 nt, Artificial Sequence
  mRNA product Design i-3 (hSL-A100) comprising derived and/or modified sequence from LASV(Lassa virus/H.sapiens-wt/NGA/2015/ISTH_0543;Clade II)__AVO03639__GPCmut4 (opt1)
aggagaaagcuuaccaugggccagaucaucaccuucuuccaggaggugccccacgucaucgaggaggugaugaacaucgugcugaucgcccucagccugcuggccauccucaaggggaucuacaacgucgcgaccugcggccuguucgggcugguguccuuccuccugcugugcggccgcagcugcuccacgaccuacaaggggguguacgagcuccagacccuggagcuggacauggccaaccucaacaugugcaugccgcugagcugcaccaagaacaacucccaccacuacaucauggucggcaacgagacgggccuggagcucacccugaccaacaccagcaucaucaaccacaaguucugcaaccuguccgacgcccacaagaagaaccucuacgaccacgcccugaugagcaucaucuccacguuccaccugagcauccccaacuucaaccaguacgaggccauguccugcgacuucaacgggggcaagaucagcgugcaguacaaccucucccacaccuacgcgguggacgccgccaaccacugcgggaccaucgccaacggcguccugcagaccuucaugcggauggcguggggcgggagcuacaucgcccuggacuccggcaaggggagcugggacugcaucaugacguccuaccaguaccucgugauccagaacaccaccugggaggaccacugccaguucagccgccccucccccaucggcuaccuggggcugcucagccagcggacccgcgacaucuacaucagccggcgccggcgcggcacguucaccuggacccuguccgacagcgagggcaacgagacccccgggggcuacugccugacgcgguggaugcucaucgaggccgagcugaagugcuucgggaacaccgccguggccaagugcaacgagaagcacgacgaggaguucugcgacaugcugcgccucuucgacuucugcaagcaggcgauccggcgccugaagaccccggcccagauguccauccagcugaucaacaaggccgucaacgcccucaucaacgaccagcugaucaugaagaaccaccuccgggacaucaugggcauccccuacugcaacuacagcaaguacugcuaccugaaccacaccgugacggggaagaccucccugccccgcugcugccuggugagcaacggcuccuaccucaacgagacccacuucagcgacgacaucgagcagcaggccgacaacaugaucaccgagcugcugcagaaggaguacaucgaccggcagggcaagacgccgcucgggcuggucgaccuguucguguucuccaccagcuucuaccugaucuccaucuuccuccaccuggugaagauccccacccaccgccacaucaccggcaagcccugccccaagccgcaccggcugaaccacauggggaucugcagcugcggccucuacaagcaccccgggguccccgugaaguggaagcgcugaggacuaguuauaagacugacuagcccgaugggccucccaacgggcccuccuccccuccuugcaccgagauuaaucaaaggcucuuuucagagccaccaaaaaaaaaaaaaaaaaaaaaaaaaaaaaaaaaaaaaaaaaaaaaaaaaaaaaaaaaaaaaaaaaaaaaaaaaaaaaaaaaaaaaaaaaaaaaaaaaaaaa

SEQ ID NO: 27824 - RNA, 1686 nt, Artificial Sequence
  mRNA product Design i-3 (hSL-A100) comprising derived and/or modified sequence from LASV(Lassa virus/H.sapiens-wt/NGA/2016/ISTH_0009;Clade II)__AVO03571__GPCmut4 (opt1)
aggagaaagcuuaccaugggccagaucaucaccuucuuccaggaggugccccacgucaucgaggaggugaugaacaucgugcugaucgcccucagccugcuggccauccucaaggggaucuacaacgucgcgaccugcggccugcuggggcucguguccuuccugcugcucugcggccgcagcugcuccacgaccuacaaggggguguacgagcugcagacccuggagcucgacauggccagccugaacaugugcaugccgcuguccugcaccaagaacaacagccaccacuacaucauggucggcaacgagacgggccucgagcugacccugaccaacaccuccaucaucaaccacaaguucugcaaccucagcgacgcccacaagaagaaccuguacgaccacgcccugauguccaucaucagcacguuccaccucuccauccccaacuucaaccaguacgaggccaugagcugcgacuucaacgggggccggaucuccgugcaguacaaccugagccacuccuacgcgguggacgccgccaaccacugcgggaccaucgccaacggcguccugcagaccuucaugcgcauggcguggggcgggagcuacaucgcccucgacuccggcaaggggagcugggacugcaucaugaccuccuaccaguaccugaucauccagaacacgaccugggaggaccacugccaguucagccggcccagccccaucggcuaccuggggcuccugucccagcgcacccgggacaucuacaucagccgccggcgccggggcaccuucacguggacccuguccgacagcgagggcaacgagacccccgggggcuacugccucacccgcuggaugcugaucgaggccgagcugaagugcuucgggaacacggccguggccaagugcaacgagaagcacgacgaggaguucugcgacaugcuccggcuguucgacuucugcaagcaggcgauccgccggcugaagaccccggcccagauguccauccagcucaucaacaaggccgugaacgcccugaucaacgaccagcugaucaugaagaaccaccuccgcgacaucaugggcauccccuacugcaacuacagcaaguacugcuaccugaaccacaccgucaccgggaagacgucccugccccggugcugccucgugagcaacggcuccuaccugaacgagacccacuucagcgacgacaucgagcagcaggccgacaacaugaucaccgagcugcuccagaaggaguacaucgaccgccagggcaagaccccgcuggggcugguggaccuguucgucuucuccacgagcuucuaccucaucuccaucuuccugcaccuggugaagauccccacccaccggcacaucaccggcaagcccugccccaagccgcaccgccucaaccacauggggaucugcagcugcggccuguacaaccaccccggggugcccgucaaguggaagcggugaggacuaguuauaagacugacuagcccgaugggccucccaacgggcccuccuccccuccuugcaccgagauuaaucaaaggcucuuuucagagccaccaaaaaaaaaaaaaaaaaaaaaaaaaaaaaaaaaaaaaaaaaaaaaaaaaaaaaaaaaaaaaaaaaaaaaaaaaaaaaaaaaaaaaaaaaaaaaaaaaaaaa

SEQ ID NO: 27825 - RNA, 1686 nt, Artificial Sequence
  mRNA product Design i-3 (hSL-A100) comprising derived and/or modified sequence from LASV(Lassa virus/H.sapiens-wt/NGA/2016/ISTH_0017;Clade II)__AVO03567__GPCmut4 (opt1)
aggagaaagcuuaccaugggccagaucaucaccuucuuccaggaggugccccacgucaucgaggaggugaugaacaucgugcugaucgcccucagccugcuggccauccucaaggggaucuacaacgucgcgaccugcggccuguucgggcugguguccuuccuccugcugugcggccgcagcugcuccacgaccuacaaggggguguacgagcuccagacccuggagcuggacauggccagccucaacaugugcaugccgcuguccugcaccaagaacaacagccaccacuacaucauggucggcaacgagacgggccuggagcucacccugaccaacaccuccaucaucaaccacaaguucugcaaccugagcgacgcccacaagaagaaccucuacgaccacgcccugauguccaucaucagcacguuccaccuguccauccccaacuucaaccaguacgaggccaugagcugcgacuucaacgggggcaagaucuccgugcaguacaaccucagccacaccuacgcgaucgacgccgccaaccacugcgggaccaucgccaacggcgugcugcagaccuucaugcggauggcguggggcggguccuacaucgcccuggacagcggcaagggguccugggacugcaucaugacgagcuaccaguaccucaucauccagaacaccaccugggaggaccacugccaguucucccgccccagccccaucggcuaccuggggcugcucagccagcggacccgcgacaucuacaucucccggcgccggcgcggcacguucaccuggacccugagcgacuccgagggcaacgagacccccgggggcuacugccugacgcgguggaugcucaucgaggccgagcugaagugcuucgggaacaccgccgucgccaagugcaacgagaagcacgacgaggaguucugcgacaugcugcgccucuucgacuucugcaagcaggcgauccggcgccugaagaccccggcccagaugagcauccagcugaucaacaaggccgugaacgcccucaucaacgaccagcugaucaugaagaaccaccuccgggacaucaugggcauccccuacugcaacuacuccaaguacugcuaccugaaccacaccgugacggggaagaccagccugccccgcugcugccuggucuccaacggcagcuaccucaacgagacccacuucuccgacgacaucgagcagcaggccgacaacaugaucaccgagcugcugcagaaggaguacauggaccggcagggcaagacgccgcucgggcugguggaccuguucguguucagcaccuccuucuaccugaucagcaucuuccuccaccugguccgcauccccacccaccggcacgugaucggcaagcccugccccaagccgcaccgccugaaccacauggggaucugcuccugcggccucuacaagcaccccggggugcccgucaaguggaagcggugaggacuaguuauaagacugacuagcccgaugggccucccaacgggcccuccuccccuccuugcaccgagauuaaucaaaggcucuuuucagagccaccaaaaaaaaaaaaaaaaaaaaaaaaaaaaaaaaaaaaaaaaaaaaaaaaaaaaaaaaaaaaaaaaaaaaaaaaaaaaaaaaaaaaaaaaaaaaaaaaaaaaa

SEQ ID NO: 27826 - RNA, 1686 nt, Artificial Sequence
  mRNA product Design i-3 (hSL-A100) comprising derived and/or modified sequence from LASV(Lassa virus/H.sapiens-wt/NGA/2018/ISTH_0959;Clade II)__AVV65099__GPCmut4 (opt1)
aggagaaagcuuaccaugggccagaucaucaccuucuuccaggaggugccccacgucaucgaggaggugaugaacaucgugcugaucgcccucagccugcuggccauccucaaggggaucuacaacgucgugaccugcggccuguucgggcugguguccuuccuccugcugugcggccgcagcugcuccacgaccuacaagggggucuacgagcuccagacccuggagcuggacauggcgagccucaacaugugcaugccgcuguccugcaccaagaacaacagccaccacuacaucauggugggcaacgagacgggccuggagcucacccugaccaacaccuccaucaucaaccacaaguucugcaaccugagcgacgcccacaagaagaaccucuacgaccacgcccugauguccaucaucagcacguuccaccuguccauccccaacuucaaccaguacgaggccaugagcugcgacuucaacgggggcaagaucuccgugcaguacaaccucagccacgccuacgcgaucgacgccgccaaccacugcgggaccaucgccaacggcguccugcagaccuucaugcggauggcguggggcggguccuacaucgcccuggacagcggcaagggguccugggacugcaucaugaccagcuaccaguaccucaucauccagaacacgaccugggaggaccacugccaguucucccgccccagccccaucggcuaccuggggcugcucagccagcggacccgcgacaucuacaucucccggcgccggcgcggcaccuucacguggacccugagcgacuccgagggcaacgagacccccgggggcuacugccugacccgguggaugcucaucgaggccgagcugaagugcuucgggaacacggccguggccaagugcaacgagaagcacgacgaggaguucugcgacaugcugcgccucuucgacuucugcaagcaggcgauccggcgccugaagaccccggcccagaugagcauccagcugaucaacaaggccgugaacgcccucaucaacgaccagcugaucaugaagaaccaccuccgggacaucaugggcauccccuacugcaacuacuccaaguacugcuaccugaaccacaccgucaccgggaagacgagccugccccgcugcugccugguguccaacggcagcuaccucaacgagacccacuucuccgacgacaucgagcagcaggccgacaacaugaucaccgagcugcugcagaaggaguacaucgaccggcagggcaagaccccgcucgggcugguggaccuguucgucuucagcacguccuucuaccugaucagcaucuuccuccaccuggugaagauccccacccaccgccacgugaucggcaagcccugccccaagccgcaccggcugaaccacauggggaucugcuccugcggccucuacaagcaccccgggguccccgugaaguggaagcgcugaggacuaguuauaagacugacuagcccgaugggccucccaacgggcccuccuccccuccuugcaccgagauuaaucaaaggcucuuuucagagccaccaaaaaaaaaaaaaaaaaaaaaaaaaaaaaaaaaaaaaaaaaaaaaaaaaaaaaaaaaaaaaaaaaaaaaaaaaaaaaaaaaaaaaaaaaaaaaaaaaaaaa

SEQ ID NO: 27827 - RNA, 1686 nt, Artificial Sequence
  mRNA product Design i-3 (hSL-A100) comprising derived and/or modified sequence from LASV(LASV003-NIG-2008;Clade II)__AIT17580__GPCmut4 (opt1)
aggagaaagcuuaccaugggccagaucaucaccuucuuccaggaggugccccacgucaucgaggaggugaugaacaucgugcugaucgcccucagccugcuggccauccucaaggggaucuacaacgucgcgaccugcggccuguucgggcugguguccuuccuccugcugugcggccgcagcugcuccacgaccuacaaggggguguacgagcuccagacccuggagcuggacauggccagccucaacaugugcaugccgcuguccugcaccaagaacaacagccaccacuacaucauggucggcaacgagacgggccuggagcucacccugaccaacaccuccaucaucaaccacaaguucugcaaccugagcgacgcccacaagaagaaccucuacgaccacgcccugauguccaucaucagcacguuccaccuguccauccccaacuucaaccaguacgaggccaugagcugcgacuucaacgggggcaagaucuccgugcaguacaaccucagccacaccuacgcgguggacgccgccaaccacugcgggaccaucgccaacggcguccugcagaccuucaugcggauggcguggggcggguccuacaucgcccuggacagcggcaagggguccugggacugcaucaugacgagcuaccaguaccucaucauccagaacaccaccugggaggaccacugccaguucucccgccccagccccaucggcuaccuggggcugcucagccagcggacccgcgacaucuacaucucccggcgccggcgcggcacguucaccuggacccugagcgacuccgagagcaacgagaccccgggcggguacugccugacgcgguggaugcucaucgaggccgagcugaagugcuucggcaacaccgccguggccaagugcaacgagaagcacgacgaggaguucugcgacaugcugcgccucuucgacuucugcaagcaggcgauccggcgccugaaggcccccgcccagauguccauccagcugaucaacaaggccgugaacgcccucaucaacgaccagcugaucaugaagaaccaccuccgggacaucauggggauccccuacugcaacuacagcaaguacugcuaccugaaccacaccgucaccggccgcacgucccugccccggugcugccuggugagcaacggguccuaccucaacgagacccacuucagcgacgacaucgagcagcaggcggacaacaugaucaccgagcugcugcagaaggaguacauggaccgccagggcaagaccccgcucggccugguggaccuguucgucuucuccacgagcuucuaccugaucuccaucuuccuccaccuggugaagauccccacccaccggcacgugaucgggaagcccugccccaagccgcaccgccugaaccacaugggcaucugcagcugcgggcucuacaagcaccccggcguccccgugaaguggaagcggugaggacuaguuauaagacugacuagcccgaugggccucccaacgggcccuccuccccuccuugcaccgagauuaaucaaaggcucuuuucagagccaccaaaaaaaaaaaaaaaaaaaaaaaaaaaaaaaaaaaaaaaaaaaaaaaaaaaaaaaaaaaaaaaaaaaaaaaaaaaaaaaaaaaaaaaaaaaaaaaaaaaaa

SEQ ID NO: 27828 - RNA, 1686 nt, Artificial Sequence
  mRNA product Design i-3 (hSL-A100) comprising derived and/or modified sequence from LASV(LASV035-NIG-2009;Clade II)__AIT17588__GPCmut4 (opt1)
aggagaaagcuuaccaugggccagaucaucaccuucuuccaggaggugccccacgucaucgaggaggugaugaacaucgugcugaucgcccucagccugcuggccauccucaaggggaucuacaacgucgcgaccugcggccuguucgggcugguguccuuccuccugcugugcggccgcagcugcuccacgaccuacaaggggguguacgagcuccagacccuggagcuggacauggccagccucaacaugugcaugccgcuguccugcaccaagaacaacagccaccacuacaucauggucggcaacgagacgggccuggagcucacccugaccaacaccuccaucaucaaccacaaguucugcaaccugagcgacgcccacaagaagaaccucuacgaccacgcccugauguccaucaucagcacguuccaccuguccauccccaacuucaaccaguacgaggccaugagcugcgacuucaacgggggcaagaucuccgugcaguacaaccucagccacgcguacgccguggacgccgccaaccacugcgggaccaucgcgaacggcguccugcagaccuucaugcggauggccuggggcggguccuacaucgcccuggacagcggcaagggguccugggacugcaucaugaccagcuaccaguaccucaucauccagaacacgaccugggaggaccacugccaguucucccgccccagccccaucggcuaccuggggcugcucagccagcggacccgcgacaucuacaucucccggcgccggcgcggcaccuucacguggacccugagcgacuccgagggcaacgagacccccgggggcuacugccugacccgguggaugcucaucgaggccgagcugaagugcuucgggaacacggccguggcgaagugcaacgagaagcacgacgaggaguucugcgacaugcugcgccucuucgacuucugcaagcaggccauccggcgccugaaggccccggcccagaugagcauccagcugaucaacaaggccgugaacgcgcucaucaacgaccagcugaucaugaagaaccaccuccgggacaucaugggcauccccuacugcaacuacuccaaguacugcuaccugaaccacaccgucaccgggaagaccagccugccccgcugcugccugguguccaacggcagcuaccucaacgagacgcacuucuccgacgacaucgagcagcaggccgacaacaugaucaccgagcugcugcagaaggaguacaucgaccggcagggcaagaccccgcucgggcugguggaccuguucgucuucagcaccuccuucuaccugaucagcaucuuccuccaccuggugaagauccccacgcaccgccacgugaucggcaagcccugccccaagccgcaccggcugaaccacauggggaucugcuccugcggccucuacaagcaccccgggguccccgugaaguggaagcgcugaggacuaguuauaagacugacuagcccgaugggccucccaacgggcccuccuccccuccuugcaccgagauuaaucaaaggcucuuuucagagccaccaaaaaaaaaaaaaaaaaaaaaaaaaaaaaaaaaaaaaaaaaaaaaaaaaaaaaaaaaaaaaaaaaaaaaaaaaaaaaaaaaaaaaaaaaaaaaaaaaaaaa

SEQ ID NO: 27829 - RNA, 1686 nt, Artificial Sequence
  mRNA product Design i-3 (hSL-A100) comprising derived and/or modified sequence from LASV(LASV1000-NIG-2009;Clade II)__AIT17782__GPCmut4 (opt1)
aggagaaagcuuaccaugggccagaucaucaccuucuuccaggaggugccccacgucaucgaggaggugaugaacaucgugcugaucgcccucagccugcuggccauccucaaggggaucuacaacgucgcgaccugcggccuguucgggcugguguccuuccuccugcugugcggccgcagcugcuccacgaccuacaaggggguguacgagcuccagacccuggagcuggacauggccagccucaacaugugcaugccgcuguccugcaccaagaacaacagccaccacuacaucauggucggcaacgagacgggccuggagcucacccugaccaacaccuccaucaucaaccacaaguucugcaaccugagcgacgcccacaagaagaaccucuacgaccacgcccugauguccaucaucagcacguuccaccuguccauccccaacuucaaccaguacgaggccaugagcugcgacuucaacgggggcaagaucuccgugcaguacaaccucagccacaccuacgcgguggacgccgccaaccacugcgggaccaucgccaacggcguccugcagaccuucaugcggauggcguggggcggguccuacaucgcccuggacagcggcaagggguccugggacugcaucaugacgagcuaccaguaccucaucauccagaacaccaccugggaggaccacugccaguucucccgccccagccccaucggcuaccuggggcugcucagccagcggacccgcgacaucuacaucucccggcgccggcgcggcacguucaccuggacccugagcgacuccgagggcaacgagacccccgggggcuacugccugacgcgguggaugcucaucgaggccgagcugaagugcuucgggaacaccgccguggccaagugcaacgagaagcacgacgaggaguucugcgacaugcugcgccucuucgacuucugcaagcaggcgaucaagcggcugaagaccccggcccagaugagcauccagcugaucaacaaggccgugaacgcccucaucaacgaccagcugaucaugaagaaccaccuccgcgacaucaugggcauccccuacugcaacuacuccaaguacugcuaccugaaccacaccgucacggggaagaccagccugccccggugcugccugguguccaacggcagcuaccucaacgagacccacuucuccgacgacaucgagcagcaggccgacaacaugaucaccgagcugcugcagaaggaguacaucgaccgccagggcaagacgccgcucgggcugguggaccuguucgucuucagcaccuccuucuaccugaucagcaucuuccuccaccuggugaagauccccacccaccggcacguggucggcaagcccugccccaagccgcaccgccugaaccacauggggaucugcuccugcggccucuacaagcaccccggggugcccgugaaguggaagcggugaggacuaguuauaagacugacuagcccgaugggccucccaacgggcccuccuccccuccuugcaccgagauuaaucaaaggcucuuuucagagccaccaaaaaaaaaaaaaaaaaaaaaaaaaaaaaaaaaaaaaaaaaaaaaaaaaaaaaaaaaaaaaaaaaaaaaaaaaaaaaaaaaaaaaaaaaaaaaaaaaaaaa

SEQ ID NO: 27830 - RNA, 1686 nt, Artificial Sequence
  mRNA product Design i-3 (hSL-A100) comprising derived and/or modified sequence from LASV(LASV221-NIG-2010;Clade II)__AIT17624__GPCmut4 (opt1)
aggagaaagcuuaccaugggccagaucaucaccuucuuccaggaggugccccacgucaucgaggaggugaugaacaucgugcugaucgcccucagccugcuggccauccucaaggggaucuacaacgucgcgaccugcggccuguucgggcugguguccuuccuccugcugugcggccgcagcugcuccacgaccuacaaggggguguacgagcuccagacccuggagcuggacauggccagccucaacaugugcaugccgcuguccugcaccaagaacaacagccaccacuacaucauggucggcaacgagacgggccuggagcucacccugaccaacaccuccaucaucaaccacaaguucugcaaccugagcgacgcccacaagaagaaccucuacgaccacgcccugauguccaucaucagcacguuccaccuguccauccccaacuucaaccaguacgaggccaugagcugcgacuucaacgggggcaagaucuccgugcaguacaaccucagccacaccuacgcgaucgacgccgccaaccacugcgggaccaucgccaacggcgugcugcagaccuucaugcggauggcguggggcggguccuacaucgcccuggacagcggcaagggguccugggacugcaucaugacgagcuaccaguaccucaucauccagaacaccaccugggaggaccacugccaguucucccgccccagccccaucggcuaccuggggcugcucagccagcggacccgcgacaucuacaucucccggcgccggcgcggcacguucaccuggacccugagcgacuccgagggcaacgagacccccgggggcuacugccugacgcgguggaugcucaucgaggccgagcugaagugcuucgggaacaccgccgucgccaagugcaacgagaagcacgacgaggaguucugcgacaugcugcgccucuucgacuucugcaagcaggcgauccggcgccugaagaccccggcccagaugagcauccagcugaucaacaaggccgugaacgcccucaucaacgaccagcugaucaugaagaaccaccuccgggacaucaugggcauccccuacugcaacuacuccaaguacugcuaccugaaccacaccgugacggggaagaccagccugccccgcugcugccuggucuccaacggcagcuaccucaacgagacccacuucuccgacgacaucgagcagcaggccgacaacaugaucaccgagaugcugcagaaggaguacauggaccggcagggcaagacgccgcuggggcucguggaccuguucguguucagcaccuccuucuaccugaucagcaucuuccugcaccucgucaagauccccacccaccgccacgugaucggcaagcccugccccaagccgcaccggcugaaccacauggggaucugcuccugcggccuguacaagcaccccggggugcccgucaaguggaagcgcugaggacuaguuauaagacugacuagcccgaugggccucccaacgggcccuccuccccuccuugcaccgagauuaaucaaaggcucuuuucagagccaccaaaaaaaaaaaaaaaaaaaaaaaaaaaaaaaaaaaaaaaaaaaaaaaaaaaaaaaaaaaaaaaaaaaaaaaaaaaaaaaaaaaaaaaaaaaaaaaaaaaaa

SEQ ID NO: 27831 - RNA, 1686 nt, Artificial Sequence
  mRNA product Design i-3 (hSL-A100) comprising derived and/or modified sequence from LASV(LASV237-NIG-2010;Clade II)__AIT17638__GPCmut4 (opt1)
aggagaaagcuuaccaugggccagaucaucaccuucuuccaggaggugccccacgucaucgaggaggugaugaacaucgugcugaucgcccucagccugcuggccauccucaaggggaucuacaacgucgcgaccugcggccuguucgggcugguguccuuccuccugcugugcggccgcagcugcuccacgaccuacaaggggguguacgagcuccagacccuggagcuggacauggccagccucaacaugugcaugccgcuguccugcaccaagaacaacagccaccacuacaucauggucggcaacgagacgggccuggagcucacccugaccaacaccuccaucaucaaccacaaguucugcaaccugagcgacgcccacaagaaggaccucuacgaccacgcccugauguccaucaucagcacguuccaccuguccauccccaacuucaaccaguacgaggccaugagcugcgacuucaacgggggcaagaucuccgugcaguacaaccucagccacaccuacgcgguggacgccgccaaccacugcgggaccaucgccaacggcguccugcagaccuucaugcggauggcguggggcggguccuacaucgcccuggacagcggcaagggguccugggacugcaucaugacgagcuaccaguaccucaucauccagaacaccaccugggaggaccacugccaguucucccgccccagccccaucggcuaccuggggcugcucagccagcggacccgcgacaucuacaucucccggcgccggcgcggcacguucaccuggacccugagcgacuccgagggcaacgagacccccgggggcuacugccugacgcgguggaugcucaucgaggccgagcugaagugcuucgggaacaccgccguggccaagugcaacgagaagcacgacgaggaguucugcgacaugcugcgccucuucgacuucugcaagcaggcgauccggcgccugaagaccccggcccagaugagcauccagcugaucaacaaggccgugaacgcccucaucaacgaccagcugaucaugaagaaccaccuccgggacaucaugggcauccccuacugcaacuacuccaaguacugcuaccugaaccacaccgucacggggaagaccagccugccccgcugcugccugguguccaacggcagcuaccucaacgagacccacuucuccgacgacaucgagcagcaggccgacaacaugaucaccgagcugcugcagaaggaguacauggaccggcagggcaagacgccgcucgggcugguggaccuguucgucuucagcaccuccuucuaccugaucagcaucuuccuccaccugaucaagauccccacccaccgccacaucaccggcaagcccugccccaagccgcaccggcugaaccacauggggaucugcuccugcggccucuacaagcaccccggggugcccgugaaguggaagcgcugaggacuaguuauaagacugacuagcccgaugggccucccaacgggcccuccuccccuccuugcaccgagauuaaucaaaggcucuuuucagagccaccaaaaaaaaaaaaaaaaaaaaaaaaaaaaaaaaaaaaaaaaaaaaaaaaaaaaaaaaaaaaaaaaaaaaaaaaaaaaaaaaaaaaaaaaaaaaaaaaaaaaa

SEQ ID NO: 27832 - RNA, 1686 nt, Artificial Sequence
  mRNA product Design i-3 (hSL-A100) comprising derived and/or modified sequence from LASV(LASV253-NIG-2011;Clade II)__AIT17670__GPCmut4 (opt1)
aggagaaagcuuaccaugggccagaucaucaccuucuuccaggaggugccccacgucaucgaggaggugaugaacaucgugcugaucgcccucagccugcuggccauccucaaggggaucuacaacgucgcgaccugcggccuguucgggcugguguccuuccuccugcugugcggccgcagcugcuccacgaccuacaaggggguguacgagcuccagacccuggagcuggacauggccagccucaacaugugcaugccgcuguccugcaccaagaacaacagccaccacuacaucauggucggcaacgagacgggccuggagcucacccugaccaacaccuccaucaucaaccacaaguucugcaaccugagcgacgcccacaagaagaaccucuacgaccacgcccugauguccaucaucagcacguuccaccuguccauccccaacuucaaccaguacgaggccaugagcugcgacuucaacgggggcaagaucuccgugcaguacaaccucagccacaccuacgcgguggacgccgccaaccacugcgggaccaucgccaacggcguccugcagaccuucaugcggauggcguggggcggguccuacaucgcccuggacagcggcaagggguccugggacugcaucaugacgagcuaccaguaccucaucauccagaacaccaccugggaggaccacugccaguucucccgccccagccccaucggcuaccuggggcugcucagccagcggacccgcgacaucuacaucucccggcgccggcgcggcacguucaccuggacccugagcgacuccgagggcaacgagacccccgggggcuacugccugacgcgguggaugcucaucgaggccgagcugaagugcuucgggaacaccgccguggccaagugcaacgagaagcacgacgaggaguucugcgacaugcugcgccucuucgacuucugcaagcaggcgauccggcgccugaaggccccggcccagaugagcauccagcugaucaacaaggccgugaacgcccucaucaacgaccagcugaucaugaagaaccaccuccgggacaucaugggcauccccuacugcaacuacuccaaguacugcuaccugaaccacaccgucaccgggcgcacgagccugccccggugcugccugguguccaacggcagcuaccucaacgagacccacuucuccgacgacaucgagcagcaggcggacaacaugaucaccgagcugcugcagaaggaguacaucgaccgccagggcaagaccccgcucgggcugguggaccuguucgucuucagcacguccuucuaccugaucagcaucuuccuccaccuggugaagauccccacccaccggcacaucaucggcaagcccugccccaagccgcaccgccugaaccacauggggaucugcuccugcggccucuacaagcaccccggggugcccgucaaguggaagcggugaggacuaguuauaagacugacuagcccgaugggccucccaacgggcccuccuccccuccuugcaccgagauuaaucaaaggcucuuuucagagccaccaaaaaaaaaaaaaaaaaaaaaaaaaaaaaaaaaaaaaaaaaaaaaaaaaaaaaaaaaaaaaaaaaaaaaaaaaaaaaaaaaaaaaaaaaaaaaaaaaaaaa

SEQ ID NO: 27833 - RNA, 1686 nt, Artificial Sequence
  mRNA product Design i-3 (hSL-A100) comprising derived and/or modified sequence from LASV(LASV254-NIG-2011;Clade II)__AIT17674__GPCmut4 (opt1)
aggagaaagcuuaccaugggccagaucaucaccuucuuccaggaggugccccacgucaucgaggaggugaugaacaucgugcugaucgcccucagccugcuggccauccucaaggggaucuacaacgucgcgaccugcggccuguucgggcugguguccuuccuccugcugugcggccgcagcugcuccacgaccuacaaggggguguacgagcuccagacccuggagcuggacaugaccaaccucaacaugugcaugccgcugagcugcacgaagaacaacucccaccacuacaucauggucggcaacgagaccggccuggagcucacccugaccaacacgagcaucaucaaccacaaguucugcaaccuguccgacgcccacaagaagaaccucuacaaccacgcccugaugagcaucaucuccaccuuccaccugagcauccccaacuucaaccaguacgaggccauguccugcgacuucaacgggggcaagaucagcgugcaguacaaccucucccacagcuacgccguggacgcggccaaccacugcgggaccaucgccaacggcguccugcagaccuucaugcggauggccuggggcggguccuacaucgcgcuggacagcggcaaggggaacugggacugcaucaugacguccuaccaguaccucaucauccagaacaccaccugggaggaccacugccaguucagccgccccucccccaucggcuaccuggggcugcucagccagcggacccgcgacaucuacaucagccggcgccggcgcggcacguucaccuggacccuguccgacagcgagggcaacgagacccccgggggcuacugccugacgcgguggaugcucaucgaggccgagcugaagugcuucgggaacaccgccguggccaagugcaacgagaagcacgacgaggaguucugcgacaugcugcgccucuucgacuucugcaagcaggccauccggcgccugaagaccccggcgcaggccaacauccagcugaucaacaaggccgugaacgcccucaucaacgaccagcugaucaugaagaaccaccuccgggacaucaugggcauccccuacugcaacuacuccaaguacugcuaccugaaccacaccgucacggggaagaccagccugccccgcugcugccugguguccaacggcagcuaccucaacgagacccacuucuccgacgacaucgagcagcaggccgacaacaugaucaccgagcugcugcagaaggaguacauggaccggcagggcaagacgccgcucgggcugguggaccuguucgucuucagcaccuccuucuaccugaucagcaucuuccuccaccuggugaagauccccacccaccgccacgugaucggcaagcccugccccaagccgcaccggcugaaccacauggggaucugcuccugcggccucuacaagcaccccgggguccccgugaaguggaagcgcugaggacuaguuauaagacugacuagcccgaugggccucccaacgggcccuccuccccuccuugcaccgagauuaaucaaaggcucuuuucagagccaccaaaaaaaaaaaaaaaaaaaaaaaaaaaaaaaaaaaaaaaaaaaaaaaaaaaaaaaaaaaaaaaaaaaaaaaaaaaaaaaaaaaaaaaaaaaaaaaaaaaaa

SEQ ID NO: 27834 - RNA, 1686 nt, Artificial Sequence
  mRNA product Design i-3 (hSL-A100) comprising derived and/or modified sequence from LASV(Nig08-A19;Clade III)__ADU56618__GPCmut4 (opt1)
aggagaaagcuuaccaugggccagaucgugaccuucuuccaggaggucccccacgugaucgaggaggugaugaacaucguccugaucgcccucagcauccuggccauccugaaggggcucuacaacaucgcgaccugcggccugaucgggcuggugacguuccuccugcuguccggccgcagcugcuccaugaccuacaaggggguguacgagcuccagacccuggagcugaacaugaacacccucaacaugugcaugccgcugagcugcacgaagaacaacucccaccacuacaucauggucggcaacgagaccggccuggagcucacccugaccaacacgagccugcuccaccacaaguucugcaaccuguccgacgcccacaagaagaaccuguacgaccacacccucaugagcaucaucuccaccuuccaccugagcauccccaacuucaaccaguacgaggccauguccugcgacuucaacgggggcaagaucaccgugcaguacaaccugagccacuccuacgccaucgacgccgcgaaccacugcgggacgguggccaacggcguccuccagaccuucaugcggauggccuggggcgggagcuacaucgcccuggacuccggccgcgggaagugggacugcaucaugaccagcuaccaguaccugaucauccagaacaccacgugggaggaccacugccaguucucccggcccagccccaucggcuaccucgggcugcugucccagcgcacccgggacaucuacaucagccgccggcgccggggcaccuucaccuggacgcucagcgacuccgagggcaacgagacccccgggggcuacugccugacccgcuggaugcugaucgaggcggagcucaagugcuucgggaacaccgccguggccaagugcaacgagaagcacgacgaggaguucugcgacaugcugcggcuguucgacuucugcaagcaggccauccgccggcucaaggccccggcgcagaugagcauccagcugaucaacaaggccgugaacgcccugaucaacgaccagcucaucaugaagaaccaccuccgcgacaucaugggcauccccuacugcaacuacuccaaguacugcuaccugaaccacacgagcaccgggcggaccucccugccccgcugcugccuggucagcaacggcuccuaccugaacgagacccacuucagcgacgacaucgagcagcaggccgacaacaugaucacggagaugcuccagaaggaguaccuggaccggcagggcaagaccccgcuggggcugguggaccucuucguguucuccaccagcuucuaccugaucuccaucuuccugcaccucgucaagauccccacccaccgccacaucgugggcaagcccugccccaagccgcaccggcugaaccacauggggaucugcagcugcggccuguacaagcagcccggggugcccguccgcuggaagcggugaggacuaguuauaagacugacuagcccgaugggccucccaacgggcccuccuccccuccuugcaccgagauuaaucaaaggcucuuuucagagccaccaaaaaaaaaaaaaaaaaaaaaaaaaaaaaaaaaaaaaaaaaaaaaaaaaaaaaaaaaaaaaaaaaaaaaaaaaaaaaaaaaaaaaaaaaaaaaaaaaaaaa

SEQ ID NO: 27835 - RNA, 1689 nt, Artificial Sequence
  mRNA product Design i-3 (hSL-A100) comprising derived and/or modified sequence from LASV(G1180-SLE-2010;Clade IV)__AIT17168__GPCmut4 (opt1)
aggagaaagcuuaccaugggccagaucgugaccuucuuccaggaggucccccacgugaucgaggaggugaugaacaucguccugaucgcccucagcauccuggccgugcugaaggggcucuacaacuucgcgaccugcggccugguggggcugcucacguuccugcugcucugcggccgcuccugcaccgccagccgguacaagggggucuacgagcugcagacccuggagcucaacauggagacccugaacaugugcaugccgcuguccugcacgaagaacaacagccaccacuacaucauggugggcaacgagaccggccucgagcugacccugaccaacacguccaucaucaaccacaaguucugcaaccucagcgacgcccacaagaagaaccuguacgaccacgcccugauguccaucaucagcaccuuccaccucuccauccccaacuucaaccaguacgaggccaugagcugcgacuucaacgggggcaagaucuccgugcaguacaaccugagccacuccuacgcgggggacgccgccaaccacugcggcaccgucgccaacggggugcugcagaccuucaugcgcauggcguggggcggcagcuacaucgcccucgacuccgggcacggcagcugggacugcaucaugacguccuaccaguaccugaucauccagaacaccaccugggaggaccacugccaguucagccggcccucccccaucggguaccugggccuccugagccagcgcacccgggacaucuacaucagccgccggcgccggggcacguucaccuggacccuguccgacagcgaggggaaggacaccccgggcggguacugccucacgcgcuggaugcugaucgaggccgagcugaagugcuucggcaacaccgccguggccaagugcaacgagaagcacgacgaggaguucugcgacaugcuccggcuguucgacuucugcaagcaggcgauccagcgccugaaggcccccgcccagauguccauccagcucaucaacaaggccgucaacgcccugaucaacgaccagcugaucaugaagaaccaccuccgggacaucauggggauccccuacugcaacuacagcaaguacugcuaccugaaccacaccaccacgggcaagaccucccugcccaagugcugccucgugagcaacggcuccuaccugaacgagacccacuucagcgacgacaucgagcagcaggcggacaacaugaucaccgagaugcugcagaaggaguacauggagcgccaggggaagacgccgcucggccugguggaccuguucgucuucuccaccagcuucuaccugaucuccaucuuccuccaccuggugaagauccccacccaccggcacaucgugggcaagagcugccccaagccccaccgccugaaccacauggggaucugcuccugcgggcucuacaagcagccgggcguccccgugaaguggaagcggugaggacuaguuauaagacugacuagcccgaugggccucccaacgggcccuccuccccuccuugcaccgagauuaaucaaaggcucuuuucagagccaccaaaaaaaaaaaaaaaaaaaaaaaaaaaaaaaaaaaaaaaaaaaaaaaaaaaaaaaaaaaaaaaaaaaaaaaaaaaaaaaaaaaaaaaaaaaaaaaaaaaaa

SEQ ID NO: 27836 - RNA, 1689 nt, Artificial Sequence
  mRNA product Design i-3 (hSL-A100) comprising derived and/or modified sequence from LASV(G1442-SLE-2011;Clade IV)__AIT17180__GPCmut4 (opt1)
aggagaaagcuuaccaugggccagaucgugaccuucuuccaggaggucccccacgugaucgaggaggugaugaacaucguccugaucgcccucagcauccuggccgugcugaaggggcucuacaacguggcgaccugcggccugaucgggcuggucacguuccuccugcugugcggccgcuccugcaccaccacccucuacaaggggguguacgagcugcagacgcuggagcucaacauggagacccugaacaugugcaugccgcugagcugcaccaagaacaacucccaccacuacauccgggugggcaacgagaccggccucgagcugacgcugaccaacaccagcaucaucaaccacaaguucugcaaccucuccgacgcccacaagaagaaccuguacgaccacgcccugaugagcaucaucuccaccuuccaccucagcauccccaacuucaaccaguacgaggccauguccugcgacuucaacgggggcaagaucagcguccaguacaaccugucccacagcuacgccggggacgcggccaaccacugcggcacgguggccaacggggugcugcagaccuucaugcgcauggccuggggcggcuccuacaucgcgcucgacagcgggcggggcaacugggacugcaucaugaccuccuaccaguaccugaucauccagaacaccacgugggacgaccacugccaguucagccgccccucccccaucggguaccugggccuccugagccagcggacccgcgacgucuacaucucccggcgccggcgcggcaccuucaccuggacgcugagcgacagcgaggggaaggacaccccgggcggguacugccucacccgguggaugcugaucgaggccgagcugaagugcuucggcaacaccgccguggccaagugcaacgagaagcacgacgaggaguucugcgacaugcuccgccuguucgacuucugcaagcaggccauccagcggcugaaggcgcccgcccagauguccauccagcucaucaacaaggccgugaacgcccugaucaacgaccagcugaucaugaagaaccaccuccgcgacaucauggggauccccuacugcaacuacagcaaguacugcuaccugaacaacacggccaccggcaagaccucccugcccaagugcugccucaucagcaacggcuccuaccugaacgagacccacuucagcgacgacaucgagcaggaggcggacaacaugaucacggagaugcugcagaaggaguacauggagcggcaggggaagaccccgcucggccuggucgaccuguucguguucuccaccagcuucuaccugaucuccaucuuccuccaccuggugaagauccccacccaccgccacaucgucggcaagagcugccccaagccccaccggcugaaccacauggggaucugcuccugcgggcucuacaagcagccgggcgugcccgugcgcuggaagcggugaggacuaguuauaagacugacuagcccgaugggccucccaacgggcccuccuccccuccuugcaccgagauuaaucaaaggcucuuuucagagccaccaaaaaaaaaaaaaaaaaaaaaaaaaaaaaaaaaaaaaaaaaaaaaaaaaaaaaaaaaaaaaaaaaaaaaaaaaaaaaaaaaaaaaaaaaaaaaaaaaaaaa

SEQ ID NO: 27837 - RNA, 1689 nt, Artificial Sequence
  mRNA product Design i-3 (hSL-A100) comprising derived and/or modified sequence from LASV(G3010-SLE-2013;Clade IV)__AIT17344__GPCmut4 (opt1)
aggagaaagcuuaccaugggccagaucgugaccuucuuccaggaggucccccacgugaucgaggaggugaugaacaucguccugaucgcccucagcauccuggccgugcugaaggggcucuacaacuucgcgaccugcggccugguggggcuggucacguuccuccugcugugcggccgcuccugcaccaccagccucuacaaggggguguacgagcugcagacccuggagcucaacauggagacgcugaacaugugcaugccgcuguccugcaccaagaacaacagccaccacuacaucauggugggcaacgagaccggccucgagcugacccugacgaacaccuccaucaucaaccacaaguucugcaaccucagcgacgcccacaagaagaaccuguacaaccacgcccugauguccaucaucagcaccuuccaccucuccauccccaacuucaaccaguacgaggccaugagcugcgacuucaacgggggcaagaucuccguccaguacaaccugagccacuccuacgccggggacgcggccagccacugcggcaccguggccaacggggugcugcagacguucaugcggauggccuggggcggcuccuacaucgcgcucgacagcggguacggcaagugggacugcaucaugaccuccuaccaguaccugaucauccagaacaccaccugggaggaccacugccaguucagccgccccucccccaucggguaccugggccuccugagccagcggacgcgcgacaucuacaucagccggcgccggcgcggcaccuucaccuggacccuguccgacagcgaggggaaggacacgccgggcggguacugccucacccgguggaugcugaucgaggccgagcugaagugcuucggcaacaccgccgucgccaagugcaacgagaagcacgacgaggaguucugcgacaugcuccgccuguucgacuucugcaagcaggccauccagcggcugaagacccccgcgcagauguccauccagcucaucaacaaggccgugaacgcccugaucaacgaccagcugaucaugaagaaccaccuccgcgacaucauggggauccccuacugcaacuacagcaaguacugcuaccugaaccacacgaccaccggcaagaccucccugcccaagugcugccucgugagcaacggcuccuaccugaacgagacgcacuucagcgacgacaucgagcagcaggccgacaacaugaucaccgagaugcugcagaaggaguacauggagcggcaggggaagaccccgcucggccuggucgaccuguucguguucuccaccagcuucuaccugaucuccaucuuccuccaccuggugaagauccccacgcaccgccacaucgucggcaagagcugccccaagccccaccggcugaaccacauggggaucugcuccugcgggcucuacaagcagccgggcgugcccgugcgcuggaagcggugaggacuaguuauaagacugacuagcccgaugggccucccaacgggcccuccuccccuccuugcaccgagauuaaucaaaggcucuuuucagagccaccaaaaaaaaaaaaaaaaaaaaaaaaaaaaaaaaaaaaaaaaaaaaaaaaaaaaaaaaaaaaaaaaaaaaaaaaaaaaaaaaaaaaaaaaaaaaaaaaaaaaa

SEQ ID NO: 27838 - RNA, 1689 nt, Artificial Sequence
  mRNA product Design i-3 (hSL-A100) comprising derived and/or modified sequence from LASV(G502-SLE-2009;Clade IV)__AIT17126__GPCmut4 (opt1)
aggagaaagcuuaccaugggccagaucgugaccuucuuccaggaggucccccacgugaucgaggaggugaugaacaucguccugaucgcccucagcauccuggccgugcugaaggggcucuacaacuucgcgaccugcggccugguggggcugcucacguuccugcugcucugcggccgcuccugcaccaccgggcuguacaagggcgucuacgagcugcagacccucgagcugaacauggagacgcugaacaugugcaugccgcucagcugcaccaagaacaacucccaccacuacaucauggugggcaacgagaccgggcuggagcugacccucacgaacaccagcaucaucaaccacaaguucugcaaccuguccgacgcccacaagaagaaccuguacgaccacgcccucaugagcaucaucuccaccuuccaccugagcauccccaacuucaaccaguacgaggccauguccugcgacuucaacggcgggaagaucagcgugcaguacaaccugucccacagcuacgccggcgacgcggccgaccacugcgggaccgucgccaacggcgugcuccagacguucaugcggauggccuggggcggguccuacaucgcgcuggacagcggccgcgggcggugggacugcaucaugaccuccuaccaguaccugaucauccagaacaccaccugggaggaccacugccaguucagccgccccucccccaucggcuaccucggccugcugagccagcggacgcgcgacaucuacaucucccggcgccggcgcgggaccuucaccuggacccucagcgacagcgagggcaaggacacgcccgggggcuacugccugacccgguggaugcugaucgaggccgagcucaagugcuucgggaacaccgccguggccaagugcaacgagaagcacgacgaggaguucugcgacaugcugcgccuguucgacuucugcaagcaggccauccagcggcucaaggcgccggcccagauguccauccagcugaucaacaaggccgucaacgcccugaucaacgaccagcucgugaugaagaaccaccuccgcgacaucaugggcauccccuacugcaacuacagccgguacugcuaccugaaccacaccacgaccggccgcaccucccugcccaagugcugccuggugagcaacggguccuaccugaacgagacccacuucagcgacgacaucgagcagcaggccgacaacaugaucacggagaugcuccagaaggaguacauggagcggcagggcaagaccccgcuggggcuggucgaccuguucguguucuccaccagcuucuaccucaucuccaucuuccugcaccuggugaagauccccacccaccgccacaucgucggcaagagcugccccaagccccaccggcucaaccacauggggaucugcuccugcggccuguacaagcagccgggcgugcccgugaaguggaagcgcugaggacuaguuauaagacugacuagcccgaugggccucccaacgggcccuccuccccuccuugcaccgagauuaaucaaaggcucuuuucagagccaccaaaaaaaaaaaaaaaaaaaaaaaaaaaaaaaaaaaaaaaaaaaaaaaaaaaaaaaaaaaaaaaaaaaaaaaaaaaaaaaaaaaaaaaaaaaaaaaaaaaaa

SEQ ID NO: 27839 - RNA, 1689 nt, Artificial Sequence
  mRNA product Design i-3 (hSL-A100) comprising derived and/or modified sequence from LASV(G733-SLE-2010;Clade IV)__AIT17154__GPCmut4 (opt1)
aggagaaagcuuaccaugggccagaucgugaccuucuuccaggaggucccccacgugaucgaggaggugaugaacaucguccugaucgcccucagcauccuggccgugcugaaggggcucuacaacuucgcgaccugcggcaucguggggcuggucuccuuccugcuccugugcggccgcagcugcacgaccucccuguacaaggggguguacgagcuccagacccuggagcugaacauggagacccucaacaugugcaugccgcugagcugcacgaagaacaacucccaccacuacaucauggugggcaacgagaccggccuggagcucacccugaccaacacgagcaucaucaaccacaaguucugcaaccuguccgacgcccacaagaagaaccucuacgaccacgcccugaugagcaucaucuccaccuuccaccugagcauccccaacuucaaccaguacgaggccauguccugcgacuucaacgggggcaagaucagcguccaguacaaccucucccacagcuacgccggggacgcggccaaccacugcggcaccaucgccaacggggugcugcagaccuucaugcggauggccuggggcggcuccuacaucgcgcuggacagcgggcgcgaccggugggacugcaucaugacguccuaccaguaccucaucauccagaacaccaccugggaggaccacugccaguucagccgccccucccccaucggcuaccuggggcugcucagccagcggacccgcgacaucuacaucagccggcgccggcgcggcacguucaccuggacccuguccgacagcgagggcaaggacacccccgggggcuacugccugacgcgguggaugcucaucgaggccgagcugaagugcuucgggaacaccgccguggccaagugcaacgagaagcacgacgaggaguucugcgacaugcugcgccucuucgacuucugcaagcaggccauccagcggcugaaggcgccggcccagauguccauccagcugaucaacaaggccgucaacgcccucaucaacgaccagcugaucaugaagaaccaccuccgcgacaucaugggcauccccuacugcaacuacagcaaguacugcuaccugaaccacaccaccacggggaagaccucccugcccaagugcugccuggugagcaacggcuccuaccucaacgagacccacuucagcgacgacaucgagcagcaggccgacaacaugaucaccgagaugcugcagaaggaguacauggagcggcagggcaagacgccgcuggggcucguggaccuguucgucuucuccaccagcuucuaccugaucuccaucuuccugcaccucgugaagauccccacccaccgccacguggucggcaagagcugccccaagccccaccggcugaaccacauggggaucugcuccugcggccuguacgggcagccgggcgugcccgugaaguggaagcgcugaggacuaguuauaagacugacuagcccgaugggccucccaacgggcccuccuccccuccuugcaccgagauuaaucaaaggcucuuuucagagccaccaaaaaaaaaaaaaaaaaaaaaaaaaaaaaaaaaaaaaaaaaaaaaaaaaaaaaaaaaaaaaaaaaaaaaaaaaaaaaaaaaaaaaaaaaaaaaaaaaaaaa

SEQ ID NO: 27840 - RNA, 1689 nt, Artificial Sequence
  mRNA product Design i-3 (hSL-A100) comprising derived and/or modified sequence from MOPV/LASV reassortant(IGS-1;Clade IV)__AFY05576__GPCmut4 (opt1)
aggagaaagcuuaccaugggccagaucgugaccuucuuccaggaggucccccacgugaucgaggaggugaugaacaucguccugaucgcccucagcgugcuggccgugcugaaggggcucuacaacuucgcgaccugcggccuggucgggcuggugacguuccuccugcugugcggccgcuccugcaccaccagccucuacaaggggguguacgagcugcagacccuggagcucaacauggagacgcugaacaugugcaugccgcuguccugcaccaagaacaacagccaccacuacaucauggucggcaacgagaccggccucgagcugacccugacgaacaccuccaucaucaaccacaaguucugcaaccucagcgacgcccacaagaagaaccuguacgaccacgcccugauguccaucaucagcaccuuccaccucuccauccccaacuucaaccaguacgaggccaugagcugcgacuucaacgggggcaagaucuccgugcaguacaaccugagccacuccuacgccggggacgcggccaaccacugcggcaccguggccaacgggguccugcagacguucaugcggauggccuggggcggcagcuacaucgcgcucgacuccgggcgcggcaacugggacugcaucaugaccagcuaccaguaccugaucauccagaacaccaccugggaggaccacugccaguucucccggcccagccccaucggguaccugggccuccugucccagcgcacgcgggacaucuacaucagccgccggcgccggggcaccuucaccuggacccugagcgacuccgagggggaggacacgccgggcggguacugccucacccgcuggaugcugaucgaggccgagcugaagugcuucggcaacaccgccguggccaagugcaacgagaagcacgacgaggaguucugcgacaugcuccggcuguucgacuucugcaagcaggccauccagcgccugaaggcgcccgcccagaugagcauccagcucaucaacaaggccgugaacgcccugaucaacgaccagcugaucaugaagaaccaccuccgggacaucauggggauccccuacugcaacuacuccaaguacugcuaccugaaccacaccacgaccggccgcaccagccugcccaagugcugccucgucuccaacggcagcuaccugaacgagacccacuucuccgacgacaucgagcagcaggccgacaacaugaucacggagaugcugcagaaggaguacauggagcggcaggggaagaccccgcucggccugguggaccuguucguguucagcaccuccuucuaccugaucagcaucuuccuccaccuggucaagauccccacccaccgccacaucguggggaaguccugccccaagccccaccggcugaaccacaugggcaucugcagcugcgggcucuacaagcagccgggcgugcccgucaaguggaagcgcugaggacuaguuauaagacugacuagcccgaugggccucccaacgggcccuccuccccuccuugcaccgagauuaaucaaaggcucuuuucagagccaccaaaaaaaaaaaaaaaaaaaaaaaaaaaaaaaaaaaaaaaaaaaaaaaaaaaaaaaaaaaaaaaaaaaaaaaaaaaaaaaaaaaaaaaaaaaaaaaaaaaaa

SEQ ID NO: 27841 - RNA, 1689 nt, Artificial Sequence
  mRNA product Design i-3 (hSL-A100) comprising derived and/or modified sequence from LASV(LM765-SLE-2012;Clade IV)__AIT17814__GPCmut4 (opt1)
aggagaaagcuuaccaugggccagaucgugaccuucuuccaggaggucccccacgugaucgaggaggugaugaacaucguccugaucgcccucagcauccuggccgugcugaaggggcucuacaacuucgcgaccugcggccugguggggcuggucacguuccuccugcugugcggccgcuccugcaccaccagccucuacaaggggguguacgagcugcagacccuggagcucaacauggagacgcugaacaugugcaugccgcuguccugcaccaagaacaacagccaccacuacaucauggugggcaacgagaccggccucgagcugacccugacgaacaccuccaucaucgaccacaaguucugcaaccucagcgacgcccaccggaagaaccuguacgaccacgcccugauguccaucaucagcaccuuccaccucuccauccccaacuucaaccaguacgaggccaugagcugcgacuucaacgggggcaagaucuccguccaguacaaccugagccacuccuacgccaaggacgcggccgaccacugcgggaccguggccaacggcgugcugcagacguucaugcgcauggccuggggcgggagcuacaucgcgcucgacuccggccgggggcgcugggacugcaucaugaccagcuaccaguaccugaucauccagaacaccaccugggaggaccacugccaguucucccggcccagccccaucggcuaccuggggcuccugucccagcgcacgcgggacaucuacaucagccgccggcgccggggcaccuucaccuggacccugagcgacuccgagggcaaggacacgcccgggggcuacugccucacccgcuggaugcugaucgaggccgagcugaagugcuucgggaacaccgccgucgccaagugcaacgagaagcacgacgaggaguucugcgacaugcuccggcuguucgacuucugcaagcaggccauccagcgccugaaggcgccggcccagaugagcauccagcucaucaacaaggccgugaacgcccugaucaacgaccagcugaucaugaagaaccaccuccgggacaucaugggcauccccuacugcaacuacuccaaguacugcuaccugaaccacaccacgaccgggaagaccagccugcccaagugcugccucguguccaacggcagcuaccugaacgagacccacuucuccgacgacaucgagcagcaggccgacaacaugaucacggagaugcugcagaaggaguacauggagcgccagggcaagaccccgcucgggcuggucgaccuguucguguucagcaccuccuucuaccugaucagcaucuuccuccaccuggugaagauccccacccaccggcacaucgucggcaagcccugccccaagccgcaccgccugaaccacauggggaucugcuccugcggccucuacaagcagcccggggugcccgugaaguggaagcggugaggacuaguuauaagacugacuagcccgaugggccucccaacgggcccuccuccccuccuugcaccgagauuaaucaaaggcucuuuucagagccaccaaaaaaaaaaaaaaaaaaaaaaaaaaaaaaaaaaaaaaaaaaaaaaaaaaaaaaaaaaaaaaaaaaaaaaaaaaaaaaaaaaaaaaaaaaaaaaaaaaaaa

SEQ ID NO: 27842 - RNA, 1689 nt, Artificial Sequence
  mRNA product Design i-3 (hSL-A100) comprising derived and/or modified sequence from LASV(LM776-SLE-2012;Clade IV)__AIT17824__GPCmut4 (opt1)
aggagaaagcuuaccaugggccagaucgugaccuucuuccaggaggucccccacgugaucgaggaggugaugaacaucguccugaucgcccucagcauccuggccgugcugaaggggcucuacaacuucgcgaccugcggccugguggggcuggucacguuccuccugcugugcggccgcuccugcaccaccagcguguacaaggggguguacgagcuccagacccuggagcugaacauggagacgcucaacaugugcaugccgcuguccugcaccaagaacaacagccaccacuacaucauggucggcaacgagaccggccuggagcucacccugacgaacaccuccaucaucaaccacaaguucugcaaccugagcgacgcccacaagaagaaccucuacgaccacgcccugauguccaucaucagcaccuuccaccuguccauccccaacuucaaccaguacgaggccaugagcugcgacuucaacgggggcaagaucuccgugcaguacaaccucagccacuccuacgccggggacgcggccaaccacugcggcaccguggccaacgggguccugcagacguucaugcggauggccuggggcggcagcuacaucgcgcuggacuccgggcacggcaagugggacugcaucaugaccagcuaccaguaccucaucauccagaacaccaccugggaggaccacugccaguucucccgccccagccccaucggguaccugggccugcucucccagcggacgcgcgacaucuacaucagccggcgccggcgcggcaccuucaccuggacccugagcgacuccgaggggaaggacacgccgggcggguacugccugacccgguggaugcucaucgaggccgagcugaagugcuucggcaacaccgccguggccaagugcaacgagaagcacgacgaggaguucugcgacaugcugcgccucuucgacuucugcaagcaggccauccagcggcugaaggcgcccgcccagaugagcauccagcugaucaacaaggccgugaacgcccucaucaacgaccagcugaucaugaagaaccaccuccgcgacaucauggggauccccuacugcaacuacuccaaguacugcuaccugaaccacaccacgaccggcaagaccagccugcccaagugcugccuggucuccaacggcagcuaccucaacgagacccacuucuccgacgacaucgagcagcaggccgacaacaugaucacggagaugcugcagaaggaguacauggagcggcaggggaagaccccgcugggccucguggaccuguucguguucagcaccuccuucuaccugaucagcaucuuccugcaccucgucaagauccccacccaccgccacaucguggggaaguccugccccaagccccaccggcugaaccacaugggcaucugcagcugcgggcuguacaagcagccgggcgugcccguccgcuggaagcggugaggacuaguuauaagacugacuagcccgaugggccucccaacgggcccuccuccccuccuugcaccgagauuaaucaaaggcucuuuucagagccaccaaaaaaaaaaaaaaaaaaaaaaaaaaaaaaaaaaaaaaaaaaaaaaaaaaaaaaaaaaaaaaaaaaaaaaaaaaaaaaaaaaaaaaaaaaaaaaaaaaaaa

SEQ ID NO: 27843 - RNA, 1689 nt, Artificial Sequence
  mRNA product Design i-3 (hSL-A100) comprising derived and/or modified sequence from LASV(Mad39;Clade IV)__ANH09722__GPCmut4 (opt1)
aggagaaagcuuaccaugggccagaucgugaccuucuuccaggaggucccccacgugaucgaggaggugaugaacaucguccugaucgcccucagcauccuggccgugcugaaggggcucuacaacguggcgaccugcggccugaucgggcuggucacguuccuccugcugugcggccgcuccugcaccaccacccucuacaaggggguguacgagcugcaggcccuggagcucaacauggagacgcugaacaugugcaugccgcugagcugcaccaagaacaacucccaccacuacauccgggugggcaacgagaccggccucgagcugacccugacgaacaccagccucaucaaccacaaguucugcaaccuguccgacgcccacaagaagaaccuguacgaccacgcccucaugagcaucaucuccaccuuccaccugagcauccccaacuucaaccaguacgaggccauguccugcgacuucaacgacgggaagaucagcguccaguacaaccugucccacaccuacgcgggcgacacggccaaccacugcgggaccguggccaacggcgugcuccagaccuucaugcgcauggccuggggcgggagcuacaucgcgcuggacuccggccgcgggggcugggacugcaucaugaccagcuaccaguaccugaucauccagaacacgaccugggaggaccacugccaguucucccggcccagccccaucggguaccucggccugcugucccagcggacccgcgacaucuacaucagccggcgccggcgcggcaccuucacguggacccucuccgacagcgaggggaaggacaccccgggcggguacugccugacccgguggaugcugaucgaggccgagcucaagugcuucggcaacacggccgucgccaagugcaacgagaagcacgacgaggaguucugcgacaugcugcgccuguucgacuucugcaagcaggccauccagcggcucaaggcgcccgcccagaugagcauccagcugaucaacaaggccgugaacgcccugaucaacgaccagcucaucaugaagaaccaccuccgcgacaucauggggauccccuacugcaacuacuccaaguacugcuaccugaaccacaccgugaccggcaagaccagccugcccaagugcugccuggucuccaacggcagcuaccugaacgagacgcacuucuccgacgacaucgagcagcaggccgacaacaugaucaccgagaugcuccagaaggaguacauggagcggcaggggaagaccccgcugggccugguggaccuguucguguucagcaccuccuucuaccucaucagcaucuuccugcaccuggucaagauccccacgcaccgccacgugguggggaagcccugccccaagccgcaccggcucaaccacaugggcaucugcuccugcggguucuacaagcagcccggcguccccgugcgcuggaagcggugaggacuaguuauaagacugacuagcccgaugggccucccaacgggcccuccuccccuccuugcaccgagauuaaucaaaggcucuuuucagagccaccaaaaaaaaaaaaaaaaaaaaaaaaaaaaaaaaaaaaaaaaaaaaaaaaaaaaaaaaaaaaaaaaaaaaaaaaaaaaaaaaaaaaaaaaaaaaaaaaaaaaa

SEQ ID NO: 27844 - RNA, 1689 nt, Artificial Sequence
  mRNA product Design i-3 (hSL-A100) comprising derived and/or modified sequence from LASV(Z0947-SLE-2011;Clade IV)__AIT17840__GPCmut4 (opt1)
aggagaaagcuuaccaugggccagaucgugaccuucuuccaggaggucccccacgugaucgaggaggugaugaacaucguccugaucgcccucagcauccuggccgugcugaaggggcucuacaacuucgcgaccugcggccugguggggcuggucacguuccuccugcugugcggccgcuccugcaccaucagccucuacaaggggguguacgagcugcagacccuggagcucaacauggagacccugaacaugugcaugccgcuguccugcacgaagaacaacagccaccacuacaucauggugggcaacgagaccggccucgagcugacccugaccaacacguccaucaucaaccacaaguucugcaaccucagcgacgcccacaagaagaaccuguacgaccacgcccugauguccaucaucagcaccuuccaccucuccauccccaacuucaaccaguacgaggccaugagcugcgacuucaacgggggcaagaucuccguccaguacaaccugagccacuccuacgccggggacgcggccaaccacugcggcaccguggccaacggggugcugcagaccuucaugcggauggccuggggcggcagcuacaucgcgcucgacuccgggcgcgaccggugggacugcaucaugacgagcuaccaguaccugaucauccagaacaccaccugggaggaccacugccaguucucccgccccagccccaucggcuaccuggggcuccugucccagcggacccgcgacaucuacaucagccggcgccggcgcggcacguucaccuggacccugagcgacuccgagggcaaggacacccccgggggcuacugccucacgcgguggaugcugaucgaggccgagcugaagugcuucgggaacaccgccgucgccaagugcaacgagaagcacgacgaggaguucugcgacaugcuccgccuguucgacuucugcaagcaggccauccagcggcugaaggcgccggcccagaugagcauccagcucaucaacaaggccgugaacgcccugaucaacgaccagcugaucaugaagaaccaccuccgcgacaucaugggcauccccuacugcaacuacuccaaguacugcuaccugaaccacaccaccacggggaagaccagccugcccaagugcugccucguguccaacggcagcuaccugaacgagacccacuucuccgacgacaucgagcagcaggccgacaacaugaucaccgagaugcugcagaaggaguacauggagcggcagggcaagacgccgcucgggcuggucgaccuguucguguucagcaccuccuucuaccugaucagcaucuuccuccaccuggugaagauccccacccaccgccacaucgucggcaagcccugccccaagccgcaccggcugaaccacauggggaucugcuccugcggccucuacaagcagcccggggugcccgugaaguggaagcgcugaggacuaguuauaagacugacuagcccgaugggccucccaacgggcccuccuccccuccuugcaccgagauuaaucaaaggcucuuuucagagccaccaaaaaaaaaaaaaaaaaaaaaaaaaaaaaaaaaaaaaaaaaaaaaaaaaaaaaaaaaaaaaaaaaaaaaaaaaaaaaaaaaaaaaaaaaaaaaaaaaaaaa

SEQ ID NO: 27845 - RNA, 1689 nt, Artificial Sequence
  mRNA product Design i-3 (hSL-A100) comprising derived and/or modified sequence from LASV(Josiah;Clade IV)__NP_694870__GPCmut4 (opt4)
aggagaaagcuuaccaugggccagaucgugaccuucuuccaggaggugccccacgugaucgaggaggugaugaacaucgugcugaucgcccugagcgugcuggccgugcugaagggccuguacaacuucgccaccugcggccuggugggccuggugaccuuccugcugcugugcggcagaagcugcaccaccagccuguacaagggcguguacgagcugcagacccuggagcugaacauggagacccugaacaugugcaugccccugagcugcaccaagaacaacagccaccacuacaucauggugggcaacgagaccggccuggagcugacccugaccaacaccagcaucaucaaccacaaguucugcaaccugagcgacgcccacaagaagaaccuguacgaccacgcccugaugagcaucaucagcaccuuccaccugagcauccccaacuucaaccaguacgaggccaugagcugcgacuucaacggcggcaagaucagcgugcaguacaaccugagccacagcuacgccggcgacgccgccaaccacugcggcaccguggccaacggcgugcugcagaccuucaugagaauggccuggggcggcagcuacaucgcccuggacagcggcagaggcaacugggacugcaucaugaccagcuaccaguaccugaucauccagaacaccaccugggaggaccacugccaguucagcagacccagccccaucggcuaccugggccugcugagccagagaaccagagacaucuacaucagcagaagaagaagaggcaccuucaccuggacccugagcgacagcgagggcaaggacacccccggcggcuacugccugaccagauggaugcugaucgaggccgagcugaagugcuucggcaacaccgccguggccaagugcaacgagaagcacgacgaggaguucugcgacaugcugagacuguucgacuucugcaagcaggccauccagagacugaaggcccccgcccagaugagcauccagcugaucaacaaggccgugaacgcccugaucaacgaccagcugaucaugaagaaccaccugagagacaucaugggcauccccuacugcaacuacagcaaguacugcuaccugaaccacaccaccaccggcagaaccagccugcccaagugcugccuggugagcaacggcagcuaccugaacgagacccacuucagcgacgacaucgagcagcaggccgacaacaugaucaccgagaugcugcagaaggaguacauggagagacagggcaagaccccccugggccugguggaccuguucguguucagcaccagcuucuaccugaucagcaucuuccugcaccuggugaagauccccacccacagacacaucgugggcaagagcugccccaagccccacagacugaaccacaugggcaucugcagcugcggccuguacaagcagcccggcgugcccgugaaguggaagagaugaggacuaguuauaagacugacuagcccgaugggccucccaacgggcccuccuccccuccuugcaccgagauuaaucaaaggcucuuuucagagccaccaaaaaaaaaaaaaaaaaaaaaaaaaaaaaaaaaaaaaaaaaaaaaaaaaaaaaaaaaaaaaaaaaaaaaaaaaaaaaaaaaaaaaaaaaaaaaaaaaaaaa

SEQ ID NO: 27846 - RNA, 1686 nt, Artificial Sequence
  mRNA product Design i-3 (hSL-A100) comprising derived and/or modified sequence from LASV(LP;Clade I)__AAF86701__GPCmut4 (opt4)
aggagaaagcuuaccaugggccagaucaucaccuucuuccaggaggugccccacgugaucgaggaggugaugaacaucgugcugaucgcccugagccugcuggccauccugaagggccuguacaacaucgccaccugcggcaucaucggccugguggccuuccuguuccugugcggcaagagcugcagccugacccugaagggcggcuacgagcugcagacccuggagcugaacauggagacccugaacaugugcaugccccugagcugcaccaagaacagcagccaccacuacaucagagugggcaacgagaccggccuggagcugacccugaccaacaccagcaucaucaaccacaaguucugcaaccugagcgacgcccacaagaagaaccuguacgaccacgcccugaugagcaucaucagcaccuuccaccugagcauccccaacuucaaccaguacgaggccaugagcugcgacuucaacggcggcaagaucagcgugcaguacaaccugagccacagcuacgccggcgacgccgccgagcacugcggcaccguggccaacggcgugcugcagaccuucaugagaauggccuggggcggcagauacaucgcccuggacagcggcaagggcaacugggacugcaucaugaccagcuaccaguaccugaucauccagaacaccaccugggaggaccacugccaguucagcagacccagccccaucggcuaccugggccugcugagccagagaaccagagacaucuacaucagcagaagaagaagaggcaccuucaccuggacccugagcgacagcgagggcaacgagacccccggcggcuacugccugaccagauggaugcugaucgaggccgagcugaagugcuucggcaacaccgccguggccaagugcaacgagaagcacgacgaggaguucugcgacaugcugagacuguucgacuucugcaagcaggccaucagaagacugaaggcccccgcccagaugagcauccagcugaucaacaaggccgugaacgcccugaucaacgaccagcugaucaugaagaaccaccugagagacaucaugggcauccccuacugcaacuacagcaaguacugcuaccugaaccacaccagcagcggcagaaccagccugcccaagugcugccugaucagcaacggcagcuaccugaacgagacccaguucagcgacgacaucgagcagcaggccgacaacaugaucaccgagaugcugcagaaggaguacaucgagagacagggcaagaccccccugggccugguggacaucuucaucuucagcaccagcuucuaccugaucagcaucuuccugcaccugaucaagauccccacccacagacacaucgugggcaagcccugccccaagccccacagacugaaccacaugggcgugugcagcugcggccuguacaagcaccccggcgugcccaccaaguggaagagaugaggacuaguuauaagacugacuagcccgaugggccucccaacgggcccuccuccccuccuugcaccgagauuaaucaaaggcucuuuucagagccaccaaaaaaaaaaaaaaaaaaaaaaaaaaaaaaaaaaaaaaaaaaaaaaaaaaaaaaaaaaaaaaaaaaaaaaaaaaaaaaaaaaaaaaaaaaaaaaaaaaaaa

SEQ ID NO: 27847 - RNA, 1686 nt, Artificial Sequence
  mRNA product Design i-3 (hSL-A100) comprising derived and/or modified sequence from LASV(803213;Clade II)__AAF86703__GPCmut4 (opt4)
aggagaaagcuuaccaugggccagaucaucaccuucuuccaggaggugccccacgugaucgaggaggugaugaacaucgugcugaucgcccugagccugcuggccauccugaagggcaucuacaacguggccaccugcggccuguucggccugaucagcuuccugcugcugugcggcagaagcugcagcgugaccuacaagggcguguacgagcugcagacccuggagcugaacauggccaaccugaacaugugcaugccccugagcugcaccaagaacaacagccaccacuacaucauggugggcaacgagaccggccuggagcugacccugaccaacaccagcaucaucaaccacaaguucugcaaccugagcgacgcccacaagaagaaccuguacgaccacgcccugaugagcaucaucagcaccuuccaccugagcauccccaacuucaaccaguacgaggccaugagcugcgacuucaacggcggcaagaucagcgugcaguacaaccugagccacagcuucgccguggacgccgccaaccacugcggcaccaucgccaacggcgugcugcagaccuucaugagaauggccuggggcggcagcuacaucgcccuggacagcggcaagggcaacugggacugcaucaugaccagcuaccaguaccugaucauccagaacaccaccugggaggaccacugccaguucagcagacccagccccaucggcuaccugggccugcugagccagagaaccagagacaucuacaucagcagaagaagaagaggcaccuucaccuggacccugagcgacagcgagggcaacgaggcccccggcggcuacugccugaccagauggaugcugaucgaggccgagcugaagugcuucggcaacaccgccguggccaagugcaacgagaagcacgacgaggaguucugcgacaugcugagacuguucgacuucugcaagcaggccaucaagagacugaagacccccgcccagaugagcauccagcugaucaacaaggccgugaacgcccugaucaacgaccagcugaucaugaagaaccaccugagagacaucaugggcauccccuacugcaacuacagcagauacugcuaccugaaccacaccgugaccggcaagaccagccugcccagaugcugccuggugagcaacggcagcuaccugaacgagacccacuucagcgacgacaucgagcagcaggccgacaacaugaucaccgagaugcugcagaaggaguacauggacagacagggcaagaccccccugggccugguggaccuguucguguucagcaccagcuucuaccugaucagcaucuuccugcaccuggugaagauccccacccacagacacaucgugggcaagcccugccccaagccccacagacugaaccacaugggcaucugcagcugcggccuguacaagcaccccggcgugcccgugaaguggaagagaugaggacuaguuauaagacugacuagcccgaugggccucccaacgggcccuccuccccuccuugcaccgagauuaaucaaaggcucuuuucagagccaccaaaaaaaaaaaaaaaaaaaaaaaaaaaaaaaaaaaaaaaaaaaaaaaaaaaaaaaaaaaaaaaaaaaaaaaaaaaaaaaaaaaaaaaaaaaaaaaaaaaaa

SEQ ID NO: 27848 - RNA, 1686 nt, Artificial Sequence
  mRNA product Design i-3 (hSL-A100) comprising derived and/or modified sequence from LASV(GA391;Clade III)__CAA36645__GPCmut4 (opt4)
aggagaaagcuuaccaugggccagaucgugaccuucuuccaggaggugccccacgugaucgaggaggugaugaacaucgugcugaucgcccugagcauccuggccauccugaagggccuguacaacguggccaccugcggccugaucggccuggugaccuuccugcugcugagcggcagaagcugcagccugaucuacaagggcaccuacgagcugcagacccuggagcugaacauggagacccugaacaugugcaugccccugagcugcaccaagaacaacagccaccacuacaucagagugggcaacgagaccggccuggagcugacccugaccaacaccagcauccugaaccacaaguucugcaaccugagcgacgcccacaagagaaaccuguacgaccacagccugaugagcaucaucagcaccuuccaccugagcauccccaacuucaaccaguacgaggccaugagcugcgacuucaacggcggcaagaucaccgugcaguacaaccugagccacagcuucgccguggacgccgccggccacugcggcacccuggccaacggcgugcugcagaccuucaugagaauggccuggggcggcagcuacaucgcccuggacagcggcagaggcaacugggacugcaucaugaccagcuaccaguaccugaucauccagaacaccaccugggacgaccacugccaguucagcagacccagccccaucggcuaccugggccugcugagccagagaaccagagacaucuacaucagcagaagaagaagaggcaccuucaccuggacccugagcgacagcgagggcaacgagacccccggcggcuacugccugaccagauggaugcugaucgaggccgagcugaagugcuucggcaacaccgccguggccaagugcaacgagaagcacgacgaggaguucugcgacaugcugagacuguucgacuucugcaagcaggccaucagaagacugaagacccccgcccagaugagcauccagcugaucaacaaggccgugaacgcccugaucaacgaccagcugaucaugaagaaccaccugagagacaucaugggcauccccuacugcaacuacagcagauacugcuaccugaaccacaccagcaccggcaagaccagccugcccagaugcugccugaucagcaacggcagcuaccugaacgagaccaaguucagcgacgacaucgagcagcaggccgacaacaugaucaccgagaugcugcagaaggaguacaucgacagacagggcaagaccccccugggccugguggaccuguucguguucagcaccagcuucuaccugaucagcaucuuccugcaccuggugaagauccccacccacagacacaucgugggcaagcccugccccaagccccacagacugaaccacaugggcaucugcagcugcggccuguacaagcagcccggcgugcccgugagauggaagagaugaggacuaguuauaagacugacuagcccgaugggccucccaacgggcccuccuccccuccuugcaccgagauuaaucaaaggcucuuuucagagccaccaaaaaaaaaaaaaaaaaaaaaaaaaaaaaaaaaaaaaaaaaaaaaaaaaaaaaaaaaaaaaaaaaaaaaaaaaaaaaaaaaaaaaaaaaaaaaaaaaaaaa

SEQ ID NO: 27849 - RNA, 1689 nt, Artificial Sequence
  mRNA product Design i-3 (hSL-A100) comprising derived and/or modified sequence from LASV(AV;Clade V)__CCA30314__GPCmut4 (opt4)
aggagaaagcuuaccaugggccagaucgugaccuucuuccaggaggugccccacgugaucgaggaggugaugaacaucgugcugaucgcccugagcauccuggccgugcugaagggccuguacaacaucgccaccugcggccugaucggccugaucaccuuccugcugcugugcggcagaagcugcagcagcaaccuguacaagggcguguacgagcugcagagccuggaccugaacauggagacccugaacaugugcaugccccugagcugcaccaagaacaacagccaccacuacaucagagugggcaacgacaccggccuggagcugacccugaccaacaccagcauccugaaccacaaguucugcaaccugagcgacgcccacaagaaggaccuguacgaccacgcccugaugagcaucaucagcaccuuccaccugagcauccccaacuucaaccaguacgaggccaugagcugcgacuucaacggcggcaagaucagcgugcaguacaaccugagccacagcuacgccaucgacgccgccaaccacugcggcaccguggccaacggcauccugcagaccuucaugagaauggccuggggcggcagcuacaucgcccuggacagcggcagaggcaacugggacugcaucaugaccagcuaccaguaccugaucauccagaacaccaccugggagaaccacugccaguucagcagacccagccccaucggcuaccugggccugcugagccagagaaccagagacaucuacaucagcagaagaagaagaggcaccuucaccuggacccugagcgacagcgagggcaacgccacccccggcggcuacugccugaccagauggaugcugaucgaggccgagcugaagugcuucggcaacaccgccguggccaagugcaacgagaagcacgacgaggaguucugcgacaugcugagacuguucgacuucugcaagcaggccaucagcagacugaagagccccgcccagaugagcauccagcugaucaacaaggccgugaacgcccugaucaacgaccagcugaucaugaagaaccaccugagagacaucaugggcauccccuacugcaacuacagcaaguacugcuaccugaaccacaccaucaccggcaagaccagccugcccaagugcugccuggugagcaacggcagcuaccugaacgagacccacuucagcgacgacaucgagcagcaggccgacaacaugaucaccgagaugcugcagaaggaguacauggagagacagggcaagaccccccugggccugguggaccuguucguguucagcaccagcuucuaccugaucagcaucuuccugagacuggugaagauccccacccacagacacaucgugggcaagcccugccccaagccccacagacugaaccacaugggcaucugcagcugcggccuguacaagcagcccggcgugcccgugagauggaagagaugaggacuaguuauaagacugacuagcccgaugggccucccaacgggcccuccuccccuccuugcaccgagauuaaucaaaggcucuuuucagagccaccaaaaaaaaaaaaaaaaaaaaaaaaaaaaaaaaaaaaaaaaaaaaaaaaaaaaaaaaaaaaaaaaaaaaaaaaaaaaaaaaaaaaaaaaaaaaaaaaaaaaa

SEQ ID NO: 27850 - RNA, 1686 nt, Artificial Sequence
  mRNA product Design i-3 (hSL-A100) comprising derived and/or modified sequence from LASV(Togo/2016/7082;Clade VI)__AMR44577__GPCmut4 (opt4)
aggagaaagcuuaccaugggccagaucaucaccuucuuccaggaggugccccacgugaucgaggaggugaugaacaucgugcugaucgcccugagccugcuggccauccugaagggcguguacaacguggccaccugcggcaucaucggccuggugaccuuccuguuccugugcggcagaagcugcagccugaucuacaagggcagcuacgagcugcagacccuggagcugaacauggagacccugaacaugugcaugccccugagcugcaccaagaacagcagccaccacuacaucagagugggcaacgagaccggccuggagcugacccugaccaacaccagcaucaucaaccacaaguucugcaaccugagcgacgcccacaagagaaaccuguacgaccacgcccugaugagcauccugagcaccuuccaccugagcauccccaacuucaaccaguacgaggccaugagcugcgacuucaacggcggcaagaucagcgugcaguacaaccugagccacgccuacgccguggacgccgccgagcacugcggcaccguggccaacggcgugcugcagaccuucaugagaauggccuggggcggcagcuacaucgcccuggacagcggcagaggcaacugggacugcaucaugaccagcuaccaguaccugaucauccagaacaccaccugggaggaccacugccaguucagcagacccagccccaucggcuaccugggccugcugagccagagaaccagagacaucuacaucagcagaagaagaagaggcaccuucaccuggacccugagcgacagcgagggcaacgagacccccggcggcuacugccugaccagauggaugcugaucgaggccgagcugaagugcuucggcaacaccgccguggccaagugcaacgagaagcacgacgaggaguucugcgacaugcugagacuguucgacuucugcaagcaggccauccagagacugaagagccccgcccagaugagcauccagcugaucaacaaggccgugaacgcccugaucaacgaccagcugaucaugaagaaccaccugagagacaugaugggcauccccuacugcaacuacagcaaguacugcuaccugaaccacaccagcagcggcagaaccagccugcccaagugcugccuggugagcaacggcagcuaccugaacgagacccacuucagcgacgacaucgagcagcaggccgacaacaugaucaccgagaugcugcagaaggaguacaucgacagacagggcaagaccccccugggccugguggaccuguucguguucagcaccagcuucuaccugaucagcaucuuccugcaccugaucaagauccccacccacagacacaucgugggcaagcccugccccaagccccacagacugaaccacaugggcaucugcagcugcggccuguacaagcagcccggcgugcccaccagauggaagagaugaggacuaguuauaagacugacuagcccgaugggccucccaacgggcccuccuccccuccuugcaccgagauuaaucaaaggcucuuuucagagccaccaaaaaaaaaaaaaaaaaaaaaaaaaaaaaaaaaaaaaaaaaaaaaaaaaaaaaaaaaaaaaaaaaaaaaaaaaaaaaaaaaaaaaaaaaaaaaaaaaaaaa

SEQ ID NO: 27851 - RNA, 1686 nt, Artificial Sequence
  mRNA product Design i-3 (hSL-A100) comprising derived and/or modified sequence from LASV(KAK-428;Clade n.d. (VII))__ANH09740__GPCmut4 (opt4)
aggagaaagcuuaccaugggccagaucgugaccuucuuccaggaggugccccacgugaucgaggaggugaugaacaucgugcugaucgcccugagccugcuggccauccugaagggccuguacaacuucgccaccugcggcgugaucggccugaucaccuuccugcugcugugcggcagaagcugcagcgccaccuacaagggccaguacgagcugcagacccuggagcugaacauggagagccugaacaugugcaugccccugagcugcaccaagaacaacagccaccacuacaucagagccggcaacaacaccggccuggagcugacccugaccaacaccagcaucaucagccacaaguucugcaaccugagcgacgcccacaagaagaaccuguacgaccacacccugaugagcaucaucaccaccuuccaccugagcauccccaacuucaaccaguacgaggccaugagcugcgacuucaacggcggcaagaucagcauccaguacaaccugagccacagcuacgccggcgacgccgcccagcacugcggcaccguggccaacggcgugcugcagaccuucaugagaauggccuggggcggcagcuaccuggcccuggacagcggcagaagaggcugggacugcaucaucagcagcuaccaguaccugaucauccagaacaccaccugggacgaccacugccaguucagcagacccagccccaucggcuaccugggcuucgugagccagaagaccagagacaucuacaucagcagaagaagaagaggcaccuucaccuggacccugagcgacagcgagggccacgacaugcccggcggcuacugccugaccagauggaugcugaucgaggccgaccugaagugcuucggcaacaccgccguggccaagugcaacgagaagcacgacgaggaguucugcgacauguggagacuguucgacuucugcaagcaggccauccagagacugaaggcccccgcccagaugaacauccagcugaucaacaaggccgugaacgcccugaucaacgaccagcugaugaugaagaaccaccugagagacaucaugggcauccccuacugcaacuacagcaaguucugcuaccugaacaacaccaccaccggcagaaccagccugcccagaugcugccugaucagcaacggcagcuaccugaacgagacccacuucagcgacgacaucgagcagcaggccgacaacaugaucaccgagaugcugcagaaggaguacauggacagacagggcaagaccccccugggccugguggaccuguucguguucagcaccagcuucuaccugaucaccaucuuccugcaccuggugaagauccccacccacagacacaucgugggcaagcccugccccaagccccacagacugaaccacaugggcaucugcagcugcggccuguacaagcagcccggcgugcccgugagauggaagagaugaggacuaguuauaagacugacuagcccgaugggccucccaacgggcccuccuccccuccuugcaccgagauuaaucaaaggcucuuuucagagccaccaaaaaaaaaaaaaaaaaaaaaaaaaaaaaaaaaaaaaaaaaaaaaaaaaaaaaaaaaaaaaaaaaaaaaaaaaaaaaaaaaaaaaaaaaaaaaaaaaaaaa

SEQ ID NO: 27852 - RNA, 1686 nt, Artificial Sequence; identical to SEQ ID NO: 27846
  mRNA product Design i-3 (hSL-A100) comprising derived and/or modified sequence from LASV(Pinneo-NIG-1969;Clade I)__AIT17836__GPCmut4 (opt4)

SEQ ID NO: 27853 - RNA, 1686 nt, Artificial Sequence
  mRNA product Design i-3 (hSL-A100) comprising derived and/or modified sequence from LASV(ISTH0009-NIG-2011;Clade II)__AIT17404__GPCmut4 (opt4)
aggagaaagcuuaccaugggccagaucaucaccuucuuccaggaggugccccacgugaucgaggaggugaugaacaucgugcugaucgcccugagccugcuggccauccugaagggcaucuacaacguggccaccugcggccuguucggccuggugagcuuccugcugcugugcggcagaagcugcagcaccaccuacaagggcguguacgagcugcagacccuggagcuggacauggccagccugaacaugugcaugccccugagcugcaccaagaacaacagccaccacuacaucauggugggcaacgagaccggccuggagcugacccugaccaacaccagcaucaucaaccacaaguucugcaaccugagcgacgcccacaagaagaaccuguacgaccacgcccugaugagcaucaucagcaccuuccaccugagcauccccaacuucaaccaguacgaggccaugagcugcgacuucaacggcggcaagaucagcgugcaguacaaccugagccacgccuacgccguggacgccgccaaccacugcggcaccaucgccaacggcgugcugcagaccuucaugagaauggccuggggcggcagcuacaucgcccuggacagcggcaagggcagcugggacugcaucaugaccagcuaccaguaccugaucauccagaacaccaccugggaggaccacugccaguucagcagacccagccccaucggcuaccugggccugcugagccagagaaccagagacaucuacaucagcagaagaagaagaggcaccuucaccuggacccugagcgacagcgagggcaacgagacccccggcggcuacugccugaccagauggaugcugaucgaggccgagcugaagugcuucggcaacaccgccguggccaagugcaacgagaagcacgacgaggaguucugcgacaugcugagacuguucgacuucugcaagcaggccaucagaagacugaagacccccgcccagaugagcauccagcugaucaacaaggccgugaacgcccugaucaacgaccagcugaucaugaagaaccaccugagagacaucaugggcauccccuacugcaacuacagcaaguacugcuaccugaaccacaccgugaccggcaagaccagccugcccagaugcugccuggugagcaacggcagcuaccugaacgagacccacuucagcgacgacaucgagcagcaggccgacaacaugaucaccgagcugcugcagaaggaguacauggacagacagggcaagaccccccugggccugguggaccuguucguguucagcaccagcuucuaccugaucagcaucuuccugcaccugaucaagauccccacccacagacacaucaccggcaagcccugccccaagccccacagacugaaccacaugggcaucugcagcugcggccuguacaagcaccccggcgugcccgugaaguggaagagaugaggacuaguuauaagacugacuagcccgaugggccucccaacgggcccuccuccccuccuugcaccgagauuaaucaaaggcucuuuucagagccaccaaaaaaaaaaaaaaaaaaaaaaaaaaaaaaaaaaaaaaaaaaaaaaaaaaaaaaaaaaaaaaaaaaaaaaaaaaaaaaaaaaaaaaaaaaaaaaaaaaaaa

SEQ ID NO: 27854 - RNA, 1686 nt, Artificial Sequence
  mRNA product Design i-3 (hSL-A100) comprising derived and/or modified sequence from LASV(ISTH2010-NIG-2012;Clade II)__AIT17482__GPCmut4 (opt4)
aggagaaagcuuaccaugggccagaucaucaccuucuuccaggaggugccccacgugaucgaggaggugaugaacaucgugcugaucgcccugagccugcuggccauccugaagggcaucuacaacguggccaccugcggccuguucggccuggugagcuuccugcugcugugcggcagaagcugcagcaccaccuacaagggcguguacgagcugcagacccuggagcuggacauggccagccugaacaugugcaugccccugagcugcaccaagaacaacagccaccacuacaucauggugggcaacgagaccggccuggagcugacccugaccaacaccagcaucaucaaccacaaguucugcaaccugagcgacgcccacaagaagaaccuguacgaccacgcccugaugagcaucaucagcaccuuccaccugagcauccccaacuucaaccaguacgaggccaugagcugcgacuucaacggcggcaagaucagcgugcaguacaaccugagccacgccuacgccguggacgccgccaaccacugcggcaccaucgccaacggcgugcugcagaccuucaugagaauggccuggggcggcagcuacaucgcccuggacagcggcaagggcagcugggacugcaucaugaccagcuaccaguaccugaucauccagaacaucaccugggaggaccacugccaguucagcagacccagccccaucggcuaccugggccugcugagccagagaaccagagacaucuacaucagcagaagaagaagaggcaccuucaccuggacccugagcgacagcgagggcaacgagacccccggcggcuacugccugaccagauggaugcugaucgaggccgagcugaagugcuucggcaacaccgccguggccaagugcaacgagaagcacgacgaggaguucugcgacaugcugagacuguucgacuucugcaagcaggccaucagaagacugaagacccccgcccagaugagcauccagcugaucaacaaggccgugaacgcccugaucaacgaccagcugaucaugaagaaccaccugagagacaucaugggcauccccuacugcaacuacagcaaguacugcuaccugaaccacaccgugaccggcaagaccagccugcccagaugcugccuggugagcaacggcagcuaccugaacgagacccacuucagcgacgacaucgagcagcaggccgacaacaugaucaccgagcugcugcagaaggaguacaucgacagacagggcaagaccccccugggccugguggaccuguucguguucagcaccagcuucuaccugaucagcaucuuccugcaccuggugaagauccccacccacagacacguggugggcaagcccugccccaagccccacagacugaaccacaugggcaucugcagcugcggccuguacaagcaccccggcgugcccgugaaguggaagagaugaggacuaguuauaagacugacuagcccgaugggccucccaacgggcccuccuccccuccuugcaccgagauuaaucaaaggcucuuuucagagccaccaaaaaaaaaaaaaaaaaaaaaaaaaaaaaaaaaaaaaaaaaaaaaaaaaaaaaaaaaaaaaaaaaaaaaaaaaaaaaaaaaaaaaaaaaaaaaaaaaaaaa

SEQ ID NO: 27855 - RNA, 1686 nt, Artificial Sequence
  mRNA product Design i-3 (hSL-A100) comprising derived and/or modified sequence from LASV(Lassa virus/H.sapiens-wt/NGA/2015/ISTH_0543;Clade II)__AVO03639__GPCmut4 (opt4)
aggagaaagcuuaccaugggccagaucaucaccuucuuccaggaggugccccacgugaucgaggaggugaugaacaucgugcugaucgcccugagccugcuggccauccugaagggcaucuacaacguggccaccugcggccuguucggccuggugagcuuccugcugcugugcggcagaagcugcagcaccaccuacaagggcguguacgagcugcagacccuggagcuggacauggccaaccugaacaugugcaugccccugagcugcaccaagaacaacagccaccacuacaucauggugggcaacgagaccggccuggagcugacccugaccaacaccagcaucaucaaccacaaguucugcaaccugagcgacgcccacaagaagaaccuguacgaccacgcccugaugagcaucaucagcaccuuccaccugagcauccccaacuucaaccaguacgaggccaugagcugcgacuucaacggcggcaagaucagcgugcaguacaaccugagccacaccuacgccguggacgccgccaaccacugcggcaccaucgccaacggcgugcugcagaccuucaugagaauggccuggggcggcagcuacaucgcccuggacagcggcaagggcagcugggacugcaucaugaccagcuaccaguaccuggugauccagaacaccaccugggaggaccacugccaguucagcagacccagccccaucggcuaccugggccugcugagccagagaaccagagacaucuacaucagcagaagaagaagaggcaccuucaccuggacccugagcgacagcgagggcaacgagacccccggcggcuacugccugaccagauggaugcugaucgaggccgagcugaagugcuucggcaacaccgccguggccaagugcaacgagaagcacgacgaggaguucugcgacaugcugagacuguucgacuucugcaagcaggccaucagaagacugaagacccccgcccagaugagcauccagcugaucaacaaggccgugaacgcccugaucaacgaccagcugaucaugaagaaccaccugagagacaucaugggcauccccuacugcaacuacagcaaguacugcuaccugaaccacaccgugaccggcaagaccagccugcccagaugcugccuggugagcaacggcagcuaccugaacgagacccacuucagcgacgacaucgagcagcaggccgacaacaugaucaccgagcugcugcagaaggaguacaucgacagacagggcaagaccccccugggccugguggaccuguucguguucagcaccagcuucuaccugaucagcaucuuccugcaccuggugaagauccccacccacagacacaucaccggcaagcccugccccaagccccacagacugaaccacaugggcaucugcagcugcggccuguacaagcaccccggcgugcccgugaaguggaagagaugaggacuaguuauaagacugacuagcccgaugggccucccaacgggcccuccuccccuccuugcaccgagauuaaucaaaggcucuuuucagagccaccaaaaaaaaaaaaaaaaaaaaaaaaaaaaaaaaaaaaaaaaaaaaaaaaaaaaaaaaaaaaaaaaaaaaaaaaaaaaaaaaaaaaaaaaaaaaaaaaaaaaa

SEQ ID NO: 27856 - RNA, 1686 nt, Artificial Sequence
  mRNA product Design i-3 (hSL-A100) comprising derived and/or modified sequence from LASV(Lassa virus/H.sapiens-wt/NGA/2016/ISTH_0009;Clade II)__AVO03571__GPCmut4 (opt4)
aggagaaagcuuaccaugggccagaucaucaccuucuuccaggaggugccccacgugaucgaggaggugaugaacaucgugcugaucgcccugagccugcuggccauccugaagggcaucuacaacguggccaccugcggccugcugggccuggugagcuuccugcugcugugcggcagaagcugcagcaccaccuacaagggcguguacgagcugcagacccuggagcuggacauggccagccugaacaugugcaugccccugagcugcaccaagaacaacagccaccacuacaucauggugggcaacgagaccggccuggagcugacccugaccaacaccagcaucaucaaccacaaguucugcaaccugagcgacgcccacaagaagaaccuguacgaccacgcccugaugagcaucaucagcaccuuccaccugagcauccccaacuucaaccaguacgaggccaugagcugcgacuucaacggcggcagaaucagcgugcaguacaaccugagccacagcuacgccguggacgccgccaaccacugcggcaccaucgccaacggcgugcugcagaccuucaugagaauggccuggggcggcagcuacaucgcccuggacagcggcaagggcagcugggacugcaucaugaccagcuaccaguaccugaucauccagaacaccaccugggaggaccacugccaguucagcagacccagccccaucggcuaccugggccugcugagccagagaaccagagacaucuacaucagcagaagaagaagaggcaccuucaccuggacccugagcgacagcgagggcaacgagacccccggcggcuacugccugaccagauggaugcugaucgaggccgagcugaagugcuucggcaacaccgccguggccaagugcaacgagaagcacgacgaggaguucugcgacaugcugagacuguucgacuucugcaagcaggccaucagaagacugaagacccccgcccagaugagcauccagcugaucaacaaggccgugaacgcccugaucaacgaccagcugaucaugaagaaccaccugagagacaucaugggcauccccuacugcaacuacagcaaguacugcuaccugaaccacaccgugaccggcaagaccagccugcccagaugcugccuggugagcaacggcagcuaccugaacgagacccacuucagcgacgacaucgagcagcaggccgacaacaugaucaccgagcugcugcagaaggaguacaucgacagacagggcaagaccccccugggccugguggaccuguucguguucagcaccagcuucuaccugaucagcaucuuccugcaccuggugaagauccccacccacagacacaucaccggcaagcccugccccaagccccacagacugaaccacaugggcaucugcagcugcggccuguacaaccaccccggcgugcccgugaaguggaagagaugaggacuaguuauaagacugacuagcccgaugggccucccaacgggcccuccuccccuccuugcaccgagauuaaucaaaggcucuuuucagagccaccaaaaaaaaaaaaaaaaaaaaaaaaaaaaaaaaaaaaaaaaaaaaaaaaaaaaaaaaaaaaaaaaaaaaaaaaaaaaaaaaaaaaaaaaaaaaaaaaaaaaa

SEQ ID NO: 27857 - RNA, 1686 nt, Artificial Sequence
  mRNA product Design i-3 (hSL-A100) comprising derived and/or modified sequence from LASV(Lassa virus/H.sapiens-wt/NGA/2016/ISTH_0017;Clade II)__AVO03567__GPCmut4 (opt4)
aggagaaagcuuaccaugggccagaucaucaccuucuuccaggaggugccccacgugaucgaggaggugaugaacaucgugcugaucgcccugagccugcuggccauccugaagggcaucuacaacguggccaccugcggccuguucggccuggugagcuuccugcugcugugcggcagaagcugcagcaccaccuacaagggcguguacgagcugcagacccuggagcuggacauggccagccugaacaugugcaugccccugagcugcaccaagaacaacagccaccacuacaucauggugggcaacgagaccggccuggagcugacccugaccaacaccagcaucaucaaccacaaguucugcaaccugagcgacgcccacaagaagaaccuguacgaccacgcccugaugagcaucaucagcaccuuccaccugagcauccccaacuucaaccaguacgaggccaugagcugcgacuucaacggcggcaagaucagcgugcaguacaaccugagccacaccuacgccaucgacgccgccaaccacugcggcaccaucgccaacggcgugcugcagaccuucaugagaauggccuggggcggcagcuacaucgcccuggacagcggcaagggcagcugggacugcaucaugaccagcuaccaguaccugaucauccagaacaccaccugggaggaccacugccaguucagcagacccagccccaucggcuaccugggccugcugagccagagaaccagagacaucuacaucagcagaagaagaagaggcaccuucaccuggacccugagcgacagcgagggcaacgagacccccggcggcuacugccugaccagauggaugcugaucgaggccgagcugaagugcuucggcaacaccgccguggccaagugcaacgagaagcacgacgaggaguucugcgacaugcugagacuguucgacuucugcaagcaggccaucagaagacugaagacccccgcccagaugagcauccagcugaucaacaaggccgugaacgcccugaucaacgaccagcugaucaugaagaaccaccugagagacaucaugggcauccccuacugcaacuacagcaaguacugcuaccugaaccacaccgugaccggcaagaccagccugcccagaugcugccuggugagcaacggcagcuaccugaacgagacccacuucagcgacgacaucgagcagcaggccgacaacaugaucaccgagcugcugcagaaggaguacauggacagacagggcaagaccccccugggccugguggaccuguucguguucagcaccagcuucuaccugaucagcaucuuccugcaccuggugagaauccccacccacagacacgugaucggcaagcccugccccaagccccacagacugaaccacaugggcaucugcagcugcggccuguacaagcaccccggcgugcccgugaaguggaagagaugaggacuaguuauaagacugacuagcccgaugggccucccaacgggcccuccuccccuccuugcaccgagauuaaucaaaggcucuuuucagagccaccaaaaaaaaaaaaaaaaaaaaaaaaaaaaaaaaaaaaaaaaaaaaaaaaaaaaaaaaaaaaaaaaaaaaaaaaaaaaaaaaaaaaaaaaaaaaaaaaaaaaa

SEQ ID NO: 27858 - RNA, 1686 nt, Artificial Sequence
  mRNA product Design i-3 (hSL-A100) comprising derived and/or modified sequence from LASV(Lassa virus/H.sapiens-wt/NGA/2018/ISTH_0959;Clade II)__AVV65099__GPCmut4 (opt4)
aggagaaagcuuaccaugggccagaucaucaccuucuuccaggaggugccccacgugaucgaggaggugaugaacaucgugcugaucgcccugagccugcuggccauccugaagggcaucuacaacguggugaccugcggccuguucggccuggugagcuuccugcugcugugcggcagaagcugcagcaccaccuacaagggcguguacgagcugcagacccuggagcuggacauggccagccugaacaugugcaugccccugagcugcaccaagaacaacagccaccacuacaucauggugggcaacgagaccggccuggagcugacccugaccaacaccagcaucaucaaccacaaguucugcaaccugagcgacgcccacaagaagaaccuguacgaccacgcccugaugagcaucaucagcaccuuccaccugagcauccccaacuucaaccaguacgaggccaugagcugcgacuucaacggcggcaagaucagcgugcaguacaaccugagccacgccuacgccaucgacgccgccaaccacugcggcaccaucgccaacggcgugcugcagaccuucaugagaauggccuggggcggcagcuacaucgcccuggacagcggcaagggcagcugggacugcaucaugaccagcuaccaguaccugaucauccagaacaccaccugggaggaccacugccaguucagcagacccagccccaucggcuaccugggccugcugagccagagaaccagagacaucuacaucagcagaagaagaagaggcaccuucaccuggacccugagcgacagcgagggcaacgagacccccggcggcuacugccugaccagauggaugcugaucgaggccgagcugaagugcuucggcaacaccgccguggccaagugcaacgagaagcacgacgaggaguucugcgacaugcugagacuguucgacuucugcaagcaggccaucagaagacugaagacccccgcccagaugagcauccagcugaucaacaaggccgugaacgcccugaucaacgaccagcugaucaugaagaaccaccugagagacaucaugggcauccccuacugcaacuacagcaaguacugcuaccugaaccacaccgugaccggcaagaccagccugcccagaugcugccuggugagcaacggcagcuaccugaacgagacccacuucagcgacgacaucgagcagcaggccgacaacaugaucaccgagcugcugcagaaggaguacaucgacagacagggcaagaccccccugggccugguggaccuguucguguucagcaccagcuucuaccugaucagcaucuuccugcaccuggugaagauccccacccacagacacgugaucggcaagcccugccccaagccccacagacugaaccacaugggcaucugcagcugcggccuguacaagcaccccggcgugcccgugaaguggaagagaugaggacuaguuauaagacugacuagcccgaugggccucccaacgggcccuccuccccuccuugcaccgagauuaaucaaaggcucuuuucagagccaccaaaaaaaaaaaaaaaaaaaaaaaaaaaaaaaaaaaaaaaaaaaaaaaaaaaaaaaaaaaaaaaaaaaaaaaaaaaaaaaaaaaaaaaaaaaaaaaaaaaaa

SEQ ID NO: 27859 - RNA, 1686 nt, Artificial Sequence
  mRNA product Design i-3 (hSL-A100) comprising derived and/or modified sequence from LASV(LASV003-NIG-2008;Clade II)__AIT17580__GPCmut4 (opt4)
aggagaaagcuuaccaugggccagaucaucaccuucuuccaggaggugccccacgugaucgaggaggugaugaacaucgugcugaucgcccugagccugcuggccauccugaagggcaucuacaacguggccaccugcggccuguucggccuggugagcuuccugcugcugugcggcagaagcugcagcaccaccuacaagggcguguacgagcugcagacccuggagcuggacauggccagccugaacaugugcaugccccugagcugcaccaagaacaacagccaccacuacaucauggugggcaacgagaccggccuggagcugacccugaccaacaccagcaucaucaaccacaaguucugcaaccugagcgacgcccacaagaagaaccuguacgaccacgcccugaugagcaucaucagcaccuuccaccugagcauccccaacuucaaccaguacgaggccaugagcugcgacuucaacggcggcaagaucagcgugcaguacaaccugagccacaccuacgccguggacgccgccaaccacugcggcaccaucgccaacggcgugcugcagaccuucaugagaauggccuggggcggcagcuacaucgcccuggacagcggcaagggcagcugggacugcaucaugaccagcuaccaguaccugaucauccagaacaccaccugggaggaccacugccaguucagcagacccagccccaucggcuaccugggccugcugagccagagaaccagagacaucuacaucagcagaagaagaagaggcaccuucaccuggacccugagcgacagcgagagcaacgagacccccggcggcuacugccugaccagauggaugcugaucgaggccgagcugaagugcuucggcaacaccgccguggccaagugcaacgagaagcacgacgaggaguucugcgacaugcugagacuguucgacuucugcaagcaggccaucagaagacugaaggcccccgcccagaugagcauccagcugaucaacaaggccgugaacgcccugaucaacgaccagcugaucaugaagaaccaccugagagacaucaugggcauccccuacugcaacuacagcaaguacugcuaccugaaccacaccgugaccggcagaaccagccugcccagaugcugccuggugagcaacggcagcuaccugaacgagacccacuucagcgacgacaucgagcagcaggccgacaacaugaucaccgagcugcugcagaaggaguacauggacagacagggcaagaccccccugggccugguggaccuguucguguucagcaccagcuucuaccugaucagcaucuuccugcaccuggugaagauccccacccacagacacgugaucggcaagcccugccccaagccccacagacugaaccacaugggcaucugcagcugcggccuguacaagcaccccggcgugcccgugaaguggaagagaugaggacuaguuauaagacugacuagcccgaugggccucccaacgggcccuccuccccuccuugcaccgagauuaaucaaaggcucuuuucagagccaccaaaaaaaaaaaaaaaaaaaaaaaaaaaaaaaaaaaaaaaaaaaaaaaaaaaaaaaaaaaaaaaaaaaaaaaaaaaaaaaaaaaaaaaaaaaaaaaaaaaaa

SEQ ID NO: 27860 - RNA, 1686 nt, Artificial Sequence
  mRNA product Design i-3 (hSL-A100) comprising derived and/or modified sequence from LASV(LASV035-NIG-2009;Clade II)__AIT17588__GPCmut4 (opt4)
aggagaaagcuuaccaugggccagaucaucaccuucuuccaggaggugccccacgugaucgaggaggugaugaacaucgugcugaucgcccugagccugcuggccauccugaagggcaucuacaacguggccaccugcggccuguucggccuggugagcuuccugcugcugugcggcagaagcugcagcaccaccuacaagggcguguacgagcugcagacccuggagcuggacauggccagccugaacaugugcaugccccugagcugcaccaagaacaacagccaccacuacaucauggugggcaacgagaccggccuggagcugacccugaccaacaccagcaucaucaaccacaaguucugcaaccugagcgacgcccacaagaagaaccuguacgaccacgcccugaugagcaucaucagcaccuuccaccugagcauccccaacuucaaccaguacgaggccaugagcugcgacuucaacggcggcaagaucagcgugcaguacaaccugagccacgccuacgccguggacgccgccaaccacugcggcaccaucgccaacggcgugcugcagaccuucaugagaauggccuggggcggcagcuacaucgcccuggacagcggcaagggcagcugggacugcaucaugaccagcuaccaguaccugaucauccagaacaccaccugggaggaccacugccaguucagcagacccagccccaucggcuaccugggccugcugagccagagaaccagagacaucuacaucagcagaagaagaagaggcaccuucaccuggacccugagcgacagcgagggcaacgagacccccggcggcuacugccugaccagauggaugcugaucgaggccgagcugaagugcuucggcaacaccgccguggccaagugcaacgagaagcacgacgaggaguucugcgacaugcugagacuguucgacuucugcaagcaggccaucagaagacugaaggcccccgcccagaugagcauccagcugaucaacaaggccgugaacgcccugaucaacgaccagcugaucaugaagaaccaccugagagacaucaugggcauccccuacugcaacuacagcaaguacugcuaccugaaccacaccgugaccggcaagaccagccugcccagaugcugccuggugagcaacggcagcuaccugaacgagacccacuucagcgacgacaucgagcagcaggccgacaacaugaucaccgagcugcugcagaaggaguacaucgacagacagggcaagaccccccugggccugguggaccuguucguguucagcaccagcuucuaccugaucagcaucuuccugcaccuggugaagauccccacccacagacacgugaucggcaagcccugccccaagccccacagacugaaccacaugggcaucugcagcugcggccuguacaagcaccccggcgugcccgugaaguggaagagaugaggacuaguuauaagacugacuagcccgaugggccucccaacgggcccuccuccccuccuugcaccgagauuaaucaaaggcucuuuucagagccaccaaaaaaaaaaaaaaaaaaaaaaaaaaaaaaaaaaaaaaaaaaaaaaaaaaaaaaaaaaaaaaaaaaaaaaaaaaaaaaaaaaaaaaaaaaaaaaaaaaaaa

SEQ ID NO: 27861 - RNA, 1686 nt, Artificial Sequence
  mRNA product Design i-3 (hSL-A100) comprising derived and/or modified sequence from LASV(LASV1000-NIG-2009;Clade II)__AIT17782__GPCmut4 (opt4)
aggagaaagcuuaccaugggccagaucaucaccuucuuccaggaggugccccacgugaucgaggaggugaugaacaucgugcugaucgcccugagccugcuggccauccugaagggcaucuacaacguggccaccugcggccuguucggccuggugagcuuccugcugcugugcggcagaagcugcagcaccaccuacaagggcguguacgagcugcagacccuggagcuggacauggccagccugaacaugugcaugccccugagcugcaccaagaacaacagccaccacuacaucauggugggcaacgagaccggccuggagcugacccugaccaacaccagcaucaucaaccacaaguucugcaaccugagcgacgcccacaagaagaaccuguacgaccacgcccugaugagcaucaucagcaccuuccaccugagcauccccaacuucaaccaguacgaggccaugagcugcgacuucaacggcggcaagaucagcgugcaguacaaccugagccacaccuacgccguggacgccgccaaccacugcggcaccaucgccaacggcgugcugcagaccuucaugagaauggccuggggcggcagcuacaucgcccuggacagcggcaagggcagcugggacugcaucaugaccagcuaccaguaccugaucauccagaacaccaccugggaggaccacugccaguucagcagacccagccccaucggcuaccugggccugcugagccagagaaccagagacaucuacaucagcagaagaagaagaggcaccuucaccuggacccugagcgacagcgagggcaacgagacccccggcggcuacugccugaccagauggaugcugaucgaggccgagcugaagugcuucggcaacaccgccguggccaagugcaacgagaagcacgacgaggaguucugcgacaugcugagacuguucgacuucugcaagcaggccaucaagagacugaagacccccgcccagaugagcauccagcugaucaacaaggccgugaacgcccugaucaacgaccagcugaucaugaagaaccaccugagagacaucaugggcauccccuacugcaacuacagcaaguacugcuaccugaaccacaccgugaccggcaagaccagccugcccagaugcugccuggugagcaacggcagcuaccugaacgagacccacuucagcgacgacaucgagcagcaggccgacaacaugaucaccgagcugcugcagaaggaguacaucgacagacagggcaagaccccccugggccugguggaccuguucguguucagcaccagcuucuaccugaucagcaucuuccugcaccuggugaagauccccacccacagacacguggugggcaagcccugccccaagccccacagacugaaccacaugggcaucugcagcugcggccuguacaagcaccccggcgugcccgugaaguggaagagaugaggacuaguuauaagacugacuagcccgaugggccucccaacgggcccuccuccccuccuugcaccgagauuaaucaaaggcucuuuucagagccaccaaaaaaaaaaaaaaaaaaaaaaaaaaaaaaaaaaaaaaaaaaaaaaaaaaaaaaaaaaaaaaaaaaaaaaaaaaaaaaaaaaaaaaaaaaaaaaaaaaaaa

SEQ ID NO: 27862 - RNA, 1686 nt, Artificial Sequence
  mRNA product Design i-3 (hSL-A100) comprising derived and/or modified sequence from LASV(LASV221-NIG-2010;Clade II)__AIT17624__GPCmut4 (opt4)
aggagaaagcuuaccaugggccagaucaucaccuucuuccaggaggugccccacgugaucgaggaggugaugaacaucgugcugaucgcccugagccugcuggccauccugaagggcaucuacaacguggccaccugcggccuguucggccuggugagcuuccugcugcugugcggcagaagcugcagcaccaccuacaagggcguguacgagcugcagacccuggagcuggacauggccagccugaacaugugcaugccccugagcugcaccaagaacaacagccaccacuacaucauggugggcaacgagaccggccuggagcugacccugaccaacaccagcaucaucaaccacaaguucugcaaccugagcgacgcccacaagaagaaccuguacgaccacgcccugaugagcaucaucagcaccuuccaccugagcauccccaacuucaaccaguacgaggccaugagcugcgacuucaacggcggcaagaucagcgugcaguacaaccugagccacaccuacgccaucgacgccgccaaccacugcggcaccaucgccaacggcgugcugcagaccuucaugagaauggccuggggcggcagcuacaucgcccuggacagcggcaagggcagcugggacugcaucaugaccagcuaccaguaccugaucauccagaacaccaccugggaggaccacugccaguucagcagacccagccccaucggcuaccugggccugcugagccagagaaccagagacaucuacaucagcagaagaagaagaggcaccuucaccuggacccugagcgacagcgagggcaacgagacccccggcggcuacugccugaccagauggaugcugaucgaggccgagcugaagugcuucggcaacaccgccguggccaagugcaacgagaagcacgacgaggaguucugcgacaugcugagacuguucgacuucugcaagcaggccaucagaagacugaagacccccgcccagaugagcauccagcugaucaacaaggccgugaacgcccugaucaacgaccagcugaucaugaagaaccaccugagagacaucaugggcauccccuacugcaacuacagcaaguacugcuaccugaaccacaccgugaccggcaagaccagccugcccagaugcugccuggugagcaacggcagcuaccugaacgagacccacuucagcgacgacaucgagcagcaggccgacaacaugaucaccgagaugcugcagaaggaguacauggacagacagggcaagaccccccugggccugguggaccuguucguguucagcaccagcuucuaccugaucagcaucuuccugcaccuggugaagauccccacccacagacacgugaucggcaagcccugccccaagccccacagacugaaccacaugggcaucugcagcugcggccuguacaagcaccccggcgugcccgugaaguggaagagaugaggacuaguuauaagacugacuagcccgaugggccucccaacgggcccuccuccccuccuugcaccgagauuaaucaaaggcucuuuucagagccaccaaaaaaaaaaaaaaaaaaaaaaaaaaaaaaaaaaaaaaaaaaaaaaaaaaaaaaaaaaaaaaaaaaaaaaaaaaaaaaaaaaaaaaaaaaaaaaaaaaaaa

SEQ ID NO: 27863 - RNA, 1686 nt, Artificial Sequence
  mRNA product Design i-3 (hSL-A100) comprising derived and/or modified sequence from LASV(LASV237-NIG-2010;Clade II)__AIT17638__GPCmut4 (opt4)
aggagaaagcuuaccaugggccagaucaucaccuucuuccaggaggugccccacgugaucgaggaggugaugaacaucgugcugaucgcccugagccugcuggccauccugaagggcaucuacaacguggccaccugcggccuguucggccuggugagcuuccugcugcugugcggcagaagcugcagcaccaccuacaagggcguguacgagcugcagacccuggagcuggacauggccagccugaacaugugcaugccccugagcugcaccaagaacaacagccaccacuacaucauggugggcaacgagaccggccuggagcugacccugaccaacaccagcaucaucaaccacaaguucugcaaccugagcgacgcccacaagaaggaccuguacgaccacgcccugaugagcaucaucagcaccuuccaccugagcauccccaacuucaaccaguacgaggccaugagcugcgacuucaacggcggcaagaucagcgugcaguacaaccugagccacaccuacgccguggacgccgccaaccacugcggcaccaucgccaacggcgugcugcagaccuucaugagaauggccuggggcggcagcuacaucgcccuggacagcggcaagggcagcugggacugcaucaugaccagcuaccaguaccugaucauccagaacaccaccugggaggaccacugccaguucagcagacccagccccaucggcuaccugggccugcugagccagagaaccagagacaucuacaucagcagaagaagaagaggcaccuucaccuggacccugagcgacagcgagggcaacgagacccccggcggcuacugccugaccagauggaugcugaucgaggccgagcugaagugcuucggcaacaccgccguggccaagugcaacgagaagcacgacgaggaguucugcgacaugcugagacuguucgacuucugcaagcaggccaucagaagacugaagacccccgcccagaugagcauccagcugaucaacaaggccgugaacgcccugaucaacgaccagcugaucaugaagaaccaccugagagacaucaugggcauccccuacugcaacuacagcaaguacugcuaccugaaccacaccgugaccggcaagaccagccugcccagaugcugccuggugagcaacggcagcuaccugaacgagacccacuucagcgacgacaucgagcagcaggccgacaacaugaucaccgagcugcugcagaaggaguacauggacagacagggcaagaccccccugggccugguggaccuguucguguucagcaccagcuucuaccugaucagcaucuuccugcaccugaucaagauccccacccacagacacaucaccggcaagcccugccccaagccccacagacugaaccacaugggcaucugcagcugcggccuguacaagcaccccggcgugcccgugaaguggaagagaugaggacuaguuauaagacugacuagcccgaugggccucccaacgggcccuccuccccuccuugcaccgagauuaaucaaaggcucuuuucagagccaccaaaaaaaaaaaaaaaaaaaaaaaaaaaaaaaaaaaaaaaaaaaaaaaaaaaaaaaaaaaaaaaaaaaaaaaaaaaaaaaaaaaaaaaaaaaaaaaaaaaaa

SEQ ID NO: 27864 - RNA, 1686 nt, Artificial Sequence
  mRNA product Design i-3 (hSL-A100) comprising derived and/or modified sequence from LASV(LASV253-NIG-2011;Clade II)__AIT17670__GPCmut4 (opt4)
aggagaaagcuuaccaugggccagaucaucaccuucuuccaggaggugccccacgugaucgaggaggugaugaacaucgugcugaucgcccugagccugcuggccauccugaagggcaucuacaacguggccaccugcggccuguucggccuggugagcuuccugcugcugugcggcagaagcugcagcaccaccuacaagggcguguacgagcugcagacccuggagcuggacauggccagccugaacaugugcaugccccugagcugcaccaagaacaacagccaccacuacaucauggugggcaacgagaccggccuggagcugacccugaccaacaccagcaucaucaaccacaaguucugcaaccugagcgacgcccacaagaagaaccuguacgaccacgcccugaugagcaucaucagcaccuuccaccugagcauccccaacuucaaccaguacgaggccaugagcugcgacuucaacggcggcaagaucagcgugcaguacaaccugagccacaccuacgccguggacgccgccaaccacugcggcaccaucgccaacggcgugcugcagaccuucaugagaauggccuggggcggcagcuacaucgcccuggacagcggcaagggcagcugggacugcaucaugaccagcuaccaguaccugaucauccagaacaccaccugggaggaccacugccaguucagcagacccagccccaucggcuaccugggccugcugagccagagaaccagagacaucuacaucagcagaagaagaagaggcaccuucaccuggacccugagcgacagcgagggcaacgagacccccggcggcuacugccugaccagauggaugcugaucgaggccgagcugaagugcuucggcaacaccgccguggccaagugcaacgagaagcacgacgaggaguucugcgacaugcugagacuguucgacuucugcaagcaggccaucagaagacugaaggcccccgcccagaugagcauccagcugaucaacaaggccgugaacgcccugaucaacgaccagcugaucaugaagaaccaccugagagacaucaugggcauccccuacugcaacuacagcaaguacugcuaccugaaccacaccgugaccggcagaaccagccugcccagaugcugccuggugagcaacggcagcuaccugaacgagacccacuucagcgacgacaucgagcagcaggccgacaacaugaucaccgagcugcugcagaaggaguacaucgacagacagggcaagaccccccugggccugguggaccuguucguguucagcaccagcuucuaccugaucagcaucuuccugcaccuggugaagauccccacccacagacacaucaucggcaagcccugccccaagccccacagacugaaccacaugggcaucugcagcugcggccuguacaagcaccccggcgugcccgugaaguggaagagaugaggacuaguuauaagacugacuagcccgaugggccucccaacgggcccuccuccccuccuugcaccgagauuaaucaaaggcucuuuucagagccaccaaaaaaaaaaaaaaaaaaaaaaaaaaaaaaaaaaaaaaaaaaaaaaaaaaaaaaaaaaaaaaaaaaaaaaaaaaaaaaaaaaaaaaaaaaaaaaaaaaaaa

SEQ ID NO: 27865 - RNA, 1686 nt, Artificial Sequence
  mRNA product Design i-3 (hSL-A100) comprising derived and/or modified sequence from LASV(LASV254-NIG-2011;Clade II)__AIT17674__GPCmut4 (opt4)
aggagaaagcuuaccaugggccagaucaucaccuucuuccaggaggugccccacgugaucgaggaggugaugaacaucgugcugaucgcccugagccugcuggccauccugaagggcaucuacaacguggccaccugcggccuguucggccuggugagcuuccugcugcugugcggcagaagcugcagcaccaccuacaagggcguguacgagcugcagacccuggagcuggacaugaccaaccugaacaugugcaugccccugagcugcaccaagaacaacagccaccacuacaucauggugggcaacgagaccggccuggagcugacccugaccaacaccagcaucaucaaccacaaguucugcaaccugagcgacgcccacaagaagaaccuguacaaccacgcccugaugagcaucaucagcaccuuccaccugagcauccccaacuucaaccaguacgaggccaugagcugcgacuucaacggcggcaagaucagcgugcaguacaaccugagccacagcuacgccguggacgccgccaaccacugcggcaccaucgccaacggcgugcugcagaccuucaugagaauggccuggggcggcagcuacaucgcccuggacagcggcaagggcaacugggacugcaucaugaccagcuaccaguaccugaucauccagaacaccaccugggaggaccacugccaguucagcagacccagccccaucggcuaccugggccugcugagccagagaaccagagacaucuacaucagcagaagaagaagaggcaccuucaccuggacccugagcgacagcgagggcaacgagacccccggcggcuacugccugaccagauggaugcugaucgaggccgagcugaagugcuucggcaacaccgccguggccaagugcaacgagaagcacgacgaggaguucugcgacaugcugagacuguucgacuucugcaagcaggccaucagaagacugaagacccccgcccaggccaacauccagcugaucaacaaggccgugaacgcccugaucaacgaccagcugaucaugaagaaccaccugagagacaucaugggcauccccuacugcaacuacagcaaguacugcuaccugaaccacaccgugaccggcaagaccagccugcccagaugcugccuggugagcaacggcagcuaccugaacgagacccacuucagcgacgacaucgagcagcaggccgacaacaugaucaccgagcugcugcagaaggaguacauggacagacagggcaagaccccccugggccugguggaccuguucguguucagcaccagcuucuaccugaucagcaucuuccugcaccuggugaagauccccacccacagacacgugaucggcaagcccugccccaagccccacagacugaaccacaugggcaucugcagcugcggccuguacaagcaccccggcgugcccgugaaguggaagagaugaggacuaguuauaagacugacuagcccgaugggccucccaacgggcccuccuccccuccuugcaccgagauuaaucaaaggcucuuuucagagccaccaaaaaaaaaaaaaaaaaaaaaaaaaaaaaaaaaaaaaaaaaaaaaaaaaaaaaaaaaaaaaaaaaaaaaaaaaaaaaaaaaaaaaaaaaaaaaaaaaaaaa

SEQ ID NO: 27866 - RNA, 1686 nt, Artificial Sequence
  mRNA product Design i-3 (hSL-A100) comprising derived and/or modified sequence from LASV(Nig08-A19;Clade III)__ADU56618__GPCmut4 (opt4)
aggagaaagcuuaccaugggccagaucgugaccuucuuccaggaggugccccacgugaucgaggaggugaugaacaucgugcugaucgcccugagcauccuggccauccugaagggccuguacaacaucgccaccugcggccugaucggccuggugaccuuccugcugcugagcggcagaagcugcagcaugaccuacaagggcguguacgagcugcagacccuggagcugaacaugaacacccugaacaugugcaugccccugagcugcaccaagaacaacagccaccacuacaucauggugggcaacgagaccggccuggagcugacccugaccaacaccagccugcugcaccacaaguucugcaaccugagcgacgcccacaagaagaaccuguacgaccacacccugaugagcaucaucagcaccuuccaccugagcauccccaacuucaaccaguacgaggccaugagcugcgacuucaacggcggcaagaucaccgugcaguacaaccugagccacagcuacgccaucgacgccgccaaccacugcggcaccguggccaacggcgugcugcagaccuucaugagaauggccuggggcggcagcuacaucgcccuggacagcggcagaggcaagugggacugcaucaugaccagcuaccaguaccugaucauccagaacaccaccugggaggaccacugccaguucagcagacccagccccaucggcuaccugggccugcugagccagagaaccagagacaucuacaucagcagaagaagaagaggcaccuucaccuggacccugagcgacagcgagggcaacgagacccccggcggcuacugccugaccagauggaugcugaucgaggccgagcugaagugcuucggcaacaccgccguggccaagugcaacgagaagcacgacgaggaguucugcgacaugcugagacuguucgacuucugcaagcaggccaucagaagacugaaggcccccgcccagaugagcauccagcugaucaacaaggccgugaacgcccugaucaacgaccagcugaucaugaagaaccaccugagagacaucaugggcauccccuacugcaacuacagcaaguacugcuaccugaaccacaccagcaccggcagaaccagccugcccagaugcugccuggugagcaacggcagcuaccugaacgagacccacuucagcgacgacaucgagcagcaggccgacaacaugaucaccgagaugcugcagaaggaguaccuggacagacagggcaagaccccccugggccugguggaccuguucguguucagcaccagcuucuaccugaucagcaucuuccugcaccuggugaagauccccacccacagacacaucgugggcaagcccugccccaagccccacagacugaaccacaugggcaucugcagcugcggccuguacaagcagcccggcgugcccgugagauggaagagaugaggacuaguuauaagacugacuagcccgaugggccucccaacgggcccuccuccccuccuugcaccgagauuaaucaaaggcucuuuucagagccaccaaaaaaaaaaaaaaaaaaaaaaaaaaaaaaaaaaaaaaaaaaaaaaaaaaaaaaaaaaaaaaaaaaaaaaaaaaaaaaaaaaaaaaaaaaaaaaaaaaaaa

SEQ ID NO: 27867 - RNA, 1689 nt, Artificial Sequence
  mRNA product Design i-3 (hSL-A100) comprising derived and/or modified sequence from LASV(G1180-SLE-2010;Clade IV)__AIT17168__GPCmut4 (opt4)
aggagaaagcuuaccaugggccagaucgugaccuucuuccaggaggugccccacgugaucgaggaggugaugaacaucgugcugaucgcccugagcauccuggccgugcugaagggccuguacaacuucgccaccugcggccuggugggccugcugaccuuccugcugcugugcggcagaagcugcaccgccagcagauacaagggcguguacgagcugcagacccuggagcugaacauggagacccugaacaugugcaugccccugagcugcaccaagaacaacagccaccacuacaucauggugggcaacgagaccggccuggagcugacccugaccaacaccagcaucaucaaccacaaguucugcaaccugagcgacgcccacaagaagaaccuguacgaccacgcccugaugagcaucaucagcaccuuccaccugagcauccccaacuucaaccaguacgaggccaugagcugcgacuucaacggcggcaagaucagcgugcaguacaaccugagccacagcuacgccggcgacgccgccaaccacugcggcaccguggccaacggcgugcugcagaccuucaugagaauggccuggggcggcagcuacaucgcccuggacagcggccacggcagcugggacugcaucaugaccagcuaccaguaccugaucauccagaacaccaccugggaggaccacugccaguucagcagacccagccccaucggcuaccugggccugcugagccagagaaccagagacaucuacaucagcagaagaagaagaggcaccuucaccuggacccugagcgacagcgagggcaaggacacccccggcggcuacugccugaccagauggaugcugaucgaggccgagcugaagugcuucggcaacaccgccguggccaagugcaacgagaagcacgacgaggaguucugcgacaugcugagacuguucgacuucugcaagcaggccauccagagacugaaggcccccgcccagaugagcauccagcugaucaacaaggccgugaacgcccugaucaacgaccagcugaucaugaagaaccaccugagagacaucaugggcauccccuacugcaacuacagcaaguacugcuaccugaaccacaccaccaccggcaagaccagccugcccaagugcugccuggugagcaacggcagcuaccugaacgagacccacuucagcgacgacaucgagcagcaggccgacaacaugaucaccgagaugcugcagaaggaguacauggagagacagggcaagaccccccugggccugguggaccuguucguguucagcaccagcuucuaccugaucagcaucuuccugcaccuggugaagauccccacccacagacacaucgugggcaagagcugccccaagccccacagacugaaccacaugggcaucugcagcugcggccuguacaagcagcccggcgugcccgugaaguggaagagaugaggacuaguuauaagacugacuagcccgaugggccucccaacgggcccuccuccccuccuugcaccgagauuaaucaaaggcucuuuucagagccaccaaaaaaaaaaaaaaaaaaaaaaaaaaaaaaaaaaaaaaaaaaaaaaaaaaaaaaaaaaaaaaaaaaaaaaaaaaaaaaaaaaaaaaaaaaaaaaaaaaaaa

SEQ ID NO: 27868 - RNA, 1689 nt, Artificial Sequence
  mRNA product Design i-3 (hSL-A100) comprising derived and/or modified sequence from LASV(G1442-SLE-2011;Clade IV)__AIT17180__GPCmut4 (opt4)
aggagaaagcuuaccaugggccagaucgugaccuucuuccaggaggugccccacgugaucgaggaggugaugaacaucgugcugaucgcccugagcauccuggccgugcugaagggccuguacaacguggccaccugcggccugaucggccuggugaccuuccugcugcugugcggcagaagcugcaccaccacccuguacaagggcguguacgagcugcagacccuggagcugaacauggagacccugaacaugugcaugccccugagcugcaccaagaacaacagccaccacuacaucagagugggcaacgagaccggccuggagcugacccugaccaacaccagcaucaucaaccacaaguucugcaaccugagcgacgcccacaagaagaaccuguacgaccacgcccugaugagcaucaucagcaccuuccaccugagcauccccaacuucaaccaguacgaggccaugagcugcgacuucaacggcggcaagaucagcgugcaguacaaccugagccacagcuacgccggcgacgccgccaaccacugcggcaccguggccaacggcgugcugcagaccuucaugagaauggccuggggcggcagcuacaucgcccuggacagcggcagaggcaacugggacugcaucaugaccagcuaccaguaccugaucauccagaacaccaccugggacgaccacugccaguucagcagacccagccccaucggcuaccugggccugcugagccagagaaccagagacguguacaucagcagaagaagaagaggcaccuucaccuggacccugagcgacagcgagggcaaggacacccccggcggcuacugccugaccagauggaugcugaucgaggccgagcugaagugcuucggcaacaccgccguggccaagugcaacgagaagcacgacgaggaguucugcgacaugcugagacuguucgacuucugcaagcaggccauccagagacugaaggcccccgcccagaugagcauccagcugaucaacaaggccgugaacgcccugaucaacgaccagcugaucaugaagaaccaccugagagacaucaugggcauccccuacugcaacuacagcaaguacugcuaccugaacaacaccgccaccggcaagaccagccugcccaagugcugccugaucagcaacggcagcuaccugaacgagacccacuucagcgacgacaucgagcaggaggccgacaacaugaucaccgagaugcugcagaaggaguacauggagagacagggcaagaccccccugggccugguggaccuguucguguucagcaccagcuucuaccugaucagcaucuuccugcaccuggugaagauccccacccacagacacaucgugggcaagagcugccccaagccccacagacugaaccacaugggcaucugcagcugcggccuguacaagcagcccggcgugcccgugagauggaagagaugaggacuaguuauaagacugacuagcccgaugggccucccaacgggcccuccuccccuccuugcaccgagauuaaucaaaggcucuuuucagagccaccaaaaaaaaaaaaaaaaaaaaaaaaaaaaaaaaaaaaaaaaaaaaaaaaaaaaaaaaaaaaaaaaaaaaaaaaaaaaaaaaaaaaaaaaaaaaaaaaaaaaa

SEQ ID NO: 27869 - RNA, 1689 nt, Artificial Sequence
  mRNA product Design i-3 (hSL-A100) comprising derived and/or modified sequence from LASV(G3010-SLE-2013;Clade IV)__AIT17344__GPCmut4 (opt4)
aggagaaagcuuaccaugggccagaucgugaccuucuuccaggaggugccccacgugaucgaggaggugaugaacaucgugcugaucgcccugagcauccuggccgugcugaagggccuguacaacuucgccaccugcggccuggugggccuggugaccuuccugcugcugugcggcagaagcugcaccaccagccuguacaagggcguguacgagcugcagacccuggagcugaacauggagacccugaacaugugcaugccccugagcugcaccaagaacaacagccaccacuacaucauggugggcaacgagaccggccuggagcugacccugaccaacaccagcaucaucaaccacaaguucugcaaccugagcgacgcccacaagaagaaccuguacaaccacgcccugaugagcaucaucagcaccuuccaccugagcauccccaacuucaaccaguacgaggccaugagcugcgacuucaacggcggcaagaucagcgugcaguacaaccugagccacagcuacgccggcgacgccgccagccacugcggcaccguggccaacggcgugcugcagaccuucaugagaauggccuggggcggcagcuacaucgcccuggacagcggcuacggcaagugggacugcaucaugaccagcuaccaguaccugaucauccagaacaccaccugggaggaccacugccaguucagcagacccagccccaucggcuaccugggccugcugagccagagaaccagagacaucuacaucagcagaagaagaagaggcaccuucaccuggacccugagcgacagcgagggcaaggacacccccggcggcuacugccugaccagauggaugcugaucgaggccgagcugaagugcuucggcaacaccgccguggccaagugcaacgagaagcacgacgaggaguucugcgacaugcugagacuguucgacuucugcaagcaggccauccagagacugaagacccccgcccagaugagcauccagcugaucaacaaggccgugaacgcccugaucaacgaccagcugaucaugaagaaccaccugagagacaucaugggcauccccuacugcaacuacagcaaguacugcuaccugaaccacaccaccaccggcaagaccagccugcccaagugcugccuggugagcaacggcagcuaccugaacgagacccacuucagcgacgacaucgagcagcaggccgacaacaugaucaccgagaugcugcagaaggaguacauggagagacagggcaagaccccccugggccugguggaccuguucguguucagcaccagcuucuaccugaucagcaucuuccugcaccuggugaagauccccacccacagacacaucgugggcaagagcugccccaagccccacagacugaaccacaugggcaucugcagcugcggccuguacaagcagcccggcgugcccgugagauggaagagaugaggacuaguuauaagacugacuagcccgaugggccucccaacgggcccuccuccccuccuugcaccgagauuaaucaaaggcucuuuucagagccaccaaaaaaaaaaaaaaaaaaaaaaaaaaaaaaaaaaaaaaaaaaaaaaaaaaaaaaaaaaaaaaaaaaaaaaaaaaaaaaaaaaaaaaaaaaaaaaaaaaaaa

SEQ ID NO: 27870 - RNA, 1689 nt, Artificial Sequence
  mRNA product Design i-3 (hSL-A100) comprising derived and/or modified sequence from LASV(G502-SLE-2009;Clade IV)__AIT17126__GPCmut4 (opt4)
aggagaaagcuuaccaugggccagaucgugaccuucuuccaggaggugccccacgugaucgaggaggugaugaacaucgugcugaucgcccugagcauccuggccgugcugaagggccuguacaacuucgccaccugcggccuggugggccugcugaccuuccugcugcugugcggcagaagcugcaccaccggccuguacaagggcguguacgagcugcagacccuggagcugaacauggagacccugaacaugugcaugccccugagcugcaccaagaacaacagccaccacuacaucauggugggcaacgagaccggccuggagcugacccugaccaacaccagcaucaucaaccacaaguucugcaaccugagcgacgcccacaagaagaaccuguacgaccacgcccugaugagcaucaucagcaccuuccaccugagcauccccaacuucaaccaguacgaggccaugagcugcgacuucaacggcggcaagaucagcgugcaguacaaccugagccacagcuacgccggcgacgccgccgaccacugcggcaccguggccaacggcgugcugcagaccuucaugagaauggccuggggcggcagcuacaucgcccuggacagcggcagaggcagaugggacugcaucaugaccagcuaccaguaccugaucauccagaacaccaccugggaggaccacugccaguucagcagacccagccccaucggcuaccugggccugcugagccagagaaccagagacaucuacaucagcagaagaagaagaggcaccuucaccuggacccugagcgacagcgagggcaaggacacccccggcggcuacugccugaccagauggaugcugaucgaggccgagcugaagugcuucggcaacaccgccguggccaagugcaacgagaagcacgacgaggaguucugcgacaugcugagacuguucgacuucugcaagcaggccauccagagacugaaggcccccgcccagaugagcauccagcugaucaacaaggccgugaacgcccugaucaacgaccagcuggugaugaagaaccaccugagagacaucaugggcauccccuacugcaacuacagcagauacugcuaccugaaccacaccaccaccggcagaaccagccugcccaagugcugccuggugagcaacggcagcuaccugaacgagacccacuucagcgacgacaucgagcagcaggccgacaacaugaucaccgagaugcugcagaaggaguacauggagagacagggcaagaccccccugggccugguggaccuguucguguucagcaccagcuucuaccugaucagcaucuuccugcaccuggugaagauccccacccacagacacaucgugggcaagagcugccccaagccccacagacugaaccacaugggcaucugcagcugcggccuguacaagcagcccggcgugcccgugaaguggaagagaugaggacuaguuauaagacugacuagcccgaugggccucccaacgggcccuccuccccuccuugcaccgagauuaaucaaaggcucuuuucagagccaccaaaaaaaaaaaaaaaaaaaaaaaaaaaaaaaaaaaaaaaaaaaaaaaaaaaaaaaaaaaaaaaaaaaaaaaaaaaaaaaaaaaaaaaaaaaaaaaaaaaaa

SEQ ID NO: 27871 - RNA, 1689 nt, Artificial Sequence
  mRNA product Design i-3 (hSL-A100) comprising derived and/or modified sequence from LASV(G733-SLE-2010;Clade IV)__AIT17154__GPCmut4 (opt4)
aggagaaagcuuaccaugggccagaucgugaccuucuuccaggaggugccccacgugaucgaggaggugaugaacaucgugcugaucgcccugagcauccuggccgugcugaagggccuguacaacuucgccaccugcggcaucgugggccuggugagcuuccugcugcugugcggcagaagcugcaccaccagccuguacaagggcguguacgagcugcagacccuggagcugaacauggagacccugaacaugugcaugccccugagcugcaccaagaacaacagccaccacuacaucauggugggcaacgagaccggccuggagcugacccugaccaacaccagcaucaucaaccacaaguucugcaaccugagcgacgcccacaagaagaaccuguacgaccacgcccugaugagcaucaucagcaccuuccaccugagcauccccaacuucaaccaguacgaggccaugagcugcgacuucaacggcggcaagaucagcgugcaguacaaccugagccacagcuacgccggcgacgccgccaaccacugcggcaccaucgccaacggcgugcugcagaccuucaugagaauggccuggggcggcagcuacaucgcccuggacagcggcagagacagaugggacugcaucaugaccagcuaccaguaccugaucauccagaacaccaccugggaggaccacugccaguucagcagacccagccccaucggcuaccugggccugcugagccagagaaccagagacaucuacaucagcagaagaagaagaggcaccuucaccuggacccugagcgacagcgagggcaaggacacccccggcggcuacugccugaccagauggaugcugaucgaggccgagcugaagugcuucggcaacaccgccguggccaagugcaacgagaagcacgacgaggaguucugcgacaugcugagacuguucgacuucugcaagcaggccauccagagacugaaggcccccgcccagaugagcauccagcugaucaacaaggccgugaacgcccugaucaacgaccagcugaucaugaagaaccaccugagagacaucaugggcauccccuacugcaacuacagcaaguacugcuaccugaaccacaccaccaccggcaagaccagccugcccaagugcugccuggugagcaacggcagcuaccugaacgagacccacuucagcgacgacaucgagcagcaggccgacaacaugaucaccgagaugcugcagaaggaguacauggagagacagggcaagaccccccugggccugguggaccuguucguguucagcaccagcuucuaccugaucagcaucuuccugcaccuggugaagauccccacccacagacacguggugggcaagagcugccccaagccccacagacugaaccacaugggcaucugcagcugcggccuguacggccagcccggcgugcccgugaaguggaagagaugaggacuaguuauaagacugacuagcccgaugggccucccaacgggcccuccuccccuccuugcaccgagauuaaucaaaggcucuuuucagagccaccaaaaaaaaaaaaaaaaaaaaaaaaaaaaaaaaaaaaaaaaaaaaaaaaaaaaaaaaaaaaaaaaaaaaaaaaaaaaaaaaaaaaaaaaaaaaaaaaaaaaa

SEQ ID NO: 27872 - RNA, 1689 nt, Artificial Sequence
  mRNA product Design i-3 (hSL-A100) comprising derived and/or modified sequence from MOPV/LASV reassortant(IGS-1;Clade IV)__AFY05576__GPCmut4 (opt4)
aggagaaagcuuaccaugggccagaucgugaccuucuuccaggaggugccccacgugaucgaggaggugaugaacaucgugcugaucgcccugagcgugcuggccgugcugaagggccuguacaacuucgccaccugcggccuggugggccuggugaccuuccugcugcugugcggcagaagcugcaccaccagccuguacaagggcguguacgagcugcagacccuggagcugaacauggagacccugaacaugugcaugccccugagcugcaccaagaacaacagccaccacuacaucauggugggcaacgagaccggccuggagcugacccugaccaacaccagcaucaucaaccacaaguucugcaaccugagcgacgcccacaagaagaaccuguacgaccacgcccugaugagcaucaucagcaccuuccaccugagcauccccaacuucaaccaguacgaggccaugagcugcgacuucaacggcggcaagaucagcgugcaguacaaccugagccacagcuacgccggcgacgccgccaaccacugcggcaccguggccaacggcgugcugcagaccuucaugagaauggccuggggcggcagcuacaucgcccuggacagcggcagaggcaacugggacugcaucaugaccagcuaccaguaccugaucauccagaacaccaccugggaggaccacugccaguucagcagacccagccccaucggcuaccugggccugcugagccagagaaccagagacaucuacaucagcagaagaagaagaggcaccuucaccuggacccugagcgacagcgagggcgaggacacccccggcggcuacugccugaccagauggaugcugaucgaggccgagcugaagugcuucggcaacaccgccguggccaagugcaacgagaagcacgacgaggaguucugcgacaugcugagacuguucgacuucugcaagcaggccauccagagacugaaggcccccgcccagaugagcauccagcugaucaacaaggccgugaacgcccugaucaacgaccagcugaucaugaagaaccaccugagagacaucaugggcauccccuacugcaacuacagcaaguacugcuaccugaaccacaccaccaccggcagaaccagccugcccaagugcugccuggugagcaacggcagcuaccugaacgagacccacuucagcgacgacaucgagcagcaggccgacaacaugaucaccgagaugcugcagaaggaguacauggagagacagggcaagaccccccugggccugguggaccuguucguguucagcaccagcuucuaccugaucagcaucuuccugcaccuggugaagauccccacccacagacacaucgugggcaagagcugccccaagccccacagacugaaccacaugggcaucugcagcugcggccuguacaagcagcccggcgugcccgugaaguggaagagaugaggacuaguuauaagacugacuagcccgaugggccucccaacgggcccuccuccccuccuugcaccgagauuaaucaaaggcucuuuucagagccaccaaaaaaaaaaaaaaaaaaaaaaaaaaaaaaaaaaaaaaaaaaaaaaaaaaaaaaaaaaaaaaaaaaaaaaaaaaaaaaaaaaaaaaaaaaaaaaaaaaaaa

SEQ ID NO: 27873 - RNA, 1689 nt, Artificial Sequence
  mRNA product Design i-3 (hSL-A100) comprising derived and/or modified sequence from LASV(LM765-SLE-2012;Clade IV)__AIT17814__GPCmut4 (opt4)
aggagaaagcuuaccaugggccagaucgugaccuucuuccaggaggugccccacgugaucgaggaggugaugaacaucgugcugaucgcccugagcauccuggccgugcugaagggccuguacaacuucgccaccugcggccuggugggccuggugaccuuccugcugcugugcggcagaagcugcaccaccagccuguacaagggcguguacgagcugcagacccuggagcugaacauggagacccugaacaugugcaugccccugagcugcaccaagaacaacagccaccacuacaucauggugggcaacgagaccggccuggagcugacccugaccaacaccagcaucaucgaccacaaguucugcaaccugagcgacgcccacagaaagaaccuguacgaccacgcccugaugagcaucaucagcaccuuccaccugagcauccccaacuucaaccaguacgaggccaugagcugcgacuucaacggcggcaagaucagcgugcaguacaaccugagccacagcuacgccaaggacgccgccgaccacugcggcaccguggccaacggcgugcugcagaccuucaugagaauggccuggggcggcagcuacaucgcccuggacagcggcagaggcagaugggacugcaucaugaccagcuaccaguaccugaucauccagaacaccaccugggaggaccacugccaguucagcagacccagccccaucggcuaccugggccugcugagccagagaaccagagacaucuacaucagcagaagaagaagaggcaccuucaccuggacccugagcgacagcgagggcaaggacacccccggcggcuacugccugaccagauggaugcugaucgaggccgagcugaagugcuucggcaacaccgccguggccaagugcaacgagaagcacgacgaggaguucugcgacaugcugagacuguucgacuucugcaagcaggccauccagagacugaaggcccccgcccagaugagcauccagcugaucaacaaggccgugaacgcccugaucaacgaccagcugaucaugaagaaccaccugagagacaucaugggcauccccuacugcaacuacagcaaguacugcuaccugaaccacaccaccaccggcaagaccagccugcccaagugcugccuggugagcaacggcagcuaccugaacgagacccacuucagcgacgacaucgagcagcaggccgacaacaugaucaccgagaugcugcagaaggaguacauggagagacagggcaagaccccccugggccugguggaccuguucguguucagcaccagcuucuaccugaucagcaucuuccugcaccuggugaagauccccacccacagacacaucgugggcaagcccugccccaagccccacagacugaaccacaugggcaucugcagcugcggccuguacaagcagcccggcgugcccgugaaguggaagagaugaggacuaguuauaagacugacuagcccgaugggccucccaacgggcccuccuccccuccuugcaccgagauuaaucaaaggcucuuuucagagccaccaaaaaaaaaaaaaaaaaaaaaaaaaaaaaaaaaaaaaaaaaaaaaaaaaaaaaaaaaaaaaaaaaaaaaaaaaaaaaaaaaaaaaaaaaaaaaaaaaaaaa

SEQ ID NO: 27874 - RNA, 1689 nt, Artificial Sequence
  mRNA product Design i-3 (hSL-A100) comprising derived and/or modified sequence from LASV(LM776-SLE-2012;Clade IV)__AIT17824__GPCmut4 (opt4)
aggagaaagcuuaccaugggccagaucgugaccuucuuccaggaggugccccacgugaucgaggaggugaugaacaucgugcugaucgcccugagcauccuggccgugcugaagggccuguacaacuucgccaccugcggccuggugggccuggugaccuuccugcugcugugcggcagaagcugcaccaccagcguguacaagggcguguacgagcugcagacccuggagcugaacauggagacccugaacaugugcaugccccugagcugcaccaagaacaacagccaccacuacaucauggugggcaacgagaccggccuggagcugacccugaccaacaccagcaucaucaaccacaaguucugcaaccugagcgacgcccacaagaagaaccuguacgaccacgcccugaugagcaucaucagcaccuuccaccugagcauccccaacuucaaccaguacgaggccaugagcugcgacuucaacggcggcaagaucagcgugcaguacaaccugagccacagcuacgccggcgacgccgccaaccacugcggcaccguggccaacggcgugcugcagaccuucaugagaauggccuggggcggcagcuacaucgcccuggacagcggccacggcaagugggacugcaucaugaccagcuaccaguaccugaucauccagaacaccaccugggaggaccacugccaguucagcagacccagccccaucggcuaccugggccugcugagccagagaaccagagacaucuacaucagcagaagaagaagaggcaccuucaccuggacccugagcgacagcgagggcaaggacacccccggcggcuacugccugaccagauggaugcugaucgaggccgagcugaagugcuucggcaacaccgccguggccaagugcaacgagaagcacgacgaggaguucugcgacaugcugagacuguucgacuucugcaagcaggccauccagagacugaaggcccccgcccagaugagcauccagcugaucaacaaggccgugaacgcccugaucaacgaccagcugaucaugaagaaccaccugagagacaucaugggcauccccuacugcaacuacagcaaguacugcuaccugaaccacaccaccaccggcaagaccagccugcccaagugcugccuggugagcaacggcagcuaccugaacgagacccacuucagcgacgacaucgagcagcaggccgacaacaugaucaccgagaugcugcagaaggaguacauggagagacagggcaagaccccccugggccugguggaccuguucguguucagcaccagcuucuaccugaucagcaucuuccugcaccuggugaagauccccacccacagacacaucgugggcaagagcugccccaagccccacagacugaaccacaugggcaucugcagcugcggccuguacaagcagcccggcgugcccgugagauggaagagaugaggacuaguuauaagacugacuagcccgaugggccucccaacgggcccuccuccccuccuugcaccgagauuaaucaaaggcucuuuucagagccaccaaaaaaaaaaaaaaaaaaaaaaaaaaaaaaaaaaaaaaaaaaaaaaaaaaaaaaaaaaaaaaaaaaaaaaaaaaaaaaaaaaaaaaaaaaaaaaaaaaaaa

SEQ ID NO: 27875 - RNA, 1689 nt, Artificial Sequence
  mRNA product Design i-3 (hSL-A100) comprising derived and/or modified sequence from LASV(Mad39;Clade IV)__ANH09722__GPCmut4 (opt4)
aggagaaagcuuaccaugggccagaucgugaccuucuuccaggaggugccccacgugaucgaggaggugaugaacaucgugcugaucgcccugagcauccuggccgugcugaagggccuguacaacguggccaccugcggccugaucggccuggugaccuuccugcugcugugcggcagaagcugcaccaccacccuguacaagggcguguacgagcugcaggcccuggagcugaacauggagacccugaacaugugcaugccccugagcugcaccaagaacaacagccaccacuacaucagagugggcaacgagaccggccuggagcugacccugaccaacaccagccugaucaaccacaaguucugcaaccugagcgacgcccacaagaagaaccuguacgaccacgcccugaugagcaucaucagcaccuuccaccugagcauccccaacuucaaccaguacgaggccaugagcugcgacuucaacgacggcaagaucagcgugcaguacaaccugagccacaccuacgccggcgacaccgccaaccacugcggcaccguggccaacggcgugcugcagaccuucaugagaauggccuggggcggcagcuacaucgcccuggacagcggcagaggcggcugggacugcaucaugaccagcuaccaguaccugaucauccagaacaccaccugggaggaccacugccaguucagcagacccagccccaucggcuaccugggccugcugagccagagaaccagagacaucuacaucagcagaagaagaagaggcaccuucaccuggacccugagcgacagcgagggcaaggacacccccggcggcuacugccugaccagauggaugcugaucgaggccgagcugaagugcuucggcaacaccgccguggccaagugcaacgagaagcacgacgaggaguucugcgacaugcugagacuguucgacuucugcaagcaggccauccagagacugaaggcccccgcccagaugagcauccagcugaucaacaaggccgugaacgcccugaucaacgaccagcugaucaugaagaaccaccugagagacaucaugggcauccccuacugcaacuacagcaaguacugcuaccugaaccacaccgugaccggcaagaccagccugcccaagugcugccuggugagcaacggcagcuaccugaacgagacccacuucagcgacgacaucgagcagcaggccgacaacaugaucaccgagaugcugcagaaggaguacauggagagacagggcaagaccccccugggccugguggaccuguucguguucagcaccagcuucuaccugaucagcaucuuccugcaccuggugaagauccccacccacagacacguggugggcaagcccugccccaagccccacagacugaaccacaugggcaucugcagcugcggcuucuacaagcagcccggcgugcccgugagauggaagagaugaggacuaguuauaagacugacuagcccgaugggccucccaacgggcccuccuccccuccuugcaccgagauuaaucaaaggcucuuuucagagccaccaaaaaaaaaaaaaaaaaaaaaaaaaaaaaaaaaaaaaaaaaaaaaaaaaaaaaaaaaaaaaaaaaaaaaaaaaaaaaaaaaaaaaaaaaaaaaaaaaaaaa

SEQ ID NO: 27876 - RNA, 1689 nt, Artificial Sequence
  mRNA product Design i-3 (hSL-A100) comprising derived and/or modified sequence from LASV(Z0947-SLE-2011;Clade IV)__AIT17840__GPCmut4 (opt4)
aggagaaagcuuaccaugggccagaucgugaccuucuuccaggaggugccccacgugaucgaggaggugaugaacaucgugcugaucgcccugagcauccuggccgugcugaagggccuguacaacuucgccaccugcggccuggugggccuggugaccuuccugcugcugugcggcagaagcugcaccaucagccuguacaagggcguguacgagcugcagacccuggagcugaacauggagacccugaacaugugcaugccccugagcugcaccaagaacaacagccaccacuacaucauggugggcaacgagaccggccuggagcugacccugaccaacaccagcaucaucaaccacaaguucugcaaccugagcgacgcccacaagaagaaccuguacgaccacgcccugaugagcaucaucagcaccuuccaccugagcauccccaacuucaaccaguacgaggccaugagcugcgacuucaacggcggcaagaucagcgugcaguacaaccugagccacagcuacgccggcgacgccgccaaccacugcggcaccguggccaacggcgugcugcagaccuucaugagaauggccuggggcggcagcuacaucgcccuggacagcggcagagacagaugggacugcaucaugaccagcuaccaguaccugaucauccagaacaccaccugggaggaccacugccaguucagcagacccagccccaucggcuaccugggccugcugagccagagaaccagagacaucuacaucagcagaagaagaagaggcaccuucaccuggacccugagcgacagcgagggcaaggacacccccggcggcuacugccugaccagauggaugcugaucgaggccgagcugaagugcuucggcaacaccgccguggccaagugcaacgagaagcacgacgaggaguucugcgacaugcugagacuguucgacuucugcaagcaggccauccagagacugaaggcccccgcccagaugagcauccagcugaucaacaaggccgugaacgcccugaucaacgaccagcugaucaugaagaaccaccugagagacaucaugggcauccccuacugcaacuacagcaaguacugcuaccugaaccacaccaccaccggcaagaccagccugcccaagugcugccuggugagcaacggcagcuaccugaacgagacccacuucagcgacgacaucgagcagcaggccgacaacaugaucaccgagaugcugcagaaggaguacauggagagacagggcaagaccccccugggccugguggaccuguucguguucagcaccagcuucuaccugaucagcaucuuccugcaccuggugaagauccccacccacagacacaucgugggcaagcccugccccaagccccacagacugaaccacaugggcaucugcagcugcggccuguacaagcagcccggcgugcccgugaaguggaagagaugaggacuaguuauaagacugacuagcccgaugggccucccaacgggcccuccuccccuccuugcaccgagauuaaucaaaggcucuuuucagagccaccaaaaaaaaaaaaaaaaaaaaaaaaaaaaaaaaaaaaaaaaaaaaaaaaaaaaaaaaaaaaaaaaaaaaaaaaaaaaaaaaaaaaaaaaaaaaaaaaaaaaa

SEQ ID NO: 27877 - RNA, 1689 nt, Artificial Sequence
  mRNA product Design i-3 (hSL-A100) comprising derived and/or modified sequence from LASV(Josiah;Clade IV)__NP_694870__GPCmut4 (opt5)
aggagaaagcuuaccaugggccagaucgugaccuucuuucaagaggucccccacguuauugaagaggugaugaacaucgugcugauugcccucagcguccuggcugugcuuaaggggcuguacaauuucgccacaugcggacucguuggccuggugacguuucuucugcucugugggagauccugcaccacaucucuguauaaaggagucuacgaacugcagacccucgagcugaacauggaaacacuuaauauguguaugccucugagcugcaccaagaacaauucccaucacuauaucauggugggcaacgagacagggcucgagcugacccuuacgaauaccucuauuaucaaccauaaauucuguaaucugagcgacgcgcacaagaaaaaccucuacgaucaugcucugauguccaucauuucuacauuucaccugagcaucccgaauuucaaccaguaugaagccauguccugcgacuuuaauggaggcaagauuagcguucaguacaaccucucucacuccuaugccggcgaugcugccaaucauugugggaccguggcuaacggaguccugcaaacauucaugcggauggccuggggcgggagcuacaucgcgcuugacucuggacgcggcaacugggauugcauuaugaccuccuaccaguaucugaucauucagaauacgacaugggaggaccacugucaguuuagcagacccucuccuaucggguaccucggacugcuuucccaacggacccgcgauaucuauauuagcagacggcgcagaggcacauucaccuggacccuguccgacucugaaggcaaggauacacccgggggauacugccucacgcgguggaugcugaucgaggccgagcugaaauguuuuggcaacaccgcuguggccaagugcaaugaaaaacaugacgaggaguucugcgauaugcuccgccuguuugacuucuguaagcaggcuauucagagacuuaaagccccugcgcagaugagcauccaacugauuaacaaggccgugaaugcucucaucaacgaucagcugaucaugaagaaucaccuucgggacauuauggggauccccuauugcaacuacuccaaauauuguuaccugaaucacacaaccacaggacgcaccagccucccuaagugcugucuggucucuaacggcuccuaccugaaugaaacgcauuucagcgacgauauugaacagcaagccgacaacaugaucacagagaugcuccagaaagaguauauggaaagacaggggaagaccccgcugggacuuguugaucuguuuguguucucuaccagcuuuuaccucauuuccaucuuccugcaccuggugaaaauccccacacaucggcacauugucggcaagucuugcccuaaaccccaucgccuuaaucacaugggcaucuguagcugcgggcucuauaagcagccuggagugcccguuaaguggaaaagaugaggacuaguuauaagacugacuagcccgaugggccucccaacgggcccuccuccccuccuugcaccgagauuaaucaaaggcucuuuucagagccaccaaaaaaaaaaaaaaaaaaaaaaaaaaaaaaaaaaaaaaaaaaaaaaaaaaaaaaaaaaaaaaaaaaaaaaaaaaaaaaaaaaaaaaaaaaaaaaaaaaaaa

SEQ ID NO: 27878 - RNA, 1686 nt, Artificial Sequence
  mRNA product Design i-3 (hSL-A100) comprising derived and/or modified sequence from LASV(LP;Clade I)__AAF86701__GPCmut4 (opt5)
aggagaaagcuuaccaugggccagaucauuaccuucuuucaagaggugccccacgucaucgaagagguuaugaacauugugcugaucgcccucagccugcuugcuauucugaaggggcucuacaauaucgccacaugcggaaucauuggccugguggcguuccuuuuucugugugggaaauccugcucucucacgcugaagggaggcuaugaacugcagacccucgagcugaacauggaaacacuuaauauguguaugccucugagcugcaccaaaaacuccucucaucacuacaucagagucgggaaugagacaggacucgagcugacccuuacaaacaccagcauuaucaaucauaaguucuguaaccuguccgacgcucacaaaaagaaucucuaugaucaugcccugaugucuauuaucagcacguuucaccuguccauuccgaacuucaaucaguacgaagccaugagcugcgacuuuaacggcggcaagaucucugugcaguauaaucucucccacagcuacgcuggggaugccgcugagcauuguggaaccguugccaacggcgugcugcaaacauucaugcggauggcguggggagggcgcuauaucgcccuugacucuggcaaagggaauugggauugcauuaugaccuccuaccaguaccugaucauucagaacacaaccugggaagaccacugucaguuuagcagacccucuccuaucggauaucucggccugcuuucccaacggacgcgcgauauuuacaucagcagacggcgcagaggcacauucaccuggacacuguccgacucugaggggaacgagacccccggaggcuauugccucacccgguggaugcugaucgaagcugagcugaaguguuuugggaauacagccgucgcuaaaugcaacgaaaagcaugaugaggaguucugcgacaugcuccgccuguuugauuucuguaaacaggccauuagacggcuuaaggcgccugcccagaugagcauccagcugauuaauaaggcugugaacgcccucaucaaugaccaacugauuaugaaaaaccaccuucgcgauaucaugggaauccccuacugcaauuauuccaaguacuguuaucugaaccacacgagcucuggcagaaccucccucccuaaaugcugucugauuagcaaugggucuuaccugaacgaaacacaguucagcgacgacaucgagcagcaagcugauaauaugauuaccgaaaugcuccagaaggaguacaucgaacggcagggaaaaacaccgcugggccuuguugacauuuuuaucuucuccaccucuuuuuaucugauuagcaucuuccuccaucugaucaagauucccacgcaccgccauaucgugggcaaaccuugccccaagccucacagacugaaccauaugggggucuguuccugcggacuuuacaagcaccccggcgugccgacaaaauggaagcggugaggacuaguuauaagacugacuagcccgaugggccucccaacgggcccuccuccccuccuugcaccgagauuaaucaaaggcucuuuucagagccaccaaaaaaaaaaaaaaaaaaaaaaaaaaaaaaaaaaaaaaaaaaaaaaaaaaaaaaaaaaaaaaaaaaaaaaaaaaaaaaaaaaaaaaaaaaaaaaaaaaaaa

SEQ ID NO: 27879 - RNA, 1686 nt, Artificial Sequence
  mRNA product Design i-3 (hSL-A100) comprising derived and/or modified sequence from LASV(803213;Clade II)__AAF86703__GPCmut4 (opt5)
aggagaaagcuuaccaugggccagaucauuaccuucuuucaagaggugccccacgucaucgaagagguuaugaacauugugcugaucgcccucagccugcuugcuauucugaaggggaucuacaauguggccacaugcggacucuucggccugaucuccuuucuucugcucugugggagaucuugcagcgucacguauaaaggaguguacgaacugcagacccuggagcucaacauggcgaaucugaacauguguaugccucuuuccugcacaaagaauaacucucaucacuauauuaugguuggcaaugaaaccgggcuggagcucacacugaccaacacaagcaucauuaaucauaaauucuguaaccuuuccgacgcucacaagaaaaaucuguacgaucaugcccucaugucuaucauuagcaccuuucaccuguccaucccgaacuucaaucaguaugaggccaugagcugcgacuuuaacggaggcaagauuucugugcaguacaaucugucccacagcuucgcugucgaugccgcuaaccauuguggcacgaucgccaacggggugcuccaaaccuuuaugcggauggcguggggaggcucuuauaucgcccuggacuccgggaagggaaauugggauugcauuaugacaagcuaccaguaccuuaucauucagaacaccacaugggaagaccacugucaguucucucgccccuccccuaucggcuaucuggggcuccugagccaaagaacccgggauauuuacaucucccgcagacggcgcggaacguuuacauggacccuuucugacagcgagggcaaugaagcucccggcggguauugccugacaagauggaugcucaucgaggccgagcugaaauguuucggaaacaccgcuguugccaagugcaaugaaaaacaugaugaggaauuuugcgacaugcugcgccucuucgauuucuguaagcaggcgauuaaacggcugaagaccccugcccagauguccauccagcuuauuaacaaggcugugaaugcccugaucaacgaccaacucauuaugaaaaaucaccugagagauaucaugggcauccccuacugcaacuauagccgguacuguuaucuuaaucacacagucacggggaagaccucucugccucgcugcugucucguguccaacggaagcuaccugaaugagacacauuuuucugacgacauugaacagcaggcugauaacaugaucaccgagaugcugcaaaaagaguacauggacagacagggcaagacaccgcucgggcugguggaucuuuucgucuuuagcaccuccuucuaucugauuucuaucuuucuccaccugguuaaaauucccacgcaucggcacaucgugggaaagccuugccccaaaccucaucgccugaaucacaugggcauuuguagcugcggccuuuacaagcaccccggggugccggucaaguggaaaagaugaggacuaguuauaagacugacuagcccgaugggccucccaacgggcccuccuccccuccuugcaccgagauuaaucaaaggcucuuuucagagccaccaaaaaaaaaaaaaaaaaaaaaaaaaaaaaaaaaaaaaaaaaaaaaaaaaaaaaaaaaaaaaaaaaaaaaaaaaaaaaaaaaaaaaaaaaaaaaaaaaaaaa

SEQ ID NO: 27880 - RNA, 1686 nt, Artificial Sequence
  mRNA product Design i-3 (hSL-A100) comprising derived and/or modified sequence from LASV(GA391;Clade III)__CAA36645__GPCmut4 (opt5)
aggagaaagcuuaccaugggccagaucgugaccuucuuucaagaggucccccacguuauugaagaggugaugaacaucgugcugauugcccucagcauccuggcuauucuuaaggggcuguacaaugucgccacaugcggacucaucggccuggugacguuccuucugcucuccgggagaucuuguagccugaucuauaaaggaaccuacgaacugcagacacucgagcugaacauggaaacccuuaauaugugcaugccucuguccuguacaaagaacaauucucaucacuauauucggguuggcaacgagaccgggcucgagcugacacuuaccaauacgagcauccugaaccauaaauuuugcaaucucuccgacgcgcacaagcgcaaccuguacgaucauucucugaugagcauuaucuccaccuuccaccucagcauuccgaauuuuaaccaguaugaagcuaugucuugugacuucaauggaggcaaaaucacagugcaguacaaccugucccacagcuuugccgucgaugccgcuggccauugcgggacccuugccaauggagugcugcaaacauucaugagaauggcuuggggcgggucuuauauugcccucgacuccggacggggcaacugggauuguaucaugaccagcuaccaguaccugaucauucagaacacgacaugggacgaucacugccaguuuucucgccccuccccuaucggguaucuuggacugcucagccaaagaacccgggacauuuacaucucccgcagacggcgcggcacauucaccuggacccugucugauagcgagggcaaugaaacacccgggggauauugucugacgagauggaugcucauugaggcggagcugaagugcuuuggcaacaccgccguugcuaaguguaaugaaaaacaugacgaggaguucugcgauaugcuucggcuguuugacuucugcaagcaggccauccgcagacucaaaaccccugcucagauguccauccagcugauuaacaaggccgugaaugcgcuuaucaacgaucaacugauuaugaaaaaucaccuccgggacaucauggggauucccuacuguaacuauagccgcuacugcuaucugaaucacacaucuacaggaaagaccucccugccuagauguugccucaucagcaacggcucuuaccugaaugaaacgaaguucagcgacgauaucgaacagcaggccgacaacaugauuacagagaugcuucaaaaagaguacaucgaucggcaggggaagaccccgcugggacucgucgaccuguuuguguucuccaccucuuuuuaucugauuagcaucuuccuucaucucgugaaaauucccacacacagacauaucgucggcaagccuugucccaaaccucaccgccugaaucauaugggcauuugcuccugugggcuguacaagcagcccggaguuccggugcgguggaaaagaugaggacuaguuauaagacugacuagcccgaugggccucccaacgggcccuccuccccuccuugcaccgagauuaaucaaaggcucuuuucagagccaccaaaaaaaaaaaaaaaaaaaaaaaaaaaaaaaaaaaaaaaaaaaaaaaaaaaaaaaaaaaaaaaaaaaaaaaaaaaaaaaaaaaaaaaaaaaaaaaaaaaaa

SEQ ID NO: 27881 - RNA, 1689 nt, Artificial Sequence
  mRNA product Design i-3 (hSL-A100) comprising derived and/or modified sequence from LASV(AV;Clade V)__CCA30314__GPCmut4 (opt5)
aggagaaagcuuaccaugggccagaucgugaccuucuuucaagaggucccccacguuauugaagaggugaugaacaucgugcugauugcccucagcauccuggcuguccuuaaggggcuguacaauauugccacaugcggacucaucggccugaucacguuccuucugcucugugggagauccugcucuagcaaccuguauaaaggaguguacgaacugcagucccucgaccugaauauggagacccuuaacauguguaugccucugucuugcacaaagaauaacagccaucacuauauucggguuggcaaugauaccgggcucgaacugacacuuaccaacacauccauccugaaucauaaauuuuguaaccucucugacgcgcacaagaaagaucuguacgaccaugcucugaugagcauuaucuccaccuuccaccucagcauuccgaauuuuaaccaguaugaggccaugucuugcgauuucaauggaggcaagaucuccgugcaguacaaccugagccacucuuaugccauugacgcugccaaucauuguggcacggucgcuaacgggauccuucaaaccuuuaugcgcauggccuggggaggcuccuacaucgcgcuggauagcgggagaggaaacugggacugcauuaugacaucuuaccaguaucucaucauucagaauaccacaugggagaaccacugucaguucucccggcccagcccuaucggcuaccuggggcuucugucccaacgcaccagagauauuuauaucucucggcgcagacggggaacguuuacauggacccucagcgacuccgaaggcaaugccacacccggcggguacugccugacccgcuggaugcugaucgaggcugaacucaaguguuucggaaacaccgccguggcuaaaugcaaugagaagcaugaugaggaauuuugcgacaugcugagacuuuucgauuuuuguaaacaggccauuagccggcugaagucuccugcgcagauguccauccagcucauuaacaaagccguuaaugcucugaucaacgaccaacuuauuaugaagaaucaucugcgcgacaucaugggcauccccuauugcaacuacagcaaguauuguuaccucaaucacacaauuacggggaaaaccucucugccuaagugcugucuggugagcaacggauccuaccucaaugagacacacuucucugaugacaucgaacagcaggccgauaacaugauuaccgagaugcugcaaaaagaauauauggagagacagggcaagacaccgcuugggcuggucgaccucuucguguuuagcaccuccuucuaccugaucagcauuuuucugcggcuugugaaaauccccacgcaccgccauauugucggaaagccuugccccaaaccucacagacucaaucauaugggcaucuguucuugcggccuguauaagcagcccgggguuccggugcgguggaagagaugaggacuaguuauaagacugacuagcccgaugggccucccaacgggcccuccuccccuccuugcaccgagauuaaucaaaggcucuuuucagagccaccaaaaaaaaaaaaaaaaaaaaaaaaaaaaaaaaaaaaaaaaaaaaaaaaaaaaaaaaaaaaaaaaaaaaaaaaaaaaaaaaaaaaaaaaaaaaaaaaaaaaa

SEQ ID NO: 27882 - RNA, 1686 nt, Artificial Sequence
  mRNA product Design i-3 (hSL-A100) comprising derived and/or modified sequence from LASV(Togo/2016/7082;Clade VI)__AMR44577__GPCmut4 (opt5)
aggagaaagcuuaccaugggccagaucauuaccuucuuucaagaggugccccacgucaucgaagagguuaugaacauugugcugaucgcccucagccugcuugcuauucugaaggggguguacaaugucgccacaugcggaaucaucggccucgugacguuccuguuucuuugugggagauccugcucucugauuuauaaaggaagcuacgaacuccagacccuggagcugaacauggaaacacucaauauguguaugccucuguccugcaccaagaacucuagccaucacuauauccggguuggcaaugagacagggcuugagcugacccucacaaacaccuccauuaucaaucauaaauucuguaaccugucugacgcgcacaagcgcaaucuuuacgaucaugcucugaugagcauucucuccacguuucaccugagcaucccgaacuucaaucaguaugaagccaugucuugcgacuuuaacggaggcaaaauuuccgugcaguacaaucugagccacgccuaugcugucgaugccgcugagcauuguggcaccguggccaacgggguucuccaaacauucaugagaauggcguggggaggcucuuacaucgcccuggacuccgggcggggaaauugggauugcaucaugaccagcuaccaguaucuuauuauccagaacacaaccugggaagaccacugucaguuuucucgccccuccccuauuggcuaccuggggcuccugagccaaagaacgcgggauaucuauauuucccgcagacggcgcggaacauucaccuggacacuuucugacagcgagggcaacgagacccccggcggguacugccugaccagauggaugcucaucgaagcugagcugaaguguuuuggaaauacagccguggcuaagugcaacgaaaaacaugaugaggaguucugcgacaugcugcggcucuuugauuucuguaagcaggccauccagcgccugaaauccccugcgcagaugagcauucaacuuaucaauaaggccgucaacgcucugauuaaugaccagcucaucaugaaaaaccaccugagagauaugaugggcauucccuauugcaauuacucuaaguauuguuaccuuaaccacacguccagcgggcggaccucucugccuaagugcugucucgugagcaauggauccuaccugaacgaaacacauuucucugacgacaucgagcagcaagccgauaauaugaucaccgaaaugcugcagaaagaguauauugaccgccagggcaagacaccgcucgggcugguggaucuuuuugucuucagcaccuccuuuuaccugaucagcauuuuccuccaccugaucaaaauucccacgcauagacacaucguuggaaagccuugccccaaaccucaucggcugaaccacaugggcauuuguucuugcggccuuuauaagcagcccggggugccgacaagauggaaacgcugaggacuaguuauaagacugacuagcccgaugggccucccaacgggcccuccuccccuccuugcaccgagauuaaucaaaggcucuuuucagagccaccaaaaaaaaaaaaaaaaaaaaaaaaaaaaaaaaaaaaaaaaaaaaaaaaaaaaaaaaaaaaaaaaaaaaaaaaaaaaaaaaaaaaaaaaaaaaaaaaaaaaa

SEQ ID NO: 27883 - RNA, 1686 nt, Artificial Sequence
  mRNA product Design i-3 (hSL-A100) comprising derived and/or modified sequence from LASV(KAK-428;Clade n.d. (VII))__ANH09740__GPCmut4 (opt5)
aggagaaagcuuaccaugggccagaucgugaccuucuuucaagaggucccccacguuauugaagaggugaugaacaucgugcugauugcccucagccugcuugcuauccugaaggggcucuacaauuucgccacaugcggagucauuggccugaucacguuucuucugcucugugggagauccugcucugcgaccuauaaaggacaguacgaacugcagacacuggagcucaacauggaaagccugaauauguguaugccucuuuccugcaccaagaacaauucucaucacuauauccgggcuggcaacaauacagggcuggagcucacccugacaaacaccagcauuaucucccauaaauucuguaaucuuucugacgcccacaagaaaaaccuguacgaucauacgcucaugagcauuaucaccacauuucaccuguccauuccgaauuucaaccaguaugaggccaugagcugcgacuuuaauggaggcaagaucucuauucaauacaaccugucccacagcuaugcuggcgaugccgcucagcauugugggaccguggccaauggaguucuccagacauucaugcgcauggcguggggcgggucuuaccuggcccuugacuccggaagacggggcugggauugcaucaucagcucuuaccaguaucugauuauccaaaacaccacgugggacgaucacugucaguuuucccgccccagcccuauuggguaccucggauucgugucccagaagacaagagacaucuauauuucucggcgcagacggggcaccuuuacauggacccugagcgauuccgaaggccaugacaugcccgggggauacugccuuacccgcuggaugcugaucgaggcugaucucaaauguuucggcaacacagccgucgcuaagugcaaugaaaaacacgacgaggaguuuugcgauauguggagacuguucgacuucuguaagcaggccauccaacggcugaaagcgccugcccagaugaacauucagcucaucaauaaggcugugaacgcccugauuaaugaccaacuuaugaugaagaaccaucugcgcgauaucauggggauucccuauugcaauuacagcaaauuuuguuaucucaacaauacgaccacaggaagaaccucucugccucggugcugucuuaucuccaacggcagcuaccugaaugaaacacacuucucugacgauaucgagcagcaggcugacaacaugauuaccgaaaugcuccagaaggaguacauggaucgccaagggaaaacgccgcugggacugguugaccucuuuguguucagcacauccuuuuaucugaucaccauuuuccuucaccuggucaagauccccacccauagacacauugugggcaaaccuugccccaagccucaucggcucaaucacaugggcaucuguucuugcgggcuguacaaacagcccggagugccggucagauggaagcgcugaggacuaguuauaagacugacuagcccgaugggccucccaacgggcccuccuccccuccuugcaccgagauuaaucaaaggcucuuuucagagccaccaaaaaaaaaaaaaaaaaaaaaaaaaaaaaaaaaaaaaaaaaaaaaaaaaaaaaaaaaaaaaaaaaaaaaaaaaaaaaaaaaaaaaaaaaaaaaaaaaaaaa

SEQ ID NO: 27884 - RNA, 1686 nt, Artificial Sequence; identical to SEQ ID NO: 27878
  mRNA product Design i-3 (hSL-A100) comprising derived and/or modified sequence from LASV(Pinneo-NIG-1969;Clade I)__AIT17836__GPCmut4 (opt5)

SEQ ID NO: 27885 - RNA, 1686 nt, Artificial Sequence
  mRNA product Design i-3 (hSL-A100) comprising derived and/or modified sequence from LASV(ISTH0009-NIG-2011;Clade II)__AIT17404__GPCmut4 (opt5)
aggagaaagcuuaccaugggccagaucauuaccuucuuucaagaggugccccacgucaucgaagagguuaugaacauugugcugaucgcccucagccugcuugcuauucugaaggggaucuacaauguggccacaugcggacucuucggccuggucuccuuucuucugcucugugggagaucuugcagcacgaccuauaaaggaguguacgaacugcagacacuggagcucgacauggcgucccugaacauguguaugccucuuucuugcaccaagaauaacagccaucacuauaucaugguuggcaaugaaacagggcuggagcucacccugacaaacaccuccauuaucaaucauaaauucuguaaccuuucugaugcucacaagaaaaaucuguacgaccaugcccucaugagcauuaucuccacguuucaccugagcauuccgaacuucaaucaguaugaggccaugucuugcgauuuuaacggaggcaagaucuccgugcaguacaaucugagccacgcuuaugccgucgacgcugccaaccauuguggcaccauugcgaauggggugcuccaaacauucaugcggauggccuggggaggcucuuacaucgcucuggauuccgggaagggaagcugggacugcaucaugaccucuuaccaguaucuuauuauccagaacacaaccugggaagaucacugucaguuuucccgccccagcccuauuggcuaccuggggcuccugucccaaagaacgcgggacaucuauauuucucgcagacggcgcggaacauucaccuggacacuuagcgauuccgagggcaacgaaacccccggcggguacugccugaccagauggaugcucaucgaggccgagcugaaauguuuuggaaauacagcuguugccaagugcaacgaaaaacaugacgaggaguucugcgauaugcugcggcucuuugacuucuguaagcaggcgauccgcagacugaaaacgccugcccagaugagcauucagcuuaucaauaaggcugugaacgcccugauuaaugaucaacucaucaugaagaaccaucugcgggacauuaugggcauccccuauugcaauuacucuaaauauuguuaccuuaaccacaccgucacagggaagaccucccugccucgcugcugucucgugagcaauggaucuuaccugaacgaaacacacuucagcgacgauaucgaacagcaggcugacaauaugauuaccgagcugcuccaaaaagaguauauggauagacagggcaagacgccgcuggggcuuguggaccuguuugucuucuccacaucuuuuuaccucaucagcauuuuccugcaccugaucaaaauucccacccaucggcacaucaccggaaagccuugccccaaaccucaucgccuuaaccacaugggcauuuguuccugcggccucuauaagcaccccgggguuccggugaaguggaaaagaugaggacuaguuauaagacugacuagcccgaugggccucccaacgggcccuccuccccuccuugcaccgagauuaaucaaaggcucuuuucagagccaccaaaaaaaaaaaaaaaaaaaaaaaaaaaaaaaaaaaaaaaaaaaaaaaaaaaaaaaaaaaaaaaaaaaaaaaaaaaaaaaaaaaaaaaaaaaaaaaaaaaaa

SEQ ID NO: 27886 - RNA, 1686 nt, Artificial Sequence
  mRNA product Design i-3 (hSL-A100) comprising derived and/or modified sequence from LASV(ISTH2010-NIG-2012;Clade II)__AIT17482__GPCmut4 (opt5)
aggagaaagcuuaccaugggccagaucauuaccuucuuucaagaggugccccacgucaucgaagagguuaugaacauugugcugaucgcccucagccugcuugcuauucugaaggggaucuacaauguggccacaugcggacucuucggccuggucuccuuucuucugcucugugggagaucuugcagcacgaccuauaaaggaguguacgaacugcagacacuggagcucgacauggcgucccugaacauguguaugccucuuucuugcaccaagaauaacagccaucacuauaucaugguuggcaaugaaacagggcuggagcucacccugacaaacaccuccauuaucaaucauaaauucuguaaccuuucugaugcucacaagaaaaaucuguacgaccaugcccucaugagcauuaucuccacguuucaccugagcauuccgaacuucaaucaguaugaggccaugucuugcgauuuuaacggaggcaagaucuccgugcaguacaaucugagccacgcuuaugccgucgacgcugccaaccauuguggcaccauugcgaauggggugcuccaaacauucaugcggauggccuggggaggcucuuacaucgcucuggauuccgggaagggaagcugggacugcaucaugaccucuuaccaguaucuuauuauccagaacauuacaugggaagaucacugucaguuuucccgccccagcccuaucggcuaccuggggcuccugucccaaagaacccgggacauuuauaucucucgcagacggcgcggaacguucacauggacccuuagcgauuccgagggcaacgaaacacccggcggguacugccugaccagauggaugcucaucgaggccgagcugaaauguuuuggaaauaccgcuguugccaagugcaacgaaaaacaugacgaggaguucugcgauaugcugcggcucuuugacuucuguaagcaggcgauucgcagacugaaaacgccugcccagaugagcauccagcuuauuaauaaggcugugaacgcccugaucaaugaucaacucauuaugaagaaccaucugcgggacaucaugggcauccccuauugcaauuacucuaaauauuguuaccuuaaccacacagucaccgggaagacaucccugccucgcugcugucucgugagcaauggaucuuaccugaacgaaacccacuucagcgacgauauugaacagcaggcugacaauaugaucacagagcugcuccaaaaagaguauauugauagacagggcaagaccccgcuggggcuuguggaccuguuugucuucuccacgucuuuuuaccucaucagcauuuuccugcaccugguuaaaauccccacacaucggcacguggugggaaagccuugccccaaaccucaucgccuuaaccacaugggcauuuguuccugcggccucuauaagcaccccggggucccggugaaguggaaaagaugaggacuaguuauaagacugacuagcccgaugggccucccaacgggcccuccuccccuccuugcaccgagauuaaucaaaggcucuuuucagagccaccaaaaaaaaaaaaaaaaaaaaaaaaaaaaaaaaaaaaaaaaaaaaaaaaaaaaaaaaaaaaaaaaaaaaaaaaaaaaaaaaaaaaaaaaaaaaaaaaaaaaa

SEQ ID NO: 27887 - RNA, 1686 nt, Artificial Sequence
  mRNA product Design i-3 (hSL-A100) comprising derived and/or modified sequence from LASV(Lassa virus/H.sapiens-wt/NGA/2015/ISTH_0543;Clade II)__AVO03639__GPCmut4 (opt5)
aggagaaagcuuaccaugggccagaucauuaccuucuuucaagaggugccccacgucaucgaagagguuaugaacauugugcugaucgcccucagccugcuugcuauucugaaggggaucuacaauguggccacaugcggacucuucggccuggucuccuuucuucugcucugugggagaucuugcagcacgaccuauaaaggaguguacgaacugcagacacuggagcucgacauggcgaaccugaauauguguaugccucuuuccugcaccaagaacaauucucaucacuauaucaugguuggcaacgaaacagggcuggagcucacccugacaaauaccagcauuaucaaccauaaauucuguaaucuuuccgaugcucacaagaaaaaccuguacgaccaugcccucaugucuauuaucagcacguuucaccuguccauuccgaauuucaaccaguaugaggccaugagcugcgauuuuaauggaggcaagaucucugugcaguacaaccugucccacaccuaugcugucgacgccgcuaaucauuguggcacaauugccaacggggugcuccaaaccuucaugcggauggcguggggaggcagcuacaucgcccuggauucugggaagggauccugggacugcaucaugacaagcuaccaguaucuuguuauucagaacaccacgugggaagaucacugucaguuuucucgccccuccccuaucggcuaccuggggcuccugagccaaagaacacgggacauuuauaucucccgcagacggcgcggaaccuucacauggacccuuucugauagcgagggcaaugaaacccccggcggguacugccugacaagauggaugcucauugaggcugagcugaaauguuuuggaaacacggccguggcuaagugcaaugaaaaacaugacgaggaguucugcgauaugcugcggcucuuugacuucuguaagcaggccauccgcagacugaaaaccccugcgcagauguccauccagcuuauuaacaaggccgucaaugcucugaucaacgaucaacucauuaugaagaaucaucugcgggacaucaugggcauucccuauugcaacuacagcaaauauuguuaccuuaaucacacagugaccgggaagacaucucugccucgcugcugucucguguccaacggaagcuaccugaaugaaacccacuucucugacgauaucgaacagcaggccgacaacaugaucacggagcugcuccaaaaagaguauauugauagacagggcaagacaccgcuggggcuugucgaccuguuuguuuucagcaccuccuuuuaccucaucucuauuuuccugcaccuggugaaaauccccacccaucggcacauuacaggaaagccuugccccaaaccucaucgccuuaaucacaugggcaucuguagcugcggccucuauaagcaccccggggugccggucaaguggaaaagaugaggacuaguuauaagacugacuagcccgaugggccucccaacgggcccuccuccccuccuugcaccgagauuaaucaaaggcucuuuucagagccaccaaaaaaaaaaaaaaaaaaaaaaaaaaaaaaaaaaaaaaaaaaaaaaaaaaaaaaaaaaaaaaaaaaaaaaaaaaaaaaaaaaaaaaaaaaaaaaaaaaaaa

SEQ ID NO: 27888 - RNA, 1686 nt, Artificial Sequence
  mRNA product Design i-3 (hSL-A100) comprising derived and/or modified sequence from LASV(Lassa virus/H.sapiens-wt/NGA/2016/ISTH_0009;Clade II)__AVO03571__GPCmut4 (opt5)
aggagaaagcuuaccaugggccagaucauuaccuucuuucaagaggugccccacgucaucgaagagguuaugaacauugugcugaucgcccucagccugcuugcuauucugaaggggaucuacaauguggccacaugcggacuccugggccuugucuccuuccugcuccugugugggagaucuugcagcacgaccuauaaaggaguguacgaacugcagacacucgagcuggacauggcgucccuuaacauguguaugccucugucuugcaccaagaauaacagccaucacuauaucaugguuggcaaugaaacagggcucgagcugacccuuacaaacaccuccauuaucaaucauaaauuuuguaaccugucugaugcucacaagaaaaaucucuacgaccaugcccugaugagcauuaucuccacguuccaccugagcauuccgaacuuuaaucaguaugaggccaugucuugcgauuucaacggaggccggaucuccgugcaguacaaucucagccacucuuaugcugucgacgccgcuaaccauuguggcaccauugccaauggggugcugcaaacauuuaugcgcauggcguggggaggcuccuacaucgcccuugauagcgggaagggaucuugggacugcaucaugaccuccuaccaguaucugauuauccagaacacaaccugggaagaucacugucaguucagcagacccuccccuauuggcuaccucgggcugcuuucucaacggacgcgcgacaucuauauuagcagacggcgcagaggaacauuuaccuggacacuguccgauagcgagggcaacgaaacccccggcggguacugccucacccgguggaugcugaucgaggcugagcugaaguguuucggaaauacagccguugcuaaaugcaacgaaaagcaugacgaggaauuuugcgauaugcuccgccuguucgacuuuuguaaacaggccaucagacggcuuaagacgccugcgcagaugucuauucagcugaucaauaaagccgugaacgcucucauuaaugaucaacugaucaugaagaaccaccuucgcgacauuaugggcauccccuauugcaauuacuccaaguauuguuaccugaaccacaccgucacagggaaaaccagccucccuagaugcugucuggugucuaauggaagcuaccugaacgagacacauuucuccgacgauaucgaacagcaggccgacaauaugauuaccgagcuccugcaaaaggaguauaucgaucggcagggcaaaacgccgcuugggcugguggaccucuucgucuuuucuaccagcuucuaccugauuuccaucuuucugcaccuuguuaagauucccacacaucgccacaucaccggaaaaccuugccccaagccucauagacucaaccacaugggcauuuguagcugcggccuguauaaucaccccggggugccggugaaauggaagcggugaggacuaguuauaagacugacuagcccgaugggccucccaacgggcccuccuccccuccuugcaccgagauuaaucaaaggcucuuuucagagccaccaaaaaaaaaaaaaaaaaaaaaaaaaaaaaaaaaaaaaaaaaaaaaaaaaaaaaaaaaaaaaaaaaaaaaaaaaaaaaaaaaaaaaaaaaaaaaaaaaaaaa

SEQ ID NO: 27889 - RNA, 1686 nt, Artificial Sequence
  mRNA product Design i-3 (hSL-A100) comprising derived and/or modified sequence from LASV(Lassa virus/H.sapiens-wt/NGA/2016/ISTH_0017;Clade II)__AVO03567__GPCmut4 (opt5)
aggagaaagcuuaccaugggccagaucauuaccuucuuucaagaggugccccacgucaucgaagagguuaugaacauugugcugaucgcccucagccugcuugcuauucugaaggggaucuacaauguggccacaugcggacucuucggccuggucuccuuucuucugcucugugggagaucuugcagcacgaccuauaaaggaguguacgaacugcagacacuggagcucgacauggcgucccugaacauguguaugccucuuucuugcaccaagaauaacagccaucacuauaucaugguuggcaaugaaacagggcuggagcucacccugacaaacaccuccauuaucaaucauaaauucuguaaccuuucugaugcucacaagaaaaaucuguacgaccaugcccucaugagcauuaucuccacguuucaccugagcauuccgaacuucaaucaguaugaggccaugucuugcgauuuuaacggaggcaagaucuccgugcaguacaaucugagccacaccuaugcuauugacgccgcuaaccauuguggcacaaucgccaaugggguccuccaaaccuucaugcggauggcguggggaggcucuuacaucgcccuggauuccgggaagggaagcugggacugcauuaugacaucuuaccaguaucuuaucauucagaacaccacgugggaagaucacugucaguuuucccgccccagcccuaucggcuaccuggggcuccugucccaaagaacacgggacauuuauaucucucgcagacggcgcggaaccuucacauggacccuuagcgauuccgagggcaacgaaacccccggcggguacugccugacaagauggaugcucaucgaggcugagcugaaauguuuuggaaauacggccguggcuaagugcaacgaaaaacaugacgaggaguucugcgauaugcugcggcucuuugacuucuguaagcaggccauucgcagacugaaaaccccugcgcagaugagcauccagcuuauuaauaaggccguuaacgcucugaucaaugaucaacucauuaugaagaaccaucugcgggacaucaugggcauccccuauugcaauuacucuaaauauuguuaccuuaaccacacagugaccgggaagacaucccugccucgcugcugucucgucagcaauggaucuuaccugaacgaaacccacuucagcgacgauauugaacagcaggccgacaauaugaucacggagcugcuccaaaaagaguauauggauagacagggcaagacaccgcuggggcuuguggaccuguuuguguucuccaccucuuuuuaccucauuagcaucuuccugcaccugguccggauucccacccaucgccacguuaucggaaaaccuugccccaagccucauagacuuaaccacaugggcauuuguuccugcggccucuauaaacaccccggggugccggugaaguggaagcggugaggacuaguuauaagacugacuagcccgaugggccucccaacgggcccuccuccccuccuugcaccgagauuaaucaaaggcucuuuucagagccaccaaaaaaaaaaaaaaaaaaaaaaaaaaaaaaaaaaaaaaaaaaaaaaaaaaaaaaaaaaaaaaaaaaaaaaaaaaaaaaaaaaaaaaaaaaaaaaaaaaaaa

SEQ ID NO: 27890 - RNA, 1686 nt, Artificial Sequence
  mRNA product Design i-3 (hSL-A100) comprising derived and/or modified sequence from LASV(Lassa virus/H.sapiens-wt/NGA/2018/ISTH_0959;Clade II)__AVV65099__GPCmut4 (opt5)
aggagaaagcuuaccaugggccagaucauuaccuucuuucaagaggugccccacgucaucgaagagguuaugaacauugugcugaucgcccucagccugcuugcuauucugaaggggaucuacaauguggucacaugcggacucuucggccugguguccuuucuucugcucugugggagaucuugcagcacgaccuauaaaggaguuuacgaacugcagacacuggagcucgacauggccucccugaacauguguaugccucuuucuugcaccaagaauaacagccaucacuauaucauggugggcaaugaaacagggcuggagcucacccugacaaacaccuccauuaucaaucauaaauucuguaaccuuucugaugcgcacaagaaaaaucuguacgaccaugcucucaugagcauuaucuccacguuucaccugagcauuccgaacuucaaucaguaugaggccaugucuugcgauuuuaacggaggcaagaucuccguccaguacaaucugagccacgccuaugcuauugacgccgcuaaccauuguggcaccaucgccaauggggugcuccaaacauucaugcggauggcguggggaggcucuuacaucgcccuggauuccgggaagggaagcugggacugcauuaugaccucuuaccaguaucuuaucauucagaacacaaccugggaagaucacugucaguuuucccgccccagcccuaucggcuaccuggggcuccugucccaaagaacgcgggacauuuauaucucucgcagacggcgcggaacauucaccuggacacuuagcgauuccgagggcaacgaaacccccggcggguacugccugaccagauggaugcucaucgaggcugagcugaaauguuuuggaaauacagccguugcuaagugcaacgaaaaacaugacgaggaguucugcgauaugcugcggcucuuugacuucuguaagcaggccauucgcagacugaaaacgccugcgcagaugagcauccagcuuauuaauaaggccgugaacgcucugaucaaugaucaacucauuaugaagaaccaucugcgggacaucaugggcauccccuauugcaauuacucuaaauauuguuaccuuaaccacaccgucacagggaagaccucccugccucgcugcugucucgugagcaauggaucuuaccugaacgaaacacacuucagcgacgauauugaacagcaggccgacaauaugaucaccgagcugcuccaaaaagaguauauugauagacagggcaagacgccgcuggggcuuguggaccuguuugucuucuccacaucuuuuuaccucaucagcauuuuccugcaccugguuaaaauccccacccaucggcacgugauuggaaagccuugccccaaaccucaucgccuuaaccacaugggcaucuguuccugcggccucuauaagcaccccggggugccggucaaguggaaaagaugaggacuaguuauaagacugacuagcccgaugggccucccaacgggcccuccuccccuccuugcaccgagauuaaucaaaggcucuuuucagagccaccaaaaaaaaaaaaaaaaaaaaaaaaaaaaaaaaaaaaaaaaaaaaaaaaaaaaaaaaaaaaaaaaaaaaaaaaaaaaaaaaaaaaaaaaaaaaaaaaaaaaa

SEQ ID NO: 27891 - RNA, 1686 nt, Artificial Sequence
  mRNA product Design i-3 (hSL-A100) comprising derived and/or modified sequence from LASV(LASV003-NIG-2008;Clade II)__AIT17580__GPCmut4 (opt5)
aggagaaagcuuaccaugggccagaucauuaccuucuuucaagaggugccccacgucaucgaagagguuaugaacauugugcugaucgcccucagccugcuugcuauucugaaggggaucuacaauguggccacaugcggacucuucggccuggucuccuuucuucugcucugugggagaucuugcagcacgaccuauaaaggaguguacgaacugcagacacuggagcucgacauggcgucccugaacauguguaugccucuuucuugcaccaagaauaacagccaucacuauaucaugguuggcaaugaaacagggcuggagcucacccugacaaacaccuccauuaucaaucauaaauucuguaaccuuucugaugcucacaagaaaaaucuguacgaccaugcccucaugagcauuaucuccacguuucaccugagcauuccgaacuucaaucaguaugaggccaugucuugcgauuuuaacggaggcaagaucuccgugcaguacaaucugagccacaccuaugcugucgacgccgcuaaccauuguggcacaauugccaauggggugcuccaaaccuucaugcggauggcguggggaggcucuuacaucgcccuggauuccgggaagggaagcugggacugcaucaugacaucuuaccaguaucuuauuauccagaacaccacgugggaagaucacugucaguuuucccgccccagcccuauuggcuaccuggggcuccugucccaaagaacacgggacaucuauauuucucgcagacggcgcggaaccuucacauggacccuuagcgauuccgagagcaacgaaacccccggcggcuacugccugacaagauggaugcucaucgaggcugagcugaaauguuuugggaauacggccguugcuaagugcaacgaaaaacaugacgaggaguucugcgauaugcugcggcucuuugacuucuguaagcaggccauccgcagacugaaagcgccugcccagaugucuauucagcuuaucaauaaggcugugaacgcccugauuaaugaucaacucaucaugaagaaccaucugcgggacauuaugggaauccccuauugcaauuacuccaaauauuguuaccuuaaccacaccgucacaggccgcaccagccugccuagaugcugucucgugucuaaugggagcuaccugaacgaaacacacuucuccgacgauaucgaacagcaggcugacaauaugauuaccgagcugcuccaaaaggaguauauggaucggcagggaaaaacgccgcugggccuuguggaccuguuugucuucucuaccagcuuuuaccucaucuccauuuuccugcaccugguuaagauccccacacaucgccacgugauugggaaaccuugccccaagccucauagacuuaaccacaugggaaucuguagcugcggccucuauaaacaccccggcgugccggucaaguggaagcggugaggacuaguuauaagacugacuagcccgaugggccucccaacgggcccuccuccccuccuugcaccgagauuaaucaaaggcucuuuucagagccaccaaaaaaaaaaaaaaaaaaaaaaaaaaaaaaaaaaaaaaaaaaaaaaaaaaaaaaaaaaaaaaaaaaaaaaaaaaaaaaaaaaaaaaaaaaaaaaaaaaaaa

SEQ ID NO: 27892 - RNA, 1686 nt, Artificial Sequence
  mRNA product Design i-3 (hSL-A100) comprising derived and/or modified sequence from LASV(LASV035-NIG-2009;Clade II)__AIT17588__GPCmut4 (opt5)
aggagaaagcuuaccaugggccagaucauuaccuucuuucaagaggugccccacgucaucgaagagguuaugaacauugugcugaucgcccucagccugcuugcuauucugaaggggaucuacaauguggccacaugcggacucuucggccuggucuccuuucuucugcucugugggagaucuugcagcacgaccuauaaaggaguguacgaacugcagacacuggagcucgacauggcgucccugaacauguguaugccucuuucuugcaccaagaauaacagccaucacuauaucaugguuggcaaugaaacagggcuggagcucacccugacaaacaccuccauuaucaaucauaaauucuguaaccuuucugaugcucacaagaaaaaucuguacgaccaugcccucaugagcauuaucuccacguuucaccugagcauuccgaacuucaaucaguaugaggccaugucuugcgauuuuaacggaggcaagaucuccgugcaguacaaucugagccacgcuuaugccgucgacgcugccaaccauuguggcaccauugcgaauggggugcuccaaacauucaugcggauggccuggggaggcucuuacaucgcucuggauuccgggaagggaagcugggacugcaucaugaccucuuaccaguaucuuauuauccagaacacaaccugggaagaucacugucaguuuucccgccccagcccuauuggcuaccuggggcuccugucccaaagaacgcgggacaucuauauuucucgcagacggcgcggaacauucaccuggacacuuagcgauuccgagggcaacgaaacccccggcggguacugccugaccagauggaugcucaucgaggccgagcugaaauguuuuggaaauacagcuguugccaagugcaacgaaaaacaugacgaggaguucugcgauaugcugcggcucuuugacuucuguaagcaggcgauccgcagacugaaagccccugcucagaugagcauucagcuuaucaauaaggccgugaacgcucugauuaaugaucaacucaucaugaagaaccaucugcgggacauuaugggcauccccuauugcaauuacucuaaauauuguuaccuuaaccacacggucaccgggaagacaucccugccucgcugcugucucgugagcaauggaucuuaccugaacgaaacccacuucagcgacgauaucgaacagcaggccgacaauaugauuacagagcugcuccaaaaagaguauaucgauagacagggcaagaccccgcuggggcuuguggaccuguuugucuucuccacgucuuuuuaccucauuagcaucuuccugcaccugguuaaaauucccacacaucggcacgugaucggaaagccuugccccaaaccucaucgccuuaaccacaugggcauuuguuccugcggccucuauaagcaccccggggugccggucaaguggaaaagaugaggacuaguuauaagacugacuagcccgaugggccucccaacgggcccuccuccccuccuugcaccgagauuaaucaaaggcucuuuucagagccaccaaaaaaaaaaaaaaaaaaaaaaaaaaaaaaaaaaaaaaaaaaaaaaaaaaaaaaaaaaaaaaaaaaaaaaaaaaaaaaaaaaaaaaaaaaaaaaaaaaaaa

SEQ ID NO: 27893 - RNA, 1686 nt, Artificial Sequence
  mRNA product Design i-3 (hSL-A100) comprising derived and/or modified sequence from LASV(LASV1000-NIG-2009;Clade II)__AIT17782__GPCmut4 (opt5)
aggagaaagcuuaccaugggccagaucauuaccuucuuucaagaggugccccacgucaucgaagagguuaugaacauugugcugaucgcccucagccugcuugcuauucugaaggggaucuacaauguggccacaugcggacucuucggccuggucuccuuucuucugcucugugggagaucuugcagcacgaccuauaaaggaguguacgaacugcagacacuggagcucgacauggcgucccugaacauguguaugccucuuucuugcaccaagaauaacagccaucacuauaucaugguuggcaaugaaacagggcuggagcucacccugacaaacaccuccauuaucaaucauaaauucuguaaccuuucugaugcucacaagaaaaaucuguacgaccaugcccucaugagcauuaucuccacguuucaccugagcauuccgaacuucaaucaguaugaggccaugucuugcgauuuuaacggaggcaagaucuccgugcaguacaaucugagccacaccuaugcugucgacgccgcuaaccauuguggcacaauugccaauggggugcuccaaaccuucaugcggauggcguggggaggcucuuacaucgcccuggauuccgggaagggaagcugggacugcaucaugacaucuuaccaguaucuuauuauccagaacaccacgugggaagaucacugucaguuuucccgccccagcccuauuggcuaccuggggcuccugucccaaagaacacgggacaucuauauuucucgcagacggcgcggaaccuucacauggacccuuagcgauuccgagggcaacgaaacccccggcggguacugccugacaagauggaugcucaucgaggcugagcugaaauguuuuggaaauacggccguugcuaagugcaacgaaaaacaugacgaggaguucugcgauaugcugcggcucuuugacuucuguaagcaggccaucaaacgccugaagaccccugcgcagaugagcauucagcuuaucaauaaggccgugaacgcucugauuaaugaucaacucaucaugaaaaaccaccugagagacauuaugggcauccccuauugcaauuacucuaaguauuguuaccuuaaccacacagucaccgggaaaacaucccugccucggugcugucucgugagcaauggaucuuaccugaacgaaacccauuucagcgacgauaucgaacagcaggccgacaauaugauuacggagcugcuccaaaaggaguauaucgaucgccagggcaaaacaccgcuggggcuuguggaccuguuugucuucuccaccucuuuuuaccucauuagcaucuuccugcaccugguuaagauucccacccauagacacguggugggaaaaccuugccccaagccucaucggcuuaaccacaugggcaucuguuccugcggccucuauaagcaccccggggucccggugaaauggaagcgcugaggacuaguuauaagacugacuagcccgaugggccucccaacgggcccuccuccccuccuugcaccgagauuaaucaaaggcucuuuucagagccaccaaaaaaaaaaaaaaaaaaaaaaaaaaaaaaaaaaaaaaaaaaaaaaaaaaaaaaaaaaaaaaaaaaaaaaaaaaaaaaaaaaaaaaaaaaaaaaaaaaaaa

SEQ ID NO: 27894 - RNA, 1686 nt, Artificial Sequence
  mRNA product Design i-3 (hSL-A100) comprising derived and/or modified sequence from LASV(LASV221-NIG-2010;Clade II)__AIT17624__GPCmut4 (opt5)
aggagaaagcuuaccaugggccagaucauuaccuucuuucaagaggugccccacgucaucgaagagguuaugaacauugugcugaucgcccucagccugcuugcuauucugaaggggaucuacaauguggccacaugcggacucuucggccuggucuccuuucuucugcucugugggagaucuugcagcacgaccuauaaaggaguguacgaacugcagacacuggagcucgacauggcgucccugaacauguguaugccucuuucuugcaccaagaauaacagccaucacuauaucaugguuggcaaugaaacagggcuggagcucacccugacaaacaccuccauuaucaaucauaaauucuguaaccuuucugaugcucacaagaaaaaucuguacgaccaugcccucaugagcauuaucuccacguuucaccugagcauuccgaacuucaaucaguaugaggccaugucuugcgauuuuaacggaggcaagaucuccgugcaguacaaucugagccacaccuaugcuauugacgccgcuaaccauuguggcacaaucgccaaugggguccuccaaaccuucaugcggauggcguggggaggcucuuacaucgcccuggauuccgggaagggaagcugggacugcauuaugacaucuuaccaguaucuuaucauucagaacaccacgugggaagaucacugucaguuuucccgccccagcccuaucggcuaccuggggcuccugucccaaagaacacgggacauuuauaucucucgcagacggcgcggaaccuucacauggacccuuagcgauuccgagggcaacgaaacccccggcggguacugccugacaagauggaugcucaucgaggcugagcugaaauguuuuggaaauacggccguggcuaagugcaacgaaaaacaugacgaggaguucugcgauaugcugcggcucuuugacuucuguaagcaggccauucgcagacugaaaaccccugcgcagaugagcauccagcuuauuaauaaggccguuaacgcucugaucaaugaucaacucauuaugaagaaccaucugcgggacaucaugggcauccccuauugcaauuacucuaaauauuguuaccuuaaccacacagugaccgggaagacaucccugccucgcugcugucucgucagcaauggaucuuaccugaacgaaacccacuucagcgacgauauugaacagcaggccgacaauaugaucacggagaugcugcaaaaagaguauauggauagacagggcaagacaccgcucgggcugguggaccuuuuuguguucuccaccucuuuuuaccugauuagcaucuuccuccaccuggucaaaauucccacccaucggcacguuaucggaaagccuugccccaaaccucaucgccugaaccacaugggcauuuguuccugcggccuuuauaagcaccccggggugccggugaaguggaaaagaugaggacuaguuauaagacugacuagcccgaugggccucccaacgggcccuccuccccuccuugcaccgagauuaaucaaaggcucuuuucagagccaccaaaaaaaaaaaaaaaaaaaaaaaaaaaaaaaaaaaaaaaaaaaaaaaaaaaaaaaaaaaaaaaaaaaaaaaaaaaaaaaaaaaaaaaaaaaaaaaaaaaaa

SEQ ID NO: 27895 - RNA, 1686 nt, Artificial Sequence
  mRNA product Design i-3 (hSL-A100) comprising derived and/or modified sequence from LASV(LASV237-NIG-2010;Clade II)__AIT17638__GPCmut4 (opt5)
aggagaaagcuuaccaugggccagaucauuaccuucuuucaagaggugccccacgucaucgaagagguuaugaacauugugcugaucgcccucagccugcuugcuauucugaaggggaucuacaauguggccacaugcggacucuucggccuggucuccuuucuucugcucugugggagaucuugcagcacgaccuauaaaggaguguacgaacugcagacacuggagcucgacauggcgucccugaacauguguaugccucuuucuugcaccaagaauaacagccaucacuauaucaugguuggcaaugaaacagggcuggagcucacccugacaaacaccuccauuaucaaucauaaauucuguaaccuuucugaugcucacaagaaagaccuguacgaucaugcccucaugagcauuaucuccacguuucaccugagcauuccgaauuucaaccaguaugaggccaugucuugcgacuuuaauggaggcaagaucuccgugcaguacaaccugagccacaccuaugcugucgaugccgcuaaucauuguggcacaauugccaacggggugcuccaaaccuucaugcggauggcguggggaggcucuuacaucgcccuggacuccgggaagggaagcugggauugcaucaugacaucuuaccaguaucuuauuauccagaauaccacgugggaagaccacugucaguuuucccgccccagcccuauuggcuaccuggggcuccugucccaaagaacacgggauaucuauauuucucgcagacggcgcggaaccuucacauggacccuuagcgacuccgagggcaacgaaacccccggcggguacugccugacaagauggaugcucaucgaggcugagcugaaauguuuuggaaacacggccguugcuaagugcaaugaaaaacaugaugaggaguucugcgacaugcugcggcucuuugauuucuguaagcaggccauccgcagacugaaaaccccugcgcagaugagcauucagcuuaucaacaaggccgugaaugcucugauuaacgaccaacucaucaugaagaaucaucugcgggacauuaugggcauccccuauugcaacuacucuaaauauuguuaccuuaaucacacagucaccgggaagacaucccugccucgcugcugucucgugagcaacggaucuuaccugaaugaaacccacuucagcgaugacaucgaacagcaggccgauaacaugauuacggagcugcuccaaaaagaguauauggacagacagggcaagacaccgcuggggcuuguggaucuguuugucuucuccaccucuuuuuaccucaucagcauuuuccugcaccugaucaaaauucccacccaucggcacaucacaggaaagccuugccccaaaccucaucgccuuaaucacaugggcauuuguuccugcggccucuauaagcaccccgggguuccggugaaguggaaaagaugaggacuaguuauaagacugacuagcccgaugggccucccaacgggcccuccuccccuccuugcaccgagauuaaucaaaggcucuuuucagagccaccaaaaaaaaaaaaaaaaaaaaaaaaaaaaaaaaaaaaaaaaaaaaaaaaaaaaaaaaaaaaaaaaaaaaaaaaaaaaaaaaaaaaaaaaaaaaaaaaaaaaa

SEQ ID NO: 27896 - RNA, 1686 nt, Artificial Sequence
  mRNA product Design i-3 (hSL-A100) comprising derived and/or modified sequence from LASV(LASV253-NIG-2011;Clade II)__AIT17670__GPCmut4 (opt5)
aggagaaagcuuaccaugggccagaucauuaccuucuuucaagaggugccccacgucaucgaagagguuaugaacauugugcugaucgcccucagccugcuugcuauucugaaggggaucuacaauguggccacaugcggacucuucggccuggucuccuuucuucugcucugugggagaucuugcagcacgaccuauaaaggaguguacgaacugcagacacuggagcucgacauggcgucccugaacauguguaugccucuuucuugcaccaagaauaacagccaucacuauaucaugguuggcaaugaaacagggcuggagcucacccugacaaacaccuccauuaucaaucauaaauucuguaaccuuucugaugcucacaagaaaaaucuguacgaccaugcccucaugagcauuaucuccacguuucaccugagcauuccgaacuucaaucaguaugaggccaugucuugcgauuuuaacggaggcaagaucuccgugcaguacaaucugagccacaccuaugcugucgacgccgcuaaccauuguggcacaauugccaauggggugcuccaaaccuucaugcggauggcguggggaggcucuuacaucgcccuggauuccgggaagggaagcugggacugcaucaugacaucuuaccaguaucuuauuauccagaacaccacgugggaagaucacugucaguuuucccgccccagcccuauuggcuaccuggggcuccugucccaaagaacacgggacaucuauauuucucgcagacggcgcggaaccuucacauggacccuuagcgauuccgagggcaacgaaacccccggcggguacugccugacaagauggaugcucaucgaggcugagcugaaauguuuuggaaauacggccguugcuaagugcaacgaaaaacaugacgaggaguucugcgauaugcugcggcucuuugacuucuguaagcaggccauccgcagacugaaagcgccugcccagaugagcauucagcuuaucaauaaggcugugaacgcccugauuaaugaucaacucaucaugaagaaccaucugcgggacauuaugggcauccccuauugcaauuacucuaaauauuguuaccuuaaccacaccgucacagggcgcaccucccugccuagaugcugucucgugagcaauggaucuuaccugaacgaaacacacuucagcgacgauaucgaacagcaggcugacaauaugauuaccgagcugcuccaaaaggaguauaucgaucggcagggcaaaacgccgcuggggcuuguggaccuguuugucuucuccacaucuuuuuaccucauuagcaucuuccugcaccugguuaagauucccacccaucgccacaucauuggaaaaccuugccccaagccucauagacuuaaccacaugggcaucuguuccugcggccucuauaaacaccccggggugccggugaaguggaagcggugaggacuaguuauaagacugacuagcccgaugggccucccaacgggcccuccuccccuccuugcaccgagauuaaucaaaggcucuuuucagagccaccaaaaaaaaaaaaaaaaaaaaaaaaaaaaaaaaaaaaaaaaaaaaaaaaaaaaaaaaaaaaaaaaaaaaaaaaaaaaaaaaaaaaaaaaaaaaaaaaaaaaa

SEQ ID NO: 27897 - RNA, 1686 nt, Artificial Sequence
  mRNA product Design i-3 (hSL-A100) comprising derived and/or modified sequence from LASV(LASV254-NIG-2011;Clade II)__AIT17674__GPCmut4 (opt5)
aggagaaagcuuaccaugggccagaucauuaccuucuuucaagaggugccccacgucaucgaagagguuaugaacauugugcugaucgcccucagccugcuugcuauucugaaggggaucuacaauguggccacaugcggacucuucggccuggucuccuuucuucugcucugugggagaucuugcagcacgaccuauaaaggaguguacgaacugcagacacuggagcucgacaugaccaaccugaauauguguaugccucuuuccugcacaaagaacaauucucaucacuauaucaugguuggcaacgaaaccgggcuggagcucacacugaccaauacgagcauuaucaaccauaaauucuguaaucuuuccgaugcgcacaagaaaaaccuguacaaucaugcucucaugucuauuaucagcaccuuucaccuguccauuccgaacuucaaucaguaugaggccaugagcugcgacuuuaacggaggcaagaucucugugcaguacaaucugucccacagcuaugccgucgaugcugccaaccauuguggcacaauugcuaacggggugcuccaaaccuucaugcggauggccuggggaggcucuuacaucgcgcuggacuccgggaagggaaauugggauugcaucaugacaagcuaccaguaucuuauuauccagaacaccacgugggaagaccacugucaguuuucucgccccuccccuauuggcuaccuggggcuccugagccaaagaacacgggauaucuauauuucccgcagacggcgcggaaccuucacauggacccuuucugacagcgagggcaaugaaacccccggcggguacugccugacaagauggaugcucaucgaggccgagcugaaauguuuuggaaacacggcuguugccaagugcaaugaaaaacaugaugaggaguucugcgacaugcugcggcucuuugauuucuguaagcaggcuauccgcagacugaaaaccccugcccaggcgaacauucagcuuaucaauaaggccgugaacgcucugauuaaugaccaacucaucaugaagaaccaucugcgggauauuaugggcauccccuauugcaauuacuccaaauauuguuaccuuaaccacacagucaccgggaagacaagccugccucgcugcugucucgugucuaauggauccuaccugaacgaaacccacuucagcgacgacaucgaacagcaggccgauaauaugauuacggagcugcuccaaaaagaguauauggacagacagggcaagacaccgcuggggcuuguggaucuguuugucuucucuaccagcuuuuaccucaucuccauuuuccugcaccugguuaaaauccccacccaucggcacgugauuggaaagccuugccccaaaccucaucgccuuaaccacaugggcaucuguucuugcggccucuauaagcaccccggggugccggucaaguggaaaagaugaggacuaguuauaagacugacuagcccgaugggccucccaacgggcccuccuccccuccuugcaccgagauuaaucaaaggcucuuuucagagccaccaaaaaaaaaaaaaaaaaaaaaaaaaaaaaaaaaaaaaaaaaaaaaaaaaaaaaaaaaaaaaaaaaaaaaaaaaaaaaaaaaaaaaaaaaaaaaaaaaaaaa

SEQ ID NO: 27898 - RNA, 1686 nt, Artificial Sequence
  mRNA product Design i-3 (hSL-A100) comprising derived and/or modified sequence from LASV(Nig08-A19;Clade III)__ADU56618__GPCmut4 (opt5)
aggagaaagcuuaccaugggccagaucgugaccuucuuucaagaggucccccacguuauugaagaggugaugaacaucgugcugauugcccucagcauccuggcuauucuuaaggggcuguacaauaucgccacaugcggacucaucggccuggucacguuccuucugcucuccgggagaucuuguagcaugaccuauaaaggaguguacgaacugcagacacuggagcucaacaugaauacccugaacaugugcaugccucuuuccuguacaaagaauaacucucaucacuauauuaugguuggcaaugaaaccgggcuggagcucacacugaccaacacgagccuucugcaucacaaauuuugcaaucucuccgacgcgcauaagaaaaaccuguacgaucacacccugaugucuaucauuagcacauuccaccucuccaucccgaauuuuaaccaguaugaggcuaugagcugugacuucaauggaggcaagauuaccgugcaguacaaccugucucauuccuaugccaucgaugccgcuaaucacugcggcacagucgccaacggggugcuucaaaccuuuaugcggauggcuuggggaggcagcuacauugcccuggacucugggcgcggaaagugggauuguaucaugacguccuaccaguaucucaucauucagaacacaaccugggaagaccauugccaguucagcagacccucuccuaucggcuaccuggggcuucugucccaacggacacgcgauauuuauaucagcagacggcgcagaggaaccuuuaccuggacacucuccgacucugagggcaaugaaacgcccggcggguacugucugacccgguggaugcugauugaggcggagcucaaaugcuucggaaacacagccguugcuaaguguaaugaaaaacacgaugaggaauuuugcgacaugcugcgccuuuucgauuuuugcaagcaggccaucagacggcugaaagcuccugcccagaugagcauccagcucauuaacaaggcggugaaugcccugaucaacgaccaacuuauuaugaagaaucaucugcgcgauaucaugggcauucccuauuguaacuacuccaaauauugcuaccucaaucacaccagcacagggagaaccucucugccucgguguugccuggucuccaacggaagcuaccucaaugagacgcacuucucugacgacaucgaacagcaggcugauaacaugaucacagagaugcugcaaaaggaguaucuugaccgccagggcaaaaccccgcuggggcucguggaucuguucguguuuagcaccuccuucuaccugauuucuaucuuucuucaucucgucaagauucccacacacagacauaucguuggaaaaccuugucccaagccucaccggcugaaucacaugggcauuugcagcuguggccuguauaaacagcccggggugccggugagauggaagcgcugaggacuaguuauaagacugacuagcccgaugggccucccaacgggcccuccuccccuccuugcaccgagauuaaucaaaggcucuuuucagagccaccaaaaaaaaaaaaaaaaaaaaaaaaaaaaaaaaaaaaaaaaaaaaaaaaaaaaaaaaaaaaaaaaaaaaaaaaaaaaaaaaaaaaaaaaaaaaaaaaaaaaa

SEQ ID NO: 27899 - RNA, 1689 nt, Artificial Sequence
  mRNA product Design i-3 (hSL-A100) comprising derived and/or modified sequence from LASV(G1180-SLE-2010;Clade IV)__AIT17168__GPCmut4 (opt5)
aggagaaagcuuaccaugggccagaucgugaccuucuuucaagaggucccccacguuauugaagaggugaugaacaucgugcugauugcccucagcauccuggcuguccuuaaggggcuguacaauuucgccacaugcggacucgugggccugcuuacguuucugcuccugugugggagauccugcaccgcgucucgguauaaaggaguuuacgaacugcagacacucgagcugaacauggaaacccuuaauauguguaugccucugagcugcacaaagaacaauucccaucacuauauuauggugggcaacgagaccgggcucgagcugacacuuaccaauacgucuaucaucaaccauaaauucuguaaucugagcgacgcucacaagaaaaaccucuacgaucaugcccugauguccauuaucucuaccuuucaccugagcauuccgaauuucaaccaguaugaagccauguccugcgacuuuaauggaggcaagaucagcguccaguacaaccucucucacuccuaugcuggcgaugccgcuaaucauugugggacaguggccaacggaguucugcaaaccuucaugcgcauggcguggggcgggagcuacauugcccuugacucuggacacggcuccugggauugcaucaugacaagcuaccaguaucugauuauccagaacaccacgugggaggaccauugucaguuuucuagacccuccccuaucggguaccucggacugcuuagccaacggacacgcgauauuuauaucuccagacggcgcagaggcaccuucacauggacccugucugacagcgaaggcaaggauacccccgggggauacugccucacacgguggaugcugauugaggcugagcugaaauguuuuggcaauacggccguggcuaagugcaacgaaaaacacgacgaggaguucugcgauaugcuccgccuguuugacuucuguaagcaggccauccagagacuuaaagcgccugcccagauguccauucaacugaucaauaaggcugucaacgcccucaucaaugaucagcugauuaugaagaaccaccuucgggacaucauggggauucccuauugcaauuacagcaaauauuguuaccugaaccauaccacaaccggaaagacaucucucccuaaaugcugucugguguccaauggcagcuaccugaacgaaacccacuucucugacgauaucgaacagcaagcugacaauaugauuacggagaugcuccagaaggaguauauggaacgccaggggaaaacaccgcugggacuuguggaucuguuugucuucagcaccuccuuuuaccucaucucuaucuuccugcaucugguuaagauucccacccacagacauaucgugggcaaaagcugcccuaagccccaccggcuuaaccacaugggcauuuguuccugcgggcucuauaagcagccuggagugcccgucaaauggaagcgcugaggacuaguuauaagacugacuagcccgaugggccucccaacgggcccuccuccccuccuugcaccgagauuaaucaaaggcucuuuucagagccaccaaaaaaaaaaaaaaaaaaaaaaaaaaaaaaaaaaaaaaaaaaaaaaaaaaaaaaaaaaaaaaaaaaaaaaaaaaaaaaaaaaaaaaaaaaaaaaaaaaaaa

SEQ ID NO: 27900 - RNA, 1689 nt, Artificial Sequence
  mRNA product Design i-3 (hSL-A100) comprising derived and/or modified sequence from LASV(G1442-SLE-2011;Clade IV)__AIT17180__GPCmut4 (opt5)
aggagaaagcuuaccaugggccagaucgugaccuucuuucaagaggucccccacguuauugaagaggugaugaacaucgugcugauugcccucagcauccuggcuguccuuaaggggcuguacaauguggccacaugcggacucauuggccugguuacguuccuucugcucugugggagauccugcaccacaacccuguauaaaggaguguacgaacugcagacacucgagcugaacauggaaacccuuaauauguguaugccucugucuugcacaaagaacaauagccaucacuauauccgggucggcaacgagaccgggcucgagcugacgcuuaccaauacauccaucauuaaccauaaauuuuguaaucugucugacgcgcacaagaaaaaccucuacgaucaugcucugaugagcaucauuuccaccuuccaccugucuaucccgaauuuuaaccaguaugaagccaugagcugcgacuucaauggaggcaagauuuccgugcaguacaaccucagccacucuuaugccggcgaugcugccaaucauugugggacaguugcuaacggagugcugcaaaccuuuaugcgcauggccuggggcggguccuacaucgcgcuugacagcggaagaggcaacugggauugcauuaugacgucuuaccaguaucugaucauccagaauacaaccugggacgaucacugucaguucucccggcccagcccuauuggguaccucggacugcuuucucaacgcacaagagacgucuauaucucccggcgcagacggggcaccuuuaccuggacacugagcgauuccgagggcaaggacacgcccgggggauacugccucacccgcuggaugcugauugaagccgagcugaaauguuucggcaacacagcuguggccaagugcaaugagaaacaugaugaagaguuuugcgacaugcucagacuguucgauuuuuguaagcaggcuauccagcggcuuaaagccccugcgcagaugucuauucaacugaucaacaaggccgugaaugcucucaucaacgaccagcugauuaugaagaaucaccuucgcgacaucauggggauucccuauugcaacuacagcaaauauuguuaccugaauaacaccgccacaggaaagaccucccucccuaaaugcugucugaucagcaauggcucuuaccugaacgaaacgcacuucuccgaugacauugagcaggaagcugauaauaugaucacagagaugcuccaaaaggaguauauggaaagacaggggaaaaccccgcugggacuugucgaccuguucguuuuuagcaccucuuucuaccucaucagcauuuuucugcaucuggugaagauccccacacaccggcauauugugggcaaauccugcccuaagccccaccgccuuaaccauaugggcaucuguucuugcgggcucuauaagcagccuggaguccccgugagauggaaacggugaggacuaguuauaagacugacuagcccgaugggccucccaacgggcccuccuccccuccuugcaccgagauuaaucaaaggcucuuuucagagccaccaaaaaaaaaaaaaaaaaaaaaaaaaaaaaaaaaaaaaaaaaaaaaaaaaaaaaaaaaaaaaaaaaaaaaaaaaaaaaaaaaaaaaaaaaaaaaaaaaaaaa

SEQ ID NO: 27901 - RNA, 1689 nt, Artificial Sequence
  mRNA product Design i-3 (hSL-A100) comprising derived and/or modified sequence from LASV(G3010-SLE-2013;Clade IV)__AIT17344__GPCmut4 (opt5)
aggagaaagcuuaccaugggccagaucgugaccuucuuucaagaggucccccacguuauugaagaggugaugaacaucgugcugauugcccucagcauccuggcuguccuuaaggggcuguacaauuucgccacaugcggacucgugggccugguuacguuucuucugcucugugggagauccugcaccacaucucuguauaaaggaguguacgaacugcagacccucgagcugaacauggaaacacuuaauauguguaugccucugagcugcaccaagaacaauucccaucacuauauuauggucggcaacgagacagggcucgagcugacccuuacgaauaccucuaucaucaaccauaaauucuguaaucugagcgacgcgcacaagaaaaaccucuacaaucaugcucugauguccauuaucucuacauuucaccugagcauuccgaacuucaaucaguaugaagccauguccugcgauuuuaacggaggcaagaucagcgugcaguacaaucucucucacuccuaugccggcgacgcugccagccauugugggaccguugcuaacggagugcugcaaacauucaugcggauggccuggggcgggucuuacauugcgcuugauuccggauacggcaagugggacugcaucaugaccagcuaucaguaccugauuauccagaacacgacaugggaggaucacugucaguuuucucgccccuccccuaucggguaucucggacugcuuagccaaagaacccgggacauuuacaucucccgcagacggcgcggcacauucaccuggacccugucugauagcgaaggcaaagacacacccgggggauauugccucacgagauggaugcugauugaggccgagcugaaguguuuuggcaauaccgcugucgccaaaugcaacgaaaagcaugaugaggaguucugcgacaugcuccggcuguuugauuucuguaaacaggcuauccagcgccuuaagaccccugcccagauguccauucaacugaucaauaaggcggugaacgcccucaucaaugaccagcugauuaugaaaaaccaccuuagagauaucauggggauucccuacugcaauuauagcaaguacuguuaccugaaccacacaacaaccggaaaaacgucucucccuaagugcugucugguguccaauggcagcuaucugaacgaaacacauuucucugacgacaucgaacagcaagcugauaauaugauuaccgagaugcuccagaaagaguacauggaacggcaggggaagaccccgcugggacuugucgaccuguuuguuuucagcacauccuuuuaucucaucucuaucuuccugcaccuggugaaaauucccacccaucgccacaucgugggcaagagcugcccuaagccccauagacuuaaccacaugggcauuuguuccugcgggcucuacaaacagccuggaguccccgugcgguggaagcgcugaggacuaguuauaagacugacuagcccgaugggccucccaacgggcccuccuccccuccuugcaccgagauuaaucaaaggcucuuuucagagccaccaaaaaaaaaaaaaaaaaaaaaaaaaaaaaaaaaaaaaaaaaaaaaaaaaaaaaaaaaaaaaaaaaaaaaaaaaaaaaaaaaaaaaaaaaaaaaaaaaaaaa

SEQ ID NO: 27902 - RNA, 1689 nt, Artificial Sequence
  mRNA product Design i-3 (hSL-A100) comprising derived and/or modified sequence from LASV(G502-SLE-2009;Clade IV)__AIT17126__GPCmut4 (opt5)
aggagaaagcuuaccaugggccagaucgugaccuucuuucaagaggucccccacguuauugaagaggugaugaacaucgugcugauugcccucagcauccuggcuguccuuaaggggcuguacaauuucgccacaugcggacucgugggccugcuuacguuucugcuccugugugggagauccugcaccacaggacuguauaaaggcguuuacgaacuccagacccuggagcuuaacauggaaacacugaauauguguaugccucucucuugcaccaagaacaauagccaucacuauauuaugguggggaacgagacaggacuggagcuuacccugacgaauaccuccaucaucaaccauaaauucuguaaucucucugacgcgcacaagaaaaaccuguacgaucaugcucugaugagcauuaucuccacauuucaccucucuauuccgaauuucaaccaguaugaagccaugagcugcgacuuuaauggcggcaagaucuccguccaguacaaccugagccacucuuaugccggggaugcugccgaccauuguggaaccguggcuaauggcguucuucaaacauucaugcggauggccuggggaggguccuacauugcgcuggauagcggccgcgggagaugggacugcaucaugaccucuuaccaguaucucauuauccagaacacgacaugggaggaucacugucaguuuucccggcccagcccuaucggauaccugggccuucugucucaacgcaccagagacauuuauaucucccggcgcagacggggcacauucaccuggacccucagcgauuccgaagggaaggacacacccggaggcuacugccugacgcgcuggaugcugauugaggccgagcucaaauguuuugggaacaccgcuguggccaagugcaaugaaaaacaugaugaggaguucugcgacaugcugagacuuuuugauuucuguaagcaggcuauccagcggcugaaagccccugcgcagaugucuauucaacucaucaacaaggccgucaaugcucugaucaacgaccagcuugugaugaagaaucaucugcgcgacauuaugggaauccccuauugcaacuacagcagauauuguuaccucaaucacacaaccacaggccggaccucccugccuaaaugcugucuggugagcaacgggucuuaccucaaugaaacgcacuucuccgaugacauugaacagcaagccgauaacaugaucacagagaugcugcagaaggaguauauggaacgccagggaaaaaccccgcuuggccuggucgaccucuuuguuuucagcaccucuuuuuaccugauuagcaucuuccugcaccuugugaagauccccacacauagacacauugugggcaaauccugcccuaagccccaucggcucaaucacauggggaucuguucuugcggacuguauaaacagccuggcguccccgugaaguggaagagaugaggacuaguuauaagacugacuagcccgaugggccucccaacgggcccuccuccccuccuugcaccgagauuaaucaaaggcucuuuucagagccaccaaaaaaaaaaaaaaaaaaaaaaaaaaaaaaaaaaaaaaaaaaaaaaaaaaaaaaaaaaaaaaaaaaaaaaaaaaaaaaaaaaaaaaaaaaaaaaaaaaaaa

SEQ ID NO: 27903 - RNA, 1689 nt, Artificial Sequence
  mRNA product Design i-3 (hSL-A100) comprising derived and/or modified sequence from LASV(G733-SLE-2010;Clade IV)__AIT17154__GPCmut4 (opt5)
aggagaaagcuuaccaugggccagaucgugaccuucuuucaagaggucccccacguuauugaagaggugaugaacaucgugcugauugcccucagcauccuggcuguccuuaaggggcuguacaauuucgccacaugcggaauugugggccucguuuccuuucugcuucugugugggagaucuugcacgaccagccucuauaaaggaguguacgaacugcagacacuggagcucaacauggaaacccugaauauguguaugccucuuuccugcacaaagaacaauucucaucacuauaucauggucggcaacgagaccgggcuggagcucacacugaccaauacgagcaucauuaaccauaaauucuguaaucuuuccgacgcgcacaagaaaaaccuguacgaucaugcucucaugucuaucauuagcaccuuucaccuguccaucccgaauuucaaccaguaugaagccaugagcugcgacuuuaauggaggcaagauuucugugcaguacaaccugucccacagcuaugccggcgaugcugccaaucauugugggacaaucgcuaacggaguucuccaaaccuucaugcggauggccuggggcgggucuuacauugcgcuggacuccggacgcgauagaugggacugcaucaugacaagcuaccaguaucuuaucauucagaacaccacgugggaggaucacugucaguuuucucggcccuccccuaucggcuaccuggggcuccugagccaacgcacaagagacauuuauaucucccggcgcagacggggaaccuucacauggacccuuucugauagcgaaggcaaggacacccccggcggguacugccugacacgcuggaugcucauugaggccgagcugaaauguuuuggaaauacggcuguggccaagugcaacgaaaaacaugaugaggaguucugcgacaugcugagacucuuugauuucuguaagcaggcuauccagcggcugaaagccccugcgcagauguccauccaacuuauuaauaaggccgucaacgcucugaucaaugaccagcucauuaugaagaaccaucugcgcgacaucaugggcauucccuauugcaauuacagcaaauauuguuaccuuaaccacaccacaaccgggaagacaucucugccuaaaugcugucucguguccaauggaagcuaccugaacgaaacccacuucucugaugacaucgaacagcaagccgauaauaugaucacggagaugcugcagaaggaguauauggaaagacagggcaaaacaccgcucgggcugguggaccuuuuugucuucagcaccuccuuuuaccugauuucuaucuuccuccaccugguuaagauucccacccaucggcacguggugggaaaaagcugcccuaagccccaucgccugaaccacaugggcaucuguuccugcggccuuuaugggcagccuggaguccccgugaaguggaaaagaugaggacuaguuauaagacugacuagcccgaugggccucccaacgggcccuccuccccuccuugcaccgagauuaaucaaaggcucuuuucagagccaccaaaaaaaaaaaaaaaaaaaaaaaaaaaaaaaaaaaaaaaaaaaaaaaaaaaaaaaaaaaaaaaaaaaaaaaaaaaaaaaaaaaaaaaaaaaaaaaaaaaaa

SEQ ID NO: 27904 - RNA, 1689 nt, Artificial Sequence
  mRNA product Design i-3 (hSL-A100) comprising derived and/or modified sequence from MOPV/LASV reassortant(IGS-1;Clade IV)__AFY05576__GPCmut4 (opt5)
aggagaaagcuuaccaugggccagaucgugaccuucuuucaagaggucccccacguuauugaagaggugaugaacaucgugcugauugcccucagcguccuggcugugcuuaaggggcuguacaauuucgccacaugcggacucguuggccuggugacguuucuucugcucugugggagauccugcaccacaucucuguauaaaggagucuacgaacugcagacccucgagcugaacauggaaacacuuaauauguguaugccucugagcugcaccaagaacaauucccaucacuauaucauggugggcaacgagacagggcucgagcugacccuuacgaauaccucuauuaucaaccauaaauucuguaaucugagcgacgcgcacaagaaaaaccucuacgaucaugcucugauguccaucauuucuacauuucaccugagcaucccgaauuucaaccaguaugaagccauguccugcgacuuuaauggaggcaagauuagcguucaguacaaccucucucacuccuaugccggcgaugcugccaaucauugugggaccguggcuaacggaguccugcaaacauucaugcggauggccuggggcgggagcuacaucgcgcuugacucuggacgcggcaacugggauugcauuaugaccuccuaccaguaucugaucauucagaauacgacaugggaggaccacugucaguuuagcagacccucuccuaucggguaccucggacugcuuucccaacggacccgcgauaucuauauuagcagacggcgcagaggcacauucaccuggacccuguccgacucugaaggcgaggauacacccgggggauacugccucacgcgguggaugcugaucgaggccgaacugaaguguuuuggcaacaccgcuguggccaaaugcaaugagaagcaugacgaagaguucugcgauaugcuccgccuguuugacuucuguaaacaggcuauucagagacuuaaggccccugcgcagaugagcauccaacugauuaacaaagccgugaaugcucucaucaacgaucagcugaucaugaagaaucaccuucgggacauuauggggauccccuauugcaacuacuccaaguauuguuaccugaaucacacaaccacaggacgcaccagccucccuaaaugcugucuggucucuaacggcuccuaccugaaugaaacgcauuucagcgacgauauugagcagcaagccgacaacaugaucacagagaugcuccagaaggaauauauggagagacaggggaaaaccccgcugggacuuguugaucuguuuguguucucuaccagcuuuuaccucauuuccaucuuccugcaccuggugaagauccccacacaucggcacauugucggcaaaucuugcccuaagccccaucgccuuaaucacaugggcaucuguagcugcgggcucuauaaacagccuggagugcccguuaaguggaagagaugaggacuaguuauaagacugacuagcccgaugggccucccaacgggcccuccuccccuccuugcaccgagauuaaucaaaggcucuuuucagagccaccaaaaaaaaaaaaaaaaaaaaaaaaaaaaaaaaaaaaaaaaaaaaaaaaaaaaaaaaaaaaaaaaaaaaaaaaaaaaaaaaaaaaaaaaaaaaaaaaaaaaa

SEQ ID NO: 27905 - RNA, 1689 nt, Artificial Sequence
  mRNA product Design i-3 (hSL-A100) comprising derived and/or modified sequence from LASV(LM765-SLE-2012;Clade IV)__AIT17814__GPCmut4 (opt5)
aggagaaagcuuaccaugggccagaucgugaccuucuuucaagaggucccccacguuauugaagaggugaugaacaucgugcugauugcccucagcauccuggcuguccuuaaggggcuguacaauuucgccacaugcggacucgugggccugguuacguuucuucugcucugugggagauccugcaccacaucucuguauaaaggaguguacgaacugcagacccucgagcugaacauggaaacacuuaauauguguaugccucugagcugcaccaagaacaauucccaucacuauauuauggucggcaacgagacagggcucgagcugacccuuacgaauaccucuaucaucgaccauaaauucuguaaccugagcgaugcgcaccggaagaaucucuacgaccaugcucugauguccauuaucucuacauuucaccugagcauuccgaacuucaaucaguaugaagccauguccugcgauuuuaacggaggcaaaaucagcgugcaguacaaucucucucacuccuaugccaaggacgcugccgaucauuguggcaccguugcuaacggggugcugcaaacauucaugcgcauggccuggggaggcagcuacauugcgcuugacucugggagaggacggugggauugcaucaugaccuccuaccaguaucugauuauccagaauacgacaugggaggaccacugucaguuuagccgccccucuccuaucggcuaccucgggcugcuuucccaaagaacccgggauauuuauaucagccgcagacggcgcggaacauucaccuggacccuguccgacucugaaggcaaggauacacccggcggguacugccucacgagauggaugcugauugaggccgagcugaaauguuuuggaaacaccgcugucgccaagugcaacgaaaaacaugacgaggaguucugcgauaugcuccggcuguuugacuucuguaagcaggcuauccagcgccuuaaagccccugcgcagaugagcauucaacugaucaauaaggccgugaacgcucucaucaaugaccagcugauuaugaagaaccaccuuagagauaucaugggcauucccuauugcaauuacuccaaauauuguuaccugaaccacacaaccacagggaagaccagccucccuaaaugcugucuggugucuaauggauccuaccugaacgaaacgcauuucagcgacgauaucgaacagcaagccgacaauaugauuacagagaugcuccagaaggaguauauggaacggcagggcaaaaccccgcuggggcuugucgaucuguuuguuuucucuaccagcuuuuaccucaucuccaucuuccugcaccuggugaagauucccacacaucgccacaucgugggaaaaccuugccccaagccucauagacuuaaccacaugggcauuuguucuugcggccucuauaagcagcccggggucccggugaaauggaagcggugaggacuaguuauaagacugacuagcccgaugggccucccaacgggcccuccuccccuccuugcaccgagauuaaucaaaggcucuuuucagagccaccaaaaaaaaaaaaaaaaaaaaaaaaaaaaaaaaaaaaaaaaaaaaaaaaaaaaaaaaaaaaaaaaaaaaaaaaaaaaaaaaaaaaaaaaaaaaaaaaaaaaa

SEQ ID NO: 27906 - RNA, 1689 nt, Artificial Sequence
  mRNA product Design i-3 (hSL-A100) comprising derived and/or modified sequence from LASV(LM776-SLE-2012;Clade IV)__AIT17824__GPCmut4 (opt5)
aggagaaagcuuaccaugggccagaucgugaccuucuuucaagaggucccccacguuauugaagaggugaugaacaucgugcugauugcccucagcauccuggcuguccuuaaggggcuguacaauuucgccacaugcggacucgugggccugguuacguuucuucugcucugugggagauccugcaccacaucuguguauaaaggagucuacgaacugcagacccuggagcucaacauggaaacacugaauauguguaugccucuuagcugcaccaagaacaauucccaucacuauauuauggugggcaacgagacagggcuggagcucacccugacgaauaccucuaucaucaaccauaaauucuguaaucuuagcgacgcgcacaagaaaaaccuguacgaucaugcucucauguccauuaucucuacauuucaccugagcauuccgaauuucaaccaguaugaagccauguccugcgacuuuaauggaggcaagaucagcguucaguacaaccugucucacuccuaugccggcgaugcugccaaucauugugggaccguggcuaacggaguccuccaaacauucaugcggauggccuggggcgggagcuacauugcgcuggacucuggacacggcaagugggauugcaucaugaccuccuaccaguaucuuauuauccagaacacgacaugggaggaccauugucaguuuagccgccccucuccuaucggguaccugggacuccugucccaaagaacccgggauauuuauaucagccgcagacggcgcggcacauucaccuggacccuuuccgacucugaaggcaaagauacacccgggggauacugccugacgagauggaugcucauugaggccgagcugaaguguuuuggcaauaccgcuguggccaaaugcaacgaaaagcacgacgaggaguucugcgauaugcugcggcucuuugacuucuguaaacaggcuauccagcgccugaaggccccugcgcagaugagcauucaacuuaucaauaaggccgugaacgcucugaucaaugaucagcucauuaugaaaaaccaccugagagacaucauggggauucccuauugcaauuacuccaaguauuguuaccuuaaccauacaaccacaggaaaaaccagccugccuaagugcugucucgucucuaauggcuccuaccugaacgaaacgcacuucagcgacgauaucgaacagcaagccgacaauaugauuacagagaugcugcagaaagaguauauggaacggcaggggaagaccccgcucggacugguugaucuuuuuguguucucuaccagcuuuuaccugaucuccaucuuccuccaucuggugaaaauucccacacaccgccauaucgucggcaagucuugcccuaagccccacagacugaaccacaugggcauuuguagcugcgggcuuuauaaacagccuggagugcccguucgguggaagcgcugaggacuaguuauaagacugacuagcccgaugggccucccaacgggcccuccuccccuccuugcaccgagauuaaucaaaggcucuuuucagagccaccaaaaaaaaaaaaaaaaaaaaaaaaaaaaaaaaaaaaaaaaaaaaaaaaaaaaaaaaaaaaaaaaaaaaaaaaaaaaaaaaaaaaaaaaaaaaaaaaaaaaa

SEQ ID NO: 27907 - RNA, 1689 nt, Artificial Sequence
  mRNA product Design i-3 (hSL-A100) comprising derived and/or modified sequence from LASV(Mad39;Clade IV)__ANH09722__GPCmut4 (opt5)
aggagaaagcuuaccaugggccagaucgugaccuucuuucaagaggucccccacguuauugaagaggugaugaacaucgugcugauugcccucagcauccuggcuguccuuaaggggcuguacaauguggccacaugcggacucauuggccugguuacguuccuucugcucugugggagauccugcaccacaacccuguauaaaggaguguacgaacugcaggcgcucgagcugaacauggaaacacuuaauauguguaugccucugucuugcaccaagaacaauagccaucacuauauccgggucggcaacgagacagggcucgagcugacccuuacgaauaccucccugaucaaccauaaauuuuguaaucucucugacgcucacaagaaaaaccuguacgaucaugcccugaugagcauuaucuccacauuccaccucucuauuccgaauuuuaaccaguaugaagccaugagcugcgacuucaaugauggaaagaucuccgugcaguacaaccugagccacaccuaugcuggcgacacagccaaucauuguggcaccguugcuaacggggugcuucaaacguuuaugcgcauggccuggggaggcucuuacauugcgcuggauuccgggagaggaggcugggacugcaucaugacaagcuaccaguaucucauuauccagaacaccacaugggaggaucacugucaguucucucggcccuccccuaucggguaccugggacuucugagccaacgcaccagagacauuuauaucucucggcgcagacggggcaccuuuacauggacgcucuccgauagcgaaggcaaggacacccccgggggauacugccugacacgcuggaugcugauugaggccgagcucaaauguuucggcaauaccgcugucgccaagugcaacgaaaaacaugaugaggaauuuugcgacaugcugagacuuuucgauuuuuguaagcaggcuauccagcggcugaaagccccugcgcagauguccauucaacucaucaauaaggccgugaacgcucugaucaaugaccagcuuauuaugaagaaccaucugcgcgacaucauggggauucccuauugcaauuacucuaaauauuguuaccucaaccacacagugaccggaaagacgagccugccuaaaugcugucuggucuccaauggcagcuaccucaacgagacacacuucucugaugacaucgaacagcaagccgauaauaugauuaccgagaugcugcagaaggaguauauggaaagacaggggaaaaccccgcuuggacugguugaccucuucguguuuuccaccagcuucuaccugaucucuaucuuucugcaccuugugaagauucccacacaucggcacgucgugggcaaaccuugccccaagccucaucgccucaaccacaugggcaucuguagcugcggguucuauaagcagcccggaguuccggugagauggaaacggugaggacuaguuauaagacugacuagcccgaugggccucccaacgggcccuccuccccuccuugcaccgagauuaaucaaaggcucuuuucagagccaccaaaaaaaaaaaaaaaaaaaaaaaaaaaaaaaaaaaaaaaaaaaaaaaaaaaaaaaaaaaaaaaaaaaaaaaaaaaaaaaaaaaaaaaaaaaaaaaaaaaaa

SEQ ID NO: 27908 - RNA, 1689 nt, Artificial Sequence
  mRNA product Design i-3 (hSL-A100) comprising derived and/or modified sequence from LASV(Z0947-SLE-2011;Clade IV)__AIT17840__GPCmut4 (opt5)
aggagaaagcuuaccaugggccagaucgugaccuucuuucaagaggucccccacguuauugaagaggugaugaacaucgugcugauugcccucagcauccuggcuguccuuaaggggcuguacaauuucgccacaugcggacucgugggccugguuacguuucuucugcucugugggagauccugcaccauuucucuguauaaaggaguguacgaacugcagacacucgagcugaacauggaaacccuuaauauguguaugccucugagcugcacaaagaacaauucccaucacuauaucauggucggcaacgagaccgggcucgagcugacacuuaccaauacgucuaucauuaaccauaaauucuguaaucugagcgacgcgcacaagaaaaaccucuacgaucaugcucugauguccaucauuucuaccuuucaccugagcaucccgaauuucaaccaguaugaagccauguccugcgacuuuaauggaggcaagauuagcgugcaguacaaccucucucacuccuaugccggcgaugcugccaaucauugugggacaguugcuaacggagugcugcaaaccuucaugcggauggccuggggcgggagcuacaucgcgcuugacucuggacgcgauagaugggacugcauuaugacauccuaccaguaucugaucauccagaacaccacgugggaggaucacugucaguuuagccggcccucuccuauuggcuaccucgggcugcuuucccaacgcacaagagacaucuauauuagccggcgcagacggggaaccuucacauggacccuguccgauucugaaggcaaggacacccccggcggguacugccucacacgcuggaugcugaucgaggccgagcugaaauguuuuggaaauacggcugucgccaagugcaacgaaaaacaugaugaggaguucugcgacaugcucagacuguuugauuucuguaagcaggcuauucagcggcuuaaagccccugcgcagaugagcauccaacugaucaauaaggccgugaacgcucucauuaaugaccagcugaucaugaagaaccaccuucgcgacauuaugggcauccccuauugcaauuacuccaaauauuguuaccugaaccacaccacaaccgggaagacaagccucccuaaaugcugucuggugucuaauggauccuaccugaacgaaacccauuucagcgaugacauugaacagcaagccgauaauaugaucacggagaugcuccagaaggaguauauggaaagacagggcaaaacaccgcuggggcuugucgaccuguuuguuuucucuaccagcuuuuaccucaucuccauuuuccugcaccuggugaagauccccacccaucggcacauugugggaaaaccuugccccaagccucaucgccuuaaccacaugggcaucuguucuugcggccucuauaagcagcccggggucccggugaaauggaagagaugaggacuaguuauaagacugacuagcccgaugggccucccaacgggcccuccuccccuccuugcaccgagauuaaucaaaggcucuuuucagagccaccaaaaaaaaaaaaaaaaaaaaaaaaaaaaaaaaaaaaaaaaaaaaaaaaaaaaaaaaaaaaaaaaaaaaaaaaaaaaaaaaaaaaaaaaaaaaaaaaaaaaa

SEQ ID NO: 27909 - RNA, 1665 nt, Artificial Sequence
  mRNA product Design i-3 (A100) comprising derived and/or modified sequence from LASV(Josiah;Clade IV)__NP_694870__GPCmut4 (opt1)
aggagaaagcuuaccaugggccagaucgugaccuucuuccaggaggucccccacgugaucgaggaggugaugaacaucguccugaucgcccucagcgugcuggccgugcugaaggggcucuacaacuucgcgaccugcggccuggucgggcuggugacguuccuccugcugugcggccgcuccugcaccaccagccucuacaaggggguguacgagcugcagacccuggagcucaacauggagacgcugaacaugugcaugccgcuguccugcaccaagaacaacagccaccacuacaucauggucggcaacgagaccggccucgagcugacgcugaccaacaccuccaucaucaaccacaaguucugcaaccucagcgacgcccacaagaagaaccuguacgaccacgcccugauguccaucaucagcaccuuccaccucuccauccccaacuucaaccaguacgaggccaugagcugcgacuucaacgggggcaagaucuccgugcaguacaaccugagccacuccuacgccggggacgcggccaaccacugcggcacgguggccaacgggguccugcagaccuucaugcggauggccuggggcggcagcuacaucgcgcucgacuccgggcgcggcaacugggacugcaucaugaccagcuaccaguaccugaucauccagaacaccacgugggaggaccacugccaguucucccggcccagccccaucggguaccugggccuccugucccagcgcacccgggacaucuacaucagccgccggcgccggggcaccuucaccuggacgcugagcgacuccgaggggaaggacaccccgggcggguacugccugacccgcuggaugcucaucgaggccgagcugaagugcuucggcaacaccgccguggccaagugcaacgagaagcacgacgaggaguucugcgacaugcugcggcuguucgacuucugcaagcaggccauccagcgccugaaggcgcccgcccagaugagcauccagcugaucaacaaggccgugaacgcccucaucaacgaccagcugaucaugaagaaccaccuccgggacaucauggggauccccuacugcaacuacuccaaguacugcuaccucaaccacacgaccaccggccgcaccagccugcccaagugcugccuggucuccaacggcagcuaccucaacgagacgcacuucuccgacgacaucgagcagcaggccgacaacaugaucaccgagaugcugcagaaggaguacauggagcggcaggggaagacgccccugggccucguggaccuguucguguucagcaccuccuucuaccugaucagcaucuuccugcaccucgucaagaucccgacccaccgccacaucguggggaaguccugccccaagccccaccggcugaaccacaugggcaucugcagcugcgggcuguacaagcagcccggcgugccggucaaguggaagcgcugaggacuaguuauaagacugacuagcccgaugggccucccaacgggcccuccuccccuccuugcaccgagauuaauaaaaaaaaaaaaaaaaaaaaaaaaaaaaaaaaaaaaaaaaaaaaaaaaaaaaaaaaaaaaaaaaaaaaaaaaaaaaaaaaaaaaaaaaaaaaaaaaaaaa

SEQ ID NO: 27910 - RNA, 1662 nt, Artificial Sequence
  mRNA product Design i-3 (A100) comprising derived and/or modified sequence from LASV(LP;Clade I)__AAF86701__GPCmut4 (opt1)
aggagaaagcuuaccaugggccagaucaucaccuucuuccaggaggugccccacgucaucgaggaggugaugaacaucgugcugaucgcccucagccugcuggccauccucaaggggcuguacaacaucgcgaccugcggcaucaucgggcuggucgccuuccucuuccugugcggcaaguccugcagccugacgcucaagggcggguacgagcugcagacccuggagcucaacauggagacccugaacaugugcaugccgcuguccugcacgaagaacagcucccaccacuacauccgcgugggcaacgagaccgggcucgagcugacccugaccaacacgagcaucaucaaccacaaguucugcaaccucuccgacgcccacaagaagaaccuguacgaccacgcccugaugagcaucaucuccaccuuccaccucagcauccccaacuucaaccaguacgaggccauguccugcgacuucaacggcgggaagaucagcgugcaguacaaccugucccacagcuacgcgggcgacgccgccgagcacugcgggaccgucgccaacggcgugcugcagaccuucaugcggauggcguggggcgggcgcuacaucgcccucgacuccggcaaggggaacugggacugcaucaugacgagcuaccaguaccugaucauccagaacaccaccugggaggaccacugccaguucucccggcccagccccaucggcuaccugggccuccugucccagcgcacccgggacaucuacaucagccgccggcgccgggggacguucaccuggacccugagcgacuccgagggcaacgagacccccgggggcuacugccugacgcgcuggaugcucaucgaggccgagcugaagugcuucgggaacaccgccguggccaagugcaacgagaagcacgacgaggaguucugcgacaugcugcggcuguucgacuucugcaagcaggcgauccgccggcugaaggcccccgcccagaugagcauccagcugaucaacaaggccgucaacgcccucaucaacgaccagcugaucaugaagaaccaccuccgcgacaucaugggcauccccuacugcaacuacuccaaguacugcuaccucaaccacaccagcuccggccggaccagccugcccaagugcugccugaucuccaacgggagcuaccucaacgagacgcaguucuccgacgacaucgagcagcaggcggacaacaugaucaccgagaugcugcagaaggaguacaucgagcgccagggcaagaccccgcuggggcucguggacaucuucaucuucagcaccuccuucuaccugaucagcaucuuccugcaccugaucaagaucccgacgcaccggcacaucgugggcaagcccugccccaagccccaccgccucaaccacaugggggucugcuccugcggccuguacaagcacccgggcgugcccaccaaguggaagcggugaggacuaguuauaagacugacuagcccgaugggccucccaacgggcccuccuccccuccuugcaccgagauuaauaaaaaaaaaaaaaaaaaaaaaaaaaaaaaaaaaaaaaaaaaaaaaaaaaaaaaaaaaaaaaaaaaaaaaaaaaaaaaaaaaaaaaaaaaaaaaaaaaaaa

SEQ ID NO: 27911 - RNA, 1662 nt, Artificial Sequence
  mRNA product Design i-3 (A100) comprising derived and/or modified sequence from LASV(803213;Clade II)__AAF86703__GPCmut4 (opt1)
aggagaaagcuuaccaugggccagaucaucaccuucuuccaggaggugccccacgucaucgaggaggugaugaacaucgugcugaucgcccucagccugcuggccauccucaaggggaucuacaacgucgcgaccugcggccuguucgggcugaucuccuuccuccugcugugcggccgcagcugcuccgugacguacaaggggguguacgagcuccagacccuggagcugaacauggccaaccucaacaugugcaugccgcugagcugcaccaagaacaacucccaccacuacaucauggucggcaacgagacgggccuggagcucacccugaccaacaccagcaucaucaaccacaaguucugcaaccuguccgacgcccacaagaagaaccucuacgaccacgcccugaugagcaucaucuccacguuccaccugagcauccccaacuucaaccaguacgaggccauguccugcgacuucaacgggggcaagaucagcgugcaguacaaccucucccacagcuucgcgguggacgccgccaaccacugcgggaccaucgccaacggcguccugcagaccuucaugcggauggcguggggcggguccuacaucgcccuggacagcggcaaggggaacugggacugcaucaugaccuccuaccaguaccucaucauccagaacacgaccugggaggaccacugccaguucagccgccccucccccaucggcuaccuggggcugcucagccagcggacccgcgacaucuacaucagccggcgccgccggggcaccuucacguggacccucuccgacagcgagggcaacgaggcccccgggggcuacugccugacccgguggaugcugaucgaggccgagcucaagugcuucgggaacaccgccguggcgaagugcaacgagaagcacgacgaggaguucugcgacaugcugcgccuguucgacuucugcaagcaggccaucaagcggcucaagacgcccgcccagauguccauccagcugaucaacaaggccgugaacgcccugaucaacgaccagcucaucaugaagaaccaccuccgcgacaucaugggcauccccuacugcaacuacagccgguacugcuaccugaaccacaccgucaccgggaagaccucccugccccgcugcugccuggugagcaacggcuccuaccugaacgagacgcacuucagcgacgacaucgagcagcaggcggacaacaugaucaccgagaugcuccagaaggaguacauggaccggcagggcaagaccccgcuggggcugguggaccucuucgucuucuccaccagcuucuaccugaucuccaucuuccugcaccuggugaagaucccgacgcaccgccacaucgugggcaagcccugccccaagccccaccggcucaaccacauggggaucugcagcugcggccuguacaagcacccggggguccccgugaaguggaagcgcugaggacuaguuauaagacugacuagcccgaugggccucccaacgggcccuccuccccuccuugcaccgagauuaauaaaaaaaaaaaaaaaaaaaaaaaaaaaaaaaaaaaaaaaaaaaaaaaaaaaaaaaaaaaaaaaaaaaaaaaaaaaaaaaaaaaaaaaaaaaaaaaaaaaa

SEQ ID NO: 27912 - RNA, 1662 nt, Artificial Sequence
  mRNA product Design i-3 (A100) comprising derived and/or modified sequence from LASV(GA391;Clade III)__CAA36645__GPCmut4 (opt1)
aggagaaagcuuaccaugggccagaucgugaccuucuuccaggaggucccccacgugaucgaggaggugaugaacaucguccugaucgcccucagcauccuggccauccugaaggggcucuacaacguggcgaccugcggccugaucgggcuggugacguuccuccugcuguccggccgcagcugcucccucaucuacaaggggaccuacgagcugcagacccuggagcucaacauggagacccugaacaugugcaugccgcugagcugcaccaagaacaacucccaccacuacauccgggucggcaacgagaccggccucgagcugacccugacgaacaccagcauccucaaccacaaguucugcaaccuguccgacgcccacaagcgcaaccuguacgaccacagccucauguccaucaucagcaccuuccaccuguccauccccaacuucaaccaguacgaggccaugagcugcgacuucaacgggggcaagaucaccgugcaguacaaccugucccacagcuucgccguggacgccgcggggcacugcggcacgcucgccaacgggguccugcagaccuucaugcggauggccuggggcggcuccuacaucgcccuggacagcgggcgcggcaacugggacugcaucaugaccuccuaccaguaccucaucauccagaacaccacgugggacgaccacugccaguucagccggcccucccccaucggguaccugggccugcucagccagcgcacccgggacaucuacaucagccgccggcgccggggcaccuucaccuggacgcucuccgacagcgaggggaacgagaccccgggcggguacugccugacccgcuggaugcugaucgaggcggagcucaagugcuucggcaacaccgccguggccaagugcaacgagaagcacgacgaggaguucugcgacaugcugcggcuguucgacuucugcaagcaggccauccgccggcucaagacgcccgcccagauguccauccagcugaucaacaaggcggugaacgcccugaucaacgaccagcucaucaugaagaaccaccuccgcgacaucauggggauccccuacugcaacuacagccgguacugcuaccugaaccacaccuccaccggcaagaccagccugccccgcugcugccugaucuccaacggcagcuaccugaacgagacgaaguucuccgacgacaucgagcagcaggccgacaacaugaucaccgagaugcuccagaaggaguacaucgaccggcaggggaagacgccccugggccuggucgaccuguucguguucagcaccuccuucuaccucaucagcaucuuccugcaccuggugaagaucccgacccaccgccacaucgucgggaagcccugccccaagccccaccggcucaaccacaugggcaucugcuccugcgggcuguacaagcagccgggcgugcccgugcgcuggaagcggugaggacuaguuauaagacugacuagcccgaugggccucccaacgggcccuccuccccuccuugcaccgagauuaauaaaaaaaaaaaaaaaaaaaaaaaaaaaaaaaaaaaaaaaaaaaaaaaaaaaaaaaaaaaaaaaaaaaaaaaaaaaaaaaaaaaaaaaaaaaaaaaaaaaa

SEQ ID NO: 27913 - RNA, 1665 nt, Artificial Sequence
  mRNA product Design i-3 (A100) comprising derived and/or modified sequence from LASV(AV;Clade V)__CCA30314__GPCmut4 (opt1)
aggagaaagcuuaccaugggccagaucgugaccuucuuccaggaggucccccacgugaucgaggaggugaugaacaucguccugaucgcccucagcauccuggccgugcugaaggggcucuacaacaucgcgaccugcggccugaucgggcugaucacguuccuccugcugugcggccgcuccugcagcuccaaccucuacaaggggguguacgagcugcagagccuggaccucaacauggagacccugaacaugugcaugccgcuguccugcaccaagaacaacagccaccacuacauccgggucggcaacgacacgggccucgagcugacccugaccaacaccuccauccucaaccacaaguucugcaaccugagcgacgcccacaagaaggaccuguacgaccacgcccucauguccaucaucagcacguuccaccuguccauccccaacuucaaccaguacgaggccaugagcugcgacuucaacgggggcaagaucuccgugcaguacaaccugagccacuccuacgccaucgacgcggccaaccacugcgggaccguggccaacggcauccuccagaccuucaugcgcauggccuggggcgggagcuacaucgcgcuggacuccggccgggggaacugggacugcaucaugaccagcuaccaguaccugaucauccagaacacgaccugggagaaccacugccaguucucccgccccagccccaucggcuaccucgggcugcugagccagcggacccgcgacaucuacaucucccggcgccgccggggcaccuucacguggacccugagcgacuccgagggcaacgccacccccgggggcuacugccucacccgguggaugcugaucgaggccgagcugaagugcuucgggaacacggccgucgccaagugcaacgagaagcacgacgaggaguucugcgacaugcuccgccuguucgacuucugcaagcaggcgaucagccggcugaagucccccgcccagaugagcauccagcucaucaacaaggccgugaacgcccugaucaacgaccagcugaucaugaagaaccaccuccgcgacaucaugggcauccccuacugcaacuacuccaaguacugcuaccugaaccacaccaucaccgggaagaccagccugcccaagugcugccucguguccaacggcagcuaccugaacgagacgcacuucuccgacgacaucgagcagcaggccgacaacaugaucaccgagaugcugcagaaggaguacauggagcggcagggcaagaccccgcucgggcuggucgaccuguucguguucagcaccuccuucuaccugaucagcaucuuccuccgccuggugaagaucccgacgcaccggcacaucgucggcaagcccugccccaagccccaccgccugaaccacauggggaucugcuccugcggccucuacaagcagccgggggugcccgugcgguggaagcgcugaggacuaguuauaagacugacuagcccgaugggccucccaacgggcccuccuccccuccuugcaccgagauuaauaaaaaaaaaaaaaaaaaaaaaaaaaaaaaaaaaaaaaaaaaaaaaaaaaaaaaaaaaaaaaaaaaaaaaaaaaaaaaaaaaaaaaaaaaaaaaaaaaaaa

SEQ ID NO: 27914 - RNA, 1662 nt, Artificial Sequence
  mRNA product Design i-3 (A100) comprising derived and/or modified sequence from LASV(Togo/2016/7082;Clade VI)__AMR44577__GPCmut4 (opt1)
aggagaaagcuuaccaugggccagaucaucaccuucuuccaggaggugccccacgucaucgaggaggugaugaacaucgugcugaucgcccucagccugcuggccauccucaagggggucuacaacguggcgaccugcggcaucaucgggcuggugacguuccuguuccucugcggccgcuccugcagccugaucuacaagggguccuacgagcugcagacccucgagcugaacauggagacccugaacaugugcaugccgcucagcugcacgaagaacuccagccaccacuacauccgggucggcaacgagaccggccuggagcugacccucaccaacacguccaucaucaaccacaaguucugcaaccugagcgacgcccacaagcgcaaccuguacgaccacgcccucauguccauccugagcaccuuccaccuguccauccccaacuucaaccaguacgaggccaugagcugcgacuucaacgggggcaagaucuccgugcaguacaaccucagccacgccuacgcgguggacgccgccgagcacugcgggaccgucgccaacggcgugcugcagaccuucaugcggauggcguggggcggguccuacaucgcccuggacagcggccgcgggaacugggacugcaucaugacguccuaccaguaccucaucauccagaacaccaccugggaggaccacugccaguucagccggcccucccccaucggcuaccuggggcugcucagccagcgcacccgggacaucuacaucagccgccggcgccggggcacguucaccuggacccucuccgacagcgagggcaacgagacccccgggggcuacugccugacgcgcuggaugcugaucgaggccgagcucaagugcuucgggaacaccgccguggccaagugcaacgagaagcacgacgaggaguucugcgacaugcugcggcuguucgacuucugcaagcaggcgauccagcgccucaagucccccgcccagaugagcauccagcugaucaacaaggccgucaacgcccugaucaacgaccagcucaucaugaagaaccaccuccgggacaugaugggcauccccuacugcaacuacuccaaguacugcuaccugaaccacaccagcuccgggcgcaccagccugcccaagugcugccugguguccaacggcagcuaccugaacgagacgcacuucuccgacgacaucgagcagcaggccgacaacaugaucaccgagaugcuccagaaggaguacaucgaccggcagggcaagaccccgcuggggcugguggaccucuucgucuucagcaccuccuucuaccugaucagcaucuuccugcaccugaucaagaucccgacgcaccgccacaucgugggcaagcccugccccaagccccaccggcucaaccacauggggaucugcuccugcggccuguacaagcagccgggggugcccacccgcuggaagcggugaggacuaguuauaagacugacuagcccgaugggccucccaacgggcccuccuccccuccuugcaccgagauuaauaaaaaaaaaaaaaaaaaaaaaaaaaaaaaaaaaaaaaaaaaaaaaaaaaaaaaaaaaaaaaaaaaaaaaaaaaaaaaaaaaaaaaaaaaaaaaaaaaaaa

SEQ ID NO: 27915 - RNA, 1662 nt, Artificial Sequence
  mRNA product Design i-3 (A100) comprising derived and/or modified sequence from LASV(KAK-428;Clade n.d. (VII))__ANH09740__GPCmut4 (opt1)
aggagaaagcuuaccaugggccagaucgugaccuucuuccaggaggucccccacgugaucgaggaggugaugaacaucguccugaucgcccucagccugcuggccauccucaaggggcuguacaacuucgcgaccugcggcgugaucgggcugaucacguuccuccugcugugcggccgcuccugcagcgccaccuacaaggggcaguacgagcuccagacccuggagcugaacauggagucccucaacaugugcaugccgcugagcugcacgaagaacaacucccaccacuacauccgggccggcaacaacaccggccuggagcucacccugaccaacacgagcaucaucucccacaaguucugcaaccugagcgacgcccacaagaagaaccucuacgaccacacccugauguccaucaucaccaccuuccaccugagcauccccaacuucaaccaguacgaggccauguccugcgacuucaacgggggcaagaucagcauccaguacaaccucucccacagcuacgcgggggacgccgcccagcacugcggcacgguggccaacgggguccugcagaccuucaugcgcauggcguggggcggcuccuaccuggcccucgacagcgggcggcgcggcugggacugcaucaucuccagcuaccaguaccugaucauccagaacaccaccugggacgaccacugccaguucucccggcccagccccaucggguaccugggcuucgugagccagaagacgcgcgacaucuacaucucccggcgccgccggggcaccuucaccuggacccugagcgacuccgaggggcacgacaugccgggcggguacugccucacgcgguggaugcugaucgaggccgaccugaagugcuucggcaacaccgccguggccaagugcaacgagaagcacgacgaggaguucugcgacauguggcgccucuucgacuucugcaagcaggcgauccagcggcugaaggcccccgcccagaugaacauccagcugaucaacaaggccgucaacgcccucaucaacgaccagcugaugaugaagaaccaccuccgcgacaucauggggauccccuacugcaacuacagcaaguucugcuaccugaacaacaccaccacgggccggaccucccugccccgcugcugccugaucagcaacggcuccuaccucaacgagacccacuucagcgacgacaucgagcagcaggcggacaacaugaucaccgagaugcugcagaaggaguacauggaccggcaggggaagacgccccugggccucguggaccuguucguguucuccaccagcuucuaccugaucaccaucuuccuccaccuggucaagaucccgacccaccgccacaucguggggaagcccugccccaagccccaccggcugaaccacaugggcaucugcuccugcgggcuguacaagcagccgggcgugcccguccgcuggaagcggugaggacuaguuauaagacugacuagcccgaugggccucccaacgggcccuccuccccuccuugcaccgagauuaauaaaaaaaaaaaaaaaaaaaaaaaaaaaaaaaaaaaaaaaaaaaaaaaaaaaaaaaaaaaaaaaaaaaaaaaaaaaaaaaaaaaaaaaaaaaaaaaaaaaa

SEQ ID NO: 27916 - RNA, 1662 nt, Artificial Sequence; identical to SEQ ID NO: 27910
  mRNA product Design i-3 (A100) comprising derived and/or modified sequence from LASV(Pinneo-NIG-1969;Clade I)__AIT17836__GPCmut4 (opt1)

SEQ ID NO: 27917 - RNA, 1662 nt, Artificial Sequence
  mRNA product Design i-3 (A100) comprising derived and/or modified sequence from LASV(ISTH0009-NIG-2011;Clade II)__AIT17404__GPCmut4 (opt1)
aggagaaagcuuaccaugggccagaucaucaccuucuuccaggaggugccccacgucaucgaggaggugaugaacaucgugcugaucgcccucagccugcuggccauccucaaggggaucuacaacgucgcgaccugcggccuguucgggcugguguccuuccuccugcugugcggccgcagcugcuccacgaccuacaaggggguguacgagcuccagacccuggagcuggacauggccagccucaacaugugcaugccgcuguccugcacgaagaacaacagccaccacuacaucauggucggcaacgagaccggccuggagcucacccugaccaacacguccaucaucaaccacaaguucugcaaccugagcgacgcccacaagaagaaccucuacgaccacgcccugauguccaucaucagcaccuuccaccuguccauccccaacuucaaccaguacgaggccaugagcugcgacuucaacgggggcaagaucuccgugcaguacaaccucagccacgcguacgccguggacgccgccaaccacugcgggaccaucgcgaacggcguccugcagaccuucaugcggauggccuggggcggguccuacaucgcccuggacagcggcaagggguccugggacugcaucaugacgagcuaccaguaccucaucauccagaacaccaccugggaggaccacugccaguucucccgccccagccccaucggcuaccuggggcugcucagccagcggacccgcgacaucuacaucucccggcgccgccggggcacguucaccuggacccucagcgacuccgagggcaacgagacccccgggggcuacugccugacgcgguggaugcugaucgaggccgagcucaagugcuucgggaacaccgccguggcgaagugcaacgagaagcacgacgaggaguucugcgacaugcugcgccuguucgacuucugcaagcaggccauccggcgccucaagacccccgcccagaugagcauccagcugaucaacaaggccgugaacgcccugaucaacgaccagcucaucaugaagaaccaccuccgggacaucaugggcaucccguacugcaacuacuccaaguacugcuaccugaaccacaccgucacggggaagaccagccugccccgcugcugccugguguccaacggcagcuaccugaacgagacccacuucuccgacgacaucgagcagcaggcggacaacaugaucaccgagcuccugcagaaggaguacauggaccggcagggcaagacgccccuggggcucguggaccuguucgucuucagcaccuccuucuaccugaucagcaucuuccugcaccucaucaagaucccgacccaccgccacaucaccggcaagcccugccccaagccccaccggcugaaccacauggggaucugcuccugcggccuguacaagcacccgggggugcccgugaaguggaagcgcugaggacuaguuauaagacugacuagcccgaugggccucccaacgggcccuccuccccuccuugcaccgagauuaauaaaaaaaaaaaaaaaaaaaaaaaaaaaaaaaaaaaaaaaaaaaaaaaaaaaaaaaaaaaaaaaaaaaaaaaaaaaaaaaaaaaaaaaaaaaaaaaaaaaa

SEQ ID NO: 27918 - RNA, 1662 nt, Artificial Sequence
  mRNA product Design i-3 (A100) comprising derived and/or modified sequence from LASV(ISTH2010-NIG-2012;Clade II)__AIT17482__GPCmut4 (opt1)
aggagaaagcuuaccaugggccagaucaucaccuucuuccaggaggugccccacgucaucgaggaggugaugaacaucgugcugaucgcccucagccugcuggccauccucaaggggaucuacaacgucgcgaccugcggccuguucgggcugguguccuuccuccugcugugcggccgcagcugcuccacgaccuacaaggggguguacgagcuccagacccuggagcuggacauggccagccucaacaugugcaugccgcuguccugcacgaagaacaacagccaccacuacaucauggucggcaacgagaccggccuggagcucacccugaccaacacguccaucaucaaccacaaguucugcaaccugagcgacgcccacaagaagaaccucuacgaccacgcccugauguccaucaucagcaccuuccaccuguccauccccaacuucaaccaguacgaggccaugagcugcgacuucaacgggggcaagaucuccgugcaguacaaccucagccacgcguacgccguggacgccgccaaccacugcgggaccaucgcgaacggcguccugcagaccuucaugcggauggccuggggcggguccuacaucgcccuggacagcggcaagggguccugggacugcaucaugacgagcuaccaguaccucaucauccagaacaucaccugggaggaccacugccaguucucccgccccagccccaucggcuaccuggggcugcucagccagcggacccgcgacaucuacaucucccggcgccgccggggcaccuucacguggacccucagcgacuccgagggcaacgagacccccgggggcuacugccugacccgguggaugcugaucgaggccgagcucaagugcuucgggaacacggccguggcgaagugcaacgagaagcacgacgaggaguucugcgacaugcugcgccuguucgacuucugcaagcaggccauccggcgccucaagacccccgcccagaugagcauccagcugaucaacaaggccgugaacgcccugaucaacgaccagcucaucaugaagaaccaccuccgggacaucaugggcauccccuacugcaacuacuccaaguacugcuaccugaaccacaccgucaccgggaagacgagccugccccgcugcugccugguguccaacggcagcuaccugaacgagacccacuucuccgacgacaucgagcagcaggcggacaacaugaucaccgagcuccugcagaaggaguacaucgaccggcagggcaagaccccgcuggggcucguggaccuguucgucuucagcacguccuucuaccugaucagcaucuuccugcaccucgugaagaucccgacccaccgccacguggucggcaagcccugccccaagccccaccggcugaaccacauggggaucugcuccugcggccuguacaagcacccgggggugcccgugaaguggaagcgcugaggacuaguuauaagacugacuagcccgaugggccucccaacgggcccuccuccccuccuugcaccgagauuaauaaaaaaaaaaaaaaaaaaaaaaaaaaaaaaaaaaaaaaaaaaaaaaaaaaaaaaaaaaaaaaaaaaaaaaaaaaaaaaaaaaaaaaaaaaaaaaaaaaaa

SEQ ID NO: 27919 - RNA, 1662 nt, Artificial Sequence
  mRNA product Design i-3 (A100) comprising derived and/or modified sequence from LASV(Lassa virus/H.sapiens-wt/NGA/2015/ISTH_0543;Clade II)__AVO03639__GPCmut4 (opt1)
aggagaaagcuuaccaugggccagaucaucaccuucuuccaggaggugccccacgucaucgaggaggugaugaacaucgugcugaucgcccucagccugcuggccauccucaaggggaucuacaacgucgcgaccugcggccuguucgggcugguguccuuccuccugcugugcggccgcagcugcuccacgaccuacaaggggguguacgagcuccagacccuggagcuggacauggccaaccucaacaugugcaugccgcugagcugcacgaagaacaacucccaccacuacaucauggucggcaacgagaccggccuggagcucacccugaccaacacgagcaucaucaaccacaaguucugcaaccuguccgacgcccacaagaagaaccucuacgaccacgcccugaugagcaucaucuccaccuuccaccugagcauccccaacuucaaccaguacgaggccauguccugcgacuucaacgggggcaagaucagcgugcaguacaaccucucccacaccuacgcgguggacgccgccaaccacugcgggaccaucgccaacggcguccugcagacguucaugcggauggcguggggcgggagcuacaucgcccuggacuccggcaaggggagcugggacugcaucaugaccuccuaccaguaccucgugauccagaacaccaccugggaggaccacugccaguucagccgccccucccccaucggcuaccuggggcugcucagccagcggacgcgcgacaucuacaucagccggcgccgccggggcaccuucaccuggacccucuccgacagcgagggcaacgagacgcccgggggcuacugccugacccgguggaugcugaucgaggccgagcucaagugcuucgggaacaccgccguggccaagugcaacgagaagcacgacgaggaguucugcgacaugcugcgccuguucgacuucugcaagcaggcgauccggcgccucaagacccccgcccagauguccauccagcugaucaacaaggccgucaacgcccugaucaacgaccagcucaucaugaagaaccaccuccgggacaucaugggcauccccuacugcaacuacagcaaguacugcuaccugaaccacacggugaccgggaagaccucccugccccgcugcugccuggugagcaacggcuccuaccugaacgagacccacuucagcgacgacaucgagcagcaggccgacaacaugaucacggagcuccugcagaaggaguacaucgaccggcagggcaagaccccgcuggggcucgucgaccuguucguguucuccaccagcuucuaccugaucuccaucuuccugcaccucgugaagaucccgacccaccgccacaucacgggcaagcccugccccaagccccaccggcugaaccacauggggaucugcagcugcggccuguacaagcacccggggguccccgugaaguggaagcgcugaggacuaguuauaagacugacuagcccgaugggccucccaacgggcccuccuccccuccuugcaccgagauuaauaaaaaaaaaaaaaaaaaaaaaaaaaaaaaaaaaaaaaaaaaaaaaaaaaaaaaaaaaaaaaaaaaaaaaaaaaaaaaaaaaaaaaaaaaaaaaaaaaaaa

SEQ ID NO: 27920 - RNA, 1662 nt, Artificial Sequence
  mRNA product Design i-3 (A100) comprising derived and/or modified sequence from LASV(Lassa virus/H.sapiens-wt/NGA/2016/ISTH_0009;Clade II)__AVO03571__GPCmut4 (opt1)
aggagaaagcuuaccaugggccagaucaucaccuucuuccaggaggugccccacgucaucgaggaggugaugaacaucgugcugaucgcccucagccugcuggccauccucaaggggaucuacaacgucgcgaccugcggccugcuggggcucguguccuuccugcugcucugcggccgcagcugcuccacgaccuacaaggggguguacgagcugcagacccuggagcucgacauggccagccugaacaugugcaugccgcuguccugcacgaagaacaacagccaccacuacaucauggucggcaacgagaccggccucgagcugacccugaccaacacguccaucaucaaccacaaguucugcaaccucagcgacgcccacaagaagaaccuguacgaccacgcccugauguccaucaucagcaccuuccaccucuccauccccaacuucaaccaguacgaggccaugagcugcgacuucaacgggggccggaucuccgugcaguacaaccugagccacuccuacgcgguggacgccgccaaccacugcgggaccaucgccaacggcguccugcagaccuucaugcgcauggcguggggcgggagcuacaucgcccucgacuccggcaaggggagcugggacugcaucaugacguccuaccaguaccugaucauccagaacaccaccugggaggaccacugccaguucagccggcccagccccaucggcuaccuggggcuccugucccagcgcacccgggacaucuacaucagccgccggcgccggggcacguucaccuggacccuguccgacagcgagggcaacgagacccccgggggcuacugccugacgcgcuggaugcucaucgaggccgagcugaagugcuucgggaacaccgccguggccaagugcaacgagaagcacgacgaggaguucugcgacaugcugcggcuguucgacuucugcaagcaggcgauccgccggcugaagacccccgcccagauguccauccagcugaucaacaaggccgugaacgcccucaucaacgaccagcugaucaugaagaaccaccuccgcgacaucaugggcaucccguacugcaacuacagcaaguacugcuaccucaaccacaccgucacggggaagaccucccugccccggugcugccuggugagcaacggcuccuaccucaacgagacccacuucagcgacgacaucgagcagcaggccgacaacaugaucaccgagcugcugcagaaggaguacaucgaccgccagggcaagacgccccucgggcugguggaccuguucgucuucuccaccagcuucuaccugaucuccaucuuccuccaccuggugaagaucccgacccaccggcacaucaccggcaagcccugccccaagccccaccgccugaaccacauggggaucugcagcugcggccucuacaaccacccgggggugcccgucaaguggaagcggugaggacuaguuauaagacugacuagcccgaugggccucccaacgggcccuccuccccuccuugcaccgagauuaauaaaaaaaaaaaaaaaaaaaaaaaaaaaaaaaaaaaaaaaaaaaaaaaaaaaaaaaaaaaaaaaaaaaaaaaaaaaaaaaaaaaaaaaaaaaaaaaaaaaa

SEQ ID NO: 27921 - RNA, 1662 nt, Artificial Sequence
  mRNA product Design i-3 (A100) comprising derived and/or modified sequence from LASV(Lassa virus/H.sapiens-wt/NGA/2016/ISTH_0017;Clade II)__AVO03567__GPCmut4 (opt1)
aggagaaagcuuaccaugggccagaucaucaccuucuuccaggaggugccccacgucaucgaggaggugaugaacaucgugcugaucgcccucagccugcuggccauccucaaggggaucuacaacgucgcgaccugcggccuguucgggcugguguccuuccuccugcugugcggccgcagcugcuccacgaccuacaaggggguguacgagcuccagacccuggagcuggacauggccagccucaacaugugcaugccgcuguccugcacgaagaacaacagccaccacuacaucauggucggcaacgagaccggccuggagcucacccugaccaacacguccaucaucaaccacaaguucugcaaccugagcgacgcccacaagaagaaccucuacgaccacgcccugauguccaucaucagcaccuuccaccuguccauccccaacuucaaccaguacgaggccaugagcugcgacuucaacgggggcaagaucuccgugcaguacaaccucagccacaccuacgcgaucgacgccgccaaccacugcgggaccaucgccaacggcgugcugcagacguucaugcggauggcguggggcggguccuacaucgcccuggacagcggcaagggguccugggacugcaucaugaccagcuaccaguaccucaucauccagaacaccaccugggaggaccacugccaguucucccgccccagccccaucggcuaccuggggcugcucagccagcggacgcgcgacaucuacaucucccggcgccgccggggcaccuucaccuggacccucagcgacuccgagggcaacgagacgcccgggggcuacugccugacccgguggaugcugaucgaggccgagcucaagugcuucgggaacaccgccgucgccaagugcaacgagaagcacgacgaggaguucugcgacaugcugcgccuguucgacuucugcaagcaggcgauccggcgccucaagacccccgcccagaugagcauccagcugaucaacaaggccgugaacgcccugaucaacgaccagcucaucaugaagaaccaccuccgggacaucaugggcauccccuacugcaacuacuccaaguacugcuaccugaaccacacggugaccgggaagaccagccugccccgcugcugccuggucuccaacggcagcuaccugaacgagacccacuucuccgacgacaucgagcagcaggccgacaacaugaucacggagcuccugcagaaggaguacauggaccggcagggcaagaccccgcuggggcucguggaccuguucguguucagcaccuccuucuaccugaucagcaucuuccugcaccucguccgcaucccgacccaccggcacgugaucggcaagcccugccccaagccccaccgccugaaccacauggggaucugcuccugcggccuguacaagcacccgggggugcccgucaaguggaagcggugaggacuaguuauaagacugacuagcccgaugggccucccaacgggcccuccuccccuccuugcaccgagauuaauaaaaaaaaaaaaaaaaaaaaaaaaaaaaaaaaaaaaaaaaaaaaaaaaaaaaaaaaaaaaaaaaaaaaaaaaaaaaaaaaaaaaaaaaaaaaaaaaaaaa

SEQ ID NO: 27922 - RNA, 1662 nt, Artificial Sequence
  mRNA product Design i-3 (A100) comprising derived and/or modified sequence from LASV(Lassa virus/H.sapiens-wt/NGA/2018/ISTH_0959;Clade II)__AVV65099__GPCmut4 (opt1)
aggagaaagcuuaccaugggccagaucaucaccuucuuccaggaggugccccacgucaucgaggaggugaugaacaucgugcugaucgcccucagccugcuggccauccucaaggggaucuacaacgucgugaccugcggccuguucgggcugguguccuuccuccugcugugcggccgcagcugcuccacgaccuacaagggggucuacgagcuccagacccuggagcuggacauggcgagccucaacaugugcaugccgcuguccugcacgaagaacaacagccaccacuacaucauggugggcaacgagaccggccuggagcucacccugaccaacacguccaucaucaaccacaaguucugcaaccugagcgacgcccacaagaagaaccucuacgaccacgcccugauguccaucaucagcaccuuccaccuguccauccccaacuucaaccaguacgaggccaugagcugcgacuucaacgggggcaagaucuccgugcaguacaaccucagccacgccuacgcgaucgacgccgccaaccacugcgggaccaucgccaacggcguccugcagaccuucaugcggauggcguggggcggguccuacaucgcccuggacagcggcaagggguccugggacugcaucaugacgagcuaccaguaccucaucauccagaacaccaccugggaggaccacugccaguucucccgccccagccccaucggcuaccuggggcugcucagccagcggacccgcgacaucuacaucucccggcgccgccggggcacguucaccuggacccucagcgacuccgagggcaacgagacccccgggggcuacugccugacgcgguggaugcugaucgaggccgagcucaagugcuucgggaacaccgccguggccaagugcaacgagaagcacgacgaggaguucugcgacaugcugcgccuguucgacuucugcaagcaggcgauccggcgccucaagacccccgcccagaugagcauccagcugaucaacaaggccgugaacgcccugaucaacgaccagcucaucaugaagaaccaccuccgggacaucaugggcaucccguacugcaacuacuccaaguacugcuaccugaaccacaccgucacggggaagaccagccugccccgcugcugccugguguccaacggcagcuaccugaacgagacccacuucuccgacgacaucgagcagcaggccgacaacaugaucaccgagcuccugcagaaggaguacaucgaccggcagggcaagacgccccuggggcucguggaccuguucgucuucagcaccuccuucuaccugaucagcaucuuccugcaccucgugaagaucccgacccaccgccacgugaucggcaagcccugccccaagccccaccggcugaaccacauggggaucugcuccugcggccuguacaagcacccggggguccccgugaaguggaagcgcugaggacuaguuauaagacugacuagcccgaugggccucccaacgggcccuccuccccuccuugcaccgagauuaauaaaaaaaaaaaaaaaaaaaaaaaaaaaaaaaaaaaaaaaaaaaaaaaaaaaaaaaaaaaaaaaaaaaaaaaaaaaaaaaaaaaaaaaaaaaaaaaaaaaa

SEQ ID NO: 27923 - RNA, 1662 nt, Artificial Sequence
  mRNA product Design i-3 (A100) comprising derived and/or modified sequence from LASV(LASV003-NIG-2008;Clade II)__AIT17580__GPCmut4 (opt1)
aggagaaagcuuaccaugggccagaucaucaccuucuuccaggaggugccccacgucaucgaggaggugaugaacaucgugcugaucgcccucagccugcuggccauccucaaggggaucuacaacgucgcgaccugcggccuguucgggcugguguccuuccuccugcugugcggccgcagcugcuccacgaccuacaaggggguguacgagcuccagacccuggagcuggacauggccagccucaacaugugcaugccgcuguccugcacgaagaacaacagccaccacuacaucauggucggcaacgagaccggccuggagcucacccugaccaacacguccaucaucaaccacaaguucugcaaccugagcgacgcccacaagaagaaccucuacgaccacgcccugauguccaucaucagcaccuuccaccuguccauccccaacuucaaccaguacgaggccaugagcugcgacuucaacgggggcaagaucuccgugcaguacaaccucagccacaccuacgcgguggacgccgccaaccacugcgggaccaucgccaacggcguccugcagacguucaugcggauggcguggggcggguccuacaucgcccuggacagcggcaagggguccugggacugcaucaugaccagcuaccaguaccucaucauccagaacaccaccugggaggaccacugccaguucucccgccccagccccaucggcuaccuggggcugcucagccagcggacgcgcgacaucuacaucucccggcgccgccggggcaccuucaccuggacccucagcgacuccgagagcaacgagacgccgggcggguacugccugacccgguggaugcugaucgaggccgagcucaagugcuucggcaacaccgccguggccaagugcaacgagaagcacgacgaggaguucugcgacaugcugcgccuguucgacuucugcaagcaggcgauccggcgccucaaggcccccgcccagauguccauccagcugaucaacaaggccgugaacgcccugaucaacgaccagcucaucaugaagaaccaccuccgggacaucauggggauccccuacugcaacuacagcaaguacugcuaccugaaccacaccgucacgggccgcaccucccugccccggugcugccuggugagcaacggguccuaccugaacgagacccacuucagcgacgacaucgagcagcaggcggacaacaugaucaccgagcuccugcagaaggaguacauggaccgccagggcaagacgccccugggccucguggaccuguucgucuucuccaccagcuucuaccugaucuccaucuuccugcaccucgugaagaucccgacccaccggcacgugaucgggaagcccugccccaagccccaccgccugaaccacaugggcaucugcagcugcgggcuguacaagcacccgggcguccccgugaaguggaagcggugaggacuaguuauaagacugacuagcccgaugggccucccaacgggcccuccuccccuccuugcaccgagauuaauaaaaaaaaaaaaaaaaaaaaaaaaaaaaaaaaaaaaaaaaaaaaaaaaaaaaaaaaaaaaaaaaaaaaaaaaaaaaaaaaaaaaaaaaaaaaaaaaaaaa

SEQ ID NO: 27924 - RNA, 1662 nt, Artificial Sequence
  mRNA product Design i-3 (A100) comprising derived and/or modified sequence from LASV(LASV035-NIG-2009;Clade II)__AIT17588__GPCmut4 (opt1)
aggagaaagcuuaccaugggccagaucaucaccuucuuccaggaggugccccacgucaucgaggaggugaugaacaucgugcugaucgcccucagccugcuggccauccucaaggggaucuacaacgucgcgaccugcggccuguucgggcugguguccuuccuccugcugugcggccgcagcugcuccacgaccuacaaggggguguacgagcuccagacccuggagcuggacauggccagccucaacaugugcaugccgcuguccugcacgaagaacaacagccaccacuacaucauggucggcaacgagaccggccuggagcucacccugaccaacacguccaucaucaaccacaaguucugcaaccugagcgacgcccacaagaagaaccucuacgaccacgcccugauguccaucaucagcaccuuccaccuguccauccccaacuucaaccaguacgaggccaugagcugcgacuucaacgggggcaagaucuccgugcaguacaaccucagccacgcguacgccguggacgccgccaaccacugcgggaccaucgcgaacggcguccugcagaccuucaugcggauggccuggggcggguccuacaucgcccuggacagcggcaagggguccugggacugcaucaugacgagcuaccaguaccucaucauccagaacaccaccugggaggaccacugccaguucucccgccccagccccaucggcuaccuggggcugcucagccagcggacccgcgacaucuacaucucccggcgccgccggggcacguucaccuggacccucagcgacuccgagggcaacgagacccccgggggcuacugccugacgcgguggaugcugaucgaggccgagcucaagugcuucgggaacaccgccguggcgaagugcaacgagaagcacgacgaggaguucugcgacaugcugcgccuguucgacuucugcaagcaggccauccggcgccucaaggcccccgcccagaugagcauccagcugaucaacaaggccgugaacgcgcugaucaacgaccagcucaucaugaagaaccaccuccgggacaucaugggcauccccuacugcaacuacuccaaguacugcuaccugaaccacaccgucaccgggaagacgagccugccccgcugcugccugguguccaacggcagcuaccugaacgagacccacuucuccgacgacaucgagcagcaggccgacaacaugaucaccgagcuccugcagaaggaguacaucgaccggcagggcaagaccccgcuggggcucguggaccuguucgucuucagcacguccuucuaccugaucagcaucuuccugcaccucgugaagaucccgacccaccgccacgugaucggcaagcccugccccaagccccaccggcugaaccacauggggaucugcuccugcggccuguacaagcacccggggguccccgugaaguggaagcgcugaggacuaguuauaagacugacuagcccgaugggccucccaacgggcccuccuccccuccuugcaccgagauuaauaaaaaaaaaaaaaaaaaaaaaaaaaaaaaaaaaaaaaaaaaaaaaaaaaaaaaaaaaaaaaaaaaaaaaaaaaaaaaaaaaaaaaaaaaaaaaaaaaaaa

SEQ ID NO: 27925 - RNA, 1662 nt, Artificial Sequence
  mRNA product Design i-3 (A100) comprising derived and/or modified sequence from LASV(LASV1000-NIG-2009;Clade II)__AIT17782__GPCmut4 (opt1)
aggagaaagcuuaccaugggccagaucaucaccuucuuccaggaggugccccacgucaucgaggaggugaugaacaucgugcugaucgcccucagccugcuggccauccucaaggggaucuacaacgucgcgaccugcggccuguucgggcugguguccuuccuccugcugugcggccgcagcugcuccacgaccuacaaggggguguacgagcuccagacccuggagcuggacauggccagccucaacaugugcaugccgcuguccugcacgaagaacaacagccaccacuacaucauggucggcaacgagaccggccuggagcucacccugaccaacacguccaucaucaaccacaaguucugcaaccugagcgacgcccacaagaagaaccucuacgaccacgcccugauguccaucaucagcaccuuccaccuguccauccccaacuucaaccaguacgaggccaugagcugcgacuucaacgggggcaagaucuccgugcaguacaaccucagccacaccuacgcgguggacgccgccaaccacugcgggaccaucgccaacggcguccugcagacguucaugcggauggcguggggcggguccuacaucgcccuggacagcggcaagggguccugggacugcaucaugaccagcuaccaguaccucaucauccagaacaccaccugggaggaccacugccaguucucccgccccagccccaucggcuaccuggggcugcucagccagcggacgcgcgacaucuacaucucccggcgccgccggggcaccuucaccuggacccucagcgacuccgagggcaacgagacgcccgggggcuacugccugacccgguggaugcugaucgaggccgagcucaagugcuucgggaacaccgccguggccaagugcaacgagaagcacgacgaggaguucugcgacaugcugcgccuguucgacuucugcaagcaggcgaucaagcggcucaagacccccgcccagaugagcauccagcugaucaacaaggccgugaacgcccugaucaacgaccagcucaucaugaagaaccaccuccgcgacaucaugggcauccccuacugcaacuacuccaaguacugcuaccugaaccacacggucaccgggaagaccagccugccccggugcugccugguguccaacggcagcuaccugaacgagacccacuucuccgacgacaucgagcagcaggccgacaacaugaucacggagcuccugcagaaggaguacaucgaccgccagggcaagaccccgcuggggcucguggaccuguucgucuucagcaccuccuucuaccugaucagcaucuuccugcaccucgugaagaucccgacccaccggcacguggucggcaagcccugccccaagccccaccgccugaaccacauggggaucugcuccugcggccuguacaagcacccgggggugcccgugaaguggaagcggugaggacuaguuauaagacugacuagcccgaugggccucccaacgggcccuccuccccuccuugcaccgagauuaauaaaaaaaaaaaaaaaaaaaaaaaaaaaaaaaaaaaaaaaaaaaaaaaaaaaaaaaaaaaaaaaaaaaaaaaaaaaaaaaaaaaaaaaaaaaaaaaaaaaa

SEQ ID NO: 27926 - RNA, 1662 nt, Artificial Sequence
  mRNA product Design i-3 (A100) comprising derived and/or modified sequence from LASV(LASV221-NIG-2010;Clade II)__AIT17624__GPCmut4 (opt1)
aggagaaagcuuaccaugggccagaucaucaccuucuuccaggaggugccccacgucaucgaggaggugaugaacaucgugcugaucgcccucagccugcuggccauccucaaggggaucuacaacgucgcgaccugcggccuguucgggcugguguccuuccuccugcugugcggccgcagcugcuccacgaccuacaaggggguguacgagcuccagacccuggagcuggacauggccagccucaacaugugcaugccgcuguccugcacgaagaacaacagccaccacuacaucauggucggcaacgagaccggccuggagcucacccugaccaacacguccaucaucaaccacaaguucugcaaccugagcgacgcccacaagaagaaccucuacgaccacgcccugauguccaucaucagcaccuuccaccuguccauccccaacuucaaccaguacgaggccaugagcugcgacuucaacgggggcaagaucuccgugcaguacaaccucagccacaccuacgcgaucgacgccgccaaccacugcgggaccaucgccaacggcgugcugcagacguucaugcggauggcguggggcggguccuacaucgcccuggacagcggcaagggguccugggacugcaucaugaccagcuaccaguaccucaucauccagaacaccaccugggaggaccacugccaguucucccgccccagccccaucggcuaccuggggcugcucagccagcggacgcgcgacaucuacaucucccggcgccgccggggcaccuucaccuggacccucagcgacuccgagggcaacgagacgcccgggggcuacugccugacccgguggaugcugaucgaggccgagcucaagugcuucgggaacaccgccgucgccaagugcaacgagaagcacgacgaggaguucugcgacaugcugcgccuguucgacuucugcaagcaggcgauccggcgccucaagacccccgcccagaugagcauccagcugaucaacaaggccgugaacgcccugaucaacgaccagcucaucaugaagaaccaccuccgggacaucaugggcauccccuacugcaacuacuccaaguacugcuaccugaaccacacggugaccgggaagaccagccugccccgcugcugccuggucuccaacggcagcuaccugaacgagacccacuucuccgacgacaucgagcagcaggccgacaacaugaucacggagaugcuccagaaggaguacauggaccggcagggcaagaccccgcuggggcugguggaccucuucguguucagcaccuccuucuaccugaucagcaucuuccugcaccuggucaagaucccgacccaccgccacgugaucggcaagcccugccccaagccccaccggcucaaccacauggggaucugcuccugcggccuguacaagcacccgggggugcccgucaaguggaagcgcugaggacuaguuauaagacugacuagcccgaugggccucccaacgggcccuccuccccuccuugcaccgagauuaauaaaaaaaaaaaaaaaaaaaaaaaaaaaaaaaaaaaaaaaaaaaaaaaaaaaaaaaaaaaaaaaaaaaaaaaaaaaaaaaaaaaaaaaaaaaaaaaaaaaa

SEQ ID NO: 27927 - RNA, 1662 nt, Artificial Sequence
  mRNA product Design i-3 (A100) comprising derived and/or modified sequence from LASV(LASV237-NIG-2010;Clade II)__AIT17638__GPCmut4 (opt1)
aggagaaagcuuaccaugggccagaucaucaccuucuuccaggaggugccccacgucaucgaggaggugaugaacaucgugcugaucgcccucagccugcuggccauccucaaggggaucuacaacgucgcgaccugcggccuguucgggcugguguccuuccuccugcugugcggccgcagcugcuccacgaccuacaaggggguguacgagcuccagacccuggagcuggacauggccagccucaacaugugcaugccgcuguccugcacgaagaacaacagccaccacuacaucauggucggcaacgagaccggccuggagcucacccugaccaacacguccaucaucaaccacaaguucugcaaccugagcgacgcccacaagaaggaccucuacgaccacgcccugauguccaucaucagcaccuuccaccuguccauccccaacuucaaccaguacgaggccaugagcugcgacuucaacgggggcaagaucuccgugcaguacaaccucagccacaccuacgcgguggacgccgccaaccacugcgggaccaucgccaacggcguccugcagacguucaugcggauggcguggggcggguccuacaucgcccuggacagcggcaagggguccugggacugcaucaugaccagcuaccaguaccucaucauccagaacaccaccugggaggaccacugccaguucucccgccccagccccaucggcuaccuggggcugcucagccagcggacgcgcgacaucuacaucucccggcgccgccggggcaccuucaccuggacccucagcgacuccgagggcaacgagacgcccgggggcuacugccugacccgguggaugcugaucgaggccgagcucaagugcuucgggaacaccgccguggccaagugcaacgagaagcacgacgaggaguucugcgacaugcugcgccuguucgacuucugcaagcaggcgauccggcgccucaagacccccgcccagaugagcauccagcugaucaacaaggccgugaacgcccugaucaacgaccagcucaucaugaagaaccaccuccgggacaucaugggcauccccuacugcaacuacuccaaguacugcuaccugaaccacacggucaccgggaagaccagccugccccgcugcugccugguguccaacggcagcuaccugaacgagacccacuucuccgacgacaucgagcagcaggccgacaacaugaucacggagcuccugcagaaggaguacauggaccggcagggcaagaccccgcuggggcucguggaccuguucgucuucagcaccuccuucuaccugaucagcaucuuccugcaccucaucaagaucccgacccaccgccacaucacgggcaagcccugccccaagccccaccggcugaaccacauggggaucugcuccugcggccuguacaagcacccgggggugcccgugaaguggaagcgcugaggacuaguuauaagacugacuagcccgaugggccucccaacgggcccuccuccccuccuugcaccgagauuaauaaaaaaaaaaaaaaaaaaaaaaaaaaaaaaaaaaaaaaaaaaaaaaaaaaaaaaaaaaaaaaaaaaaaaaaaaaaaaaaaaaaaaaaaaaaaaaaaaaaa

SEQ ID NO: 27928 - RNA, 1662 nt, Artificial Sequence
  mRNA product Design i-3 (A100) comprising derived and/or modified sequence from LASV(LASV253-NIG-2011;Clade II)__AIT17670__GPCmut4 (opt1)
aggagaaagcuuaccaugggccagaucaucaccuucuuccaggaggugccccacgucaucgaggaggugaugaacaucgugcugaucgcccucagccugcuggccauccucaaggggaucuacaacgucgcgaccugcggccuguucgggcugguguccuuccuccugcugugcggccgcagcugcuccacgaccuacaaggggguguacgagcuccagacccuggagcuggacauggccagccucaacaugugcaugccgcuguccugcacgaagaacaacagccaccacuacaucauggucggcaacgagaccggccuggagcucacccugaccaacacguccaucaucaaccacaaguucugcaaccugagcgacgcccacaagaagaaccucuacgaccacgcccugauguccaucaucagcaccuuccaccuguccauccccaacuucaaccaguacgaggccaugagcugcgacuucaacgggggcaagaucuccgugcaguacaaccucagccacaccuacgcgguggacgccgccaaccacugcgggaccaucgccaacggcguccugcagacguucaugcggauggcguggggcggguccuacaucgcccuggacagcggcaagggguccugggacugcaucaugaccagcuaccaguaccucaucauccagaacaccaccugggaggaccacugccaguucucccgccccagccccaucggcuaccuggggcugcucagccagcggacgcgcgacaucuacaucucccggcgccgccggggcaccuucaccuggacccucagcgacuccgagggcaacgagacgcccgggggcuacugccugacccgguggaugcugaucgaggccgagcucaagugcuucgggaacaccgccguggccaagugcaacgagaagcacgacgaggaguucugcgacaugcugcgccuguucgacuucugcaagcaggcgauccggcgccucaaggcccccgcccagaugagcauccagcugaucaacaaggccgugaacgcccugaucaacgaccagcucaucaugaagaaccaccuccgggacaucaugggcaucccguacugcaacuacuccaaguacugcuaccugaaccacaccgucacggggcgcaccagccugccccggugcugccugguguccaacggcagcuaccugaacgagacccacuucuccgacgacaucgagcagcaggcggacaacaugaucaccgagcuccugcagaaggaguacaucgaccgccagggcaagacgccccuggggcucguggaccuguucgucuucagcaccuccuucuaccugaucagcaucuuccugcaccucgugaagaucccgacccaccggcacaucaucggcaagcccugccccaagccccaccgccugaaccacauggggaucugcuccugcggccuguacaagcacccgggggugcccgucaaguggaagcggugaggacuaguuauaagacugacuagcccgaugggccucccaacgggcccuccuccccuccuugcaccgagauuaauaaaaaaaaaaaaaaaaaaaaaaaaaaaaaaaaaaaaaaaaaaaaaaaaaaaaaaaaaaaaaaaaaaaaaaaaaaaaaaaaaaaaaaaaaaaaaaaaaaaa

SEQ ID NO: 27929 - RNA, 1662 nt, Artificial Sequence
  mRNA product Design i-3 (A100) comprising derived and/or modified sequence from LASV(LASV254-NIG-2011;Clade II)__AIT17674__GPCmut4 (opt1)
aggagaaagcuuaccaugggccagaucaucaccuucuuccaggaggugccccacgucaucgaggaggugaugaacaucgugcugaucgcccucagccugcuggccauccucaaggggaucuacaacgucgcgaccugcggccuguucgggcugguguccuuccuccugcugugcggccgcagcugcuccacgaccuacaaggggguguacgagcuccagacccuggagcuggacaugaccaaccucaacaugugcaugccgcugagcugcaccaagaacaacucccaccacuacaucauggucggcaacgagaccggccuggagcucacccugacgaacaccagcaucaucaaccacaaguucugcaaccuguccgacgcccacaagaagaaccucuacaaccacgcccugaugagcaucaucuccaccuuccaccugagcauccccaacuucaaccaguacgaggccauguccugcgacuucaacgggggcaagaucagcgugcaguacaaccucucccacagcuacgccguggacgcggccaaccacugcgggaccaucgccaacggcguccugcagacguucaugcggauggccuggggcggguccuacaucgcgcuggacagcggcaaggggaacugggacugcaucaugaccuccuaccaguaccucaucauccagaacaccaccugggaggaccacugccaguucagccgccccucccccaucggcuaccuggggcugcucagccagcggacgcgcgacaucuacaucagccggcgccgccggggcaccuucaccuggacccucuccgacagcgagggcaacgagacgcccgggggcuacugccugacccgguggaugcugaucgaggccgagcucaagugcuucgggaacaccgccguggccaagugcaacgagaagcacgacgaggaguucugcgacaugcugcgccuguucgacuucugcaagcaggccauccggcgccucaagacccccgcgcaggccaacauccagcugaucaacaaggccgugaacgcccugaucaacgaccagcucaucaugaagaaccaccuccgggacaucaugggcauccccuacugcaacuacuccaaguacugcuaccugaaccacacggucaccgggaagaccagccugccccgcugcugccugguguccaacggcagcuaccugaacgagacccacuucuccgacgacaucgagcagcaggccgacaacaugaucacggagcuccugcagaaggaguacauggaccggcagggcaagaccccgcuggggcucguggaccuguucgucuucagcaccuccuucuaccugaucagcaucuuccugcaccucgugaagaucccgacccaccgccacgugaucggcaagcccugccccaagccccaccggcugaaccacauggggaucugcuccugcggccuguacaagcacccggggguccccgugaaguggaagcgcugaggacuaguuauaagacugacuagcccgaugggccucccaacgggcccuccuccccuccuugcaccgagauuaauaaaaaaaaaaaaaaaaaaaaaaaaaaaaaaaaaaaaaaaaaaaaaaaaaaaaaaaaaaaaaaaaaaaaaaaaaaaaaaaaaaaaaaaaaaaaaaaaaaaa

SEQ ID NO: 27930 - RNA, 1662 nt, Artificial Sequence
  mRNA product Design i-3 (A100) comprising derived and/or modified sequence from LASV(Nig08-A19;Clade III)__ADU56618__GPCmut4 (opt1)
aggagaaagcuuaccaugggccagaucgugaccuucuuccaggaggucccccacgugaucgaggaggugaugaacaucguccugaucgcccucagcauccuggccauccugaaggggcucuacaacaucgcgaccugcggccugaucgggcuggugacguuccuccugcuguccggccgcagcugcuccaugaccuacaaggggguguacgagcuccagacccuggagcugaacaugaacacccucaacaugugcaugccgcugagcugcaccaagaacaacucccaccacuacaucauggucggcaacgagaccggccuggagcucacccugacgaacaccagccugcuccaccacaaguucugcaaccuguccgacgcccacaagaagaaccuguacgaccacacccucaugagcaucaucuccaccuuccaccugagcauccccaacuucaaccaguacgaggccauguccugcgacuucaacgggggcaagaucacggugcaguacaaccugagccacuccuacgccaucgacgccgcgaaccacugcgggaccguggccaacggcguccuccagaccuucaugcggauggccuggggcgggagcuacaucgcccuggacuccggccgcgggaagugggacugcaucaugaccagcuaccaguaccugaucauccagaacacgaccugggaggaccacugccaguucucccggcccagccccaucggcuaccucgggcugcugucccagcgcacccgggacaucuacaucagccgccggcgccggggcaccuucacguggacccugagcgacuccgagggcaacgagacccccgggggcuacugccucacccgcuggaugcugaucgaggcggagcugaagugcuucgggaacacggccguggccaagugcaacgagaagcacgacgaggaguucugcgacaugcuccggcuguucgacuucugcaagcaggccauccgccggcugaaggcccccgcgcagaugagcauccagcucaucaacaaggccgugaacgcccugaucaacgaccagcugaucaugaagaaccaccuccgcgacaucaugggcauccccuacugcaacuacuccaaguacugcuaccugaaccacaccagcaccgggcggaccucccugccccgcugcugccucgucagcaacggcuccuaccugaacgagacgcacuucagcgacgacaucgagcagcaggccgacaacaugaucaccgagaugcugcagaaggaguaccucgaccggcagggcaagaccccgcuggggcugguggaccuguucguguucuccaccagcuucuaccucaucuccaucuuccugcaccuggucaagaucccgacgcaccgccacaucgugggcaagcccugccccaagccccaccggcucaaccacauggggaucugcagcugcggccuguacaagcagccgggggugcccguccgcuggaagcggugaggacuaguuauaagacugacuagcccgaugggccucccaacgggcccuccuccccuccuugcaccgagauuaauaaaaaaaaaaaaaaaaaaaaaaaaaaaaaaaaaaaaaaaaaaaaaaaaaaaaaaaaaaaaaaaaaaaaaaaaaaaaaaaaaaaaaaaaaaaaaaaaaaaa

SEQ ID NO: 27931 - RNA, 1665 nt, Artificial Sequence
  mRNA product Design i-3 (A100) comprising derived and/or modified sequence from LASV(G1180-SLE-2010;Clade IV)__AIT17168__GPCmut4 (opt1)
aggagaaagcuuaccaugggccagaucgugaccuucuuccaggaggucccccacgugaucgaggaggugaugaacaucguccugaucgcccucagcauccuggccgugcugaaggggcucuacaacuucgcgaccugcggccugguggggcugcucaccuuccugcugcucugcggccgcuccugcaccgccagccgguacaagggggucuacgagcugcagacccuggagcucaacauggagacccugaacaugugcaugccgcuguccugcaccaagaacaacagccaccacuacaucauggugggcaacgagaccggccucgagcugacccugacgaacaccuccaucaucaaccacaaguucugcaaccucagcgacgcccacaagaagaaccuguacgaccacgcccugauguccaucaucagcaccuuccaccucuccauccccaacuucaaccaguacgaggccaugagcugcgacuucaacgggggcaagaucuccgugcaguacaaccugagccacuccuacgcgggggacgccgccaaccacugcggcaccgucgccaacggggugcugcagacguucaugcgcauggcguggggcggcagcuacaucgcccucgacuccgggcacggcagcugggacugcaucaugaccuccuaccaguaccugaucauccagaacaccaccugggaggaccacugccaguucagccggcccucccccaucggguaccugggccuccugagccagcgcacgcgggacaucuacaucagccgccggcgccggggcaccuucaccuggacccuguccgacagcgaggggaaggacacgccgggcggguacugccugacccgcuggaugcucaucgaggccgagcugaagugcuucggcaacaccgccguggccaagugcaacgagaagcacgacgaggaguucugcgacaugcugcggcuguucgacuucugcaagcaggcgauccagcgccugaaggcccccgcccagauguccauccagcugaucaacaaggccgucaacgcccucaucaacgaccagcugaucaugaagaaccaccuccgggacaucauggggauccccuacugcaacuacagcaaguacugcuaccucaaccacaccacgaccggcaagaccucccugcccaagugcugccuggugagcaacggcuccuaccucaacgagacccacuucagcgacgacaucgagcagcaggcggacaacaugaucacggagaugcugcagaaggaguacauggagcgccaggggaagacgccccugggccucguggaccuguucgucuucuccaccagcuucuaccugaucuccaucuuccugcaccucgugaagaucccgacccaccggcacaucgugggcaagagcugccccaagccccaccgccugaaccacauggggaucugcuccugcgggcuguacaagcagcccggcgucccggugaaguggaagcggugaggacuaguuauaagacugacuagcccgaugggccucccaacgggcccuccuccccuccuugcaccgagauuaauaaaaaaaaaaaaaaaaaaaaaaaaaaaaaaaaaaaaaaaaaaaaaaaaaaaaaaaaaaaaaaaaaaaaaaaaaaaaaaaaaaaaaaaaaaaaaaaaaaaa

SEQ ID NO: 27932 - RNA, 1665 nt, Artificial Sequence
  mRNA product Design i-3 (A100) comprising derived and/or modified sequence from LASV(G1442-SLE-2011;Clade IV)__AIT17180__GPCmut4 (opt1)
aggagaaagcuuaccaugggccagaucgugaccuucuuccaggaggucccccacgugaucgaggaggugaugaacaucguccugaucgcccucagcauccuggccgugcugaaggggcucuacaacguggcgaccugcggccugaucgggcuggucacguuccuccugcugugcggccgcuccugcaccaccacccucuacaaggggguguacgagcugcagacgcuggagcucaacauggagacccugaacaugugcaugccgcugagcugcaccaagaacaacucccaccacuacauccgggugggcaacgagacgggccucgagcugacccugaccaacaccagcaucaucaaccacaaguucugcaaccucuccgacgcccacaagaagaaccuguacgaccacgcccugaugagcaucaucuccacguuccaccucagcauccccaacuucaaccaguacgaggccauguccugcgacuucaacgggggcaagaucagcguccaguacaaccugucccacagcuacgccggggacgcggccaaccacugcggcaccguggccaacggggugcugcagaccuucaugcgcauggccuggggcggcuccuacaucgcgcucgacagcgggcggggcaacugggacugcaucaugaccuccuaccaguaccugaucauccagaacacgaccugggacgaccacugccaguucagccgccccucccccaucggguaccugggccuccugagccagcggacccgcgacgucuacaucucccggcgccgccggggcaccuucacguggacccugagcgacagcgaggggaaggacaccccgggcggguacugccugacccgguggaugcucaucgaggccgagcugaagugcuucggcaacacggccguggccaagugcaacgagaagcacgacgaggaguucugcgacaugcugcgccucuucgacuucugcaagcaggccauccagcggcugaaggcgcccgcccagauguccauccagcugaucaacaaggccgugaacgcccucaucaacgaccagcugaucaugaagaaccaccuccgcgacaucauggggauccccuacugcaacuacagcaaguacugcuaccugaacaacaccgccaccggcaagaccucccugcccaagugcugccugaucagcaacggcuccuaccucaacgagacgcacuucagcgacgacaucgagcaggaggcggacaacaugaucaccgagaugcugcagaaggaguacauggagcggcaggggaagacgccccugggccucgucgaccuguucguguucuccaccagcuucuaccugaucuccaucuuccugcaccucgugaagaucccgacccaccgccacaucgucggcaagagcugccccaagccccaccggcugaaccacauggggaucugcuccugcgggcuguacaagcagcccggcgugccggugcgcuggaagcggugaggacuaguuauaagacugacuagcccgaugggccucccaacgggcccuccuccccuccuugcaccgagauuaauaaaaaaaaaaaaaaaaaaaaaaaaaaaaaaaaaaaaaaaaaaaaaaaaaaaaaaaaaaaaaaaaaaaaaaaaaaaaaaaaaaaaaaaaaaaaaaaaaaaa

SEQ ID NO: 27933 - RNA, 1665 nt, Artificial Sequence
  mRNA product Design i-3 (A100) comprising derived and/or modified sequence from LASV(G3010-SLE-2013;Clade IV)__AIT17344__GPCmut4 (opt1)
aggagaaagcuuaccaugggccagaucgugaccuucuuccaggaggucccccacgugaucgaggaggugaugaacaucguccugaucgcccucagcauccuggccgugcugaaggggcucuacaacuucgcgaccugcggccugguggggcuggucacguuccuccugcugugcggccgcuccugcaccaccagccucuacaaggggguguacgagcugcagacccuggagcucaacauggagacgcugaacaugugcaugccgcuguccugcaccaagaacaacagccaccacuacaucauggugggcaacgagaccggccucgagcugacgcugaccaacaccuccaucaucaaccacaaguucugcaaccucagcgacgcccacaagaagaaccuguacaaccacgcccugauguccaucaucagcaccuuccaccucuccauccccaacuucaaccaguacgaggccaugagcugcgacuucaacgggggcaagaucuccguccaguacaaccugagccacuccuacgccggggacgcggccagccacugcggcacgguggccaacggggugcugcagaccuucaugcggauggccuggggcggcuccuacaucgcgcucgacagcggguacggcaagugggacugcaucaugaccuccuaccaguaccugaucauccagaacaccacgugggaggaccacugccaguucagccgccccucccccaucggguaccugggccuccugagccagcggacccgcgacaucuacaucagccggcgccgccggggcaccuucaccuggacgcuguccgacagcgaggggaaggacaccccgggcggguacugccugacccgguggaugcucaucgaggccgagcugaagugcuucggcaacaccgccgucgccaagugcaacgagaagcacgacgaggaguucugcgacaugcugcgccucuucgacuucugcaagcaggccauccagcggcugaagacgcccgcgcagauguccauccagcugaucaacaaggccgugaacgcccucaucaacgaccagcugaucaugaagaaccaccuccgcgacaucauggggauccccuacugcaacuacagcaaguacugcuaccugaaccacaccaccaccggcaagacgucccugcccaagugcugccuggugagcaacggcuccuaccucaacgagacccacuucagcgacgacaucgagcagcaggccgacaacaugaucaccgagaugcugcagaaggaguacauggagcggcaggggaagacgccccugggccucgucgaccuguucguguucuccaccagcuucuaccugaucuccaucuuccugcaccucgugaagaucccgacccaccgccacaucgucggcaagagcugccccaagccccaccggcugaaccacauggggaucugcuccugcgggcuguacaagcagcccggcgugccggugcgcuggaagcggugaggacuaguuauaagacugacuagcccgaugggccucccaacgggcccuccuccccuccuugcaccgagauuaauaaaaaaaaaaaaaaaaaaaaaaaaaaaaaaaaaaaaaaaaaaaaaaaaaaaaaaaaaaaaaaaaaaaaaaaaaaaaaaaaaaaaaaaaaaaaaaaaaaaa

SEQ ID NO: 27934 - RNA, 1665 nt, Artificial Sequence
  mRNA product Design i-3 (A100) comprising derived and/or modified sequence from LASV(G502-SLE-2009;Clade IV)__AIT17126__GPCmut4 (opt1)
aggagaaagcuuaccaugggccagaucgugaccuucuuccaggaggucccccacgugaucgaggaggugaugaacaucguccugaucgcccucagcauccuggccgugcugaaggggcucuacaacuucgcgaccugcggccugguggggcugcucacguuccugcugcucugcggccgcuccugcaccaccgggcuguacaagggcgucuacgagcugcagacccucgagcugaacauggagacgcugaacaugugcaugccgcucagcugcaccaagaacaacucccaccacuacaucauggugggcaacgagaccgggcuggagcugacgcucaccaacaccagcaucaucaaccacaaguucugcaaccuguccgacgcccacaagaagaaccuguacgaccacgcccucaugagcaucaucuccaccuuccaccugagcauccccaacuucaaccaguacgaggccauguccugcgacuucaacggcgggaagaucagcgugcaguacaaccugucccacagcuacgccggcgacgcggccgaccacugcgggacggucgccaacggcgugcuccagaccuucaugcggauggccuggggcggguccuacaucgcgcuggacagcggccgcgggcggugggacugcaucaugaccuccuaccaguaccugaucauccagaacaccacgugggaggaccacugccaguucagccgccccucccccaucggcuaccucggccugcugagccagcggacccgcgacaucuacaucucccggcgccgccgggggaccuucaccuggacgcugagcgacagcgagggcaaggacacccccgggggcuacugccucacccgguggaugcugaucgaggccgagcugaagugcuucgggaacaccgccguggccaagugcaacgagaagcacgacgaggaguucugcgacaugcuccgccuguucgacuucugcaagcaggccauccagcggcugaaggcgcccgcccagauguccauccagcucaucaacaaggccgucaacgcccugaucaacgaccagcuggugaugaagaaccaccuccgcgacaucaugggcauccccuacugcaacuacagccgguacugcuaccugaaccacacgaccaccggccgcaccucccugcccaagugcugccucgugagcaacggguccuaccugaacgagacgcacuucagcgacgacaucgagcagcaggccgacaacaugaucaccgagaugcugcagaaggaguacauggagcggcagggcaagaccccgcucgggcuggucgaccuguucguguucuccaccagcuucuaccugaucuccaucuuccuccaccuggugaagaucccgacgcaccgccacaucgucggcaagagcugccccaagccccaccggcugaaccacauggggaucugcuccugcggccucuacaagcagcccggcgugccggugaaguggaagcgcugaggacuaguuauaagacugacuagcccgaugggccucccaacgggcccuccuccccuccuugcaccgagauuaauaaaaaaaaaaaaaaaaaaaaaaaaaaaaaaaaaaaaaaaaaaaaaaaaaaaaaaaaaaaaaaaaaaaaaaaaaaaaaaaaaaaaaaaaaaaaaaaaaaaa

SEQ ID NO: 27935 - RNA, 1665 nt, Artificial Sequence
  mRNA product Design i-3 (A100) comprising derived and/or modified sequence from LASV(G733-SLE-2010;Clade IV)__AIT17154__GPCmut4 (opt1)
aggagaaagcuuaccaugggccagaucgugaccuucuuccaggaggucccccacgugaucgaggaggugaugaacaucguccugaucgcccucagcauccuggccgugcugaaggggcucuacaacuucgcgaccugcggcaucguggggcuggucuccuuccugcuccugugcggccgcagcugcacgaccucccuguacaaggggguguacgagcuccagacccuggagcugaacauggagacccucaacaugugcaugccgcugagcugcaccaagaacaacucccaccacuacaucauggugggcaacgagaccggccuggagcucacccugacgaacaccagcaucaucaaccacaaguucugcaaccuguccgacgcccacaagaagaaccucuacgaccacgcccugaugagcaucaucuccaccuuccaccugagcauccccaacuucaaccaguacgaggccauguccugcgacuucaacgggggcaagaucagcguccaguacaaccucucccacagcuacgccggggacgcggccaaccacugcggcaccaucgccaacggggugcugcagacguucaugcggauggccuggggcggcuccuacaucgcgcuggacagcgggcgcgaccggugggacugcaucaugaccuccuaccaguaccucaucauccagaacaccaccugggaggaccacugccaguucagccgccccucccccaucggcuaccuggggcugcucagccagcggacgcgcgacaucuacaucagccggcgccgccggggcaccuucaccuggacccucuccgacagcgagggcaaggacacgcccgggggcuacugccugacccgguggaugcugaucgaggccgagcucaagugcuucgggaacaccgccguggccaagugcaacgagaagcacgacgaggaguucugcgacaugcugcgccuguucgacuucugcaagcaggccauccagcggcucaaggcgcccgcccagauguccauccagcugaucaacaaggccgucaacgcccugaucaacgaccagcucaucaugaagaaccaccuccgcgacaucaugggcauccccuacugcaacuacagcaaguacugcuaccugaaccacaccacgaccgggaagaccucccugcccaagugcugccuggugagcaacggcuccuaccugaacgagacccacuucagcgacgacaucgagcagcaggccgacaacaugaucacggagaugcuccagaaggaguacauggagcggcagggcaagaccccgcuggggcugguggaccucuucgucuucuccaccagcuucuaccugaucuccaucuuccugcaccuggugaagaucccgacccaccgccacguggucggcaagagcugccccaagccccaccggcucaaccacauggggaucugcuccugcggccuguacgggcagcccggcgugccggugaaguggaagcgcugaggacuaguuauaagacugacuagcccgaugggccucccaacgggcccuccuccccuccuugcaccgagauuaauaaaaaaaaaaaaaaaaaaaaaaaaaaaaaaaaaaaaaaaaaaaaaaaaaaaaaaaaaaaaaaaaaaaaaaaaaaaaaaaaaaaaaaaaaaaaaaaaaaaa

SEQ ID NO: 27936 - RNA, 1665 nt, Artificial Sequence
  mRNA product Design i-3 (A100) comprising derived and/or modified sequence from MOPV/LASV reassortant(IGS-1;Clade IV)__AFY05576__GPCmut4 (opt1)
aggagaaagcuuaccaugggccagaucgugaccuucuuccaggaggucccccacgugaucgaggaggugaugaacaucguccugaucgcccucagcgugcuggccgugcugaaggggcucuacaacuucgcgaccugcggccuggucgggcuggugacguuccuccugcugugcggccgcuccugcaccaccagccucuacaaggggguguacgagcugcagacccuggagcucaacauggagacgcugaacaugugcaugccgcuguccugcaccaagaacaacagccaccacuacaucauggucggcaacgagaccggccucgagcugacgcugaccaacaccuccaucaucaaccacaaguucugcaaccucagcgacgcccacaagaagaaccuguacgaccacgcccugauguccaucaucagcaccuuccaccucuccauccccaacuucaaccaguacgaggccaugagcugcgacuucaacgggggcaagaucuccgugcaguacaaccugagccacuccuacgccggggacgcggccaaccacugcggcacgguggccaacgggguccugcagaccuucaugcggauggccuggggcggcagcuacaucgcgcucgacuccgggcgcggcaacugggacugcaucaugaccagcuaccaguaccugaucauccagaacaccacgugggaggaccacugccaguucucccggcccagccccaucggguaccugggccuccugucccagcgcacccgggacaucuacaucagccgccggcgccggggcaccuucaccuggacgcugagcgacuccgagggggaggacaccccgggcggguacugccugacccgcuggaugcucaucgaggccgagcugaagugcuucggcaacaccgccguggccaagugcaacgagaagcacgacgaggaguucugcgacaugcugcggcuguucgacuucugcaagcaggccauccagcgccugaaggcgcccgcccagaugagcauccagcugaucaacaaggccgugaacgcccucaucaacgaccagcugaucaugaagaaccaccuccgggacaucauggggauccccuacugcaacuacuccaaguacugcuaccucaaccacacgaccaccggccgcaccagccugcccaagugcugccuggucuccaacggcagcuaccucaacgagacgcacuucuccgacgacaucgagcagcaggccgacaacaugaucaccgagaugcugcagaaggaguacauggagcggcaggggaagacgccccugggccucguggaccuguucguguucagcaccuccuucuaccugaucagcaucuuccugcaccucgucaagaucccgacccaccgccacaucguggggaaguccugccccaagccccaccggcugaaccacaugggcaucugcagcugcgggcuguacaagcagcccggcgugccggucaaguggaagcgcugaggacuaguuauaagacugacuagcccgaugggccucccaacgggcccuccuccccuccuugcaccgagauuaauaaaaaaaaaaaaaaaaaaaaaaaaaaaaaaaaaaaaaaaaaaaaaaaaaaaaaaaaaaaaaaaaaaaaaaaaaaaaaaaaaaaaaaaaaaaaaaaaaaaa

SEQ ID NO: 27937 - RNA, 1665 nt, Artificial Sequence
  mRNA product Design i-3 (A100) comprising derived and/or modified sequence from LASV(LM765-SLE-2012;Clade IV)__AIT17814__GPCmut4 (opt1)
aggagaaagcuuaccaugggccagaucgugaccuucuuccaggaggucccccacgugaucgaggaggugaugaacaucguccugaucgcccucagcauccuggccgugcugaaggggcucuacaacuucgcgaccugcggccugguggggcuggucacguuccuccugcugugcggccgcuccugcaccaccagccucuacaaggggguguacgagcugcagacccuggagcucaacauggagacgcugaacaugugcaugccgcuguccugcaccaagaacaacagccaccacuacaucauggugggcaacgagaccggccucgagcugacgcugaccaacaccuccaucaucgaccacaaguucugcaaccucagcgacgcccaccggaagaaccuguacgaccacgcccugauguccaucaucagcaccuuccaccucuccauccccaacuucaaccaguacgaggccaugagcugcgacuucaacgggggcaagaucuccguccaguacaaccugagccacuccuacgccaaggacgcggccgaccacugcgggacgguggccaacggcgugcugcagaccuucaugcgcauggccuggggcgggagcuacaucgcgcucgacuccggccgggggcgcugggacugcaucaugaccagcuaccaguaccugaucauccagaacaccacgugggaggaccacugccaguucucccggcccagccccaucggcuaccuggggcuccugucccagcgcacccgggacaucuacaucagccgccggcgccggggcaccuucaccuggacgcugagcgacuccgagggcaaggacacccccgggggcuacugccugacccgcuggaugcucaucgaggccgagcugaagugcuucgggaacaccgccgucgccaagugcaacgagaagcacgacgaggaguucugcgacaugcugcggcuguucgacuucugcaagcaggccauccagcgccugaaggcgcccgcccagaugagcauccagcugaucaacaaggccgugaacgcccucaucaacgaccagcugaucaugaagaaccaccuccgggacaucaugggcauccccuacugcaacuacuccaaguacugcuaccucaaccacacgaccaccgggaagaccagccugcccaagugcugccugguguccaacggcagcuaccucaacgagacgcacuucuccgacgacaucgagcagcaggccgacaacaugaucaccgagaugcugcagaaggaguacauggagcgccagggcaagaccccgcuggggcucgucgaccuguucguguucagcaccuccuucuaccugaucagcaucuuccugcaccucgugaagaucccgacgcaccggcacaucgucggcaagcccugccccaagccccaccgccugaaccacauggggaucugcuccugcggccuguacaagcagccgggggugcccgugaaguggaagcggugaggacuaguuauaagacugacuagcccgaugggccucccaacgggcccuccuccccuccuugcaccgagauuaauaaaaaaaaaaaaaaaaaaaaaaaaaaaaaaaaaaaaaaaaaaaaaaaaaaaaaaaaaaaaaaaaaaaaaaaaaaaaaaaaaaaaaaaaaaaaaaaaaaaa

SEQ ID NO: 27938 - RNA, 1665 nt, Artificial Sequence
  mRNA product Design i-3 (A100) comprising derived and/or modified sequence from LASV(LM776-SLE-2012;Clade IV)__AIT17824__GPCmut4 (opt1)
aggagaaagcuuaccaugggccagaucgugaccuucuuccaggaggucccccacgugaucgaggaggugaugaacaucguccugaucgcccucagcauccuggccgugcugaaggggcucuacaacuucgcgaccugcggccugguggggcuggucacguuccuccugcugugcggccgcuccugcaccaccagcguguacaaggggguguacgagcuccagacccuggagcugaacauggagacgcucaacaugugcaugccgcuguccugcaccaagaacaacagccaccacuacaucauggucggcaacgagaccggccuggagcucacgcugaccaacaccuccaucaucaaccacaaguucugcaaccugagcgacgcccacaagaagaaccucuacgaccacgcccugauguccaucaucagcaccuuccaccuguccauccccaacuucaaccaguacgaggccaugagcugcgacuucaacgggggcaagaucuccgugcaguacaaccucagccacuccuacgccggggacgcggccaaccacugcggcacgguggccaacgggguccugcagaccuucaugcggauggccuggggcggcagcuacaucgcgcuggacuccgggcacggcaagugggacugcaucaugaccagcuaccaguaccucaucauccagaacaccacgugggaggaccacugccaguucucccgccccagccccaucggguaccugggccugcucucccagcggacccgcgacaucuacaucagccggcgccgccggggcaccuucaccuggacgcucagcgacuccgaggggaaggacaccccgggcggguacugccugacccgguggaugcugaucgaggccgagcucaagugcuucggcaacaccgccguggccaagugcaacgagaagcacgacgaggaguucugcgacaugcugcgccuguucgacuucugcaagcaggccauccagcggcucaaggcgcccgcccagaugagcauccagcugaucaacaaggccgugaacgcccugaucaacgaccagcucaucaugaagaaccaccuccgcgacaucauggggauccccuacugcaacuacuccaaguacugcuaccugaaccacacgaccaccggcaagaccagccugcccaagugcugccuggucuccaacggcagcuaccugaacgagacgcacuucuccgacgacaucgagcagcaggccgacaacaugaucaccgagaugcuccagaaggaguacauggagcggcaggggaagacgccccugggccugguggaccucuucguguucagcaccuccuucuaccugaucagcaucuuccugcaccuggucaagaucccgacccaccgccacaucguggggaaguccugccccaagccccaccggcucaaccacaugggcaucugcagcugcgggcuguacaagcagcccggcgugccgguccgcuggaagcggugaggacuaguuauaagacugacuagcccgaugggccucccaacgggcccuccuccccuccuugcaccgagauuaauaaaaaaaaaaaaaaaaaaaaaaaaaaaaaaaaaaaaaaaaaaaaaaaaaaaaaaaaaaaaaaaaaaaaaaaaaaaaaaaaaaaaaaaaaaaaaaaaaaaa

SEQ ID NO: 27939 - RNA, 1665 nt, Artificial Sequence
  mRNA product Design i-3 (A100) comprising derived and/or modified sequence from LASV(Mad39;Clade IV)__ANH09722__GPCmut4 (opt1)
aggagaaagcuuaccaugggccagaucgugaccuucuuccaggaggucccccacgugaucgaggaggugaugaacaucguccugaucgcccucagcauccuggccgugcugaaggggcucuacaacguggcgaccugcggccugaucgggcuggucacguuccuccugcugugcggccgcuccugcaccaccacccucuacaaggggguguacgagcugcaggcccuggagcucaacauggagacgcugaacaugugcaugccgcugagcugcaccaagaacaacucccaccacuacauccgggugggcaacgagaccggccucgagcugacgcugaccaacaccagccucaucaaccacaaguucugcaaccuguccgacgcccacaagaagaaccuguacgaccacgcccucaugagcaucaucuccaccuuccaccugagcauccccaacuucaaccaguacgaggccauguccugcgacuucaacgacgggaagaucagcguccaguacaaccugucccacacguacgcgggcgacaccgccaaccacugcgggaccguggccaacggcgugcuccagaccuucaugcgcauggccuggggcgggagcuacaucgcgcuggacuccggccgcgggggcugggacugcaucaugacgagcuaccaguaccugaucauccagaacaccaccugggaggaccacugccaguucucccggcccagccccaucggguaccucggccugcugucccagcggacccgcgacaucuacaucagccggcgccgccggggcacguucaccuggacccuguccgacagcgaggggaaggacaccccgggcggguacugccucacgcgguggaugcugaucgaggccgagcugaagugcuucggcaacaccgccgucgccaagugcaacgagaagcacgacgaggaguucugcgacaugcuccgccuguucgacuucugcaagcaggccauccagcggcugaaggcgcccgcccagaugagcauccagcucaucaacaaggccgugaacgcccugaucaacgaccagcugaucaugaagaaccaccuccgcgacaucauggggauccccuacugcaacuacuccaaguacugcuaccugaaccacaccgugaccggcaagacgagccugcccaagugcugccucgucuccaacggcagcuaccugaacgagacccacuucuccgacgacaucgagcagcaggccgacaacaugaucaccgagaugcugcagaaggaguacauggagcggcaggggaagacgccccucggccugguggaccuguucguguucagcaccuccuucuaccugaucagcaucuuccuccaccuggucaagaucccgacccaccgccacgugguggggaagcccugccccaagccccaccggcugaaccacaugggcaucugcuccugcggguucuacaagcagccgggcguccccgugcgcuggaagcggugaggacuaguuauaagacugacuagcccgaugggccucccaacgggcccuccuccccuccuugcaccgagauuaauaaaaaaaaaaaaaaaaaaaaaaaaaaaaaaaaaaaaaaaaaaaaaaaaaaaaaaaaaaaaaaaaaaaaaaaaaaaaaaaaaaaaaaaaaaaaaaaaaaaa

SEQ ID NO: 27940 - RNA, 1665 nt, Artificial Sequence
  mRNA product Design i-3 (A100) comprising derived and/or modified sequence from LASV(Z0947-SLE-2011;Clade IV)__AIT17840__GPCmut4 (opt1)
aggagaaagcuuaccaugggccagaucgugaccuucuuccaggaggucccccacgugaucgaggaggugaugaacaucguccugaucgcccucagcauccuggccgugcugaaggggcucuacaacuucgcgaccugcggccugguggggcuggucacguuccuccugcugugcggccgcuccugcaccaucagccucuacaaggggguguacgagcugcagacccuggagcucaacauggagacccugaacaugugcaugccgcuguccugcaccaagaacaacagccaccacuacaucauggugggcaacgagaccggccucgagcugacccugacgaacaccuccaucaucaaccacaaguucugcaaccucagcgacgcccacaagaagaaccuguacgaccacgcccugauguccaucaucagcaccuuccaccucuccauccccaacuucaaccaguacgaggccaugagcugcgacuucaacgggggcaagaucuccguccaguacaaccugagccacuccuacgccggggacgcggccaaccacugcggcaccguggccaacggggugcugcagacguucaugcggauggccuggggcggcagcuacaucgcgcucgacuccgggcgcgaccggugggacugcaucaugaccagcuaccaguaccugaucauccagaacaccaccugggaggaccacugccaguucucccgccccagccccaucggcuaccuggggcuccugucccagcggacgcgcgacaucuacaucagccggcgccgccggggcaccuucaccuggacccugagcgacuccgagggcaaggacacgcccgggggcuacugccugacccgguggaugcucaucgaggccgagcugaagugcuucgggaacaccgccgucgccaagugcaacgagaagcacgacgaggaguucugcgacaugcugcgccucuucgacuucugcaagcaggccauccagcggcugaaggcgcccgcccagaugagcauccagcugaucaacaaggccgugaacgcccucaucaacgaccagcugaucaugaagaaccaccuccgcgacaucaugggcauccccuacugcaacuacuccaaguacugcuaccugaaccacaccacgaccgggaagaccagccugcccaagugcugccugguguccaacggcagcuaccucaacgagacccacuucuccgacgacaucgagcagcaggccgacaacaugaucacggagaugcugcagaaggaguacauggagcggcagggcaagaccccgcuggggcucgucgaccuguucguguucagcaccuccuucuaccugaucagcaucuuccugcaccucgugaagaucccgacccaccgccacaucgucggcaagcccugccccaagccccaccggcugaaccacauggggaucugcuccugcggccuguacaagcagccgggggugcccgugaaguggaagcgcugaggacuaguuauaagacugacuagcccgaugggccucccaacgggcccuccuccccuccuugcaccgagauuaauaaaaaaaaaaaaaaaaaaaaaaaaaaaaaaaaaaaaaaaaaaaaaaaaaaaaaaaaaaaaaaaaaaaaaaaaaaaaaaaaaaaaaaaaaaaaaaaaaaaa

SEQ ID NO: 27941 - RNA, 1665 nt, Artificial Sequence
  mRNA product Design i-3 (A100) comprising derived and/or modified sequence from LASV(Josiah;Clade IV)__NP_694870__GPCmut4 (opt1)
aggagaaagcuuaccaugggccagaucgugaccuucuuccaggaggucccccacgugaucgaggaggugaugaacaucguccugaucgcccucagcgugcuggccgugcugaaggggcucuacaacuucgcgaccugcggccuggucgggcuggugacguuccuccugcugugcggccgcuccugcaccaccagccucuacaaggggguguacgagcugcagacccuggagcucaacauggagacgcugaacaugugcaugccgcuguccugcaccaagaacaacagccaccacuacaucauggucggcaacgagaccggccucgagcugacccugacgaacaccuccaucaucaaccacaaguucugcaaccucagcgacgcccacaagaagaaccuguacgaccacgcccugauguccaucaucagcaccuuccaccucuccauccccaacuucaaccaguacgaggccaugagcugcgacuucaacgggggcaagaucuccgugcaguacaaccugagccacuccuacgccggggacgcggccaaccacugcggcaccguggccaacgggguccugcagacguucaugcggauggccuggggcggcagcuacaucgcgcucgacuccgggcgcggcaacugggacugcaucaugaccagcuaccaguaccugaucauccagaacaccaccugggaggaccacugccaguucucccggcccagccccaucggguaccugggccuccugucccagcgcacgcgggacaucuacaucagccgccggcgccggggcaccuucaccuggacccugagcgacuccgaggggaaggacacgccgggcggguacugccucacccgcuggaugcugaucgaggccgagcugaagugcuucggcaacaccgccguggccaagugcaacgagaagcacgacgaggaguucugcgacaugcuccggcuguucgacuucugcaagcaggccauccagcgccugaaggcgcccgcccagaugagcauccagcucaucaacaaggccgugaacgcccugaucaacgaccagcugaucaugaagaaccaccuccgggacaucauggggauccccuacugcaacuacuccaaguacugcuaccugaaccacaccacgaccggccgcaccagccugcccaagugcugccucgucuccaacggcagcuaccugaacgagacccacuucuccgacgacaucgagcagcaggccgacaacaugaucacggagaugcugcagaaggaguacauggagcggcaggggaagaccccgcucggccugguggaccuguucguguucagcaccuccuucuaccugaucagcaucuuccuccaccuggucaagauccccacccaccgccacaucguggggaaguccugccccaagccccaccggcugaaccacaugggcaucugcagcugcgggcucuacaagcagccgggcgugcccgucaaguggaagcgcugaggacuaguuauaagacugacuagcccgaugggccucccaacgggcccuccuccccuccuugcaccgagauuaauaaaaaaaaaaaaaaaaaaaaaaaaaaaaaaaaaaaaaaaaaaaaaaaaaaaaaaaaaaaaaaaaaaaaaaaaaaaaaaaaaaaaaaaaaaaaaaaaaaaa

SEQ ID NO: 27942 - RNA, 1662 nt, Artificial Sequence
  mRNA product Design i-3 (A100) comprising derived and/or modified sequence from LASV(LP;Clade I)__AAF86701__GPCmut4 (opt1)
aggagaaagcuuaccaugggccagaucaucaccuucuuccaggaggugccccacgucaucgaggaggugaugaacaucgugcugaucgcccucagccugcuggccauccucaaggggcuguacaacaucgcgaccugcggcaucaucgggcuggucgccuuccucuuccugugcggcaaguccugcagccugacgcucaagggcggguacgagcugcagacccuggagcucaacauggagacccugaacaugugcaugccgcuguccugcaccaagaacagcucccaccacuacauccgcgugggcaacgagacggggcucgagcugacccugaccaacaccagcaucaucaaccacaaguucugcaaccucuccgacgcccacaagaagaaccuguacgaccacgcccugaugagcaucaucuccacguuccaccucagcauccccaacuucaaccaguacgaggccauguccugcgacuucaacggcgggaagaucagcgugcaguacaaccugucccacagcuacgcgggcgacgccgccgagcacugcgggaccgucgccaacggcgugcugcagaccuucaugcggauggcguggggcgggcgcuacaucgcccucgacuccggcaaggggaacugggacugcaucaugaccagcuaccaguaccugaucauccagaacacgaccugggaggaccacugccaguucucccggcccagccccaucggcuaccugggccuccugucccagcgcacccgggacaucuacaucagccgccggcgccgggggaccuucacguggacccugagcgacuccgagggcaacgagacccccgggggcuacugccucacccgcuggaugcugaucgaggccgagcugaagugcuucgggaacacggccguggccaagugcaacgagaagcacgacgaggaguucugcgacaugcuccggcuguucgacuucugcaagcaggcgauccgccggcugaaggccccggcccagaugagcauccagcucaucaacaaggccgucaacgcccugaucaacgaccagcugaucaugaagaaccaccuccgcgacaucaugggcauccccuacugcaacuacuccaaguacugcuaccugaaccacaccagcuccggccggaccagccugcccaagugcugccucaucuccaacgggagcuaccugaacgagacccaguucuccgacgacaucgagcagcaggcggacaacaugaucacggagaugcugcagaaggaguacaucgagcgccagggcaagaccccgcucgggcugguggacaucuucaucuucagcaccuccuucuaccugaucagcaucuuccugcaccucaucaagauccccacccaccggcacaucgugggcaagcccugccccaagccgcaccgccugaaccacaugggggucugcuccugcggccuguacaagcaccccggcgugcccacgaaguggaagcggugaggacuaguuauaagacugacuagcccgaugggccucccaacgggcccuccuccccuccuugcaccgagauuaauaaaaaaaaaaaaaaaaaaaaaaaaaaaaaaaaaaaaaaaaaaaaaaaaaaaaaaaaaaaaaaaaaaaaaaaaaaaaaaaaaaaaaaaaaaaaaaaaaaaa

SEQ ID NO: 27943 - RNA, 1662 nt, Artificial Sequence
  mRNA product Design i-3 (A100) comprising derived and/or modified sequence from LASV(803213;Clade II)__AAF86703__GPCmut4 (opt1)
aggagaaagcuuaccaugggccagaucaucaccuucuuccaggaggugccccacgucaucgaggaggugaugaacaucgugcugaucgcccucagccugcuggccauccucaaggggaucuacaacgucgcgaccugcggccuguucgggcugaucuccuuccuccugcugugcggccgcagcugcuccgugacguacaaggggguguacgagcuccagacccuggagcugaacauggccaaccucaacaugugcaugccgcugagcugcaccaagaacaacucccaccacuacaucauggucggcaacgagaccggccuggagcucacgcugaccaacaccagcaucaucaaccacaaguucugcaaccuguccgacgcccacaagaagaaccucuacgaccacgcccugaugagcaucaucuccaccuuccaccugagcauccccaacuucaaccaguacgaggccauguccugcgacuucaacgggggcaagaucagcgugcaguacaaccucucccacagcuucgcgguggacgccgccaaccacugcgggacgaucgccaacggcguccugcagaccuucaugcggauggcguggggcggguccuacaucgcccuggacagcggcaaggggaacugggacugcaucaugaccuccuaccaguaccucaucauccagaacaccacgugggaggaccacugccaguucagccgccccucccccaucggcuaccuggggcugcucagccagcggacccgcgacaucuacaucagccggcgccggcgcggcaccuucaccuggacgcuguccgacagcgagggcaacgaggcccccgggggcuacugccugacccgguggaugcucaucgaggccgagcugaagugcuucgggaacaccgccguggcgaagugcaacgagaagcacgacgaggaguucugcgacaugcugcgccucuucgacuucugcaagcaggccaucaagcggcugaagaccccggcccagauguccauccagcugaucaacaaggccgugaacgcccucaucaacgaccagcugaucaugaagaaccaccuccgcgacaucaugggcauccccuacugcaacuacagccgguacugcuaccugaaccacacggucaccgggaagaccucccugccccgcugcugccuggugagcaacggcuccuaccucaacgagacccacuucagcgacgacaucgagcagcaggcggacaacaugaucacggagaugcugcagaaggaguacauggaccggcagggcaagaccccgcuggggcucguggaccuguucgucuucuccaccagcuucuaccugaucuccaucuuccugcaccucgugaagauccccacccaccgccacaucgugggcaagcccugccccaagccgcaccggcugaaccacauggggaucugcagcugcggccuguacaagcaccccgggguccccgugaaguggaagcgcugaggacuaguuauaagacugacuagcccgaugggccucccaacgggcccuccuccccuccuugcaccgagauuaauaaaaaaaaaaaaaaaaaaaaaaaaaaaaaaaaaaaaaaaaaaaaaaaaaaaaaaaaaaaaaaaaaaaaaaaaaaaaaaaaaaaaaaaaaaaaaaaaaaaa

SEQ ID NO: 27944 - RNA, 1662 nt, Artificial Sequence
  mRNA product Design i-3 (A100) comprising derived and/or modified sequence from LASV(GA391;Clade III)__CAA36645__GPCmut4 (opt1)
aggagaaagcuuaccaugggccagaucgugaccuucuuccaggaggucccccacgugaucgaggaggugaugaacaucguccugaucgcccucagcauccuggccauccugaaggggcucuacaacguggcgaccugcggccugaucgggcuggugacguuccuccugcuguccggccgcagcugcucccucaucuacaaggggaccuacgagcugcagacccuggagcucaacauggagacccugaacaugugcaugccgcugagcugcacgaagaacaacucccaccacuacauccgggucggcaacgagaccggccucgagcugacccugaccaacacgagcauccucaaccacaaguucugcaaccuguccgacgcccacaagcgcaaccuguacgaccacagccucauguccaucaucagcaccuuccaccuguccauccccaacuucaaccaguacgaggccaugagcugcgacuucaacgggggcaagaucaccgugcaguacaaccugucccacagcuucgccguggacgccgcggggcacugcggcacccucgccaacgggguccugcagacguucaugcggauggccuggggcggcuccuacaucgcccuggacagcgggcgcggcaacugggacugcaucaugaccuccuaccaguaccucaucauccagaacaccaccugggacgaccacugccaguucagccggcccucccccaucggguaccugggccugcucagccagcgcacgcgggacaucuacaucagccgccggcgccggggcaccuucaccuggacccuguccgacagcgaggggaacgagacgccgggcggguacugccugacccgcuggaugcucaucgaggcggagcugaagugcuucggcaacaccgccguggccaagugcaacgagaagcacgacgaggaguucugcgacaugcugcggcuguucgacuucugcaagcaggccauccgccggcugaagacccccgcccagauguccauccagcugaucaacaaggcggugaacgcccucaucaacgaccagcugaucaugaagaaccaccuccgcgacaucauggggauccccuacugcaacuacagccgguacugcuaccucaaccacacguccaccggcaagaccagccugccccgcugcugccugaucuccaacggcagcuaccucaacgagaccaaguucuccgacgacaucgagcagcaggccgacaacaugaucacggagaugcugcagaaggaguacaucgaccggcaggggaagaccccgcugggccuggucgaccucuucguguucagcaccuccuucuaccugaucagcaucuuccugcaccucgugaagauccccacccaccgccacaucgucgggaagcccugccccaagccgcaccggcugaaccacaugggcaucugcuccugcgggcuguacaagcagcccggcgugcccgugcgcuggaagcgcugaggacuaguuauaagacugacuagcccgaugggccucccaacgggcccuccuccccuccuugcaccgagauuaauaaaaaaaaaaaaaaaaaaaaaaaaaaaaaaaaaaaaaaaaaaaaaaaaaaaaaaaaaaaaaaaaaaaaaaaaaaaaaaaaaaaaaaaaaaaaaaaaaaaa

SEQ ID NO: 27945 - RNA, 1665 nt, Artificial Sequence
  mRNA product Design i-3 (A100) comprising derived and/or modified sequence from LASV(AV;Clade V)__CCA30314__GPCmut4 (opt1)
aggagaaagcuuaccaugggccagaucgugaccuucuuccaggaggucccccacgugaucgaggaggugaugaacaucguccugaucgcccucagcauccuggccgugcugaaggggcucuacaacaucgcgaccugcggccugaucgggcugaucacguuccuccugcugugcggccgcuccugcagcuccaaccucuacaaggggguguacgagcugcagagccuggaccucaacauggagacccugaacaugugcaugccgcuguccugcaccaagaacaacagccaccacuacauccgggucggcaacgacaccggccucgagcugacgcugaccaacaccuccauccucaaccacaaguucugcaaccugagcgacgcccacaagaaggaccuguacgaccacgcccucauguccaucaucagcaccuuccaccuguccauccccaacuucaaccaguacgaggccaugagcugcgacuucaacgggggcaagaucuccgugcaguacaaccugagccacuccuacgccaucgacgcggccaaccacugcgggacgguggccaacggcauccuccagaccuucaugcgcauggccuggggcgggagcuacaucgcgcuggacuccggccgggggaacugggacugcaucaugaccagcuaccaguaccugaucauccagaacaccacgugggagaaccacugccaguucucccgccccagccccaucggcuaccucgggcugcugagccagcggacccgcgacaucuacaucucccggcgccggcgcggcaccuucaccuggacgcucagcgacuccgagggcaacgccacccccgggggcuacugccugacccgguggaugcugaucgaggccgagcucaagugcuucgggaacaccgccgucgccaagugcaacgagaagcacgacgaggaguucugcgacaugcugcgccuguucgacuucugcaagcaggcgaucagccggcucaaguccccggcccagaugagcauccagcugaucaacaaggccgugaacgcccugaucaacgaccagcucaucaugaagaaccaccuccgcgacaucaugggcauccccuacugcaacuacuccaaguacugcuaccugaaccacacgaucaccgggaagaccagccugcccaagugcugccugguguccaacggcagcuaccugaacgagacccacuucuccgacgacaucgagcagcaggccgacaacaugaucacggagaugcuccagaaggaguacauggagcggcagggcaagaccccgcuggggcuggucgaccuguucguguucagcaccuccuucuaccucaucagcaucuuccugcgccuggugaagauccccacccaccggcacaucgucggcaagcccugccccaagccgcaccgccucaaccacauggggaucugcuccugcggccuguacaagcagcccggggugcccgugcgguggaagcgcugaggacuaguuauaagacugacuagcccgaugggccucccaacgggcccuccuccccuccuugcaccgagauuaauaaaaaaaaaaaaaaaaaaaaaaaaaaaaaaaaaaaaaaaaaaaaaaaaaaaaaaaaaaaaaaaaaaaaaaaaaaaaaaaaaaaaaaaaaaaaaaaaaaaa

SEQ ID NO: 27946 - RNA, 1662 nt, Artificial Sequence
  mRNA product Design i-3 (A100) comprising derived and/or modified sequence from LASV(Togo/2016/7082;Clade VI)__AMR44577__GPCmut4 (opt1)
aggagaaagcuuaccaugggccagaucaucaccuucuuccaggaggugccccacgucaucgaggaggugaugaacaucgugcugaucgcccucagccugcuggccauccucaagggggucuacaacguggcgaccugcggcaucaucgggcuggugacguuccuguuccucugcggccgcuccugcagccugaucuacaagggguccuacgagcugcagacccucgagcugaacauggagacccugaacaugugcaugccgcucagcugcaccaagaacuccagccaccacuacauccgggucggcaacgagacgggccuggagcugacccucaccaacaccuccaucaucaaccacaaguucugcaaccugagcgacgcccacaagcgcaaccuguacgaccacgcccucauguccauccugagcacguuccaccuguccauccccaacuucaaccaguacgaggccaugagcugcgacuucaacgggggcaagaucuccgugcaguacaaccucagccacgccuacgcgguggacgccgccgagcacugcgggaccgucgccaacggcgugcugcagaccuucaugcggauggcguggggcggguccuacaucgcccuggacagcggccgcgggaacugggacugcaucaugaccuccuaccaguaccucaucauccagaacacgaccugggaggaccacugccaguucagccggcccucccccaucggcuaccuggggcugcucagccagcgcacccgggacaucuacaucagccgccggcgccggggcaccuucacguggacccuguccgacagcgagggcaacgagacccccgggggcuacugccugacccgcuggaugcucaucgaggccgagcugaagugcuucgggaacacggccguggccaagugcaacgagaagcacgacgaggaguucugcgacaugcugcggcuguucgacuucugcaagcaggcgauccagcgccugaaguccccggcccagaugagcauccagcugaucaacaaggccgucaacgcccucaucaacgaccagcugaucaugaagaaccaccuccgggacaugaugggcauccccuacugcaacuacuccaaguacugcuaccucaaccacaccagcuccgggcgcaccagccugcccaagugcugccugguguccaacggcagcuaccucaacgagacccacuucuccgacgacaucgagcagcaggccgacaacaugaucacggagaugcugcagaaggaguacaucgaccggcagggcaagaccccgcuggggcucguggaccuguucgucuucagcaccuccuucuaccugaucagcaucuuccugcaccucaucaagauccccacccaccgccacaucgugggcaagcccugccccaagccgcaccggcugaaccacauggggaucugcuccugcggccuguacaagcagcccggggugcccacgcgcuggaagcggugaggacuaguuauaagacugacuagcccgaugggccucccaacgggcccuccuccccuccuugcaccgagauuaauaaaaaaaaaaaaaaaaaaaaaaaaaaaaaaaaaaaaaaaaaaaaaaaaaaaaaaaaaaaaaaaaaaaaaaaaaaaaaaaaaaaaaaaaaaaaaaaaaaaa

SEQ ID NO: 27947 - RNA, 1662 nt, Artificial Sequence
  mRNA product Design i-3 (A100) comprising derived and/or modified sequence from LASV(KAK-428;Clade n.d. (VII))__ANH09740__GPCmut4 (opt1)
aggagaaagcuuaccaugggccagaucgugaccuucuuccaggaggucccccacgugaucgaggaggugaugaacaucguccugaucgcccucagccugcuggccauccucaaggggcuguacaacuucgcgaccugcggcgugaucgggcugaucacguuccuccugcugugcggccgcuccugcagcgccaccuacaaggggcaguacgagcuccagacccuggagcugaacauggagucccucaacaugugcaugccgcugagcugcaccaagaacaacucccaccacuacauccgggccggcaacaacacgggccuggagcucacccugaccaacaccagcaucaucucccacaaguucugcaaccugagcgacgcccacaagaagaaccucuacgaccacacgcugauguccaucaucaccaccuuccaccugagcauccccaacuucaaccaguacgaggccauguccugcgacuucaacgggggcaagaucagcauccaguacaaccucucccacagcuacgcgggggacgccgcccagcacugcggcaccguggccaacgggguccugcagacguucaugcgcauggcguggggcggcuccuaccuggcccucgacagcgggcggcgcggcugggacugcaucaucuccagcuaccaguaccugaucauccagaacaccaccugggacgaccacugccaguucucccggcccagccccaucggguaccugggcuucgugagccagaagacccgcgacaucuacaucucccggcgccggcgcggcacguucaccuggacccucagcgacuccgaggggcacgacaugccgggcggguacugccugacccgguggaugcugaucgaggccgaccucaagugcuucggcaacacggccguggccaagugcaacgagaagcacgacgaggaguucugcgacauguggcgccuguucgacuucugcaagcaggcgauccagcggcugaaggcccccgcccagaugaacauccagcucaucaacaaggccgucaacgcccugaucaacgaccagcugaugaugaagaaccaccuccgcgacaucauggggauccccuacugcaacuacagcaaguucugcuaccugaacaacaccaccaccggccggacgucccugccccgcugcugccucaucagcaacggcuccuaccugaacgagacccacuucagcgacgacaucgagcagcaggcggacaacaugaucaccgagaugcugcagaaggaguacauggaccggcaggggaagaccccgcucggccugguggaccuguucguguucuccacgagcuucuaccucaucaccaucuuccugcaccuggucaagauccccacccaccgccacaucguggggaagcccugccccaagccgcaccggcugaaccacaugggcaucugcuccugcgggcucuacaagcagcccggcgugcccguccgcuggaagcggugaggacuaguuauaagacugacuagcccgaugggccucccaacgggcccuccuccccuccuugcaccgagauuaauaaaaaaaaaaaaaaaaaaaaaaaaaaaaaaaaaaaaaaaaaaaaaaaaaaaaaaaaaaaaaaaaaaaaaaaaaaaaaaaaaaaaaaaaaaaaaaaaaaaa

SEQ ID NO: 27948 - RNA, 1662 nt, Artificial Sequence; identical to SEQ ID NO: 27942
  mRNA product Design i-3 (A100) comprising derived and/or modified sequence from LASV(Pinneo-NIG-1969;Clade I)__AIT17836__GPCmut4 (opt1)

SEQ ID NO: 27949 - RNA, 1662 nt, Artificial Sequence
  mRNA product Design i-3 (A100) comprising derived and/or modified sequence from LASV(ISTH0009-NIG-2011;Clade II)__AIT17404__GPCmut4 (opt1)
aggagaaagcuuaccaugggccagaucaucaccuucuuccaggaggugccccacgucaucgaggaggugaugaacaucgugcugaucgcccucagccugcuggccauccucaaggggaucuacaacgucgcgaccugcggccuguucgggcugguguccuuccuccugcugugcggccgcagcugcuccacgaccuacaaggggguguacgagcuccagacccuggagcuggacauggccagccucaacaugugcaugccgcuguccugcaccaagaacaacagccaccacuacaucauggucggcaacgagacgggccuggagcucacccugaccaacaccuccaucaucaaccacaaguucugcaaccugagcgacgcccacaagaagaaccucuacgaccacgcccugauguccaucaucagcacguuccaccuguccauccccaacuucaaccaguacgaggccaugagcugcgacuucaacgggggcaagaucuccgugcaguacaaccucagccacgcguacgccguggacgccgccaaccacugcgggaccaucgcgaacggcguccugcagaccuucaugcggauggccuggggcggguccuacaucgcccuggacagcggcaagggguccugggacugcaucaugaccagcuaccaguaccucaucauccagaacacgaccugggaggaccacugccaguucucccgccccagccccaucggcuaccuggggcugcucagccagcggacccgcgacaucuacaucucccggcgccggcgcggcaccuucacguggacccugagcgacuccgagggcaacgagacccccgggggcuacugccugacccgguggaugcucaucgaggccgagcugaagugcuucgggaacacggccguggcgaagugcaacgagaagcacgacgaggaguucugcgacaugcugcgccucuucgacuucugcaagcaggccauccggcgccugaagaccccggcccagaugagcauccagcugaucaacaaggccgugaacgcccucaucaacgaccagcugaucaugaagaaccaccuccgggacaucaugggcauccccuacugcaacuacuccaaguacugcuaccugaaccacaccgucaccgggaagacgagccugccccgcugcugccugguguccaacggcagcuaccucaacgagacccacuucuccgacgacaucgagcagcaggcggacaacaugaucaccgagcugcugcagaaggaguacauggaccggcagggcaagaccccgcucgggcugguggaccuguucgucuucagcacguccuucuaccugaucagcaucuuccuccaccugaucaagauccccacccaccgccacaucaccggcaagcccugccccaagccgcaccggcugaaccacauggggaucugcuccugcggccucuacaagcaccccggggugcccgugaaguggaagcgcugaggacuaguuauaagacugacuagcccgaugggccucccaacgggcccuccuccccuccuugcaccgagauuaauaaaaaaaaaaaaaaaaaaaaaaaaaaaaaaaaaaaaaaaaaaaaaaaaaaaaaaaaaaaaaaaaaaaaaaaaaaaaaaaaaaaaaaaaaaaaaaaaaaaa

SEQ ID NO: 27950 - RNA, 1662 nt, Artificial Sequence
  mRNA product Design i-3 (A100) comprising derived and/or modified sequence from LASV(ISTH2010-NIG-2012;Clade II)__AIT17482__GPCmut4 (opt1)
aggagaaagcuuaccaugggccagaucaucaccuucuuccaggaggugccccacgucaucgaggaggugaugaacaucgugcugaucgcccucagccugcuggccauccucaaggggaucuacaacgucgcgaccugcggccuguucgggcugguguccuuccuccugcugugcggccgcagcugcuccacgaccuacaaggggguguacgagcuccagacccuggagcuggacauggccagccucaacaugugcaugccgcuguccugcaccaagaacaacagccaccacuacaucauggucggcaacgagacgggccuggagcucacccugaccaacaccuccaucaucaaccacaaguucugcaaccugagcgacgcccacaagaagaaccucuacgaccacgcccugauguccaucaucagcacguuccaccuguccauccccaacuucaaccaguacgaggccaugagcugcgacuucaacgggggcaagaucuccgugcaguacaaccucagccacgcguacgccguggacgccgccaaccacugcgggaccaucgcgaacggcguccugcagaccuucaugcggauggccuggggcggguccuacaucgcccuggacagcggcaagggguccugggacugcaucaugaccagcuaccaguaccucaucauccagaacaucacgugggaggaccacugccaguucucccgccccagccccaucggcuaccuggggcugcucagccagcggacccgcgacaucuacaucucccggcgccggcgcggcaccuucaccuggacgcugagcgacuccgagggcaacgagacccccgggggcuacugccugacccgguggaugcucaucgaggccgagcugaagugcuucgggaacaccgccguggcgaagugcaacgagaagcacgacgaggaguucugcgacaugcugcgccucuucgacuucugcaagcaggccauccggcgccugaagacgccggcccagaugagcauccagcugaucaacaaggccgugaacgcccucaucaacgaccagcugaucaugaagaaccaccuccgggacaucaugggcauccccuacugcaacuacuccaaguacugcuaccugaaccacaccgucaccgggaagaccagccugccccgcugcugccugguguccaacggcagcuaccucaacgagacgcacuucuccgacgacaucgagcagcaggcggacaacaugaucaccgagcugcugcagaaggaguacaucgaccggcagggcaagaccccgcucgggcugguggaccuguucgucuucagcaccuccuucuaccugaucagcaucuuccuccaccuggugaagauccccacgcaccgccacguggucggcaagcccugccccaagccgcaccggcugaaccacauggggaucugcuccugcggccucuacaagcaccccggggugcccgugaaguggaagcgcugaggacuaguuauaagacugacuagcccgaugggccucccaacgggcccuccuccccuccuugcaccgagauuaauaaaaaaaaaaaaaaaaaaaaaaaaaaaaaaaaaaaaaaaaaaaaaaaaaaaaaaaaaaaaaaaaaaaaaaaaaaaaaaaaaaaaaaaaaaaaaaaaaaaa

SEQ ID NO: 27951 - RNA, 1662 nt, Artificial Sequence
  mRNA product Design i-3 (A100) comprising derived and/or modified sequence from LASV(Lassa virus/H.sapiens-wt/NGA/2015/ISTH_0543;Clade II)__AVO03639__GPCmut4 (opt1)
aggagaaagcuuaccaugggccagaucaucaccuucuuccaggaggugccccacgucaucgaggaggugaugaacaucgugcugaucgcccucagccugcuggccauccucaaggggaucuacaacgucgcgaccugcggccuguucgggcugguguccuuccuccugcugugcggccgcagcugcuccacgaccuacaaggggguguacgagcuccagacccuggagcuggacauggccaaccucaacaugugcaugccgcugagcugcaccaagaacaacucccaccacuacaucauggucggcaacgagacgggccuggagcucacccugaccaacaccagcaucaucaaccacaaguucugcaaccuguccgacgcccacaagaagaaccucuacgaccacgcccugaugagcaucaucuccacguuccaccugagcauccccaacuucaaccaguacgaggccauguccugcgacuucaacgggggcaagaucagcgugcaguacaaccucucccacaccuacgcgguggacgccgccaaccacugcgggaccaucgccaacggcguccugcagaccuucaugcggauggcguggggcgggagcuacaucgcccuggacuccggcaaggggagcugggacugcaucaugacguccuaccaguaccucgugauccagaacaccaccugggaggaccacugccaguucagccgccccucccccaucggcuaccuggggcugcucagccagcggacccgcgacaucuacaucagccggcgccggcgcggcacguucaccuggacccuguccgacagcgagggcaacgagacccccgggggcuacugccugacgcgguggaugcucaucgaggccgagcugaagugcuucgggaacaccgccguggccaagugcaacgagaagcacgacgaggaguucugcgacaugcugcgccucuucgacuucugcaagcaggcgauccggcgccugaagaccccggcccagauguccauccagcugaucaacaaggccgucaacgcccucaucaacgaccagcugaucaugaagaaccaccuccgggacaucaugggcauccccuacugcaacuacagcaaguacugcuaccugaaccacaccgugacggggaagaccucccugccccgcugcugccuggugagcaacggcuccuaccucaacgagacccacuucagcgacgacaucgagcagcaggccgacaacaugaucaccgagcugcugcagaaggaguacaucgaccggcagggcaagacgccgcucgggcuggucgaccuguucguguucuccaccagcuucuaccugaucuccaucuuccuccaccuggugaagauccccacccaccgccacaucaccggcaagcccugccccaagccgcaccggcugaaccacauggggaucugcagcugcggccucuacaagcaccccgggguccccgugaaguggaagcgcugaggacuaguuauaagacugacuagcccgaugggccucccaacgggcccuccuccccuccuugcaccgagauuaauaaaaaaaaaaaaaaaaaaaaaaaaaaaaaaaaaaaaaaaaaaaaaaaaaaaaaaaaaaaaaaaaaaaaaaaaaaaaaaaaaaaaaaaaaaaaaaaaaaaa

SEQ ID NO: 27952 - RNA, 1662 nt, Artificial Sequence
  mRNA product Design i-3 (A100) comprising derived and/or modified sequence from LASV(Lassa virus/H.sapiens-wt/NGA/2016/ISTH_0009;Clade II)__AVO03571__GPCmut4 (opt1)
aggagaaagcuuaccaugggccagaucaucaccuucuuccaggaggugccccacgucaucgaggaggugaugaacaucgugcugaucgcccucagccugcuggccauccucaaggggaucuacaacgucgcgaccugcggccugcuggggcucguguccuuccugcugcucugcggccgcagcugcuccacgaccuacaaggggguguacgagcugcagacccuggagcucgacauggccagccugaacaugugcaugccgcuguccugcaccaagaacaacagccaccacuacaucauggucggcaacgagacgggccucgagcugacccugaccaacaccuccaucaucaaccacaaguucugcaaccucagcgacgcccacaagaagaaccuguacgaccacgcccugauguccaucaucagcacguuccaccucuccauccccaacuucaaccaguacgaggccaugagcugcgacuucaacgggggccggaucuccgugcaguacaaccugagccacuccuacgcgguggacgccgccaaccacugcgggaccaucgccaacggcguccugcagaccuucaugcgcauggcguggggcgggagcuacaucgcccucgacuccggcaaggggagcugggacugcaucaugaccuccuaccaguaccugaucauccagaacacgaccugggaggaccacugccaguucagccggcccagccccaucggcuaccuggggcuccugucccagcgcacccgggacaucuacaucagccgccggcgccggggcaccuucacguggacccuguccgacagcgagggcaacgagacccccgggggcuacugccucacccgcuggaugcugaucgaggccgagcugaagugcuucgggaacacggccguggccaagugcaacgagaagcacgacgaggaguucugcgacaugcuccggcuguucgacuucugcaagcaggcgauccgccggcugaagaccccggcccagauguccauccagcucaucaacaaggccgugaacgcccugaucaacgaccagcugaucaugaagaaccaccuccgcgacaucaugggcauccccuacugcaacuacagcaaguacugcuaccugaaccacaccgucaccgggaagacgucccugccccggugcugccucgugagcaacggcuccuaccugaacgagacccacuucagcgacgacaucgagcagcaggccgacaacaugaucaccgagcugcuccagaaggaguacaucgaccgccagggcaagaccccgcuggggcugguggaccuguucgucuucuccacgagcuucuaccucaucuccaucuuccugcaccuggugaagauccccacccaccggcacaucaccggcaagcccugccccaagccgcaccgccucaaccacauggggaucugcagcugcggccuguacaaccaccccggggugcccgucaaguggaagcggugaggacuaguuauaagacugacuagcccgaugggccucccaacgggcccuccuccccuccuugcaccgagauuaauaaaaaaaaaaaaaaaaaaaaaaaaaaaaaaaaaaaaaaaaaaaaaaaaaaaaaaaaaaaaaaaaaaaaaaaaaaaaaaaaaaaaaaaaaaaaaaaaaaaa

SEQ ID NO: 27953 - RNA, 1662 nt, Artificial Sequence
  mRNA product Design i-3 (A100) comprising derived and/or modified sequence from LASV(Lassa virus/H.sapiens-wt/NGA/2016/ISTH_0017;Clade II)__AVO03567__GPCmut4 (opt1)
aggagaaagcuuaccaugggccagaucaucaccuucuuccaggaggugccccacgucaucgaggaggugaugaacaucgugcugaucgcccucagccugcuggccauccucaaggggaucuacaacgucgcgaccugcggccuguucgggcugguguccuuccuccugcugugcggccgcagcugcuccacgaccuacaaggggguguacgagcuccagacccuggagcuggacauggccagccucaacaugugcaugccgcuguccugcaccaagaacaacagccaccacuacaucauggucggcaacgagacgggccuggagcucacccugaccaacaccuccaucaucaaccacaaguucugcaaccugagcgacgcccacaagaagaaccucuacgaccacgcccugauguccaucaucagcacguuccaccuguccauccccaacuucaaccaguacgaggccaugagcugcgacuucaacgggggcaagaucuccgugcaguacaaccucagccacaccuacgcgaucgacgccgccaaccacugcgggaccaucgccaacggcgugcugcagaccuucaugcggauggcguggggcggguccuacaucgcccuggacagcggcaagggguccugggacugcaucaugacgagcuaccaguaccucaucauccagaacaccaccugggaggaccacugccaguucucccgccccagccccaucggcuaccuggggcugcucagccagcggacccgcgacaucuacaucucccggcgccggcgcggcacguucaccuggacccugagcgacuccgagggcaacgagacccccgggggcuacugccugacgcgguggaugcucaucgaggccgagcugaagugcuucgggaacaccgccgucgccaagugcaacgagaagcacgacgaggaguucugcgacaugcugcgccucuucgacuucugcaagcaggcgauccggcgccugaagaccccggcccagaugagcauccagcugaucaacaaggccgugaacgcccucaucaacgaccagcugaucaugaagaaccaccuccgggacaucaugggcauccccuacugcaacuacuccaaguacugcuaccugaaccacaccgugacggggaagaccagccugccccgcugcugccuggucuccaacggcagcuaccucaacgagacccacuucuccgacgacaucgagcagcaggccgacaacaugaucaccgagcugcugcagaaggaguacauggaccggcagggcaagacgccgcucgggcugguggaccuguucguguucagcaccuccuucuaccugaucagcaucuuccuccaccugguccgcauccccacccaccggcacgugaucggcaagcccugccccaagccgcaccgccugaaccacauggggaucugcuccugcggccucuacaagcaccccggggugcccgucaaguggaagcggugaggacuaguuauaagacugacuagcccgaugggccucccaacgggcccuccuccccuccuugcaccgagauuaauaaaaaaaaaaaaaaaaaaaaaaaaaaaaaaaaaaaaaaaaaaaaaaaaaaaaaaaaaaaaaaaaaaaaaaaaaaaaaaaaaaaaaaaaaaaaaaaaaaaa

SEQ ID NO: 27954 - RNA, 1662 nt, Artificial Sequence
  mRNA product Design i-3 (A100) comprising derived and/or modified sequence from LASV(Lassa virus/H.sapiens-wt/NGA/2018/ISTH_0959;Clade II)__AVV65099__GPCmut4 (opt1)
aggagaaagcuuaccaugggccagaucaucaccuucuuccaggaggugccccacgucaucgaggaggugaugaacaucgugcugaucgcccucagccugcuggccauccucaaggggaucuacaacgucgugaccugcggccuguucgggcugguguccuuccuccugcugugcggccgcagcugcuccacgaccuacaagggggucuacgagcuccagacccuggagcuggacauggcgagccucaacaugugcaugccgcuguccugcaccaagaacaacagccaccacuacaucauggugggcaacgagacgggccuggagcucacccugaccaacaccuccaucaucaaccacaaguucugcaaccugagcgacgcccacaagaagaaccucuacgaccacgcccugauguccaucaucagcacguuccaccuguccauccccaacuucaaccaguacgaggccaugagcugcgacuucaacgggggcaagaucuccgugcaguacaaccucagccacgccuacgcgaucgacgccgccaaccacugcgggaccaucgccaacggcguccugcagaccuucaugcggauggcguggggcggguccuacaucgcccuggacagcggcaagggguccugggacugcaucaugaccagcuaccaguaccucaucauccagaacacgaccugggaggaccacugccaguucucccgccccagccccaucggcuaccuggggcugcucagccagcggacccgcgacaucuacaucucccggcgccggcgcggcaccuucacguggacccugagcgacuccgagggcaacgagacccccgggggcuacugccugacccgguggaugcucaucgaggccgagcugaagugcuucgggaacacggccguggccaagugcaacgagaagcacgacgaggaguucugcgacaugcugcgccucuucgacuucugcaagcaggcgauccggcgccugaagaccccggcccagaugagcauccagcugaucaacaaggccgugaacgcccucaucaacgaccagcugaucaugaagaaccaccuccgggacaucaugggcauccccuacugcaacuacuccaaguacugcuaccugaaccacaccgucaccgggaagacgagccugccccgcugcugccugguguccaacggcagcuaccucaacgagacccacuucuccgacgacaucgagcagcaggccgacaacaugaucaccgagcugcugcagaaggaguacaucgaccggcagggcaagaccccgcucgggcugguggaccuguucgucuucagcacguccuucuaccugaucagcaucuuccuccaccuggugaagauccccacccaccgccacgugaucggcaagcccugccccaagccgcaccggcugaaccacauggggaucugcuccugcggccucuacaagcaccccgggguccccgugaaguggaagcgcugaggacuaguuauaagacugacuagcccgaugggccucccaacgggcccuccuccccuccuugcaccgagauuaauaaaaaaaaaaaaaaaaaaaaaaaaaaaaaaaaaaaaaaaaaaaaaaaaaaaaaaaaaaaaaaaaaaaaaaaaaaaaaaaaaaaaaaaaaaaaaaaaaaaa

SEQ ID NO: 27955 - RNA, 1662 nt, Artificial Sequence
  mRNA product Design i-3 (A100) comprising derived and/or modified sequence from LASV(LASV003-NIG-2008;Clade II)__AIT17580__GPCmut4 (opt1)
aggagaaagcuuaccaugggccagaucaucaccuucuuccaggaggugccccacgucaucgaggaggugaugaacaucgugcugaucgcccucagccugcuggccauccucaaggggaucuacaacgucgcgaccugcggccuguucgggcugguguccuuccuccugcugugcggccgcagcugcuccacgaccuacaaggggguguacgagcuccagacccuggagcuggacauggccagccucaacaugugcaugccgcuguccugcaccaagaacaacagccaccacuacaucauggucggcaacgagacgggccuggagcucacccugaccaacaccuccaucaucaaccacaaguucugcaaccugagcgacgcccacaagaagaaccucuacgaccacgcccugauguccaucaucagcacguuccaccuguccauccccaacuucaaccaguacgaggccaugagcugcgacuucaacgggggcaagaucuccgugcaguacaaccucagccacaccuacgcgguggacgccgccaaccacugcgggaccaucgccaacggcguccugcagaccuucaugcggauggcguggggcggguccuacaucgcccuggacagcggcaagggguccugggacugcaucaugacgagcuaccaguaccucaucauccagaacaccaccugggaggaccacugccaguucucccgccccagccccaucggcuaccuggggcugcucagccagcggacccgcgacaucuacaucucccggcgccggcgcggcacguucaccuggacccugagcgacuccgagagcaacgagaccccgggcggguacugccugacgcgguggaugcucaucgaggccgagcugaagugcuucggcaacaccgccguggccaagugcaacgagaagcacgacgaggaguucugcgacaugcugcgccucuucgacuucugcaagcaggcgauccggcgccugaaggcccccgcccagauguccauccagcugaucaacaaggccgugaacgcccucaucaacgaccagcugaucaugaagaaccaccuccgggacaucauggggauccccuacugcaacuacagcaaguacugcuaccugaaccacaccgucaccggccgcacgucccugccccggugcugccuggugagcaacggguccuaccucaacgagacccacuucagcgacgacaucgagcagcaggcggacaacaugaucaccgagcugcugcagaaggaguacauggaccgccagggcaagaccccgcucggccugguggaccuguucgucuucuccacgagcuucuaccugaucuccaucuuccuccaccuggugaagauccccacccaccggcacgugaucgggaagcccugccccaagccgcaccgccugaaccacaugggcaucugcagcugcgggcucuacaagcaccccggcguccccgugaaguggaagcggugaggacuaguuauaagacugacuagcccgaugggccucccaacgggcccuccuccccuccuugcaccgagauuaauaaaaaaaaaaaaaaaaaaaaaaaaaaaaaaaaaaaaaaaaaaaaaaaaaaaaaaaaaaaaaaaaaaaaaaaaaaaaaaaaaaaaaaaaaaaaaaaaaaaa

SEQ ID NO: 27956 - RNA, 1662 nt, Artificial Sequence
  mRNA product Design i-3 (A100) comprising derived and/or modified sequence from LASV(LASV035-NIG-2009;Clade II)__AIT17588__GPCmut4 (opt1)
aggagaaagcuuaccaugggccagaucaucaccuucuuccaggaggugccccacgucaucgaggaggugaugaacaucgugcugaucgcccucagccugcuggccauccucaaggggaucuacaacgucgcgaccugcggccuguucgggcugguguccuuccuccugcugugcggccgcagcugcuccacgaccuacaaggggguguacgagcuccagacccuggagcuggacauggccagccucaacaugugcaugccgcuguccugcaccaagaacaacagccaccacuacaucauggucggcaacgagacgggccuggagcucacccugaccaacaccuccaucaucaaccacaaguucugcaaccugagcgacgcccacaagaagaaccucuacgaccacgcccugauguccaucaucagcacguuccaccuguccauccccaacuucaaccaguacgaggccaugagcugcgacuucaacgggggcaagaucuccgugcaguacaaccucagccacgcguacgccguggacgccgccaaccacugcgggaccaucgcgaacggcguccugcagaccuucaugcggauggccuggggcggguccuacaucgcccuggacagcggcaagggguccugggacugcaucaugaccagcuaccaguaccucaucauccagaacacgaccugggaggaccacugccaguucucccgccccagccccaucggcuaccuggggcugcucagccagcggacccgcgacaucuacaucucccggcgccggcgcggcaccuucacguggacccugagcgacuccgagggcaacgagacccccgggggcuacugccugacccgguggaugcucaucgaggccgagcugaagugcuucgggaacacggccguggcgaagugcaacgagaagcacgacgaggaguucugcgacaugcugcgccucuucgacuucugcaagcaggccauccggcgccugaaggccccggcccagaugagcauccagcugaucaacaaggccgugaacgcgcucaucaacgaccagcugaucaugaagaaccaccuccgggacaucaugggcauccccuacugcaacuacuccaaguacugcuaccugaaccacaccgucaccgggaagaccagccugccccgcugcugccugguguccaacggcagcuaccucaacgagacgcacuucuccgacgacaucgagcagcaggccgacaacaugaucaccgagcugcugcagaaggaguacaucgaccggcagggcaagaccccgcucgggcugguggaccuguucgucuucagcaccuccuucuaccugaucagcaucuuccuccaccuggugaagauccccacgcaccgccacgugaucggcaagcccugccccaagccgcaccggcugaaccacauggggaucugcuccugcggccucuacaagcaccccgggguccccgugaaguggaagcgcugaggacuaguuauaagacugacuagcccgaugggccucccaacgggcccuccuccccuccuugcaccgagauuaauaaaaaaaaaaaaaaaaaaaaaaaaaaaaaaaaaaaaaaaaaaaaaaaaaaaaaaaaaaaaaaaaaaaaaaaaaaaaaaaaaaaaaaaaaaaaaaaaaaaa

SEQ ID NO: 27957 - RNA, 1662 nt, Artificial Sequence
  mRNA product Design i-3 (A100) comprising derived and/or modified sequence from LASV(LASV1000-NIG-2009;Clade II)__AIT17782__GPCmut4 (opt1)
aggagaaagcuuaccaugggccagaucaucaccuucuuccaggaggugccccacgucaucgaggaggugaugaacaucgugcugaucgcccucagccugcuggccauccucaaggggaucuacaacgucgcgaccugcggccuguucgggcugguguccuuccuccugcugugcggccgcagcugcuccacgaccuacaaggggguguacgagcuccagacccuggagcuggacauggccagccucaacaugugcaugccgcuguccugcaccaagaacaacagccaccacuacaucauggucggcaacgagacgggccuggagcucacccugaccaacaccuccaucaucaaccacaaguucugcaaccugagcgacgcccacaagaagaaccucuacgaccacgcccugauguccaucaucagcacguuccaccuguccauccccaacuucaaccaguacgaggccaugagcugcgacuucaacgggggcaagaucuccgugcaguacaaccucagccacaccuacgcgguggacgccgccaaccacugcgggaccaucgccaacggcguccugcagaccuucaugcggauggcguggggcggguccuacaucgcccuggacagcggcaagggguccugggacugcaucaugacgagcuaccaguaccucaucauccagaacaccaccugggaggaccacugccaguucucccgccccagccccaucggcuaccuggggcugcucagccagcggacccgcgacaucuacaucucccggcgccggcgcggcacguucaccuggacccugagcgacuccgagggcaacgagacccccgggggcuacugccugacgcgguggaugcucaucgaggccgagcugaagugcuucgggaacaccgccguggccaagugcaacgagaagcacgacgaggaguucugcgacaugcugcgccucuucgacuucugcaagcaggcgaucaagcggcugaagaccccggcccagaugagcauccagcugaucaacaaggccgugaacgcccucaucaacgaccagcugaucaugaagaaccaccuccgcgacaucaugggcauccccuacugcaacuacuccaaguacugcuaccugaaccacaccgucacggggaagaccagccugccccggugcugccugguguccaacggcagcuaccucaacgagacccacuucuccgacgacaucgagcagcaggccgacaacaugaucaccgagcugcugcagaaggaguacaucgaccgccagggcaagacgccgcucgggcugguggaccuguucgucuucagcaccuccuucuaccugaucagcaucuuccuccaccuggugaagauccccacccaccggcacguggucggcaagcccugccccaagccgcaccgccugaaccacauggggaucugcuccugcggccucuacaagcaccccggggugcccgugaaguggaagcggugaggacuaguuauaagacugacuagcccgaugggccucccaacgggcccuccuccccuccuugcaccgagauuaauaaaaaaaaaaaaaaaaaaaaaaaaaaaaaaaaaaaaaaaaaaaaaaaaaaaaaaaaaaaaaaaaaaaaaaaaaaaaaaaaaaaaaaaaaaaaaaaaaaaa

SEQ ID NO: 27958 - RNA, 1662 nt, Artificial Sequence
  mRNA product Design i-3 (A100) comprising derived and/or modified sequence from LASV(LASV221-NIG-2010;Clade II)__AIT17624__GPCmut4 (opt1)
aggagaaagcuuaccaugggccagaucaucaccuucuuccaggaggugccccacgucaucgaggaggugaugaacaucgugcugaucgcccucagccugcuggccauccucaaggggaucuacaacgucgcgaccugcggccuguucgggcugguguccuuccuccugcugugcggccgcagcugcuccacgaccuacaaggggguguacgagcuccagacccuggagcuggacauggccagccucaacaugugcaugccgcuguccugcaccaagaacaacagccaccacuacaucauggucggcaacgagacgggccuggagcucacccugaccaacaccuccaucaucaaccacaaguucugcaaccugagcgacgcccacaagaagaaccucuacgaccacgcccugauguccaucaucagcacguuccaccuguccauccccaacuucaaccaguacgaggccaugagcugcgacuucaacgggggcaagaucuccgugcaguacaaccucagccacaccuacgcgaucgacgccgccaaccacugcgggaccaucgccaacggcgugcugcagaccuucaugcggauggcguggggcggguccuacaucgcccuggacagcggcaagggguccugggacugcaucaugacgagcuaccaguaccucaucauccagaacaccaccugggaggaccacugccaguucucccgccccagccccaucggcuaccuggggcugcucagccagcggacccgcgacaucuacaucucccggcgccggcgcggcacguucaccuggacccugagcgacuccgagggcaacgagacccccgggggcuacugccugacgcgguggaugcucaucgaggccgagcugaagugcuucgggaacaccgccgucgccaagugcaacgagaagcacgacgaggaguucugcgacaugcugcgccucuucgacuucugcaagcaggcgauccggcgccugaagaccccggcccagaugagcauccagcugaucaacaaggccgugaacgcccucaucaacgaccagcugaucaugaagaaccaccuccgggacaucaugggcauccccuacugcaacuacuccaaguacugcuaccugaaccacaccgugacggggaagaccagccugccccgcugcugccuggucuccaacggcagcuaccucaacgagacccacuucuccgacgacaucgagcagcaggccgacaacaugaucaccgagaugcugcagaaggaguacauggaccggcagggcaagacgccgcuggggcucguggaccuguucguguucagcaccuccuucuaccugaucagcaucuuccugcaccucgucaagauccccacccaccgccacgugaucggcaagcccugccccaagccgcaccggcugaaccacauggggaucugcuccugcggccuguacaagcaccccggggugcccgucaaguggaagcgcugaggacuaguuauaagacugacuagcccgaugggccucccaacgggcccuccuccccuccuugcaccgagauuaauaaaaaaaaaaaaaaaaaaaaaaaaaaaaaaaaaaaaaaaaaaaaaaaaaaaaaaaaaaaaaaaaaaaaaaaaaaaaaaaaaaaaaaaaaaaaaaaaaaaa

SEQ ID NO: 27959 - RNA, 1662 nt, Artificial Sequence
  mRNA product Design i-3 (A100) comprising derived and/or modified sequence from LASV(LASV237-NIG-2010;Clade II)__AIT17638__GPCmut4 (opt1)
aggagaaagcuuaccaugggccagaucaucaccuucuuccaggaggugccccacgucaucgaggaggugaugaacaucgugcugaucgcccucagccugcuggccauccucaaggggaucuacaacgucgcgaccugcggccuguucgggcugguguccuuccuccugcugugcggccgcagcugcuccacgaccuacaaggggguguacgagcuccagacccuggagcuggacauggccagccucaacaugugcaugccgcuguccugcaccaagaacaacagccaccacuacaucauggucggcaacgagacgggccuggagcucacccugaccaacaccuccaucaucaaccacaaguucugcaaccugagcgacgcccacaagaaggaccucuacgaccacgcccugauguccaucaucagcacguuccaccuguccauccccaacuucaaccaguacgaggccaugagcugcgacuucaacgggggcaagaucuccgugcaguacaaccucagccacaccuacgcgguggacgccgccaaccacugcgggaccaucgccaacggcguccugcagaccuucaugcggauggcguggggcggguccuacaucgcccuggacagcggcaagggguccugggacugcaucaugacgagcuaccaguaccucaucauccagaacaccaccugggaggaccacugccaguucucccgccccagccccaucggcuaccuggggcugcucagccagcggacccgcgacaucuacaucucccggcgccggcgcggcacguucaccuggacccugagcgacuccgagggcaacgagacccccgggggcuacugccugacgcgguggaugcucaucgaggccgagcugaagugcuucgggaacaccgccguggccaagugcaacgagaagcacgacgaggaguucugcgacaugcugcgccucuucgacuucugcaagcaggcgauccggcgccugaagaccccggcccagaugagcauccagcugaucaacaaggccgugaacgcccucaucaacgaccagcugaucaugaagaaccaccuccgggacaucaugggcauccccuacugcaacuacuccaaguacugcuaccugaaccacaccgucacggggaagaccagccugccccgcugcugccugguguccaacggcagcuaccucaacgagacccacuucuccgacgacaucgagcagcaggccgacaacaugaucaccgagcugcugcagaaggaguacauggaccggcagggcaagacgccgcucgggcugguggaccuguucgucuucagcaccuccuucuaccugaucagcaucuuccuccaccugaucaagauccccacccaccgccacaucaccggcaagcccugccccaagccgcaccggcugaaccacauggggaucugcuccugcggccucuacaagcaccccggggugcccgugaaguggaagcgcugaggacuaguuauaagacugacuagcccgaugggccucccaacgggcccuccuccccuccuugcaccgagauuaauaaaaaaaaaaaaaaaaaaaaaaaaaaaaaaaaaaaaaaaaaaaaaaaaaaaaaaaaaaaaaaaaaaaaaaaaaaaaaaaaaaaaaaaaaaaaaaaaaaaa

SEQ ID NO: 27960 - RNA, 1662 nt, Artificial Sequence
  mRNA product Design i-3 (A100) comprising derived and/or modified sequence from LASV(LASV253-NIG-2011;Clade II)__AIT17670__GPCmut4 (opt1)
aggagaaagcuuaccaugggccagaucaucaccuucuuccaggaggugccccacgucaucgaggaggugaugaacaucgugcugaucgcccucagccugcuggccauccucaaggggaucuacaacgucgcgaccugcggccuguucgggcugguguccuuccuccugcugugcggccgcagcugcuccacgaccuacaaggggguguacgagcuccagacccuggagcuggacauggccagccucaacaugugcaugccgcuguccugcaccaagaacaacagccaccacuacaucauggucggcaacgagacgggccuggagcucacccugaccaacaccuccaucaucaaccacaaguucugcaaccugagcgacgcccacaagaagaaccucuacgaccacgcccugauguccaucaucagcacguuccaccuguccauccccaacuucaaccaguacgaggccaugagcugcgacuucaacgggggcaagaucuccgugcaguacaaccucagccacaccuacgcgguggacgccgccaaccacugcgggaccaucgccaacggcguccugcagaccuucaugcggauggcguggggcggguccuacaucgcccuggacagcggcaagggguccugggacugcaucaugacgagcuaccaguaccucaucauccagaacaccaccugggaggaccacugccaguucucccgccccagccccaucggcuaccuggggcugcucagccagcggacccgcgacaucuacaucucccggcgccggcgcggcacguucaccuggacccugagcgacuccgagggcaacgagacccccgggggcuacugccugacgcgguggaugcucaucgaggccgagcugaagugcuucgggaacaccgccguggccaagugcaacgagaagcacgacgaggaguucugcgacaugcugcgccucuucgacuucugcaagcaggcgauccggcgccugaaggccccggcccagaugagcauccagcugaucaacaaggccgugaacgcccucaucaacgaccagcugaucaugaagaaccaccuccgggacaucaugggcauccccuacugcaacuacuccaaguacugcuaccugaaccacaccgucaccgggcgcacgagccugccccggugcugccugguguccaacggcagcuaccucaacgagacccacuucuccgacgacaucgagcagcaggcggacaacaugaucaccgagcugcugcagaaggaguacaucgaccgccagggcaagaccccgcucgggcugguggaccuguucgucuucagcacguccuucuaccugaucagcaucuuccuccaccuggugaagauccccacccaccggcacaucaucggcaagcccugccccaagccgcaccgccugaaccacauggggaucugcuccugcggccucuacaagcaccccggggugcccgucaaguggaagcggugaggacuaguuauaagacugacuagcccgaugggccucccaacgggcccuccuccccuccuugcaccgagauuaauaaaaaaaaaaaaaaaaaaaaaaaaaaaaaaaaaaaaaaaaaaaaaaaaaaaaaaaaaaaaaaaaaaaaaaaaaaaaaaaaaaaaaaaaaaaaaaaaaaaa

SEQ ID NO: 27961 - RNA, 1662 nt, Artificial Sequence
  mRNA product Design i-3 (A100) comprising derived and/or modified sequence from LASV(LASV254-NIG-2011;Clade II)__AIT17674__GPCmut4 (opt1)
aggagaaagcuuaccaugggccagaucaucaccuucuuccaggaggugccccacgucaucgaggaggugaugaacaucgugcugaucgcccucagccugcuggccauccucaaggggaucuacaacgucgcgaccugcggccuguucgggcugguguccuuccuccugcugugcggccgcagcugcuccacgaccuacaaggggguguacgagcuccagacccuggagcuggacaugaccaaccucaacaugugcaugccgcugagcugcacgaagaacaacucccaccacuacaucauggucggcaacgagaccggccuggagcucacccugaccaacacgagcaucaucaaccacaaguucugcaaccuguccgacgcccacaagaagaaccucuacaaccacgcccugaugagcaucaucuccaccuuccaccugagcauccccaacuucaaccaguacgaggccauguccugcgacuucaacgggggcaagaucagcgugcaguacaaccucucccacagcuacgccguggacgcggccaaccacugcgggaccaucgccaacggcguccugcagaccuucaugcggauggccuggggcggguccuacaucgcgcuggacagcggcaaggggaacugggacugcaucaugacguccuaccaguaccucaucauccagaacaccaccugggaggaccacugccaguucagccgccccucccccaucggcuaccuggggcugcucagccagcggacccgcgacaucuacaucagccggcgccggcgcggcacguucaccuggacccuguccgacagcgagggcaacgagacccccgggggcuacugccugacgcgguggaugcucaucgaggccgagcugaagugcuucgggaacaccgccguggccaagugcaacgagaagcacgacgaggaguucugcgacaugcugcgccucuucgacuucugcaagcaggccauccggcgccugaagaccccggcgcaggccaacauccagcugaucaacaaggccgugaacgcccucaucaacgaccagcugaucaugaagaaccaccuccgggacaucaugggcauccccuacugcaacuacuccaaguacugcuaccugaaccacaccgucacggggaagaccagccugccccgcugcugccugguguccaacggcagcuaccucaacgagacccacuucuccgacgacaucgagcagcaggccgacaacaugaucaccgagcugcugcagaaggaguacauggaccggcagggcaagacgccgcucgggcugguggaccuguucgucuucagcaccuccuucuaccugaucagcaucuuccuccaccuggugaagauccccacccaccgccacgugaucggcaagcccugccccaagccgcaccggcugaaccacauggggaucugcuccugcggccucuacaagcaccccgggguccccgugaaguggaagcgcugaggacuaguuauaagacugacuagcccgaugggccucccaacgggcccuccuccccuccuugcaccgagauuaauaaaaaaaaaaaaaaaaaaaaaaaaaaaaaaaaaaaaaaaaaaaaaaaaaaaaaaaaaaaaaaaaaaaaaaaaaaaaaaaaaaaaaaaaaaaaaaaaaaaa

SEQ ID NO: 27962 - RNA, 1662 nt, Artificial Sequence
  mRNA product Design i-3 (A100) comprising derived and/or modified sequence from LASV(Nig08-A19;Clade III)__ADU56618__GPCmut4 (opt1)
aggagaaagcuuaccaugggccagaucgugaccuucuuccaggaggucccccacgugaucgaggaggugaugaacaucguccugaucgcccucagcauccuggccauccugaaggggcucuacaacaucgcgaccugcggccugaucgggcuggugacguuccuccugcuguccggccgcagcugcuccaugaccuacaaggggguguacgagcuccagacccuggagcugaacaugaacacccucaacaugugcaugccgcugagcugcacgaagaacaacucccaccacuacaucauggucggcaacgagaccggccuggagcucacccugaccaacacgagccugcuccaccacaaguucugcaaccuguccgacgcccacaagaagaaccuguacgaccacacccucaugagcaucaucuccaccuuccaccugagcauccccaacuucaaccaguacgaggccauguccugcgacuucaacgggggcaagaucaccgugcaguacaaccugagccacuccuacgccaucgacgccgcgaaccacugcgggacgguggccaacggcguccuccagaccuucaugcggauggccuggggcgggagcuacaucgcccuggacuccggccgcgggaagugggacugcaucaugaccagcuaccaguaccugaucauccagaacaccacgugggaggaccacugccaguucucccggcccagccccaucggcuaccucgggcugcugucccagcgcacccgggacaucuacaucagccgccggcgccggggcaccuucaccuggacgcucagcgacuccgagggcaacgagacccccgggggcuacugccugacccgcuggaugcugaucgaggcggagcucaagugcuucgggaacaccgccguggccaagugcaacgagaagcacgacgaggaguucugcgacaugcugcggcuguucgacuucugcaagcaggccauccgccggcucaaggccccggcgcagaugagcauccagcugaucaacaaggccgugaacgcccugaucaacgaccagcucaucaugaagaaccaccuccgcgacaucaugggcauccccuacugcaacuacuccaaguacugcuaccugaaccacacgagcaccgggcggaccucccugccccgcugcugccuggucagcaacggcuccuaccugaacgagacccacuucagcgacgacaucgagcagcaggccgacaacaugaucacggagaugcuccagaaggaguaccuggaccggcagggcaagaccccgcuggggcugguggaccucuucguguucuccaccagcuucuaccugaucuccaucuuccugcaccucgucaagauccccacccaccgccacaucgugggcaagcccugccccaagccgcaccggcugaaccacauggggaucugcagcugcggccuguacaagcagcccggggugcccguccgcuggaagcggugaggacuaguuauaagacugacuagcccgaugggccucccaacgggcccuccuccccuccuugcaccgagauuaauaaaaaaaaaaaaaaaaaaaaaaaaaaaaaaaaaaaaaaaaaaaaaaaaaaaaaaaaaaaaaaaaaaaaaaaaaaaaaaaaaaaaaaaaaaaaaaaaaaaa

SEQ ID NO: 27963 - RNA, 1665 nt, Artificial Sequence
  mRNA product Design i-3 (A100) comprising derived and/or modified sequence from LASV(G1180-SLE-2010;Clade IV)__AIT17168__GPCmut4 (opt1)
aggagaaagcuuaccaugggccagaucgugaccuucuuccaggaggucccccacgugaucgaggaggugaugaacaucguccugaucgcccucagcauccuggccgugcugaaggggcucuacaacuucgcgaccugcggccugguggggcugcucacguuccugcugcucugcggccgcuccugcaccgccagccgguacaagggggucuacgagcugcagacccuggagcucaacauggagacccugaacaugugcaugccgcuguccugcacgaagaacaacagccaccacuacaucauggugggcaacgagaccggccucgagcugacccugaccaacacguccaucaucaaccacaaguucugcaaccucagcgacgcccacaagaagaaccuguacgaccacgcccugauguccaucaucagcaccuuccaccucuccauccccaacuucaaccaguacgaggccaugagcugcgacuucaacgggggcaagaucuccgugcaguacaaccugagccacuccuacgcgggggacgccgccaaccacugcggcaccgucgccaacggggugcugcagaccuucaugcgcauggcguggggcggcagcuacaucgcccucgacuccgggcacggcagcugggacugcaucaugacguccuaccaguaccugaucauccagaacaccaccugggaggaccacugccaguucagccggcccucccccaucggguaccugggccuccugagccagcgcacccgggacaucuacaucagccgccggcgccggggcacguucaccuggacccuguccgacagcgaggggaaggacaccccgggcggguacugccucacgcgcuggaugcugaucgaggccgagcugaagugcuucggcaacaccgccguggccaagugcaacgagaagcacgacgaggaguucugcgacaugcuccggcuguucgacuucugcaagcaggcgauccagcgccugaaggcccccgcccagauguccauccagcucaucaacaaggccgucaacgcccugaucaacgaccagcugaucaugaagaaccaccuccgggacaucauggggauccccuacugcaacuacagcaaguacugcuaccugaaccacaccaccacgggcaagaccucccugcccaagugcugccucgugagcaacggcuccuaccugaacgagacccacuucagcgacgacaucgagcagcaggcggacaacaugaucaccgagaugcugcagaaggaguacauggagcgccaggggaagacgccgcucggccugguggaccuguucgucuucuccaccagcuucuaccugaucuccaucuuccuccaccuggugaagauccccacccaccggcacaucgugggcaagagcugccccaagccccaccgccugaaccacauggggaucugcuccugcgggcucuacaagcagccgggcguccccgugaaguggaagcggugaggacuaguuauaagacugacuagcccgaugggccucccaacgggcccuccuccccuccuugcaccgagauuaauaaaaaaaaaaaaaaaaaaaaaaaaaaaaaaaaaaaaaaaaaaaaaaaaaaaaaaaaaaaaaaaaaaaaaaaaaaaaaaaaaaaaaaaaaaaaaaaaaaaa

SEQ ID NO: 27964 - RNA, 1665 nt, Artificial Sequence
  mRNA product Design i-3 (A100) comprising derived and/or modified sequence from LASV(G1442-SLE-2011;Clade IV)__AIT17180__GPCmut4 (opt1)
aggagaaagcuuaccaugggccagaucgugaccuucuuccaggaggucccccacgugaucgaggaggugaugaacaucguccugaucgcccucagcauccuggccgugcugaaggggcucuacaacguggcgaccugcggccugaucgggcuggucacguuccuccugcugugcggccgcuccugcaccaccacccucuacaaggggguguacgagcugcagacgcuggagcucaacauggagacccugaacaugugcaugccgcugagcugcaccaagaacaacucccaccacuacauccgggugggcaacgagaccggccucgagcugacgcugaccaacaccagcaucaucaaccacaaguucugcaaccucuccgacgcccacaagaagaaccuguacgaccacgcccugaugagcaucaucuccaccuuccaccucagcauccccaacuucaaccaguacgaggccauguccugcgacuucaacgggggcaagaucagcguccaguacaaccugucccacagcuacgccggggacgcggccaaccacugcggcacgguggccaacggggugcugcagaccuucaugcgcauggccuggggcggcuccuacaucgcgcucgacagcgggcggggcaacugggacugcaucaugaccuccuaccaguaccugaucauccagaacaccacgugggacgaccacugccaguucagccgccccucccccaucggguaccugggccuccugagccagcggacccgcgacgucuacaucucccggcgccggcgcggcaccuucaccuggacgcugagcgacagcgaggggaaggacaccccgggcggguacugccucacccgguggaugcugaucgaggccgagcugaagugcuucggcaacaccgccguggccaagugcaacgagaagcacgacgaggaguucugcgacaugcuccgccuguucgacuucugcaagcaggccauccagcggcugaaggcgcccgcccagauguccauccagcucaucaacaaggccgugaacgcccugaucaacgaccagcugaucaugaagaaccaccuccgcgacaucauggggauccccuacugcaacuacagcaaguacugcuaccugaacaacacggccaccggcaagaccucccugcccaagugcugccucaucagcaacggcuccuaccugaacgagacccacuucagcgacgacaucgagcaggaggcggacaacaugaucacggagaugcugcagaaggaguacauggagcggcaggggaagaccccgcucggccuggucgaccuguucguguucuccaccagcuucuaccugaucuccaucuuccuccaccuggugaagauccccacccaccgccacaucgucggcaagagcugccccaagccccaccggcugaaccacauggggaucugcuccugcgggcucuacaagcagccgggcgugcccgugcgcuggaagcggugaggacuaguuauaagacugacuagcccgaugggccucccaacgggcccuccuccccuccuugcaccgagauuaauaaaaaaaaaaaaaaaaaaaaaaaaaaaaaaaaaaaaaaaaaaaaaaaaaaaaaaaaaaaaaaaaaaaaaaaaaaaaaaaaaaaaaaaaaaaaaaaaaaaa

SEQ ID NO: 27965 - RNA, 1665 nt, Artificial Sequence
  mRNA product Design i-3 (A100) comprising derived and/or modified sequence from LASV(G3010-SLE-2013;Clade IV)__AIT17344__GPCmut4 (opt1)
aggagaaagcuuaccaugggccagaucgugaccuucuuccaggaggucccccacgugaucgaggaggugaugaacaucguccugaucgcccucagcauccuggccgugcugaaggggcucuacaacuucgcgaccugcggccugguggggcuggucacguuccuccugcugugcggccgcuccugcaccaccagccucuacaaggggguguacgagcugcagacccuggagcucaacauggagacgcugaacaugugcaugccgcuguccugcaccaagaacaacagccaccacuacaucauggugggcaacgagaccggccucgagcugacccugacgaacaccuccaucaucaaccacaaguucugcaaccucagcgacgcccacaagaagaaccuguacaaccacgcccugauguccaucaucagcaccuuccaccucuccauccccaacuucaaccaguacgaggccaugagcugcgacuucaacgggggcaagaucuccguccaguacaaccugagccacuccuacgccggggacgcggccagccacugcggcaccguggccaacggggugcugcagacguucaugcggauggccuggggcggcuccuacaucgcgcucgacagcggguacggcaagugggacugcaucaugaccuccuaccaguaccugaucauccagaacaccaccugggaggaccacugccaguucagccgccccucccccaucggguaccugggccuccugagccagcggacgcgcgacaucuacaucagccggcgccggcgcggcaccuucaccuggacccuguccgacagcgaggggaaggacacgccgggcggguacugccucacccgguggaugcugaucgaggccgagcugaagugcuucggcaacaccgccgucgccaagugcaacgagaagcacgacgaggaguucugcgacaugcuccgccuguucgacuucugcaagcaggccauccagcggcugaagacccccgcgcagauguccauccagcucaucaacaaggccgugaacgcccugaucaacgaccagcugaucaugaagaaccaccuccgcgacaucauggggauccccuacugcaacuacagcaaguacugcuaccugaaccacacgaccaccggcaagaccucccugcccaagugcugccucgugagcaacggcuccuaccugaacgagacgcacuucagcgacgacaucgagcagcaggccgacaacaugaucaccgagaugcugcagaaggaguacauggagcggcaggggaagaccccgcucggccuggucgaccuguucguguucuccaccagcuucuaccugaucuccaucuuccuccaccuggugaagauccccacgcaccgccacaucgucggcaagagcugccccaagccccaccggcugaaccacauggggaucugcuccugcgggcucuacaagcagccgggcgugcccgugcgcuggaagcggugaggacuaguuauaagacugacuagcccgaugggccucccaacgggcccuccuccccuccuugcaccgagauuaauaaaaaaaaaaaaaaaaaaaaaaaaaaaaaaaaaaaaaaaaaaaaaaaaaaaaaaaaaaaaaaaaaaaaaaaaaaaaaaaaaaaaaaaaaaaaaaaaaaaa

SEQ ID NO: 27966 - RNA, 1665 nt, Artificial Sequence
  mRNA product Design i-3 (A100) comprising derived and/or modified sequence from LASV(G502-SLE-2009;Clade IV)__AIT17126__GPCmut4 (opt1)
aggagaaagcuuaccaugggccagaucgugaccuucuuccaggaggucccccacgugaucgaggaggugaugaacaucguccugaucgcccucagcauccuggccgugcugaaggggcucuacaacuucgcgaccugcggccugguggggcugcucacguuccugcugcucugcggccgcuccugcaccaccgggcuguacaagggcgucuacgagcugcagacccucgagcugaacauggagacgcugaacaugugcaugccgcucagcugcaccaagaacaacucccaccacuacaucauggugggcaacgagaccgggcuggagcugacccucacgaacaccagcaucaucaaccacaaguucugcaaccuguccgacgcccacaagaagaaccuguacgaccacgcccucaugagcaucaucuccaccuuccaccugagcauccccaacuucaaccaguacgaggccauguccugcgacuucaacggcgggaagaucagcgugcaguacaaccugucccacagcuacgccggcgacgcggccgaccacugcgggaccgucgccaacggcgugcuccagacguucaugcggauggccuggggcggguccuacaucgcgcuggacagcggccgcgggcggugggacugcaucaugaccuccuaccaguaccugaucauccagaacaccaccugggaggaccacugccaguucagccgccccucccccaucggcuaccucggccugcugagccagcggacgcgcgacaucuacaucucccggcgccggcgcgggaccuucaccuggacccucagcgacagcgagggcaaggacacgcccgggggcuacugccugacccgguggaugcugaucgaggccgagcucaagugcuucgggaacaccgccguggccaagugcaacgagaagcacgacgaggaguucugcgacaugcugcgccuguucgacuucugcaagcaggccauccagcggcucaaggcgccggcccagauguccauccagcugaucaacaaggccgucaacgcccugaucaacgaccagcucgugaugaagaaccaccuccgcgacaucaugggcauccccuacugcaacuacagccgguacugcuaccugaaccacaccacgaccggccgcaccucccugcccaagugcugccuggugagcaacggguccuaccugaacgagacccacuucagcgacgacaucgagcagcaggccgacaacaugaucacggagaugcuccagaaggaguacauggagcggcagggcaagaccccgcuggggcuggucgaccuguucguguucuccaccagcuucuaccucaucuccaucuuccugcaccuggugaagauccccacccaccgccacaucgucggcaagagcugccccaagccccaccggcucaaccacauggggaucugcuccugcggccuguacaagcagccgggcgugcccgugaaguggaagcgcugaggacuaguuauaagacugacuagcccgaugggccucccaacgggcccuccuccccuccuugcaccgagauuaauaaaaaaaaaaaaaaaaaaaaaaaaaaaaaaaaaaaaaaaaaaaaaaaaaaaaaaaaaaaaaaaaaaaaaaaaaaaaaaaaaaaaaaaaaaaaaaaaaaaa

SEQ ID NO: 27967 - RNA, 1665 nt, Artificial Sequence
  mRNA product Design i-3 (A100) comprising derived and/or modified sequence from LASV(G733-SLE-2010;Clade IV)__AIT17154__GPCmut4 (opt1)
aggagaaagcuuaccaugggccagaucgugaccuucuuccaggaggucccccacgugaucgaggaggugaugaacaucguccugaucgcccucagcauccuggccgugcugaaggggcucuacaacuucgcgaccugcggcaucguggggcuggucuccuuccugcuccugugcggccgcagcugcacgaccucccuguacaaggggguguacgagcuccagacccuggagcugaacauggagacccucaacaugugcaugccgcugagcugcacgaagaacaacucccaccacuacaucauggugggcaacgagaccggccuggagcucacccugaccaacacgagcaucaucaaccacaaguucugcaaccuguccgacgcccacaagaagaaccucuacgaccacgcccugaugagcaucaucuccaccuuccaccugagcauccccaacuucaaccaguacgaggccauguccugcgacuucaacgggggcaagaucagcguccaguacaaccucucccacagcuacgccggggacgcggccaaccacugcggcaccaucgccaacggggugcugcagaccuucaugcggauggccuggggcggcuccuacaucgcgcuggacagcgggcgcgaccggugggacugcaucaugacguccuaccaguaccucaucauccagaacaccaccugggaggaccacugccaguucagccgccccucccccaucggcuaccuggggcugcucagccagcggacccgcgacaucuacaucagccggcgccggcgcggcacguucaccuggacccuguccgacagcgagggcaaggacacccccgggggcuacugccugacgcgguggaugcucaucgaggccgagcugaagugcuucgggaacaccgccguggccaagugcaacgagaagcacgacgaggaguucugcgacaugcugcgccucuucgacuucugcaagcaggccauccagcggcugaaggcgccggcccagauguccauccagcugaucaacaaggccgucaacgcccucaucaacgaccagcugaucaugaagaaccaccuccgcgacaucaugggcauccccuacugcaacuacagcaaguacugcuaccugaaccacaccaccacggggaagaccucccugcccaagugcugccuggugagcaacggcuccuaccucaacgagacccacuucagcgacgacaucgagcagcaggccgacaacaugaucaccgagaugcugcagaaggaguacauggagcggcagggcaagacgccgcuggggcucguggaccuguucgucuucuccaccagcuucuaccugaucuccaucuuccugcaccucgugaagauccccacccaccgccacguggucggcaagagcugccccaagccccaccggcugaaccacauggggaucugcuccugcggccuguacgggcagccgggcgugcccgugaaguggaagcgcugaggacuaguuauaagacugacuagcccgaugggccucccaacgggcccuccuccccuccuugcaccgagauuaauaaaaaaaaaaaaaaaaaaaaaaaaaaaaaaaaaaaaaaaaaaaaaaaaaaaaaaaaaaaaaaaaaaaaaaaaaaaaaaaaaaaaaaaaaaaaaaaaaaaa

SEQ ID NO: 27968 - RNA, 1665 nt, Artificial Sequence
  mRNA product Design i-3 (A100) comprising derived and/or modified sequence from MOPV/LASV reassortant(IGS-1;Clade IV)__AFY05576__GPCmut4 (opt1)
aggagaaagcuuaccaugggccagaucgugaccuucuuccaggaggucccccacgugaucgaggaggugaugaacaucguccugaucgcccucagcgugcuggccgugcugaaggggcucuacaacuucgcgaccugcggccuggucgggcuggugacguuccuccugcugugcggccgcuccugcaccaccagccucuacaaggggguguacgagcugcagacccuggagcucaacauggagacgcugaacaugugcaugccgcuguccugcaccaagaacaacagccaccacuacaucauggucggcaacgagaccggccucgagcugacccugacgaacaccuccaucaucaaccacaaguucugcaaccucagcgacgcccacaagaagaaccuguacgaccacgcccugauguccaucaucagcaccuuccaccucuccauccccaacuucaaccaguacgaggccaugagcugcgacuucaacgggggcaagaucuccgugcaguacaaccugagccacuccuacgccggggacgcggccaaccacugcggcaccguggccaacgggguccugcagacguucaugcggauggccuggggcggcagcuacaucgcgcucgacuccgggcgcggcaacugggacugcaucaugaccagcuaccaguaccugaucauccagaacaccaccugggaggaccacugccaguucucccggcccagccccaucggguaccugggccuccugucccagcgcacgcgggacaucuacaucagccgccggcgccggggcaccuucaccuggacccugagcgacuccgagggggaggacacgccgggcggguacugccucacccgcuggaugcugaucgaggccgagcugaagugcuucggcaacaccgccguggccaagugcaacgagaagcacgacgaggaguucugcgacaugcuccggcuguucgacuucugcaagcaggccauccagcgccugaaggcgcccgcccagaugagcauccagcucaucaacaaggccgugaacgcccugaucaacgaccagcugaucaugaagaaccaccuccgggacaucauggggauccccuacugcaacuacuccaaguacugcuaccugaaccacaccacgaccggccgcaccagccugcccaagugcugccucgucuccaacggcagcuaccugaacgagacccacuucuccgacgacaucgagcagcaggccgacaacaugaucacggagaugcugcagaaggaguacauggagcggcaggggaagaccccgcucggccugguggaccuguucguguucagcaccuccuucuaccugaucagcaucuuccuccaccuggucaagauccccacccaccgccacaucguggggaaguccugccccaagccccaccggcugaaccacaugggcaucugcagcugcgggcucuacaagcagccgggcgugcccgucaaguggaagcgcugaggacuaguuauaagacugacuagcccgaugggccucccaacgggcccuccuccccuccuugcaccgagauuaauaaaaaaaaaaaaaaaaaaaaaaaaaaaaaaaaaaaaaaaaaaaaaaaaaaaaaaaaaaaaaaaaaaaaaaaaaaaaaaaaaaaaaaaaaaaaaaaaaaaa

SEQ ID NO: 27969 - RNA, 1665 nt, Artificial Sequence
  mRNA product Design i-3 (A100) comprising derived and/or modified sequence from LASV(LM765-SLE-2012;Clade IV)__AIT17814__GPCmut4 (opt1)
aggagaaagcuuaccaugggccagaucgugaccuucuuccaggaggucccccacgugaucgaggaggugaugaacaucguccugaucgcccucagcauccuggccgugcugaaggggcucuacaacuucgcgaccugcggccugguggggcuggucacguuccuccugcugugcggccgcuccugcaccaccagccucuacaaggggguguacgagcugcagacccuggagcucaacauggagacgcugaacaugugcaugccgcuguccugcaccaagaacaacagccaccacuacaucauggugggcaacgagaccggccucgagcugacccugacgaacaccuccaucaucgaccacaaguucugcaaccucagcgacgcccaccggaagaaccuguacgaccacgcccugauguccaucaucagcaccuuccaccucuccauccccaacuucaaccaguacgaggccaugagcugcgacuucaacgggggcaagaucuccguccaguacaaccugagccacuccuacgccaaggacgcggccgaccacugcgggaccguggccaacggcgugcugcagacguucaugcgcauggccuggggcgggagcuacaucgcgcucgacuccggccgggggcgcugggacugcaucaugaccagcuaccaguaccugaucauccagaacaccaccugggaggaccacugccaguucucccggcccagccccaucggcuaccuggggcuccugucccagcgcacgcgggacaucuacaucagccgccggcgccggggcaccuucaccuggacccugagcgacuccgagggcaaggacacgcccgggggcuacugccucacccgcuggaugcugaucgaggccgagcugaagugcuucgggaacaccgccgucgccaagugcaacgagaagcacgacgaggaguucugcgacaugcuccggcuguucgacuucugcaagcaggccauccagcgccugaaggcgccggcccagaugagcauccagcucaucaacaaggccgugaacgcccugaucaacgaccagcugaucaugaagaaccaccuccgggacaucaugggcauccccuacugcaacuacuccaaguacugcuaccugaaccacaccacgaccgggaagaccagccugcccaagugcugccucguguccaacggcagcuaccugaacgagacccacuucuccgacgacaucgagcagcaggccgacaacaugaucacggagaugcugcagaaggaguacauggagcgccagggcaagaccccgcucgggcuggucgaccuguucguguucagcaccuccuucuaccugaucagcaucuuccuccaccuggugaagauccccacccaccggcacaucgucggcaagcccugccccaagccgcaccgccugaaccacauggggaucugcuccugcggccucuacaagcagcccggggugcccgugaaguggaagcggugaggacuaguuauaagacugacuagcccgaugggccucccaacgggcccuccuccccuccuugcaccgagauuaauaaaaaaaaaaaaaaaaaaaaaaaaaaaaaaaaaaaaaaaaaaaaaaaaaaaaaaaaaaaaaaaaaaaaaaaaaaaaaaaaaaaaaaaaaaaaaaaaaaaa

SEQ ID NO: 27970 - RNA, 1665 nt, Artificial Sequence
  mRNA product Design i-3 (A100) comprising derived and/or modified sequence from LASV(LM776-SLE-2012;Clade IV)__AIT17824__GPCmut4 (opt1)
aggagaaagcuuaccaugggccagaucgugaccuucuuccaggaggucccccacgugaucgaggaggugaugaacaucguccugaucgcccucagcauccuggccgugcugaaggggcucuacaacuucgcgaccugcggccugguggggcuggucacguuccuccugcugugcggccgcuccugcaccaccagcguguacaaggggguguacgagcuccagacccuggagcugaacauggagacgcucaacaugugcaugccgcuguccugcaccaagaacaacagccaccacuacaucauggucggcaacgagaccggccuggagcucacccugacgaacaccuccaucaucaaccacaaguucugcaaccugagcgacgcccacaagaagaaccucuacgaccacgcccugauguccaucaucagcaccuuccaccuguccauccccaacuucaaccaguacgaggccaugagcugcgacuucaacgggggcaagaucuccgugcaguacaaccucagccacuccuacgccggggacgcggccaaccacugcggcaccguggccaacgggguccugcagacguucaugcggauggccuggggcggcagcuacaucgcgcuggacuccgggcacggcaagugggacugcaucaugaccagcuaccaguaccucaucauccagaacaccaccugggaggaccacugccaguucucccgccccagccccaucggguaccugggccugcucucccagcggacgcgcgacaucuacaucagccggcgccggcgcggcaccuucaccuggacccugagcgacuccgaggggaaggacacgccgggcggguacugccugacccgguggaugcucaucgaggccgagcugaagugcuucggcaacaccgccguggccaagugcaacgagaagcacgacgaggaguucugcgacaugcugcgccucuucgacuucugcaagcaggccauccagcggcugaaggcgcccgcccagaugagcauccagcugaucaacaaggccgugaacgcccucaucaacgaccagcugaucaugaagaaccaccuccgcgacaucauggggauccccuacugcaacuacuccaaguacugcuaccugaaccacaccacgaccggcaagaccagccugcccaagugcugccuggucuccaacggcagcuaccucaacgagacccacuucuccgacgacaucgagcagcaggccgacaacaugaucacggagaugcugcagaaggaguacauggagcggcaggggaagaccccgcugggccucguggaccuguucguguucagcaccuccuucuaccugaucagcaucuuccugcaccucgucaagauccccacccaccgccacaucguggggaaguccugccccaagccccaccggcugaaccacaugggcaucugcagcugcgggcuguacaagcagccgggcgugcccguccgcuggaagcggugaggacuaguuauaagacugacuagcccgaugggccucccaacgggcccuccuccccuccuugcaccgagauuaauaaaaaaaaaaaaaaaaaaaaaaaaaaaaaaaaaaaaaaaaaaaaaaaaaaaaaaaaaaaaaaaaaaaaaaaaaaaaaaaaaaaaaaaaaaaaaaaaaaaa

SEQ ID NO: 27971 - RNA, 1665 nt, Artificial Sequence
  mRNA product Design i-3 (A100) comprising derived and/or modified sequence from LASV(Mad39;Clade IV)__ANH09722__GPCmut4 (opt1)
aggagaaagcuuaccaugggccagaucgugaccuucuuccaggaggucccccacgugaucgaggaggugaugaacaucguccugaucgcccucagcauccuggccgugcugaaggggcucuacaacguggcgaccugcggccugaucgggcuggucacguuccuccugcugugcggccgcuccugcaccaccacccucuacaaggggguguacgagcugcaggcccuggagcucaacauggagacgcugaacaugugcaugccgcugagcugcaccaagaacaacucccaccacuacauccgggugggcaacgagaccggccucgagcugacccugacgaacaccagccucaucaaccacaaguucugcaaccuguccgacgcccacaagaagaaccuguacgaccacgcccucaugagcaucaucuccaccuuccaccugagcauccccaacuucaaccaguacgaggccauguccugcgacuucaacgacgggaagaucagcguccaguacaaccugucccacaccuacgcgggcgacacggccaaccacugcgggaccguggccaacggcgugcuccagaccuucaugcgcauggccuggggcgggagcuacaucgcgcuggacuccggccgcgggggcugggacugcaucaugaccagcuaccaguaccugaucauccagaacacgaccugggaggaccacugccaguucucccggcccagccccaucggguaccucggccugcugucccagcggacccgcgacaucuacaucagccggcgccggcgcggcaccuucacguggacccucuccgacagcgaggggaaggacaccccgggcggguacugccugacccgguggaugcugaucgaggccgagcucaagugcuucggcaacacggccgucgccaagugcaacgagaagcacgacgaggaguucugcgacaugcugcgccuguucgacuucugcaagcaggccauccagcggcucaaggcgcccgcccagaugagcauccagcugaucaacaaggccgugaacgcccugaucaacgaccagcucaucaugaagaaccaccuccgcgacaucauggggauccccuacugcaacuacuccaaguacugcuaccugaaccacaccgugaccggcaagaccagccugcccaagugcugccuggucuccaacggcagcuaccugaacgagacgcacuucuccgacgacaucgagcagcaggccgacaacaugaucaccgagaugcuccagaaggaguacauggagcggcaggggaagaccccgcugggccugguggaccuguucguguucagcaccuccuucuaccucaucagcaucuuccugcaccuggucaagauccccacgcaccgccacgugguggggaagcccugccccaagccgcaccggcucaaccacaugggcaucugcuccugcggguucuacaagcagcccggcguccccgugcgcuggaagcggugaggacuaguuauaagacugacuagcccgaugggccucccaacgggcccuccuccccuccuugcaccgagauuaauaaaaaaaaaaaaaaaaaaaaaaaaaaaaaaaaaaaaaaaaaaaaaaaaaaaaaaaaaaaaaaaaaaaaaaaaaaaaaaaaaaaaaaaaaaaaaaaaaaaa

SEQ ID NO: 27972 - RNA, 1665 nt, Artificial Sequence
  mRNA product Design i-3 (A100) comprising derived and/or modified sequence from LASV(Z0947-SLE-2011;Clade IV)__AIT17840__GPCmut4 (opt1)
aggagaaagcuuaccaugggccagaucgugaccuucuuccaggaggucccccacgugaucgaggaggugaugaacaucguccugaucgcccucagcauccuggccgugcugaaggggcucuacaacuucgcgaccugcggccugguggggcuggucacguuccuccugcugugcggccgcuccugcaccaucagccucuacaaggggguguacgagcugcagacccuggagcucaacauggagacccugaacaugugcaugccgcuguccugcacgaagaacaacagccaccacuacaucauggugggcaacgagaccggccucgagcugacccugaccaacacguccaucaucaaccacaaguucugcaaccucagcgacgcccacaagaagaaccuguacgaccacgcccugauguccaucaucagcaccuuccaccucuccauccccaacuucaaccaguacgaggccaugagcugcgacuucaacgggggcaagaucuccguccaguacaaccugagccacuccuacgccggggacgcggccaaccacugcggcaccguggccaacggggugcugcagaccuucaugcggauggccuggggcggcagcuacaucgcgcucgacuccgggcgcgaccggugggacugcaucaugacgagcuaccaguaccugaucauccagaacaccaccugggaggaccacugccaguucucccgccccagccccaucggcuaccuggggcuccugucccagcggacccgcgacaucuacaucagccggcgccggcgcggcacguucaccuggacccugagcgacuccgagggcaaggacacccccgggggcuacugccucacgcgguggaugcugaucgaggccgagcugaagugcuucgggaacaccgccgucgccaagugcaacgagaagcacgacgaggaguucugcgacaugcuccgccuguucgacuucugcaagcaggccauccagcggcugaaggcgccggcccagaugagcauccagcucaucaacaaggccgugaacgcccugaucaacgaccagcugaucaugaagaaccaccuccgcgacaucaugggcauccccuacugcaacuacuccaaguacugcuaccugaaccacaccaccacggggaagaccagccugcccaagugcugccucguguccaacggcagcuaccugaacgagacccacuucuccgacgacaucgagcagcaggccgacaacaugaucaccgagaugcugcagaaggaguacauggagcggcagggcaagacgccgcucgggcuggucgaccuguucguguucagcaccuccuucuaccugaucagcaucuuccuccaccuggugaagauccccacccaccgccacaucgucggcaagcccugccccaagccgcaccggcugaaccacauggggaucugcuccugcggccucuacaagcagcccggggugcccgugaaguggaagcgcugaggacuaguuauaagacugacuagcccgaugggccucccaacgggcccuccuccccuccuugcaccgagauuaauaaaaaaaaaaaaaaaaaaaaaaaaaaaaaaaaaaaaaaaaaaaaaaaaaaaaaaaaaaaaaaaaaaaaaaaaaaaaaaaaaaaaaaaaaaaaaaaaaaaa

SEQ ID NO: 27973 - RNA, 1665 nt, Artificial Sequence
  mRNA product Design i-3 (A100) comprising derived and/or modified sequence from LASV(Josiah;Clade IV)__NP_694870__GPCmut4 (opt4)
aggagaaagcuuaccaugggccagaucgugaccuucuuccaggaggugccccacgugaucgaggaggugaugaacaucgugcugaucgcccugagcgugcuggccgugcugaagggccuguacaacuucgccaccugcggccuggugggccuggugaccuuccugcugcugugcggcagaagcugcaccaccagccuguacaagggcguguacgagcugcagacccuggagcugaacauggagacccugaacaugugcaugccccugagcugcaccaagaacaacagccaccacuacaucauggugggcaacgagaccggccuggagcugacccugaccaacaccagcaucaucaaccacaaguucugcaaccugagcgacgcccacaagaagaaccuguacgaccacgcccugaugagcaucaucagcaccuuccaccugagcauccccaacuucaaccaguacgaggccaugagcugcgacuucaacggcggcaagaucagcgugcaguacaaccugagccacagcuacgccggcgacgccgccaaccacugcggcaccguggccaacggcgugcugcagaccuucaugagaauggccuggggcggcagcuacaucgcccuggacagcggcagaggcaacugggacugcaucaugaccagcuaccaguaccugaucauccagaacaccaccugggaggaccacugccaguucagcagacccagccccaucggcuaccugggccugcugagccagagaaccagagacaucuacaucagcagaagaagaagaggcaccuucaccuggacccugagcgacagcgagggcaaggacacccccggcggcuacugccugaccagauggaugcugaucgaggccgagcugaagugcuucggcaacaccgccguggccaagugcaacgagaagcacgacgaggaguucugcgacaugcugagacuguucgacuucugcaagcaggccauccagagacugaaggcccccgcccagaugagcauccagcugaucaacaaggccgugaacgcccugaucaacgaccagcugaucaugaagaaccaccugagagacaucaugggcauccccuacugcaacuacagcaaguacugcuaccugaaccacaccaccaccggcagaaccagccugcccaagugcugccuggugagcaacggcagcuaccugaacgagacccacuucagcgacgacaucgagcagcaggccgacaacaugaucaccgagaugcugcagaaggaguacauggagagacagggcaagaccccccugggccugguggaccuguucguguucagcaccagcuucuaccugaucagcaucuuccugcaccuggugaagauccccacccacagacacaucgugggcaagagcugccccaagccccacagacugaaccacaugggcaucugcagcugcggccuguacaagcagcccggcgugcccgugaaguggaagagaugaggacuaguuauaagacugacuagcccgaugggccucccaacgggcccuccuccccuccuugcaccgagauuaauaaaaaaaaaaaaaaaaaaaaaaaaaaaaaaaaaaaaaaaaaaaaaaaaaaaaaaaaaaaaaaaaaaaaaaaaaaaaaaaaaaaaaaaaaaaaaaaaaaaa

SEQ ID NO: 27974 - RNA, 1662 nt, Artificial Sequence
  mRNA product Design i-3 (A100) comprising derived and/or modified sequence from LASV(LP;Clade I)__AAF86701__GPCmut4 (opt4)
aggagaaagcuuaccaugggccagaucaucaccuucuuccaggaggugccccacgugaucgaggaggugaugaacaucgugcugaucgcccugagccugcuggccauccugaagggccuguacaacaucgccaccugcggcaucaucggccugguggccuuccuguuccugugcggcaagagcugcagccugacccugaagggcggcuacgagcugcagacccuggagcugaacauggagacccugaacaugugcaugccccugagcugcaccaagaacagcagccaccacuacaucagagugggcaacgagaccggccuggagcugacccugaccaacaccagcaucaucaaccacaaguucugcaaccugagcgacgcccacaagaagaaccuguacgaccacgcccugaugagcaucaucagcaccuuccaccugagcauccccaacuucaaccaguacgaggccaugagcugcgacuucaacggcggcaagaucagcgugcaguacaaccugagccacagcuacgccggcgacgccgccgagcacugcggcaccguggccaacggcgugcugcagaccuucaugagaauggccuggggcggcagauacaucgcccuggacagcggcaagggcaacugggacugcaucaugaccagcuaccaguaccugaucauccagaacaccaccugggaggaccacugccaguucagcagacccagccccaucggcuaccugggccugcugagccagagaaccagagacaucuacaucagcagaagaagaagaggcaccuucaccuggacccugagcgacagcgagggcaacgagacccccggcggcuacugccugaccagauggaugcugaucgaggccgagcugaagugcuucggcaacaccgccguggccaagugcaacgagaagcacgacgaggaguucugcgacaugcugagacuguucgacuucugcaagcaggccaucagaagacugaaggcccccgcccagaugagcauccagcugaucaacaaggccgugaacgcccugaucaacgaccagcugaucaugaagaaccaccugagagacaucaugggcauccccuacugcaacuacagcaaguacugcuaccugaaccacaccagcagcggcagaaccagccugcccaagugcugccugaucagcaacggcagcuaccugaacgagacccaguucagcgacgacaucgagcagcaggccgacaacaugaucaccgagaugcugcagaaggaguacaucgagagacagggcaagaccccccugggccugguggacaucuucaucuucagcaccagcuucuaccugaucagcaucuuccugcaccugaucaagauccccacccacagacacaucgugggcaagcccugccccaagccccacagacugaaccacaugggcgugugcagcugcggccuguacaagcaccccggcgugcccaccaaguggaagagaugaggacuaguuauaagacugacuagcccgaugggccucccaacgggcccuccuccccuccuugcaccgagauuaauaaaaaaaaaaaaaaaaaaaaaaaaaaaaaaaaaaaaaaaaaaaaaaaaaaaaaaaaaaaaaaaaaaaaaaaaaaaaaaaaaaaaaaaaaaaaaaaaaaaa

SEQ ID NO: 27975 - RNA, 1662 nt, Artificial Sequence
  mRNA product Design i-3 (A100) comprising derived and/or modified sequence from LASV(803213;Clade II)__AAF86703__GPCmut4 (opt4)
aggagaaagcuuaccaugggccagaucaucaccuucuuccaggaggugccccacgugaucgaggaggugaugaacaucgugcugaucgcccugagccugcuggccauccugaagggcaucuacaacguggccaccugcggccuguucggccugaucagcuuccugcugcugugcggcagaagcugcagcgugaccuacaagggcguguacgagcugcagacccuggagcugaacauggccaaccugaacaugugcaugccccugagcugcaccaagaacaacagccaccacuacaucauggugggcaacgagaccggccuggagcugacccugaccaacaccagcaucaucaaccacaaguucugcaaccugagcgacgcccacaagaagaaccuguacgaccacgcccugaugagcaucaucagcaccuuccaccugagcauccccaacuucaaccaguacgaggccaugagcugcgacuucaacggcggcaagaucagcgugcaguacaaccugagccacagcuucgccguggacgccgccaaccacugcggcaccaucgccaacggcgugcugcagaccuucaugagaauggccuggggcggcagcuacaucgcccuggacagcggcaagggcaacugggacugcaucaugaccagcuaccaguaccugaucauccagaacaccaccugggaggaccacugccaguucagcagacccagccccaucggcuaccugggccugcugagccagagaaccagagacaucuacaucagcagaagaagaagaggcaccuucaccuggacccugagcgacagcgagggcaacgaggcccccggcggcuacugccugaccagauggaugcugaucgaggccgagcugaagugcuucggcaacaccgccguggccaagugcaacgagaagcacgacgaggaguucugcgacaugcugagacuguucgacuucugcaagcaggccaucaagagacugaagacccccgcccagaugagcauccagcugaucaacaaggccgugaacgcccugaucaacgaccagcugaucaugaagaaccaccugagagacaucaugggcauccccuacugcaacuacagcagauacugcuaccugaaccacaccgugaccggcaagaccagccugcccagaugcugccuggugagcaacggcagcuaccugaacgagacccacuucagcgacgacaucgagcagcaggccgacaacaugaucaccgagaugcugcagaaggaguacauggacagacagggcaagaccccccugggccugguggaccuguucguguucagcaccagcuucuaccugaucagcaucuuccugcaccuggugaagauccccacccacagacacaucgugggcaagcccugccccaagccccacagacugaaccacaugggcaucugcagcugcggccuguacaagcaccccggcgugcccgugaaguggaagagaugaggacuaguuauaagacugacuagcccgaugggccucccaacgggcccuccuccccuccuugcaccgagauuaauaaaaaaaaaaaaaaaaaaaaaaaaaaaaaaaaaaaaaaaaaaaaaaaaaaaaaaaaaaaaaaaaaaaaaaaaaaaaaaaaaaaaaaaaaaaaaaaaaaaa

SEQ ID NO: 27976 - RNA, 1662 nt, Artificial Sequence
  mRNA product Design i-3 (A100) comprising derived and/or modified sequence from LASV(GA391;Clade III)__CAA36645__GPCmut4 (opt4)
aggagaaagcuuaccaugggccagaucgugaccuucuuccaggaggugccccacgugaucgaggaggugaugaacaucgugcugaucgcccugagcauccuggccauccugaagggccuguacaacguggccaccugcggccugaucggccuggugaccuuccugcugcugagcggcagaagcugcagccugaucuacaagggcaccuacgagcugcagacccuggagcugaacauggagacccugaacaugugcaugccccugagcugcaccaagaacaacagccaccacuacaucagagugggcaacgagaccggccuggagcugacccugaccaacaccagcauccugaaccacaaguucugcaaccugagcgacgcccacaagagaaaccuguacgaccacagccugaugagcaucaucagcaccuuccaccugagcauccccaacuucaaccaguacgaggccaugagcugcgacuucaacggcggcaagaucaccgugcaguacaaccugagccacagcuucgccguggacgccgccggccacugcggcacccuggccaacggcgugcugcagaccuucaugagaauggccuggggcggcagcuacaucgcccuggacagcggcagaggcaacugggacugcaucaugaccagcuaccaguaccugaucauccagaacaccaccugggacgaccacugccaguucagcagacccagccccaucggcuaccugggccugcugagccagagaaccagagacaucuacaucagcagaagaagaagaggcaccuucaccuggacccugagcgacagcgagggcaacgagacccccggcggcuacugccugaccagauggaugcugaucgaggccgagcugaagugcuucggcaacaccgccguggccaagugcaacgagaagcacgacgaggaguucugcgacaugcugagacuguucgacuucugcaagcaggccaucagaagacugaagacccccgcccagaugagcauccagcugaucaacaaggccgugaacgcccugaucaacgaccagcugaucaugaagaaccaccugagagacaucaugggcauccccuacugcaacuacagcagauacugcuaccugaaccacaccagcaccggcaagaccagccugcccagaugcugccugaucagcaacggcagcuaccugaacgagaccaaguucagcgacgacaucgagcagcaggccgacaacaugaucaccgagaugcugcagaaggaguacaucgacagacagggcaagaccccccugggccugguggaccuguucguguucagcaccagcuucuaccugaucagcaucuuccugcaccuggugaagauccccacccacagacacaucgugggcaagcccugccccaagccccacagacugaaccacaugggcaucugcagcugcggccuguacaagcagcccggcgugcccgugagauggaagagaugaggacuaguuauaagacugacuagcccgaugggccucccaacgggcccuccuccccuccuugcaccgagauuaauaaaaaaaaaaaaaaaaaaaaaaaaaaaaaaaaaaaaaaaaaaaaaaaaaaaaaaaaaaaaaaaaaaaaaaaaaaaaaaaaaaaaaaaaaaaaaaaaaaaa

SEQ ID NO: 27977 - RNA, 1665 nt, Artificial Sequence
  mRNA product Design i-3 (A100) comprising derived and/or modified sequence from LASV(AV;Clade V)__CCA30314__GPCmut4 (opt4)
aggagaaagcuuaccaugggccagaucgugaccuucuuccaggaggugccccacgugaucgaggaggugaugaacaucgugcugaucgcccugagcauccuggccgugcugaagggccuguacaacaucgccaccugcggccugaucggccugaucaccuuccugcugcugugcggcagaagcugcagcagcaaccuguacaagggcguguacgagcugcagagccuggaccugaacauggagacccugaacaugugcaugccccugagcugcaccaagaacaacagccaccacuacaucagagugggcaacgacaccggccuggagcugacccugaccaacaccagcauccugaaccacaaguucugcaaccugagcgacgcccacaagaaggaccuguacgaccacgcccugaugagcaucaucagcaccuuccaccugagcauccccaacuucaaccaguacgaggccaugagcugcgacuucaacggcggcaagaucagcgugcaguacaaccugagccacagcuacgccaucgacgccgccaaccacugcggcaccguggccaacggcauccugcagaccuucaugagaauggccuggggcggcagcuacaucgcccuggacagcggcagaggcaacugggacugcaucaugaccagcuaccaguaccugaucauccagaacaccaccugggagaaccacugccaguucagcagacccagccccaucggcuaccugggccugcugagccagagaaccagagacaucuacaucagcagaagaagaagaggcaccuucaccuggacccugagcgacagcgagggcaacgccacccccggcggcuacugccugaccagauggaugcugaucgaggccgagcugaagugcuucggcaacaccgccguggccaagugcaacgagaagcacgacgaggaguucugcgacaugcugagacuguucgacuucugcaagcaggccaucagcagacugaagagccccgcccagaugagcauccagcugaucaacaaggccgugaacgcccugaucaacgaccagcugaucaugaagaaccaccugagagacaucaugggcauccccuacugcaacuacagcaaguacugcuaccugaaccacaccaucaccggcaagaccagccugcccaagugcugccuggugagcaacggcagcuaccugaacgagacccacuucagcgacgacaucgagcagcaggccgacaacaugaucaccgagaugcugcagaaggaguacauggagagacagggcaagaccccccugggccugguggaccuguucguguucagcaccagcuucuaccugaucagcaucuuccugagacuggugaagauccccacccacagacacaucgugggcaagcccugccccaagccccacagacugaaccacaugggcaucugcagcugcggccuguacaagcagcccggcgugcccgugagauggaagagaugaggacuaguuauaagacugacuagcccgaugggccucccaacgggcccuccuccccuccuugcaccgagauuaauaaaaaaaaaaaaaaaaaaaaaaaaaaaaaaaaaaaaaaaaaaaaaaaaaaaaaaaaaaaaaaaaaaaaaaaaaaaaaaaaaaaaaaaaaaaaaaaaaaaa

SEQ ID NO: 27978 - RNA, 1662 nt, Artificial Sequence
  mRNA product Design i-3 (A100) comprising derived and/or modified sequence from LASV(Togo/2016/7082;Clade VI)__AMR44577__GPCmut4 (opt4)
aggagaaagcuuaccaugggccagaucaucaccuucuuccaggaggugccccacgugaucgaggaggugaugaacaucgugcugaucgcccugagccugcuggccauccugaagggcguguacaacguggccaccugcggcaucaucggccuggugaccuuccuguuccugugcggcagaagcugcagccugaucuacaagggcagcuacgagcugcagacccuggagcugaacauggagacccugaacaugugcaugccccugagcugcaccaagaacagcagccaccacuacaucagagugggcaacgagaccggccuggagcugacccugaccaacaccagcaucaucaaccacaaguucugcaaccugagcgacgcccacaagagaaaccuguacgaccacgcccugaugagcauccugagcaccuuccaccugagcauccccaacuucaaccaguacgaggccaugagcugcgacuucaacggcggcaagaucagcgugcaguacaaccugagccacgccuacgccguggacgccgccgagcacugcggcaccguggccaacggcgugcugcagaccuucaugagaauggccuggggcggcagcuacaucgcccuggacagcggcagaggcaacugggacugcaucaugaccagcuaccaguaccugaucauccagaacaccaccugggaggaccacugccaguucagcagacccagccccaucggcuaccugggccugcugagccagagaaccagagacaucuacaucagcagaagaagaagaggcaccuucaccuggacccugagcgacagcgagggcaacgagacccccggcggcuacugccugaccagauggaugcugaucgaggccgagcugaagugcuucggcaacaccgccguggccaagugcaacgagaagcacgacgaggaguucugcgacaugcugagacuguucgacuucugcaagcaggccauccagagacugaagagccccgcccagaugagcauccagcugaucaacaaggccgugaacgcccugaucaacgaccagcugaucaugaagaaccaccugagagacaugaugggcauccccuacugcaacuacagcaaguacugcuaccugaaccacaccagcagcggcagaaccagccugcccaagugcugccuggugagcaacggcagcuaccugaacgagacccacuucagcgacgacaucgagcagcaggccgacaacaugaucaccgagaugcugcagaaggaguacaucgacagacagggcaagaccccccugggccugguggaccuguucguguucagcaccagcuucuaccugaucagcaucuuccugcaccugaucaagauccccacccacagacacaucgugggcaagcccugccccaagccccacagacugaaccacaugggcaucugcagcugcggccuguacaagcagcccggcgugcccaccagauggaagagaugaggacuaguuauaagacugacuagcccgaugggccucccaacgggcccuccuccccuccuugcaccgagauuaauaaaaaaaaaaaaaaaaaaaaaaaaaaaaaaaaaaaaaaaaaaaaaaaaaaaaaaaaaaaaaaaaaaaaaaaaaaaaaaaaaaaaaaaaaaaaaaaaaaaa

SEQ ID NO: 27979 - RNA, 1662 nt, Artificial Sequence
  mRNA product Design i-3 (A100) comprising derived and/or modified sequence from LASV(KAK-428;Clade n.d. (VII))__ANH09740__GPCmut4 (opt4)
aggagaaagcuuaccaugggccagaucgugaccuucuuccaggaggugccccacgugaucgaggaggugaugaacaucgugcugaucgcccugagccugcuggccauccugaagggccuguacaacuucgccaccugcggcgugaucggccugaucaccuuccugcugcugugcggcagaagcugcagcgccaccuacaagggccaguacgagcugcagacccuggagcugaacauggagagccugaacaugugcaugccccugagcugcaccaagaacaacagccaccacuacaucagagccggcaacaacaccggccuggagcugacccugaccaacaccagcaucaucagccacaaguucugcaaccugagcgacgcccacaagaagaaccuguacgaccacacccugaugagcaucaucaccaccuuccaccugagcauccccaacuucaaccaguacgaggccaugagcugcgacuucaacggcggcaagaucagcauccaguacaaccugagccacagcuacgccggcgacgccgcccagcacugcggcaccguggccaacggcgugcugcagaccuucaugagaauggccuggggcggcagcuaccuggcccuggacagcggcagaagaggcugggacugcaucaucagcagcuaccaguaccugaucauccagaacaccaccugggacgaccacugccaguucagcagacccagccccaucggcuaccugggcuucgugagccagaagaccagagacaucuacaucagcagaagaagaagaggcaccuucaccuggacccugagcgacagcgagggccacgacaugcccggcggcuacugccugaccagauggaugcugaucgaggccgaccugaagugcuucggcaacaccgccguggccaagugcaacgagaagcacgacgaggaguucugcgacauguggagacuguucgacuucugcaagcaggccauccagagacugaaggcccccgcccagaugaacauccagcugaucaacaaggccgugaacgcccugaucaacgaccagcugaugaugaagaaccaccugagagacaucaugggcauccccuacugcaacuacagcaaguucugcuaccugaacaacaccaccaccggcagaaccagccugcccagaugcugccugaucagcaacggcagcuaccugaacgagacccacuucagcgacgacaucgagcagcaggccgacaacaugaucaccgagaugcugcagaaggaguacauggacagacagggcaagaccccccugggccugguggaccuguucguguucagcaccagcuucuaccugaucaccaucuuccugcaccuggugaagauccccacccacagacacaucgugggcaagcccugccccaagccccacagacugaaccacaugggcaucugcagcugcggccuguacaagcagcccggcgugcccgugagauggaagagaugaggacuaguuauaagacugacuagcccgaugggccucccaacgggcccuccuccccuccuugcaccgagauuaauaaaaaaaaaaaaaaaaaaaaaaaaaaaaaaaaaaaaaaaaaaaaaaaaaaaaaaaaaaaaaaaaaaaaaaaaaaaaaaaaaaaaaaaaaaaaaaaaaaaa

SEQ ID NO: 27980 - RNA, 1662 nt, Artificial Sequence; identical to SEQ ID NO: 27974
  mRNA product Design i-3 (A100) comprising derived and/or modified sequence from LASV(Pinneo-NIG-1969;Clade I)__AIT17836__GPCmut4 (opt4)

SEQ ID NO: 27981 - RNA, 1662 nt, Artificial Sequence
  mRNA product Design i-3 (A100) comprising derived and/or modified sequence from LASV(ISTH0009-NIG-2011;Clade II)__AIT17404__GPCmut4 (opt4)
aggagaaagcuuaccaugggccagaucaucaccuucuuccaggaggugccccacgugaucgaggaggugaugaacaucgugcugaucgcccugagccugcuggccauccugaagggcaucuacaacguggccaccugcggccuguucggccuggugagcuuccugcugcugugcggcagaagcugcagcaccaccuacaagggcguguacgagcugcagacccuggagcuggacauggccagccugaacaugugcaugccccugagcugcaccaagaacaacagccaccacuacaucauggugggcaacgagaccggccuggagcugacccugaccaacaccagcaucaucaaccacaaguucugcaaccugagcgacgcccacaagaagaaccuguacgaccacgcccugaugagcaucaucagcaccuuccaccugagcauccccaacuucaaccaguacgaggccaugagcugcgacuucaacggcggcaagaucagcgugcaguacaaccugagccacgccuacgccguggacgccgccaaccacugcggcaccaucgccaacggcgugcugcagaccuucaugagaauggccuggggcggcagcuacaucgcccuggacagcggcaagggcagcugggacugcaucaugaccagcuaccaguaccugaucauccagaacaccaccugggaggaccacugccaguucagcagacccagccccaucggcuaccugggccugcugagccagagaaccagagacaucuacaucagcagaagaagaagaggcaccuucaccuggacccugagcgacagcgagggcaacgagacccccggcggcuacugccugaccagauggaugcugaucgaggccgagcugaagugcuucggcaacaccgccguggccaagugcaacgagaagcacgacgaggaguucugcgacaugcugagacuguucgacuucugcaagcaggccaucagaagacugaagacccccgcccagaugagcauccagcugaucaacaaggccgugaacgcccugaucaacgaccagcugaucaugaagaaccaccugagagacaucaugggcauccccuacugcaacuacagcaaguacugcuaccugaaccacaccgugaccggcaagaccagccugcccagaugcugccuggugagcaacggcagcuaccugaacgagacccacuucagcgacgacaucgagcagcaggccgacaacaugaucaccgagcugcugcagaaggaguacauggacagacagggcaagaccccccugggccugguggaccuguucguguucagcaccagcuucuaccugaucagcaucuuccugcaccugaucaagauccccacccacagacacaucaccggcaagcccugccccaagccccacagacugaaccacaugggcaucugcagcugcggccuguacaagcaccccggcgugcccgugaaguggaagagaugaggacuaguuauaagacugacuagcccgaugggccucccaacgggcccuccuccccuccuugcaccgagauuaauaaaaaaaaaaaaaaaaaaaaaaaaaaaaaaaaaaaaaaaaaaaaaaaaaaaaaaaaaaaaaaaaaaaaaaaaaaaaaaaaaaaaaaaaaaaaaaaaaaaa

SEQ ID NO: 27982 - RNA, 1662 nt, Artificial Sequence
  mRNA product Design i-3 (A100) comprising derived and/or modified sequence from LASV(ISTH2010-NIG-2012;Clade II)__AIT17482__GPCmut4 (opt4)
aggagaaagcuuaccaugggccagaucaucaccuucuuccaggaggugccccacgugaucgaggaggugaugaacaucgugcugaucgcccugagccugcuggccauccugaagggcaucuacaacguggccaccugcggccuguucggccuggugagcuuccugcugcugugcggcagaagcugcagcaccaccuacaagggcguguacgagcugcagacccuggagcuggacauggccagccugaacaugugcaugccccugagcugcaccaagaacaacagccaccacuacaucauggugggcaacgagaccggccuggagcugacccugaccaacaccagcaucaucaaccacaaguucugcaaccugagcgacgcccacaagaagaaccuguacgaccacgcccugaugagcaucaucagcaccuuccaccugagcauccccaacuucaaccaguacgaggccaugagcugcgacuucaacggcggcaagaucagcgugcaguacaaccugagccacgccuacgccguggacgccgccaaccacugcggcaccaucgccaacggcgugcugcagaccuucaugagaauggccuggggcggcagcuacaucgcccuggacagcggcaagggcagcugggacugcaucaugaccagcuaccaguaccugaucauccagaacaucaccugggaggaccacugccaguucagcagacccagccccaucggcuaccugggccugcugagccagagaaccagagacaucuacaucagcagaagaagaagaggcaccuucaccuggacccugagcgacagcgagggcaacgagacccccggcggcuacugccugaccagauggaugcugaucgaggccgagcugaagugcuucggcaacaccgccguggccaagugcaacgagaagcacgacgaggaguucugcgacaugcugagacuguucgacuucugcaagcaggccaucagaagacugaagacccccgcccagaugagcauccagcugaucaacaaggccgugaacgcccugaucaacgaccagcugaucaugaagaaccaccugagagacaucaugggcauccccuacugcaacuacagcaaguacugcuaccugaaccacaccgugaccggcaagaccagccugcccagaugcugccuggugagcaacggcagcuaccugaacgagacccacuucagcgacgacaucgagcagcaggccgacaacaugaucaccgagcugcugcagaaggaguacaucgacagacagggcaagaccccccugggccugguggaccuguucguguucagcaccagcuucuaccugaucagcaucuuccugcaccuggugaagauccccacccacagacacguggugggcaagcccugccccaagccccacagacugaaccacaugggcaucugcagcugcggccuguacaagcaccccggcgugcccgugaaguggaagagaugaggacuaguuauaagacugacuagcccgaugggccucccaacgggcccuccuccccuccuugcaccgagauuaauaaaaaaaaaaaaaaaaaaaaaaaaaaaaaaaaaaaaaaaaaaaaaaaaaaaaaaaaaaaaaaaaaaaaaaaaaaaaaaaaaaaaaaaaaaaaaaaaaaaa

SEQ ID NO: 27983 - RNA, 1662 nt, Artificial Sequence
  mRNA product Design i-3 (A100) comprising derived and/or modified sequence from LASV(Lassa virus/H.sapiens-wt/NGA/2015/ISTH_0543;Clade II)__AVO03639__GPCmut4 (opt4)
aggagaaagcuuaccaugggccagaucaucaccuucuuccaggaggugccccacgugaucgaggaggugaugaacaucgugcugaucgcccugagccugcuggccauccugaagggcaucuacaacguggccaccugcggccuguucggccuggugagcuuccugcugcugugcggcagaagcugcagcaccaccuacaagggcguguacgagcugcagacccuggagcuggacauggccaaccugaacaugugcaugccccugagcugcaccaagaacaacagccaccacuacaucauggugggcaacgagaccggccuggagcugacccugaccaacaccagcaucaucaaccacaaguucugcaaccugagcgacgcccacaagaagaaccuguacgaccacgcccugaugagcaucaucagcaccuuccaccugagcauccccaacuucaaccaguacgaggccaugagcugcgacuucaacggcggcaagaucagcgugcaguacaaccugagccacaccuacgccguggacgccgccaaccacugcggcaccaucgccaacggcgugcugcagaccuucaugagaauggccuggggcggcagcuacaucgcccuggacagcggcaagggcagcugggacugcaucaugaccagcuaccaguaccuggugauccagaacaccaccugggaggaccacugccaguucagcagacccagccccaucggcuaccugggccugcugagccagagaaccagagacaucuacaucagcagaagaagaagaggcaccuucaccuggacccugagcgacagcgagggcaacgagacccccggcggcuacugccugaccagauggaugcugaucgaggccgagcugaagugcuucggcaacaccgccguggccaagugcaacgagaagcacgacgaggaguucugcgacaugcugagacuguucgacuucugcaagcaggccaucagaagacugaagacccccgcccagaugagcauccagcugaucaacaaggccgugaacgcccugaucaacgaccagcugaucaugaagaaccaccugagagacaucaugggcauccccuacugcaacuacagcaaguacugcuaccugaaccacaccgugaccggcaagaccagccugcccagaugcugccuggugagcaacggcagcuaccugaacgagacccacuucagcgacgacaucgagcagcaggccgacaacaugaucaccgagcugcugcagaaggaguacaucgacagacagggcaagaccccccugggccugguggaccuguucguguucagcaccagcuucuaccugaucagcaucuuccugcaccuggugaagauccccacccacagacacaucaccggcaagcccugccccaagccccacagacugaaccacaugggcaucugcagcugcggccuguacaagcaccccggcgugcccgugaaguggaagagaugaggacuaguuauaagacugacuagcccgaugggccucccaacgggcccuccuccccuccuugcaccgagauuaauaaaaaaaaaaaaaaaaaaaaaaaaaaaaaaaaaaaaaaaaaaaaaaaaaaaaaaaaaaaaaaaaaaaaaaaaaaaaaaaaaaaaaaaaaaaaaaaaaaaa

SEQ ID NO: 27984 - RNA, 1662 nt, Artificial Sequence
  mRNA product Design i-3 (A100) comprising derived and/or modified sequence from LASV(Lassa virus/H.sapiens-wt/NGA/2016/ISTH_0009;Clade II)__AVO03571__GPCmut4 (opt4)
aggagaaagcuuaccaugggccagaucaucaccuucuuccaggaggugccccacgugaucgaggaggugaugaacaucgugcugaucgcccugagccugcuggccauccugaagggcaucuacaacguggccaccugcggccugcugggccuggugagcuuccugcugcugugcggcagaagcugcagcaccaccuacaagggcguguacgagcugcagacccuggagcuggacauggccagccugaacaugugcaugccccugagcugcaccaagaacaacagccaccacuacaucauggugggcaacgagaccggccuggagcugacccugaccaacaccagcaucaucaaccacaaguucugcaaccugagcgacgcccacaagaagaaccuguacgaccacgcccugaugagcaucaucagcaccuuccaccugagcauccccaacuucaaccaguacgaggccaugagcugcgacuucaacggcggcagaaucagcgugcaguacaaccugagccacagcuacgccguggacgccgccaaccacugcggcaccaucgccaacggcgugcugcagaccuucaugagaauggccuggggcggcagcuacaucgcccuggacagcggcaagggcagcugggacugcaucaugaccagcuaccaguaccugaucauccagaacaccaccugggaggaccacugccaguucagcagacccagccccaucggcuaccugggccugcugagccagagaaccagagacaucuacaucagcagaagaagaagaggcaccuucaccuggacccugagcgacagcgagggcaacgagacccccggcggcuacugccugaccagauggaugcugaucgaggccgagcugaagugcuucggcaacaccgccguggccaagugcaacgagaagcacgacgaggaguucugcgacaugcugagacuguucgacuucugcaagcaggccaucagaagacugaagacccccgcccagaugagcauccagcugaucaacaaggccgugaacgcccugaucaacgaccagcugaucaugaagaaccaccugagagacaucaugggcauccccuacugcaacuacagcaaguacugcuaccugaaccacaccgugaccggcaagaccagccugcccagaugcugccuggugagcaacggcagcuaccugaacgagacccacuucagcgacgacaucgagcagcaggccgacaacaugaucaccgagcugcugcagaaggaguacaucgacagacagggcaagaccccccugggccugguggaccuguucguguucagcaccagcuucuaccugaucagcaucuuccugcaccuggugaagauccccacccacagacacaucaccggcaagcccugccccaagccccacagacugaaccacaugggcaucugcagcugcggccuguacaaccaccccggcgugcccgugaaguggaagagaugaggacuaguuauaagacugacuagcccgaugggccucccaacgggcccuccuccccuccuugcaccgagauuaauaaaaaaaaaaaaaaaaaaaaaaaaaaaaaaaaaaaaaaaaaaaaaaaaaaaaaaaaaaaaaaaaaaaaaaaaaaaaaaaaaaaaaaaaaaaaaaaaaaaa

SEQ ID NO: 27985 - RNA, 1662 nt, Artificial Sequence
  mRNA product Design i-3 (A100) comprising derived and/or modified sequence from LASV(Lassa virus/H.sapiens-wt/NGA/2016/ISTH_0017;Clade II)__AVO03567__GPCmut4 (opt4)
aggagaaagcuuaccaugggccagaucaucaccuucuuccaggaggugccccacgugaucgaggaggugaugaacaucgugcugaucgcccugagccugcuggccauccugaagggcaucuacaacguggccaccugcggccuguucggccuggugagcuuccugcugcugugcggcagaagcugcagcaccaccuacaagggcguguacgagcugcagacccuggagcuggacauggccagccugaacaugugcaugccccugagcugcaccaagaacaacagccaccacuacaucauggugggcaacgagaccggccuggagcugacccugaccaacaccagcaucaucaaccacaaguucugcaaccugagcgacgcccacaagaagaaccuguacgaccacgcccugaugagcaucaucagcaccuuccaccugagcauccccaacuucaaccaguacgaggccaugagcugcgacuucaacggcggcaagaucagcgugcaguacaaccugagccacaccuacgccaucgacgccgccaaccacugcggcaccaucgccaacggcgugcugcagaccuucaugagaauggccuggggcggcagcuacaucgcccuggacagcggcaagggcagcugggacugcaucaugaccagcuaccaguaccugaucauccagaacaccaccugggaggaccacugccaguucagcagacccagccccaucggcuaccugggccugcugagccagagaaccagagacaucuacaucagcagaagaagaagaggcaccuucaccuggacccugagcgacagcgagggcaacgagacccccggcggcuacugccugaccagauggaugcugaucgaggccgagcugaagugcuucggcaacaccgccguggccaagugcaacgagaagcacgacgaggaguucugcgacaugcugagacuguucgacuucugcaagcaggccaucagaagacugaagacccccgcccagaugagcauccagcugaucaacaaggccgugaacgcccugaucaacgaccagcugaucaugaagaaccaccugagagacaucaugggcauccccuacugcaacuacagcaaguacugcuaccugaaccacaccgugaccggcaagaccagccugcccagaugcugccuggugagcaacggcagcuaccugaacgagacccacuucagcgacgacaucgagcagcaggccgacaacaugaucaccgagcugcugcagaaggaguacauggacagacagggcaagaccccccugggccugguggaccuguucguguucagcaccagcuucuaccugaucagcaucuuccugcaccuggugagaauccccacccacagacacgugaucggcaagcccugccccaagccccacagacugaaccacaugggcaucugcagcugcggccuguacaagcaccccggcgugcccgugaaguggaagagaugaggacuaguuauaagacugacuagcccgaugggccucccaacgggcccuccuccccuccuugcaccgagauuaauaaaaaaaaaaaaaaaaaaaaaaaaaaaaaaaaaaaaaaaaaaaaaaaaaaaaaaaaaaaaaaaaaaaaaaaaaaaaaaaaaaaaaaaaaaaaaaaaaaaa

SEQ ID NO: 27986 - RNA, 1662 nt, Artificial Sequence
  mRNA product Design i-3 (A100) comprising derived and/or modified sequence from LASV(Lassa virus/H.sapiens-wt/NGA/2018/ISTH_0959;Clade II)__AVV65099__GPCmut4 (opt4)
aggagaaagcuuaccaugggccagaucaucaccuucuuccaggaggugccccacgugaucgaggaggugaugaacaucgugcugaucgcccugagccugcuggccauccugaagggcaucuacaacguggugaccugcggccuguucggccuggugagcuuccugcugcugugcggcagaagcugcagcaccaccuacaagggcguguacgagcugcagacccuggagcuggacauggccagccugaacaugugcaugccccugagcugcaccaagaacaacagccaccacuacaucauggugggcaacgagaccggccuggagcugacccugaccaacaccagcaucaucaaccacaaguucugcaaccugagcgacgcccacaagaagaaccuguacgaccacgcccugaugagcaucaucagcaccuuccaccugagcauccccaacuucaaccaguacgaggccaugagcugcgacuucaacggcggcaagaucagcgugcaguacaaccugagccacgccuacgccaucgacgccgccaaccacugcggcaccaucgccaacggcgugcugcagaccuucaugagaauggccuggggcggcagcuacaucgcccuggacagcggcaagggcagcugggacugcaucaugaccagcuaccaguaccugaucauccagaacaccaccugggaggaccacugccaguucagcagacccagccccaucggcuaccugggccugcugagccagagaaccagagacaucuacaucagcagaagaagaagaggcaccuucaccuggacccugagcgacagcgagggcaacgagacccccggcggcuacugccugaccagauggaugcugaucgaggccgagcugaagugcuucggcaacaccgccguggccaagugcaacgagaagcacgacgaggaguucugcgacaugcugagacuguucgacuucugcaagcaggccaucagaagacugaagacccccgcccagaugagcauccagcugaucaacaaggccgugaacgcccugaucaacgaccagcugaucaugaagaaccaccugagagacaucaugggcauccccuacugcaacuacagcaaguacugcuaccugaaccacaccgugaccggcaagaccagccugcccagaugcugccuggugagcaacggcagcuaccugaacgagacccacuucagcgacgacaucgagcagcaggccgacaacaugaucaccgagcugcugcagaaggaguacaucgacagacagggcaagaccccccugggccugguggaccuguucguguucagcaccagcuucuaccugaucagcaucuuccugcaccuggugaagauccccacccacagacacgugaucggcaagcccugccccaagccccacagacugaaccacaugggcaucugcagcugcggccuguacaagcaccccggcgugcccgugaaguggaagagaugaggacuaguuauaagacugacuagcccgaugggccucccaacgggcccuccuccccuccuugcaccgagauuaauaaaaaaaaaaaaaaaaaaaaaaaaaaaaaaaaaaaaaaaaaaaaaaaaaaaaaaaaaaaaaaaaaaaaaaaaaaaaaaaaaaaaaaaaaaaaaaaaaaaa

SEQ ID NO: 27987 - RNA, 1662 nt, Artificial Sequence
  mRNA product Design i-3 (A100) comprising derived and/or modified sequence from LASV(LASV003-NIG-2008;Clade II)__AIT17580__GPCmut4 (opt4)
aggagaaagcuuaccaugggccagaucaucaccuucuuccaggaggugccccacgugaucgaggaggugaugaacaucgugcugaucgcccugagccugcuggccauccugaagggcaucuacaacguggccaccugcggccuguucggccuggugagcuuccugcugcugugcggcagaagcugcagcaccaccuacaagggcguguacgagcugcagacccuggagcuggacauggccagccugaacaugugcaugccccugagcugcaccaagaacaacagccaccacuacaucauggugggcaacgagaccggccuggagcugacccugaccaacaccagcaucaucaaccacaaguucugcaaccugagcgacgcccacaagaagaaccuguacgaccacgcccugaugagcaucaucagcaccuuccaccugagcauccccaacuucaaccaguacgaggccaugagcugcgacuucaacggcggcaagaucagcgugcaguacaaccugagccacaccuacgccguggacgccgccaaccacugcggcaccaucgccaacggcgugcugcagaccuucaugagaauggccuggggcggcagcuacaucgcccuggacagcggcaagggcagcugggacugcaucaugaccagcuaccaguaccugaucauccagaacaccaccugggaggaccacugccaguucagcagacccagccccaucggcuaccugggccugcugagccagagaaccagagacaucuacaucagcagaagaagaagaggcaccuucaccuggacccugagcgacagcgagagcaacgagacccccggcggcuacugccugaccagauggaugcugaucgaggccgagcugaagugcuucggcaacaccgccguggccaagugcaacgagaagcacgacgaggaguucugcgacaugcugagacuguucgacuucugcaagcaggccaucagaagacugaaggcccccgcccagaugagcauccagcugaucaacaaggccgugaacgcccugaucaacgaccagcugaucaugaagaaccaccugagagacaucaugggcauccccuacugcaacuacagcaaguacugcuaccugaaccacaccgugaccggcagaaccagccugcccagaugcugccuggugagcaacggcagcuaccugaacgagacccacuucagcgacgacaucgagcagcaggccgacaacaugaucaccgagcugcugcagaaggaguacauggacagacagggcaagaccccccugggccugguggaccuguucguguucagcaccagcuucuaccugaucagcaucuuccugcaccuggugaagauccccacccacagacacgugaucggcaagcccugccccaagccccacagacugaaccacaugggcaucugcagcugcggccuguacaagcaccccggcgugcccgugaaguggaagagaugaggacuaguuauaagacugacuagcccgaugggccucccaacgggcccuccuccccuccuugcaccgagauuaauaaaaaaaaaaaaaaaaaaaaaaaaaaaaaaaaaaaaaaaaaaaaaaaaaaaaaaaaaaaaaaaaaaaaaaaaaaaaaaaaaaaaaaaaaaaaaaaaaaaa

SEQ ID NO: 27988 - RNA, 1662 nt, Artificial Sequence
  mRNA product Design i-3 (A100) comprising derived and/or modified sequence from LASV(LASV035-NIG-2009;Clade II)__AIT17588__GPCmut4 (opt4)
aggagaaagcuuaccaugggccagaucaucaccuucuuccaggaggugccccacgugaucgaggaggugaugaacaucgugcugaucgcccugagccugcuggccauccugaagggcaucuacaacguggccaccugcggccuguucggccuggugagcuuccugcugcugugcggcagaagcugcagcaccaccuacaagggcguguacgagcugcagacccuggagcuggacauggccagccugaacaugugcaugccccugagcugcaccaagaacaacagccaccacuacaucauggugggcaacgagaccggccuggagcugacccugaccaacaccagcaucaucaaccacaaguucugcaaccugagcgacgcccacaagaagaaccuguacgaccacgcccugaugagcaucaucagcaccuuccaccugagcauccccaacuucaaccaguacgaggccaugagcugcgacuucaacggcggcaagaucagcgugcaguacaaccugagccacgccuacgccguggacgccgccaaccacugcggcaccaucgccaacggcgugcugcagaccuucaugagaauggccuggggcggcagcuacaucgcccuggacagcggcaagggcagcugggacugcaucaugaccagcuaccaguaccugaucauccagaacaccaccugggaggaccacugccaguucagcagacccagccccaucggcuaccugggccugcugagccagagaaccagagacaucuacaucagcagaagaagaagaggcaccuucaccuggacccugagcgacagcgagggcaacgagacccccggcggcuacugccugaccagauggaugcugaucgaggccgagcugaagugcuucggcaacaccgccguggccaagugcaacgagaagcacgacgaggaguucugcgacaugcugagacuguucgacuucugcaagcaggccaucagaagacugaaggcccccgcccagaugagcauccagcugaucaacaaggccgugaacgcccugaucaacgaccagcugaucaugaagaaccaccugagagacaucaugggcauccccuacugcaacuacagcaaguacugcuaccugaaccacaccgugaccggcaagaccagccugcccagaugcugccuggugagcaacggcagcuaccugaacgagacccacuucagcgacgacaucgagcagcaggccgacaacaugaucaccgagcugcugcagaaggaguacaucgacagacagggcaagaccccccugggccugguggaccuguucguguucagcaccagcuucuaccugaucagcaucuuccugcaccuggugaagauccccacccacagacacgugaucggcaagcccugccccaagccccacagacugaaccacaugggcaucugcagcugcggccuguacaagcaccccggcgugcccgugaaguggaagagaugaggacuaguuauaagacugacuagcccgaugggccucccaacgggcccuccuccccuccuugcaccgagauuaauaaaaaaaaaaaaaaaaaaaaaaaaaaaaaaaaaaaaaaaaaaaaaaaaaaaaaaaaaaaaaaaaaaaaaaaaaaaaaaaaaaaaaaaaaaaaaaaaaaaa

SEQ ID NO: 27989 - RNA, 1662 nt, Artificial Sequence
  mRNA product Design i-3 (A100) comprising derived and/or modified sequence from LASV(LASV1000-NIG-2009;Clade II)__AIT17782__GPCmut4 (opt4)
aggagaaagcuuaccaugggccagaucaucaccuucuuccaggaggugccccacgugaucgaggaggugaugaacaucgugcugaucgcccugagccugcuggccauccugaagggcaucuacaacguggccaccugcggccuguucggccuggugagcuuccugcugcugugcggcagaagcugcagcaccaccuacaagggcguguacgagcugcagacccuggagcuggacauggccagccugaacaugugcaugccccugagcugcaccaagaacaacagccaccacuacaucauggugggcaacgagaccggccuggagcugacccugaccaacaccagcaucaucaaccacaaguucugcaaccugagcgacgcccacaagaagaaccuguacgaccacgcccugaugagcaucaucagcaccuuccaccugagcauccccaacuucaaccaguacgaggccaugagcugcgacuucaacggcggcaagaucagcgugcaguacaaccugagccacaccuacgccguggacgccgccaaccacugcggcaccaucgccaacggcgugcugcagaccuucaugagaauggccuggggcggcagcuacaucgcccuggacagcggcaagggcagcugggacugcaucaugaccagcuaccaguaccugaucauccagaacaccaccugggaggaccacugccaguucagcagacccagccccaucggcuaccugggccugcugagccagagaaccagagacaucuacaucagcagaagaagaagaggcaccuucaccuggacccugagcgacagcgagggcaacgagacccccggcggcuacugccugaccagauggaugcugaucgaggccgagcugaagugcuucggcaacaccgccguggccaagugcaacgagaagcacgacgaggaguucugcgacaugcugagacuguucgacuucugcaagcaggccaucaagagacugaagacccccgcccagaugagcauccagcugaucaacaaggccgugaacgcccugaucaacgaccagcugaucaugaagaaccaccugagagacaucaugggcauccccuacugcaacuacagcaaguacugcuaccugaaccacaccgugaccggcaagaccagccugcccagaugcugccuggugagcaacggcagcuaccugaacgagacccacuucagcgacgacaucgagcagcaggccgacaacaugaucaccgagcugcugcagaaggaguacaucgacagacagggcaagaccccccugggccugguggaccuguucguguucagcaccagcuucuaccugaucagcaucuuccugcaccuggugaagauccccacccacagacacguggugggcaagcccugccccaagccccacagacugaaccacaugggcaucugcagcugcggccuguacaagcaccccggcgugcccgugaaguggaagagaugaggacuaguuauaagacugacuagcccgaugggccucccaacgggcccuccuccccuccuugcaccgagauuaauaaaaaaaaaaaaaaaaaaaaaaaaaaaaaaaaaaaaaaaaaaaaaaaaaaaaaaaaaaaaaaaaaaaaaaaaaaaaaaaaaaaaaaaaaaaaaaaaaaaa

SEQ ID NO: 27990 - RNA, 1662 nt, Artificial Sequence
  mRNA product Design i-3 (A100) comprising derived and/or modified sequence from LASV(LASV221-NIG-2010;Clade II)__AIT17624__GPCmut4 (opt4)
aggagaaagcuuaccaugggccagaucaucaccuucuuccaggaggugccccacgugaucgaggaggugaugaacaucgugcugaucgcccugagccugcuggccauccugaagggcaucuacaacguggccaccugcggccuguucggccuggugagcuuccugcugcugugcggcagaagcugcagcaccaccuacaagggcguguacgagcugcagacccuggagcuggacauggccagccugaacaugugcaugccccugagcugcaccaagaacaacagccaccacuacaucauggugggcaacgagaccggccuggagcugacccugaccaacaccagcaucaucaaccacaaguucugcaaccugagcgacgcccacaagaagaaccuguacgaccacgcccugaugagcaucaucagcaccuuccaccugagcauccccaacuucaaccaguacgaggccaugagcugcgacuucaacggcggcaagaucagcgugcaguacaaccugagccacaccuacgccaucgacgccgccaaccacugcggcaccaucgccaacggcgugcugcagaccuucaugagaauggccuggggcggcagcuacaucgcccuggacagcggcaagggcagcugggacugcaucaugaccagcuaccaguaccugaucauccagaacaccaccugggaggaccacugccaguucagcagacccagccccaucggcuaccugggccugcugagccagagaaccagagacaucuacaucagcagaagaagaagaggcaccuucaccuggacccugagcgacagcgagggcaacgagacccccggcggcuacugccugaccagauggaugcugaucgaggccgagcugaagugcuucggcaacaccgccguggccaagugcaacgagaagcacgacgaggaguucugcgacaugcugagacuguucgacuucugcaagcaggccaucagaagacugaagacccccgcccagaugagcauccagcugaucaacaaggccgugaacgcccugaucaacgaccagcugaucaugaagaaccaccugagagacaucaugggcauccccuacugcaacuacagcaaguacugcuaccugaaccacaccgugaccggcaagaccagccugcccagaugcugccuggugagcaacggcagcuaccugaacgagacccacuucagcgacgacaucgagcagcaggccgacaacaugaucaccgagaugcugcagaaggaguacauggacagacagggcaagaccccccugggccugguggaccuguucguguucagcaccagcuucuaccugaucagcaucuuccugcaccuggugaagauccccacccacagacacgugaucggcaagcccugccccaagccccacagacugaaccacaugggcaucugcagcugcggccuguacaagcaccccggcgugcccgugaaguggaagagaugaggacuaguuauaagacugacuagcccgaugggccucccaacgggcccuccuccccuccuugcaccgagauuaauaaaaaaaaaaaaaaaaaaaaaaaaaaaaaaaaaaaaaaaaaaaaaaaaaaaaaaaaaaaaaaaaaaaaaaaaaaaaaaaaaaaaaaaaaaaaaaaaaaaa

SEQ ID NO: 27991 - RNA, 1662 nt, Artificial Sequence
  mRNA product Design i-3 (A100) comprising derived and/or modified sequence from LASV(LASV237-NIG-2010;Clade II)__AIT17638__GPCmut4 (opt4)
aggagaaagcuuaccaugggccagaucaucaccuucuuccaggaggugccccacgugaucgaggaggugaugaacaucgugcugaucgcccugagccugcuggccauccugaagggcaucuacaacguggccaccugcggccuguucggccuggugagcuuccugcugcugugcggcagaagcugcagcaccaccuacaagggcguguacgagcugcagacccuggagcuggacauggccagccugaacaugugcaugccccugagcugcaccaagaacaacagccaccacuacaucauggugggcaacgagaccggccuggagcugacccugaccaacaccagcaucaucaaccacaaguucugcaaccugagcgacgcccacaagaaggaccuguacgaccacgcccugaugagcaucaucagcaccuuccaccugagcauccccaacuucaaccaguacgaggccaugagcugcgacuucaacggcggcaagaucagcgugcaguacaaccugagccacaccuacgccguggacgccgccaaccacugcggcaccaucgccaacggcgugcugcagaccuucaugagaauggccuggggcggcagcuacaucgcccuggacagcggcaagggcagcugggacugcaucaugaccagcuaccaguaccugaucauccagaacaccaccugggaggaccacugccaguucagcagacccagccccaucggcuaccugggccugcugagccagagaaccagagacaucuacaucagcagaagaagaagaggcaccuucaccuggacccugagcgacagcgagggcaacgagacccccggcggcuacugccugaccagauggaugcugaucgaggccgagcugaagugcuucggcaacaccgccguggccaagugcaacgagaagcacgacgaggaguucugcgacaugcugagacuguucgacuucugcaagcaggccaucagaagacugaagacccccgcccagaugagcauccagcugaucaacaaggccgugaacgcccugaucaacgaccagcugaucaugaagaaccaccugagagacaucaugggcauccccuacugcaacuacagcaaguacugcuaccugaaccacaccgugaccggcaagaccagccugcccagaugcugccuggugagcaacggcagcuaccugaacgagacccacuucagcgacgacaucgagcagcaggccgacaacaugaucaccgagcugcugcagaaggaguacauggacagacagggcaagaccccccugggccugguggaccuguucguguucagcaccagcuucuaccugaucagcaucuuccugcaccugaucaagauccccacccacagacacaucaccggcaagcccugccccaagccccacagacugaaccacaugggcaucugcagcugcggccuguacaagcaccccggcgugcccgugaaguggaagagaugaggacuaguuauaagacugacuagcccgaugggccucccaacgggcccuccuccccuccuugcaccgagauuaauaaaaaaaaaaaaaaaaaaaaaaaaaaaaaaaaaaaaaaaaaaaaaaaaaaaaaaaaaaaaaaaaaaaaaaaaaaaaaaaaaaaaaaaaaaaaaaaaaaaa

SEQ ID NO: 27992 - RNA, 1662 nt, Artificial Sequence
  mRNA product Design i-3 (A100) comprising derived and/or modified sequence from LASV(LASV253-NIG-2011;Clade II)__AIT17670__GPCmut4 (opt4)
aggagaaagcuuaccaugggccagaucaucaccuucuuccaggaggugccccacgugaucgaggaggugaugaacaucgugcugaucgcccugagccugcuggccauccugaagggcaucuacaacguggccaccugcggccuguucggccuggugagcuuccugcugcugugcggcagaagcugcagcaccaccuacaagggcguguacgagcugcagacccuggagcuggacauggccagccugaacaugugcaugccccugagcugcaccaagaacaacagccaccacuacaucauggugggcaacgagaccggccuggagcugacccugaccaacaccagcaucaucaaccacaaguucugcaaccugagcgacgcccacaagaagaaccuguacgaccacgcccugaugagcaucaucagcaccuuccaccugagcauccccaacuucaaccaguacgaggccaugagcugcgacuucaacggcggcaagaucagcgugcaguacaaccugagccacaccuacgccguggacgccgccaaccacugcggcaccaucgccaacggcgugcugcagaccuucaugagaauggccuggggcggcagcuacaucgcccuggacagcggcaagggcagcugggacugcaucaugaccagcuaccaguaccugaucauccagaacaccaccugggaggaccacugccaguucagcagacccagccccaucggcuaccugggccugcugagccagagaaccagagacaucuacaucagcagaagaagaagaggcaccuucaccuggacccugagcgacagcgagggcaacgagacccccggcggcuacugccugaccagauggaugcugaucgaggccgagcugaagugcuucggcaacaccgccguggccaagugcaacgagaagcacgacgaggaguucugcgacaugcugagacuguucgacuucugcaagcaggccaucagaagacugaaggcccccgcccagaugagcauccagcugaucaacaaggccgugaacgcccugaucaacgaccagcugaucaugaagaaccaccugagagacaucaugggcauccccuacugcaacuacagcaaguacugcuaccugaaccacaccgugaccggcagaaccagccugcccagaugcugccuggugagcaacggcagcuaccugaacgagacccacuucagcgacgacaucgagcagcaggccgacaacaugaucaccgagcugcugcagaaggaguacaucgacagacagggcaagaccccccugggccugguggaccuguucguguucagcaccagcuucuaccugaucagcaucuuccugcaccuggugaagauccccacccacagacacaucaucggcaagcccugccccaagccccacagacugaaccacaugggcaucugcagcugcggccuguacaagcaccccggcgugcccgugaaguggaagagaugaggacuaguuauaagacugacuagcccgaugggccucccaacgggcccuccuccccuccuugcaccgagauuaauaaaaaaaaaaaaaaaaaaaaaaaaaaaaaaaaaaaaaaaaaaaaaaaaaaaaaaaaaaaaaaaaaaaaaaaaaaaaaaaaaaaaaaaaaaaaaaaaaaaa

SEQ ID NO: 27993 - RNA, 1662 nt, Artificial Sequence
  mRNA product Design i-3 (A100) comprising derived and/or modified sequence from LASV(LASV254-NIG-2011;Clade II)__AIT17674__GPCmut4 (opt4)
aggagaaagcuuaccaugggccagaucaucaccuucuuccaggaggugccccacgugaucgaggaggugaugaacaucgugcugaucgcccugagccugcuggccauccugaagggcaucuacaacguggccaccugcggccuguucggccuggugagcuuccugcugcugugcggcagaagcugcagcaccaccuacaagggcguguacgagcugcagacccuggagcuggacaugaccaaccugaacaugugcaugccccugagcugcaccaagaacaacagccaccacuacaucauggugggcaacgagaccggccuggagcugacccugaccaacaccagcaucaucaaccacaaguucugcaaccugagcgacgcccacaagaagaaccuguacaaccacgcccugaugagcaucaucagcaccuuccaccugagcauccccaacuucaaccaguacgaggccaugagcugcgacuucaacggcggcaagaucagcgugcaguacaaccugagccacagcuacgccguggacgccgccaaccacugcggcaccaucgccaacggcgugcugcagaccuucaugagaauggccuggggcggcagcuacaucgcccuggacagcggcaagggcaacugggacugcaucaugaccagcuaccaguaccugaucauccagaacaccaccugggaggaccacugccaguucagcagacccagccccaucggcuaccugggccugcugagccagagaaccagagacaucuacaucagcagaagaagaagaggcaccuucaccuggacccugagcgacagcgagggcaacgagacccccggcggcuacugccugaccagauggaugcugaucgaggccgagcugaagugcuucggcaacaccgccguggccaagugcaacgagaagcacgacgaggaguucugcgacaugcugagacuguucgacuucugcaagcaggccaucagaagacugaagacccccgcccaggccaacauccagcugaucaacaaggccgugaacgcccugaucaacgaccagcugaucaugaagaaccaccugagagacaucaugggcauccccuacugcaacuacagcaaguacugcuaccugaaccacaccgugaccggcaagaccagccugcccagaugcugccuggugagcaacggcagcuaccugaacgagacccacuucagcgacgacaucgagcagcaggccgacaacaugaucaccgagcugcugcagaaggaguacauggacagacagggcaagaccccccugggccugguggaccuguucguguucagcaccagcuucuaccugaucagcaucuuccugcaccuggugaagauccccacccacagacacgugaucggcaagcccugccccaagccccacagacugaaccacaugggcaucugcagcugcggccuguacaagcaccccggcgugcccgugaaguggaagagaugaggacuaguuauaagacugacuagcccgaugggccucccaacgggcccuccuccccuccuugcaccgagauuaauaaaaaaaaaaaaaaaaaaaaaaaaaaaaaaaaaaaaaaaaaaaaaaaaaaaaaaaaaaaaaaaaaaaaaaaaaaaaaaaaaaaaaaaaaaaaaaaaaaaa

SEQ ID NO: 27994 - RNA, 1662 nt, Artificial Sequence
  mRNA product Design i-3 (A100) comprising derived and/or modified sequence from LASV(Nig08-A19;Clade III)__ADU56618__GPCmut4 (opt4)
aggagaaagcuuaccaugggccagaucgugaccuucuuccaggaggugccccacgugaucgaggaggugaugaacaucgugcugaucgcccugagcauccuggccauccugaagggccuguacaacaucgccaccugcggccugaucggccuggugaccuuccugcugcugagcggcagaagcugcagcaugaccuacaagggcguguacgagcugcagacccuggagcugaacaugaacacccugaacaugugcaugccccugagcugcaccaagaacaacagccaccacuacaucauggugggcaacgagaccggccuggagcugacccugaccaacaccagccugcugcaccacaaguucugcaaccugagcgacgcccacaagaagaaccuguacgaccacacccugaugagcaucaucagcaccuuccaccugagcauccccaacuucaaccaguacgaggccaugagcugcgacuucaacggcggcaagaucaccgugcaguacaaccugagccacagcuacgccaucgacgccgccaaccacugcggcaccguggccaacggcgugcugcagaccuucaugagaauggccuggggcggcagcuacaucgcccuggacagcggcagaggcaagugggacugcaucaugaccagcuaccaguaccugaucauccagaacaccaccugggaggaccacugccaguucagcagacccagccccaucggcuaccugggccugcugagccagagaaccagagacaucuacaucagcagaagaagaagaggcaccuucaccuggacccugagcgacagcgagggcaacgagacccccggcggcuacugccugaccagauggaugcugaucgaggccgagcugaagugcuucggcaacaccgccguggccaagugcaacgagaagcacgacgaggaguucugcgacaugcugagacuguucgacuucugcaagcaggccaucagaagacugaaggcccccgcccagaugagcauccagcugaucaacaaggccgugaacgcccugaucaacgaccagcugaucaugaagaaccaccugagagacaucaugggcauccccuacugcaacuacagcaaguacugcuaccugaaccacaccagcaccggcagaaccagccugcccagaugcugccuggugagcaacggcagcuaccugaacgagacccacuucagcgacgacaucgagcagcaggccgacaacaugaucaccgagaugcugcagaaggaguaccuggacagacagggcaagaccccccugggccugguggaccuguucguguucagcaccagcuucuaccugaucagcaucuuccugcaccuggugaagauccccacccacagacacaucgugggcaagcccugccccaagccccacagacugaaccacaugggcaucugcagcugcggccuguacaagcagcccggcgugcccgugagauggaagagaugaggacuaguuauaagacugacuagcccgaugggccucccaacgggcccuccuccccuccuugcaccgagauuaauaaaaaaaaaaaaaaaaaaaaaaaaaaaaaaaaaaaaaaaaaaaaaaaaaaaaaaaaaaaaaaaaaaaaaaaaaaaaaaaaaaaaaaaaaaaaaaaaaaaa

SEQ ID NO: 27995 - RNA, 1665 nt, Artificial Sequence
  mRNA product Design i-3 (A100) comprising derived and/or modified sequence from LASV(G1180-SLE-2010;Clade IV)__AIT17168__GPCmut4 (opt4)
aggagaaagcuuaccaugggccagaucgugaccuucuuccaggaggugccccacgugaucgaggaggugaugaacaucgugcugaucgcccugagcauccuggccgugcugaagggccuguacaacuucgccaccugcggccuggugggccugcugaccuuccugcugcugugcggcagaagcugcaccgccagcagauacaagggcguguacgagcugcagacccuggagcugaacauggagacccugaacaugugcaugccccugagcugcaccaagaacaacagccaccacuacaucauggugggcaacgagaccggccuggagcugacccugaccaacaccagcaucaucaaccacaaguucugcaaccugagcgacgcccacaagaagaaccuguacgaccacgcccugaugagcaucaucagcaccuuccaccugagcauccccaacuucaaccaguacgaggccaugagcugcgacuucaacggcggcaagaucagcgugcaguacaaccugagccacagcuacgccggcgacgccgccaaccacugcggcaccguggccaacggcgugcugcagaccuucaugagaauggccuggggcggcagcuacaucgcccuggacagcggccacggcagcugggacugcaucaugaccagcuaccaguaccugaucauccagaacaccaccugggaggaccacugccaguucagcagacccagccccaucggcuaccugggccugcugagccagagaaccagagacaucuacaucagcagaagaagaagaggcaccuucaccuggacccugagcgacagcgagggcaaggacacccccggcggcuacugccugaccagauggaugcugaucgaggccgagcugaagugcuucggcaacaccgccguggccaagugcaacgagaagcacgacgaggaguucugcgacaugcugagacuguucgacuucugcaagcaggccauccagagacugaaggcccccgcccagaugagcauccagcugaucaacaaggccgugaacgcccugaucaacgaccagcugaucaugaagaaccaccugagagacaucaugggcauccccuacugcaacuacagcaaguacugcuaccugaaccacaccaccaccggcaagaccagccugcccaagugcugccuggugagcaacggcagcuaccugaacgagacccacuucagcgacgacaucgagcagcaggccgacaacaugaucaccgagaugcugcagaaggaguacauggagagacagggcaagaccccccugggccugguggaccuguucguguucagcaccagcuucuaccugaucagcaucuuccugcaccuggugaagauccccacccacagacacaucgugggcaagagcugccccaagccccacagacugaaccacaugggcaucugcagcugcggccuguacaagcagcccggcgugcccgugaaguggaagagaugaggacuaguuauaagacugacuagcccgaugggccucccaacgggcccuccuccccuccuugcaccgagauuaauaaaaaaaaaaaaaaaaaaaaaaaaaaaaaaaaaaaaaaaaaaaaaaaaaaaaaaaaaaaaaaaaaaaaaaaaaaaaaaaaaaaaaaaaaaaaaaaaaaaa

SEQ ID NO: 27996 - RNA, 1665 nt, Artificial Sequence
  mRNA product Design i-3 (A100) comprising derived and/or modified sequence from LASV(G1442-SLE-2011;Clade IV)__AIT17180__GPCmut4 (opt4)
aggagaaagcuuaccaugggccagaucgugaccuucuuccaggaggugccccacgugaucgaggaggugaugaacaucgugcugaucgcccugagcauccuggccgugcugaagggccuguacaacguggccaccugcggccugaucggccuggugaccuuccugcugcugugcggcagaagcugcaccaccacccuguacaagggcguguacgagcugcagacccuggagcugaacauggagacccugaacaugugcaugccccugagcugcaccaagaacaacagccaccacuacaucagagugggcaacgagaccggccuggagcugacccugaccaacaccagcaucaucaaccacaaguucugcaaccugagcgacgcccacaagaagaaccuguacgaccacgcccugaugagcaucaucagcaccuuccaccugagcauccccaacuucaaccaguacgaggccaugagcugcgacuucaacggcggcaagaucagcgugcaguacaaccugagccacagcuacgccggcgacgccgccaaccacugcggcaccguggccaacggcgugcugcagaccuucaugagaauggccuggggcggcagcuacaucgcccuggacagcggcagaggcaacugggacugcaucaugaccagcuaccaguaccugaucauccagaacaccaccugggacgaccacugccaguucagcagacccagccccaucggcuaccugggccugcugagccagagaaccagagacguguacaucagcagaagaagaagaggcaccuucaccuggacccugagcgacagcgagggcaaggacacccccggcggcuacugccugaccagauggaugcugaucgaggccgagcugaagugcuucggcaacaccgccguggccaagugcaacgagaagcacgacgaggaguucugcgacaugcugagacuguucgacuucugcaagcaggccauccagagacugaaggcccccgcccagaugagcauccagcugaucaacaaggccgugaacgcccugaucaacgaccagcugaucaugaagaaccaccugagagacaucaugggcauccccuacugcaacuacagcaaguacugcuaccugaacaacaccgccaccggcaagaccagccugcccaagugcugccugaucagcaacggcagcuaccugaacgagacccacuucagcgacgacaucgagcaggaggccgacaacaugaucaccgagaugcugcagaaggaguacauggagagacagggcaagaccccccugggccugguggaccuguucguguucagcaccagcuucuaccugaucagcaucuuccugcaccuggugaagauccccacccacagacacaucgugggcaagagcugccccaagccccacagacugaaccacaugggcaucugcagcugcggccuguacaagcagcccggcgugcccgugagauggaagagaugaggacuaguuauaagacugacuagcccgaugggccucccaacgggcccuccuccccuccuugcaccgagauuaauaaaaaaaaaaaaaaaaaaaaaaaaaaaaaaaaaaaaaaaaaaaaaaaaaaaaaaaaaaaaaaaaaaaaaaaaaaaaaaaaaaaaaaaaaaaaaaaaaaaa

SEQ ID NO: 27997 - RNA, 1665 nt, Artificial Sequence
  mRNA product Design i-3 (A100) comprising derived and/or modified sequence from LASV(G3010-SLE-2013;Clade IV)__AIT17344__GPCmut4 (opt4)
aggagaaagcuuaccaugggccagaucgugaccuucuuccaggaggugccccacgugaucgaggaggugaugaacaucgugcugaucgcccugagcauccuggccgugcugaagggccuguacaacuucgccaccugcggccuggugggccuggugaccuuccugcugcugugcggcagaagcugcaccaccagccuguacaagggcguguacgagcugcagacccuggagcugaacauggagacccugaacaugugcaugccccugagcugcaccaagaacaacagccaccacuacaucauggugggcaacgagaccggccuggagcugacccugaccaacaccagcaucaucaaccacaaguucugcaaccugagcgacgcccacaagaagaaccuguacaaccacgcccugaugagcaucaucagcaccuuccaccugagcauccccaacuucaaccaguacgaggccaugagcugcgacuucaacggcggcaagaucagcgugcaguacaaccugagccacagcuacgccggcgacgccgccagccacugcggcaccguggccaacggcgugcugcagaccuucaugagaauggccuggggcggcagcuacaucgcccuggacagcggcuacggcaagugggacugcaucaugaccagcuaccaguaccugaucauccagaacaccaccugggaggaccacugccaguucagcagacccagccccaucggcuaccugggccugcugagccagagaaccagagacaucuacaucagcagaagaagaagaggcaccuucaccuggacccugagcgacagcgagggcaaggacacccccggcggcuacugccugaccagauggaugcugaucgaggccgagcugaagugcuucggcaacaccgccguggccaagugcaacgagaagcacgacgaggaguucugcgacaugcugagacuguucgacuucugcaagcaggccauccagagacugaagacccccgcccagaugagcauccagcugaucaacaaggccgugaacgcccugaucaacgaccagcugaucaugaagaaccaccugagagacaucaugggcauccccuacugcaacuacagcaaguacugcuaccugaaccacaccaccaccggcaagaccagccugcccaagugcugccuggugagcaacggcagcuaccugaacgagacccacuucagcgacgacaucgagcagcaggccgacaacaugaucaccgagaugcugcagaaggaguacauggagagacagggcaagaccccccugggccugguggaccuguucguguucagcaccagcuucuaccugaucagcaucuuccugcaccuggugaagauccccacccacagacacaucgugggcaagagcugccccaagccccacagacugaaccacaugggcaucugcagcugcggccuguacaagcagcccggcgugcccgugagauggaagagaugaggacuaguuauaagacugacuagcccgaugggccucccaacgggcccuccuccccuccuugcaccgagauuaauaaaaaaaaaaaaaaaaaaaaaaaaaaaaaaaaaaaaaaaaaaaaaaaaaaaaaaaaaaaaaaaaaaaaaaaaaaaaaaaaaaaaaaaaaaaaaaaaaaaa

SEQ ID NO: 27998 - RNA, 1665 nt, Artificial Sequence
  mRNA product Design i-3 (A100) comprising derived and/or modified sequence from LASV(G502-SLE-2009;Clade IV)__AIT17126__GPCmut4 (opt4)
aggagaaagcuuaccaugggccagaucgugaccuucuuccaggaggugccccacgugaucgaggaggugaugaacaucgugcugaucgcccugagcauccuggccgugcugaagggccuguacaacuucgccaccugcggccuggugggccugcugaccuuccugcugcugugcggcagaagcugcaccaccggccuguacaagggcguguacgagcugcagacccuggagcugaacauggagacccugaacaugugcaugccccugagcugcaccaagaacaacagccaccacuacaucauggugggcaacgagaccggccuggagcugacccugaccaacaccagcaucaucaaccacaaguucugcaaccugagcgacgcccacaagaagaaccuguacgaccacgcccugaugagcaucaucagcaccuuccaccugagcauccccaacuucaaccaguacgaggccaugagcugcgacuucaacggcggcaagaucagcgugcaguacaaccugagccacagcuacgccggcgacgccgccgaccacugcggcaccguggccaacggcgugcugcagaccuucaugagaauggccuggggcggcagcuacaucgcccuggacagcggcagaggcagaugggacugcaucaugaccagcuaccaguaccugaucauccagaacaccaccugggaggaccacugccaguucagcagacccagccccaucggcuaccugggccugcugagccagagaaccagagacaucuacaucagcagaagaagaagaggcaccuucaccuggacccugagcgacagcgagggcaaggacacccccggcggcuacugccugaccagauggaugcugaucgaggccgagcugaagugcuucggcaacaccgccguggccaagugcaacgagaagcacgacgaggaguucugcgacaugcugagacuguucgacuucugcaagcaggccauccagagacugaaggcccccgcccagaugagcauccagcugaucaacaaggccgugaacgcccugaucaacgaccagcuggugaugaagaaccaccugagagacaucaugggcauccccuacugcaacuacagcagauacugcuaccugaaccacaccaccaccggcagaaccagccugcccaagugcugccuggugagcaacggcagcuaccugaacgagacccacuucagcgacgacaucgagcagcaggccgacaacaugaucaccgagaugcugcagaaggaguacauggagagacagggcaagaccccccugggccugguggaccuguucguguucagcaccagcuucuaccugaucagcaucuuccugcaccuggugaagauccccacccacagacacaucgugggcaagagcugccccaagccccacagacugaaccacaugggcaucugcagcugcggccuguacaagcagcccggcgugcccgugaaguggaagagaugaggacuaguuauaagacugacuagcccgaugggccucccaacgggcccuccuccccuccuugcaccgagauuaauaaaaaaaaaaaaaaaaaaaaaaaaaaaaaaaaaaaaaaaaaaaaaaaaaaaaaaaaaaaaaaaaaaaaaaaaaaaaaaaaaaaaaaaaaaaaaaaaaaaa

SEQ ID NO: 27999 - RNA, 1665 nt, Artificial Sequence
  mRNA product Design i-3 (A100) comprising derived and/or modified sequence from LASV(G733-SLE-2010;Clade IV)__AIT17154__GPCmut4 (opt4)
aggagaaagcuuaccaugggccagaucgugaccuucuuccaggaggugccccacgugaucgaggaggugaugaacaucgugcugaucgcccugagcauccuggccgugcugaagggccuguacaacuucgccaccugcggcaucgugggccuggugagcuuccugcugcugugcggcagaagcugcaccaccagccuguacaagggcguguacgagcugcagacccuggagcugaacauggagacccugaacaugugcaugccccugagcugcaccaagaacaacagccaccacuacaucauggugggcaacgagaccggccuggagcugacccugaccaacaccagcaucaucaaccacaaguucugcaaccugagcgacgcccacaagaagaaccuguacgaccacgcccugaugagcaucaucagcaccuuccaccugagcauccccaacuucaaccaguacgaggccaugagcugcgacuucaacggcggcaagaucagcgugcaguacaaccugagccacagcuacgccggcgacgccgccaaccacugcggcaccaucgccaacggcgugcugcagaccuucaugagaauggccuggggcggcagcuacaucgcccuggacagcggcagagacagaugggacugcaucaugaccagcuaccaguaccugaucauccagaacaccaccugggaggaccacugccaguucagcagacccagccccaucggcuaccugggccugcugagccagagaaccagagacaucuacaucagcagaagaagaagaggcaccuucaccuggacccugagcgacagcgagggcaaggacacccccggcggcuacugccugaccagauggaugcugaucgaggccgagcugaagugcuucggcaacaccgccguggccaagugcaacgagaagcacgacgaggaguucugcgacaugcugagacuguucgacuucugcaagcaggccauccagagacugaaggcccccgcccagaugagcauccagcugaucaacaaggccgugaacgcccugaucaacgaccagcugaucaugaagaaccaccugagagacaucaugggcauccccuacugcaacuacagcaaguacugcuaccugaaccacaccaccaccggcaagaccagccugcccaagugcugccuggugagcaacggcagcuaccugaacgagacccacuucagcgacgacaucgagcagcaggccgacaacaugaucaccgagaugcugcagaaggaguacauggagagacagggcaagaccccccugggccugguggaccuguucguguucagcaccagcuucuaccugaucagcaucuuccugcaccuggugaagauccccacccacagacacguggugggcaagagcugccccaagccccacagacugaaccacaugggcaucugcagcugcggccuguacggccagcccggcgugcccgugaaguggaagagaugaggacuaguuauaagacugacuagcccgaugggccucccaacgggcccuccuccccuccuugcaccgagauuaauaaaaaaaaaaaaaaaaaaaaaaaaaaaaaaaaaaaaaaaaaaaaaaaaaaaaaaaaaaaaaaaaaaaaaaaaaaaaaaaaaaaaaaaaaaaaaaaaaaaa

SEQ ID NO: 28000 - RNA, 1665 nt, Artificial Sequence
  mRNA product Design i-3 (A100) comprising derived and/or modified sequence from MOPV/LASV reassortant(IGS-1;Clade IV)__AFY05576__GPCmut4 (opt4)
aggagaaagcuuaccaugggccagaucgugaccuucuuccaggaggugccccacgugaucgaggaggugaugaacaucgugcugaucgcccugagcgugcuggccgugcugaagggccuguacaacuucgccaccugcggccuggugggccuggugaccuuccugcugcugugcggcagaagcugcaccaccagccuguacaagggcguguacgagcugcagacccuggagcugaacauggagacccugaacaugugcaugccccugagcugcaccaagaacaacagccaccacuacaucauggugggcaacgagaccggccuggagcugacccugaccaacaccagcaucaucaaccacaaguucugcaaccugagcgacgcccacaagaagaaccuguacgaccacgcccugaugagcaucaucagcaccuuccaccugagcauccccaacuucaaccaguacgaggccaugagcugcgacuucaacggcggcaagaucagcgugcaguacaaccugagccacagcuacgccggcgacgccgccaaccacugcggcaccguggccaacggcgugcugcagaccuucaugagaauggccuggggcggcagcuacaucgcccuggacagcggcagaggcaacugggacugcaucaugaccagcuaccaguaccugaucauccagaacaccaccugggaggaccacugccaguucagcagacccagccccaucggcuaccugggccugcugagccagagaaccagagacaucuacaucagcagaagaagaagaggcaccuucaccuggacccugagcgacagcgagggcgaggacacccccggcggcuacugccugaccagauggaugcugaucgaggccgagcugaagugcuucggcaacaccgccguggccaagugcaacgagaagcacgacgaggaguucugcgacaugcugagacuguucgacuucugcaagcaggccauccagagacugaaggcccccgcccagaugagcauccagcugaucaacaaggccgugaacgcccugaucaacgaccagcugaucaugaagaaccaccugagagacaucaugggcauccccuacugcaacuacagcaaguacugcuaccugaaccacaccaccaccggcagaaccagccugcccaagugcugccuggugagcaacggcagcuaccugaacgagacccacuucagcgacgacaucgagcagcaggccgacaacaugaucaccgagaugcugcagaaggaguacauggagagacagggcaagaccccccugggccugguggaccuguucguguucagcaccagcuucuaccugaucagcaucuuccugcaccuggugaagauccccacccacagacacaucgugggcaagagcugccccaagccccacagacugaaccacaugggcaucugcagcugcggccuguacaagcagcccggcgugcccgugaaguggaagagaugaggacuaguuauaagacugacuagcccgaugggccucccaacgggcccuccuccccuccuugcaccgagauuaauaaaaaaaaaaaaaaaaaaaaaaaaaaaaaaaaaaaaaaaaaaaaaaaaaaaaaaaaaaaaaaaaaaaaaaaaaaaaaaaaaaaaaaaaaaaaaaaaaaaa

SEQ ID NO: 28001 - RNA, 1665 nt, Artificial Sequence
  mRNA product Design i-3 (A100) comprising derived and/or modified sequence from LASV(LM765-SLE-2012;Clade IV)__AIT17814__GPCmut4 (opt4)
aggagaaagcuuaccaugggccagaucgugaccuucuuccaggaggugccccacgugaucgaggaggugaugaacaucgugcugaucgcccugagcauccuggccgugcugaagggccuguacaacuucgccaccugcggccuggugggccuggugaccuuccugcugcugugcggcagaagcugcaccaccagccuguacaagggcguguacgagcugcagacccuggagcugaacauggagacccugaacaugugcaugccccugagcugcaccaagaacaacagccaccacuacaucauggugggcaacgagaccggccuggagcugacccugaccaacaccagcaucaucgaccacaaguucugcaaccugagcgacgcccacagaaagaaccuguacgaccacgcccugaugagcaucaucagcaccuuccaccugagcauccccaacuucaaccaguacgaggccaugagcugcgacuucaacggcggcaagaucagcgugcaguacaaccugagccacagcuacgccaaggacgccgccgaccacugcggcaccguggccaacggcgugcugcagaccuucaugagaauggccuggggcggcagcuacaucgcccuggacagcggcagaggcagaugggacugcaucaugaccagcuaccaguaccugaucauccagaacaccaccugggaggaccacugccaguucagcagacccagccccaucggcuaccugggccugcugagccagagaaccagagacaucuacaucagcagaagaagaagaggcaccuucaccuggacccugagcgacagcgagggcaaggacacccccggcggcuacugccugaccagauggaugcugaucgaggccgagcugaagugcuucggcaacaccgccguggccaagugcaacgagaagcacgacgaggaguucugcgacaugcugagacuguucgacuucugcaagcaggccauccagagacugaaggcccccgcccagaugagcauccagcugaucaacaaggccgugaacgcccugaucaacgaccagcugaucaugaagaaccaccugagagacaucaugggcauccccuacugcaacuacagcaaguacugcuaccugaaccacaccaccaccggcaagaccagccugcccaagugcugccuggugagcaacggcagcuaccugaacgagacccacuucagcgacgacaucgagcagcaggccgacaacaugaucaccgagaugcugcagaaggaguacauggagagacagggcaagaccccccugggccugguggaccuguucguguucagcaccagcuucuaccugaucagcaucuuccugcaccuggugaagauccccacccacagacacaucgugggcaagcccugccccaagccccacagacugaaccacaugggcaucugcagcugcggccuguacaagcagcccggcgugcccgugaaguggaagagaugaggacuaguuauaagacugacuagcccgaugggccucccaacgggcccuccuccccuccuugcaccgagauuaauaaaaaaaaaaaaaaaaaaaaaaaaaaaaaaaaaaaaaaaaaaaaaaaaaaaaaaaaaaaaaaaaaaaaaaaaaaaaaaaaaaaaaaaaaaaaaaaaaaaa

SEQ ID NO: 28002 - RNA, 1665 nt, Artificial Sequence
  mRNA product Design i-3 (A100) comprising derived and/or modified sequence from LASV(LM776-SLE-2012;Clade IV)__AIT17824__GPCmut4 (opt4)
aggagaaagcuuaccaugggccagaucgugaccuucuuccaggaggugccccacgugaucgaggaggugaugaacaucgugcugaucgcccugagcauccuggccgugcugaagggccuguacaacuucgccaccugcggccuggugggccuggugaccuuccugcugcugugcggcagaagcugcaccaccagcguguacaagggcguguacgagcugcagacccuggagcugaacauggagacccugaacaugugcaugccccugagcugcaccaagaacaacagccaccacuacaucauggugggcaacgagaccggccuggagcugacccugaccaacaccagcaucaucaaccacaaguucugcaaccugagcgacgcccacaagaagaaccuguacgaccacgcccugaugagcaucaucagcaccuuccaccugagcauccccaacuucaaccaguacgaggccaugagcugcgacuucaacggcggcaagaucagcgugcaguacaaccugagccacagcuacgccggcgacgccgccaaccacugcggcaccguggccaacggcgugcugcagaccuucaugagaauggccuggggcggcagcuacaucgcccuggacagcggccacggcaagugggacugcaucaugaccagcuaccaguaccugaucauccagaacaccaccugggaggaccacugccaguucagcagacccagccccaucggcuaccugggccugcugagccagagaaccagagacaucuacaucagcagaagaagaagaggcaccuucaccuggacccugagcgacagcgagggcaaggacacccccggcggcuacugccugaccagauggaugcugaucgaggccgagcugaagugcuucggcaacaccgccguggccaagugcaacgagaagcacgacgaggaguucugcgacaugcugagacuguucgacuucugcaagcaggccauccagagacugaaggcccccgcccagaugagcauccagcugaucaacaaggccgugaacgcccugaucaacgaccagcugaucaugaagaaccaccugagagacaucaugggcauccccuacugcaacuacagcaaguacugcuaccugaaccacaccaccaccggcaagaccagccugcccaagugcugccuggugagcaacggcagcuaccugaacgagacccacuucagcgacgacaucgagcagcaggccgacaacaugaucaccgagaugcugcagaaggaguacauggagagacagggcaagaccccccugggccugguggaccuguucguguucagcaccagcuucuaccugaucagcaucuuccugcaccuggugaagauccccacccacagacacaucgugggcaagagcugccccaagccccacagacugaaccacaugggcaucugcagcugcggccuguacaagcagcccggcgugcccgugagauggaagagaugaggacuaguuauaagacugacuagcccgaugggccucccaacgggcccuccuccccuccuugcaccgagauuaauaaaaaaaaaaaaaaaaaaaaaaaaaaaaaaaaaaaaaaaaaaaaaaaaaaaaaaaaaaaaaaaaaaaaaaaaaaaaaaaaaaaaaaaaaaaaaaaaaaaa

SEQ ID NO: 28003 - RNA, 1665 nt, Artificial Sequence
  mRNA product Design i-3 (A100) comprising derived and/or modified sequence from LASV(Mad39;Clade IV)__ANH09722__GPCmut4 (opt4)
aggagaaagcuuaccaugggccagaucgugaccuucuuccaggaggugccccacgugaucgaggaggugaugaacaucgugcugaucgcccugagcauccuggccgugcugaagggccuguacaacguggccaccugcggccugaucggccuggugaccuuccugcugcugugcggcagaagcugcaccaccacccuguacaagggcguguacgagcugcaggcccuggagcugaacauggagacccugaacaugugcaugccccugagcugcaccaagaacaacagccaccacuacaucagagugggcaacgagaccggccuggagcugacccugaccaacaccagccugaucaaccacaaguucugcaaccugagcgacgcccacaagaagaaccuguacgaccacgcccugaugagcaucaucagcaccuuccaccugagcauccccaacuucaaccaguacgaggccaugagcugcgacuucaacgacggcaagaucagcgugcaguacaaccugagccacaccuacgccggcgacaccgccaaccacugcggcaccguggccaacggcgugcugcagaccuucaugagaauggccuggggcggcagcuacaucgcccuggacagcggcagaggcggcugggacugcaucaugaccagcuaccaguaccugaucauccagaacaccaccugggaggaccacugccaguucagcagacccagccccaucggcuaccugggccugcugagccagagaaccagagacaucuacaucagcagaagaagaagaggcaccuucaccuggacccugagcgacagcgagggcaaggacacccccggcggcuacugccugaccagauggaugcugaucgaggccgagcugaagugcuucggcaacaccgccguggccaagugcaacgagaagcacgacgaggaguucugcgacaugcugagacuguucgacuucugcaagcaggccauccagagacugaaggcccccgcccagaugagcauccagcugaucaacaaggccgugaacgcccugaucaacgaccagcugaucaugaagaaccaccugagagacaucaugggcauccccuacugcaacuacagcaaguacugcuaccugaaccacaccgugaccggcaagaccagccugcccaagugcugccuggugagcaacggcagcuaccugaacgagacccacuucagcgacgacaucgagcagcaggccgacaacaugaucaccgagaugcugcagaaggaguacauggagagacagggcaagaccccccugggccugguggaccuguucguguucagcaccagcuucuaccugaucagcaucuuccugcaccuggugaagauccccacccacagacacguggugggcaagcccugccccaagccccacagacugaaccacaugggcaucugcagcugcggcuucuacaagcagcccggcgugcccgugagauggaagagaugaggacuaguuauaagacugacuagcccgaugggccucccaacgggcccuccuccccuccuugcaccgagauuaauaaaaaaaaaaaaaaaaaaaaaaaaaaaaaaaaaaaaaaaaaaaaaaaaaaaaaaaaaaaaaaaaaaaaaaaaaaaaaaaaaaaaaaaaaaaaaaaaaaaa

SEQ ID NO: 28004 - RNA, 1665 nt, Artificial Sequence
  mRNA product Design i-3 (A100) comprising derived and/or modified sequence from LASV(Z0947-SLE-2011;Clade IV)__AIT17840__GPCmut4 (opt4)
aggagaaagcuuaccaugggccagaucgugaccuucuuccaggaggugccccacgugaucgaggaggugaugaacaucgugcugaucgcccugagcauccuggccgugcugaagggccuguacaacuucgccaccugcggccuggugggccuggugaccuuccugcugcugugcggcagaagcugcaccaucagccuguacaagggcguguacgagcugcagacccuggagcugaacauggagacccugaacaugugcaugccccugagcugcaccaagaacaacagccaccacuacaucauggugggcaacgagaccggccuggagcugacccugaccaacaccagcaucaucaaccacaaguucugcaaccugagcgacgcccacaagaagaaccuguacgaccacgcccugaugagcaucaucagcaccuuccaccugagcauccccaacuucaaccaguacgaggccaugagcugcgacuucaacggcggcaagaucagcgugcaguacaaccugagccacagcuacgccggcgacgccgccaaccacugcggcaccguggccaacggcgugcugcagaccuucaugagaauggccuggggcggcagcuacaucgcccuggacagcggcagagacagaugggacugcaucaugaccagcuaccaguaccugaucauccagaacaccaccugggaggaccacugccaguucagcagacccagccccaucggcuaccugggccugcugagccagagaaccagagacaucuacaucagcagaagaagaagaggcaccuucaccuggacccugagcgacagcgagggcaaggacacccccggcggcuacugccugaccagauggaugcugaucgaggccgagcugaagugcuucggcaacaccgccguggccaagugcaacgagaagcacgacgaggaguucugcgacaugcugagacuguucgacuucugcaagcaggccauccagagacugaaggcccccgcccagaugagcauccagcugaucaacaaggccgugaacgcccugaucaacgaccagcugaucaugaagaaccaccugagagacaucaugggcauccccuacugcaacuacagcaaguacugcuaccugaaccacaccaccaccggcaagaccagccugcccaagugcugccuggugagcaacggcagcuaccugaacgagacccacuucagcgacgacaucgagcagcaggccgacaacaugaucaccgagaugcugcagaaggaguacauggagagacagggcaagaccccccugggccugguggaccuguucguguucagcaccagcuucuaccugaucagcaucuuccugcaccuggugaagauccccacccacagacacaucgugggcaagcccugccccaagccccacagacugaaccacaugggcaucugcagcugcggccuguacaagcagcccggcgugcccgugaaguggaagagaugaggacuaguuauaagacugacuagcccgaugggccucccaacgggcccuccuccccuccuugcaccgagauuaauaaaaaaaaaaaaaaaaaaaaaaaaaaaaaaaaaaaaaaaaaaaaaaaaaaaaaaaaaaaaaaaaaaaaaaaaaaaaaaaaaaaaaaaaaaaaaaaaaaaa

SEQ ID NO: 28005 - RNA, 1665 nt, Artificial Sequence
  mRNA product Design i-3 (A100) comprising derived and/or modified sequence from LASV(Josiah;Clade IV)__NP_694870__GPCmut4 (opt5)
aggagaaagcuuaccaugggccagaucgugaccuucuuucaagaggucccccacguuauugaagaggugaugaacaucgugcugauugcccucagcguccuggcugugcuuaaggggcuguacaauuucgccacaugcggacucguuggccuggugacguuucuucugcucugugggagauccugcaccacaucucuguauaaaggagucuacgaacugcagacccucgagcugaacauggaaacacuuaauauguguaugccucugagcugcaccaagaacaauucccaucacuauaucauggugggcaacgagacagggcucgagcugacccuuacgaauaccucuauuaucaaccauaaauucuguaaucugagcgacgcgcacaagaaaaaccucuacgaucaugcucugauguccaucauuucuacauuucaccugagcaucccgaauuucaaccaguaugaagccauguccugcgacuuuaauggaggcaagauuagcguucaguacaaccucucucacuccuaugccggcgaugcugccaaucauugugggaccguggcuaacggaguccugcaaacauucaugcggauggccuggggcgggagcuacaucgcgcuugacucuggacgcggcaacugggauugcauuaugaccuccuaccaguaucugaucauucagaauacgacaugggaggaccacugucaguuuagcagacccucuccuaucggguaccucggacugcuuucccaacggacccgcgauaucuauauuagcagacggcgcagaggcacauucaccuggacccuguccgacucugaaggcaaggauacacccgggggauacugccucacgcgguggaugcugaucgaggccgagcugaaauguuuuggcaacaccgcuguggccaagugcaaugaaaaacaugacgaggaguucugcgauaugcuccgccuguuugacuucuguaagcaggcuauucagagacuuaaagccccugcgcagaugagcauccaacugauuaacaaggccgugaaugcucucaucaacgaucagcugaucaugaagaaucaccuucgggacauuauggggauccccuauugcaacuacuccaaauauuguuaccugaaucacacaaccacaggacgcaccagccucccuaagugcugucuggucucuaacggcuccuaccugaaugaaacgcauuucagcgacgauauugaacagcaagccgacaacaugaucacagagaugcuccagaaagaguauauggaaagacaggggaagaccccgcugggacuuguugaucuguuuguguucucuaccagcuuuuaccucauuuccaucuuccugcaccuggugaaaauccccacacaucggcacauugucggcaagucuugcccuaaaccccaucgccuuaaucacaugggcaucuguagcugcgggcucuauaagcagccuggagugcccguuaaguggaaaagaugaggacuaguuauaagacugacuagcccgaugggccucccaacgggcccuccuccccuccuugcaccgagauuaauaaaaaaaaaaaaaaaaaaaaaaaaaaaaaaaaaaaaaaaaaaaaaaaaaaaaaaaaaaaaaaaaaaaaaaaaaaaaaaaaaaaaaaaaaaaaaaaaaaaa

SEQ ID NO: 28006 - RNA, 1662 nt, Artificial Sequence
  mRNA product Design i-3 (A100) comprising derived and/or modified sequence from LASV(LP;Clade I)__AAF86701__GPCmut4 (opt5)
aggagaaagcuuaccaugggccagaucauuaccuucuuucaagaggugccccacgucaucgaagagguuaugaacauugugcugaucgcccucagccugcuugcuauucugaaggggcucuacaauaucgccacaugcggaaucauuggccugguggcguuccuuuuucugugugggaaauccugcucucucacgcugaagggaggcuaugaacugcagacccucgagcugaacauggaaacacuuaauauguguaugccucugagcugcaccaaaaacuccucucaucacuacaucagagucgggaaugagacaggacucgagcugacccuuacaaacaccagcauuaucaaucauaaguucuguaaccuguccgacgcucacaaaaagaaucucuaugaucaugcccugaugucuauuaucagcacguuucaccuguccauuccgaacuucaaucaguacgaagccaugagcugcgacuuuaacggcggcaagaucucugugcaguauaaucucucccacagcuacgcuggggaugccgcugagcauuguggaaccguugccaacggcgugcugcaaacauucaugcggauggcguggggagggcgcuauaucgcccuugacucuggcaaagggaauugggauugcauuaugaccuccuaccaguaccugaucauucagaacacaaccugggaagaccacugucaguuuagcagacccucuccuaucggauaucucggccugcuuucccaacggacgcgcgauauuuacaucagcagacggcgcagaggcacauucaccuggacacuguccgacucugaggggaacgagacccccggaggcuauugccucacccgguggaugcugaucgaagcugagcugaaguguuuugggaauacagccgucgcuaaaugcaacgaaaagcaugaugaggaguucugcgacaugcuccgccuguuugauuucuguaaacaggccauuagacggcuuaaggcgccugcccagaugagcauccagcugauuaauaaggcugugaacgcccucaucaaugaccaacugauuaugaaaaaccaccuucgcgauaucaugggaauccccuacugcaauuauuccaaguacuguuaucugaaccacacgagcucuggcagaaccucccucccuaaaugcugucugauuagcaaugggucuuaccugaacgaaacacaguucagcgacgacaucgagcagcaagcugauaauaugauuaccgaaaugcuccagaaggaguacaucgaacggcagggaaaaacaccgcugggccuuguugacauuuuuaucuucuccaccucuuuuuaucugauuagcaucuuccuccaucugaucaagauucccacgcaccgccauaucgugggcaaaccuugccccaagccucacagacugaaccauaugggggucuguuccugcggacuuuacaagcaccccggcgugccgacaaaauggaagcggugaggacuaguuauaagacugacuagcccgaugggccucccaacgggcccuccuccccuccuugcaccgagauuaauaaaaaaaaaaaaaaaaaaaaaaaaaaaaaaaaaaaaaaaaaaaaaaaaaaaaaaaaaaaaaaaaaaaaaaaaaaaaaaaaaaaaaaaaaaaaaaaaaaaa

SEQ ID NO: 28007 - RNA, 1662 nt, Artificial Sequence
  mRNA product Design i-3 (A100) comprising derived and/or modified sequence from LASV(803213;Clade II)__AAF86703__GPCmut4 (opt5)
aggagaaagcuuaccaugggccagaucauuaccuucuuucaagaggugccccacgucaucgaagagguuaugaacauugugcugaucgcccucagccugcuugcuauucugaaggggaucuacaauguggccacaugcggacucuucggccugaucuccuuucuucugcucugugggagaucuugcagcgucacguauaaaggaguguacgaacugcagacccuggagcucaacauggcgaaucugaacauguguaugccucuuuccugcacaaagaauaacucucaucacuauauuaugguuggcaaugaaaccgggcuggagcucacacugaccaacacaagcaucauuaaucauaaauucuguaaccuuuccgacgcucacaagaaaaaucuguacgaucaugcccucaugucuaucauuagcaccuuucaccuguccaucccgaacuucaaucaguaugaggccaugagcugcgacuuuaacggaggcaagauuucugugcaguacaaucugucccacagcuucgcugucgaugccgcuaaccauuguggcacgaucgccaacggggugcuccaaaccuuuaugcggauggcguggggaggcucuuauaucgcccuggacuccgggaagggaaauugggauugcauuaugacaagcuaccaguaccuuaucauucagaacaccacaugggaagaccacugucaguucucucgccccuccccuaucggcuaucuggggcuccugagccaaagaacccgggauauuuacaucucccgcagacggcgcggaacguuuacauggacccuuucugacagcgagggcaaugaagcucccggcggguauugccugacaagauggaugcucaucgaggccgagcugaaauguuucggaaacaccgcuguugccaagugcaaugaaaaacaugaugaggaauuuugcgacaugcugcgccucuucgauuucuguaagcaggcgauuaaacggcugaagaccccugcccagauguccauccagcuuauuaacaaggcugugaaugcccugaucaacgaccaacucauuaugaaaaaucaccugagagauaucaugggcauccccuacugcaacuauagccgguacuguuaucuuaaucacacagucacggggaagaccucucugccucgcugcugucucguguccaacggaagcuaccugaaugagacacauuuuucugacgacauugaacagcaggcugauaacaugaucaccgagaugcugcaaaaagaguacauggacagacagggcaagacaccgcucgggcugguggaucuuuucgucuuuagcaccuccuucuaucugauuucuaucuuucuccaccugguuaaaauucccacgcaucggcacaucgugggaaagccuugccccaaaccucaucgccugaaucacaugggcauuuguagcugcggccuuuacaagcaccccggggugccggucaaguggaaaagaugaggacuaguuauaagacugacuagcccgaugggccucccaacgggcccuccuccccuccuugcaccgagauuaauaaaaaaaaaaaaaaaaaaaaaaaaaaaaaaaaaaaaaaaaaaaaaaaaaaaaaaaaaaaaaaaaaaaaaaaaaaaaaaaaaaaaaaaaaaaaaaaaaaaa

SEQ ID NO: 28008 - RNA, 1662 nt, Artificial Sequence
  mRNA product Design i-3 (A100) comprising derived and/or modified sequence from LASV(GA391;Clade III)__CAA36645__GPCmut4 (opt5)
aggagaaagcuuaccaugggccagaucgugaccuucuuucaagaggucccccacguuauugaagaggugaugaacaucgugcugauugcccucagcauccuggcuauucuuaaggggcuguacaaugucgccacaugcggacucaucggccuggugacguuccuucugcucuccgggagaucuuguagccugaucuauaaaggaaccuacgaacugcagacacucgagcugaacauggaaacccuuaauaugugcaugccucuguccuguacaaagaacaauucucaucacuauauucggguuggcaacgagaccgggcucgagcugacacuuaccaauacgagcauccugaaccauaaauuuugcaaucucuccgacgcgcacaagcgcaaccuguacgaucauucucugaugagcauuaucuccaccuuccaccucagcauuccgaauuuuaaccaguaugaagcuaugucuugugacuucaauggaggcaaaaucacagugcaguacaaccugucccacagcuuugccgucgaugccgcuggccauugcgggacccuugccaauggagugcugcaaacauucaugagaauggcuuggggcgggucuuauauugcccucgacuccggacggggcaacugggauuguaucaugaccagcuaccaguaccugaucauucagaacacgacaugggacgaucacugccaguuuucucgccccuccccuaucggguaucuuggacugcucagccaaagaacccgggacauuuacaucucccgcagacggcgcggcacauucaccuggacccugucugauagcgagggcaaugaaacacccgggggauauugucugacgagauggaugcucauugaggcggagcugaagugcuuuggcaacaccgccguugcuaaguguaaugaaaaacaugacgaggaguucugcgauaugcuucggcuguuugacuucugcaagcaggccauccgcagacucaaaaccccugcucagauguccauccagcugauuaacaaggccgugaaugcgcuuaucaacgaucaacugauuaugaaaaaucaccuccgggacaucauggggauucccuacuguaacuauagccgcuacugcuaucugaaucacacaucuacaggaaagaccucccugccuagauguugccucaucagcaacggcucuuaccugaaugaaacgaaguucagcgacgauaucgaacagcaggccgacaacaugauuacagagaugcuucaaaaagaguacaucgaucggcaggggaagaccccgcugggacucgucgaccuguuuguguucuccaccucuuuuuaucugauuagcaucuuccuucaucucgugaaaauucccacacacagacauaucgucggcaagccuugucccaaaccucaccgccugaaucauaugggcauuugcuccugugggcuguacaagcagcccggaguuccggugcgguggaaaagaugaggacuaguuauaagacugacuagcccgaugggccucccaacgggcccuccuccccuccuugcaccgagauuaauaaaaaaaaaaaaaaaaaaaaaaaaaaaaaaaaaaaaaaaaaaaaaaaaaaaaaaaaaaaaaaaaaaaaaaaaaaaaaaaaaaaaaaaaaaaaaaaaaaaa

SEQ ID NO: 28009 - RNA, 1665 nt, Artificial Sequence
  mRNA product Design i-3 (A100) comprising derived and/or modified sequence from LASV(AV;Clade V)__CCA30314__GPCmut4 (opt5)
aggagaaagcuuaccaugggccagaucgugaccuucuuucaagaggucccccacguuauugaagaggugaugaacaucgugcugauugcccucagcauccuggcuguccuuaaggggcuguacaauauugccacaugcggacucaucggccugaucacguuccuucugcucugugggagauccugcucuagcaaccuguauaaaggaguguacgaacugcagucccucgaccugaauauggagacccuuaacauguguaugccucugucuugcacaaagaauaacagccaucacuauauucggguuggcaaugauaccgggcucgaacugacacuuaccaacacauccauccugaaucauaaauuuuguaaccucucugacgcgcacaagaaagaucuguacgaccaugcucugaugagcauuaucuccaccuuccaccucagcauuccgaauuuuaaccaguaugaggccaugucuugcgauuucaauggaggcaagaucuccgugcaguacaaccugagccacucuuaugccauugacgcugccaaucauuguggcacggucgcuaacgggauccuucaaaccuuuaugcgcauggccuggggaggcuccuacaucgcgcuggauagcgggagaggaaacugggacugcauuaugacaucuuaccaguaucucaucauucagaauaccacaugggagaaccacugucaguucucccggcccagcccuaucggcuaccuggggcuucugucccaacgcaccagagauauuuauaucucucggcgcagacggggaacguuuacauggacccucagcgacuccgaaggcaaugccacacccggcggguacugccugacccgcuggaugcugaucgaggcugaacucaaguguuucggaaacaccgccguggcuaaaugcaaugagaagcaugaugaggaauuuugcgacaugcugagacuuuucgauuuuuguaaacaggccauuagccggcugaagucuccugcgcagauguccauccagcucauuaacaaagccguuaaugcucugaucaacgaccaacuuauuaugaagaaucaucugcgcgacaucaugggcauccccuauugcaacuacagcaaguauuguuaccucaaucacacaauuacggggaaaaccucucugccuaagugcugucuggugagcaacggauccuaccucaaugagacacacuucucugaugacaucgaacagcaggccgauaacaugauuaccgagaugcugcaaaaagaauauauggagagacagggcaagacaccgcuugggcuggucgaccucuucguguuuagcaccuccuucuaccugaucagcauuuuucugcggcuugugaaaauccccacgcaccgccauauugucggaaagccuugccccaaaccucacagacucaaucauaugggcaucuguucuugcggccuguauaagcagcccgggguuccggugcgguggaagagaugaggacuaguuauaagacugacuagcccgaugggccucccaacgggcccuccuccccuccuugcaccgagauuaauaaaaaaaaaaaaaaaaaaaaaaaaaaaaaaaaaaaaaaaaaaaaaaaaaaaaaaaaaaaaaaaaaaaaaaaaaaaaaaaaaaaaaaaaaaaaaaaaaaaa

SEQ ID NO: 28010 - RNA, 1662 nt, Artificial Sequence
  mRNA product Design i-3 (A100) comprising derived and/or modified sequence from LASV(Togo/2016/7082;Clade VI)__AMR44577__GPCmut4 (opt5)
aggagaaagcuuaccaugggccagaucauuaccuucuuucaagaggugccccacgucaucgaagagguuaugaacauugugcugaucgcccucagccugcuugcuauucugaaggggguguacaaugucgccacaugcggaaucaucggccucgugacguuccuguuucuuugugggagauccugcucucugauuuauaaaggaagcuacgaacuccagacccuggagcugaacauggaaacacucaauauguguaugccucuguccugcaccaagaacucuagccaucacuauauccggguuggcaaugagacagggcuugagcugacccucacaaacaccuccauuaucaaucauaaauucuguaaccugucugacgcgcacaagcgcaaucuuuacgaucaugcucugaugagcauucucuccacguuucaccugagcaucccgaacuucaaucaguaugaagccaugucuugcgacuuuaacggaggcaaaauuuccgugcaguacaaucugagccacgccuaugcugucgaugccgcugagcauuguggcaccguggccaacgggguucuccaaacauucaugagaauggcguggggaggcucuuacaucgcccuggacuccgggcggggaaauugggauugcaucaugaccagcuaccaguaucuuauuauccagaacacaaccugggaagaccacugucaguuuucucgccccuccccuauuggcuaccuggggcuccugagccaaagaacgcgggauaucuauauuucccgcagacggcgcggaacauucaccuggacacuuucugacagcgagggcaacgagacccccggcggguacugccugaccagauggaugcucaucgaagcugagcugaaguguuuuggaaauacagccguggcuaagugcaacgaaaaacaugaugaggaguucugcgacaugcugcggcucuuugauuucuguaagcaggccauccagcgccugaaauccccugcgcagaugagcauucaacuuaucaauaaggccgucaacgcucugauuaaugaccagcucaucaugaaaaaccaccugagagauaugaugggcauucccuauugcaauuacucuaaguauuguuaccuuaaccacacguccagcgggcggaccucucugccuaagugcugucucgugagcaauggauccuaccugaacgaaacacauuucucugacgacaucgagcagcaagccgauaauaugaucaccgaaaugcugcagaaagaguauauugaccgccagggcaagacaccgcucgggcugguggaucuuuuugucuucagcaccuccuuuuaccugaucagcauuuuccuccaccugaucaaaauucccacgcauagacacaucguuggaaagccuugccccaaaccucaucggcugaaccacaugggcauuuguucuugcggccuuuauaagcagcccggggugccgacaagauggaaacgcugaggacuaguuauaagacugacuagcccgaugggccucccaacgggcccuccuccccuccuugcaccgagauuaauaaaaaaaaaaaaaaaaaaaaaaaaaaaaaaaaaaaaaaaaaaaaaaaaaaaaaaaaaaaaaaaaaaaaaaaaaaaaaaaaaaaaaaaaaaaaaaaaaaaa

SEQ ID NO: 28011 - RNA, 1662 nt, Artificial Sequence
  mRNA product Design i-3 (A100) comprising derived and/or modified sequence from LASV(KAK-428;Clade n.d. (VII))__ANH09740__GPCmut4 (opt5)
aggagaaagcuuaccaugggccagaucgugaccuucuuucaagaggucccccacguuauugaagaggugaugaacaucgugcugauugcccucagccugcuugcuauccugaaggggcucuacaauuucgccacaugcggagucauuggccugaucacguuucuucugcucugugggagauccugcucugcgaccuauaaaggacaguacgaacugcagacacuggagcucaacauggaaagccugaauauguguaugccucuuuccugcaccaagaacaauucucaucacuauauccgggcuggcaacaauacagggcuggagcucacccugacaaacaccagcauuaucucccauaaauucuguaaucuuucugacgcccacaagaaaaaccuguacgaucauacgcucaugagcauuaucaccacauuucaccuguccauuccgaauuucaaccaguaugaggccaugagcugcgacuuuaauggaggcaagaucucuauucaauacaaccugucccacagcuaugcuggcgaugccgcucagcauugugggaccguggccaauggaguucuccagacauucaugcgcauggcguggggcgggucuuaccuggcccuugacuccggaagacggggcugggauugcaucaucagcucuuaccaguaucugauuauccaaaacaccacgugggacgaucacugucaguuuucccgccccagcccuauuggguaccucggauucgugucccagaagacaagagacaucuauauuucucggcgcagacggggcaccuuuacauggacccugagcgauuccgaaggccaugacaugcccgggggauacugccuuacccgcuggaugcugaucgaggcugaucucaaauguuucggcaacacagccgucgcuaagugcaaugaaaaacacgacgaggaguuuugcgauauguggagacuguucgacuucuguaagcaggccauccaacggcugaaagcgccugcccagaugaacauucagcucaucaauaaggcugugaacgcccugauuaaugaccaacuuaugaugaagaaccaucugcgcgauaucauggggauucccuauugcaauuacagcaaauuuuguuaucucaacaauacgaccacaggaagaaccucucugccucggugcugucuuaucuccaacggcagcuaccugaaugaaacacacuucucugacgauaucgagcagcaggcugacaacaugauuaccgaaaugcuccagaaggaguacauggaucgccaagggaaaacgccgcugggacugguugaccucuuuguguucagcacauccuuuuaucugaucaccauuuuccuucaccuggucaagauccccacccauagacacauugugggcaaaccuugccccaagccucaucggcucaaucacaugggcaucuguucuugcgggcuguacaaacagcccggagugccggucagauggaagcgcugaggacuaguuauaagacugacuagcccgaugggccucccaacgggcccuccuccccuccuugcaccgagauuaauaaaaaaaaaaaaaaaaaaaaaaaaaaaaaaaaaaaaaaaaaaaaaaaaaaaaaaaaaaaaaaaaaaaaaaaaaaaaaaaaaaaaaaaaaaaaaaaaaaaa

SEQ ID NO: 28012 - RNA, 1662 nt, Artificial Sequence; identical to SEQ ID NO: 28006
  mRNA product Design i-3 (A100) comprising derived and/or modified sequence from LASV(Pinneo-NIG-1969;Clade I)__AIT17836__GPCmut4 (opt5)

SEQ ID NO: 28013 - RNA, 1662 nt, Artificial Sequence
  mRNA product Design i-3 (A100) comprising derived and/or modified sequence from LASV(ISTH0009-NIG-2011;Clade II)__AIT17404__GPCmut4 (opt5)
aggagaaagcuuaccaugggccagaucauuaccuucuuucaagaggugccccacgucaucgaagagguuaugaacauugugcugaucgcccucagccugcuugcuauucugaaggggaucuacaauguggccacaugcggacucuucggccuggucuccuuucuucugcucugugggagaucuugcagcacgaccuauaaaggaguguacgaacugcagacacuggagcucgacauggcgucccugaacauguguaugccucuuucuugcaccaagaauaacagccaucacuauaucaugguuggcaaugaaacagggcuggagcucacccugacaaacaccuccauuaucaaucauaaauucuguaaccuuucugaugcucacaagaaaaaucuguacgaccaugcccucaugagcauuaucuccacguuucaccugagcauuccgaacuucaaucaguaugaggccaugucuugcgauuuuaacggaggcaagaucuccgugcaguacaaucugagccacgcuuaugccgucgacgcugccaaccauuguggcaccauugcgaauggggugcuccaaacauucaugcggauggccuggggaggcucuuacaucgcucuggauuccgggaagggaagcugggacugcaucaugaccucuuaccaguaucuuauuauccagaacacaaccugggaagaucacugucaguuuucccgccccagcccuauuggcuaccuggggcuccugucccaaagaacgcgggacaucuauauuucucgcagacggcgcggaacauucaccuggacacuuagcgauuccgagggcaacgaaacccccggcggguacugccugaccagauggaugcucaucgaggccgagcugaaauguuuuggaaauacagcuguugccaagugcaacgaaaaacaugacgaggaguucugcgauaugcugcggcucuuugacuucuguaagcaggcgauccgcagacugaaaacgccugcccagaugagcauucagcuuaucaauaaggcugugaacgcccugauuaaugaucaacucaucaugaagaaccaucugcgggacauuaugggcauccccuauugcaauuacucuaaauauuguuaccuuaaccacaccgucacagggaagaccucccugccucgcugcugucucgugagcaauggaucuuaccugaacgaaacacacuucagcgacgauaucgaacagcaggcugacaauaugauuaccgagcugcuccaaaaagaguauauggauagacagggcaagacgccgcuggggcuuguggaccuguuugucuucuccacaucuuuuuaccucaucagcauuuuccugcaccugaucaaaauucccacccaucggcacaucaccggaaagccuugccccaaaccucaucgccuuaaccacaugggcauuuguuccugcggccucuauaagcaccccgggguuccggugaaguggaaaagaugaggacuaguuauaagacugacuagcccgaugggccucccaacgggcccuccuccccuccuugcaccgagauuaauaaaaaaaaaaaaaaaaaaaaaaaaaaaaaaaaaaaaaaaaaaaaaaaaaaaaaaaaaaaaaaaaaaaaaaaaaaaaaaaaaaaaaaaaaaaaaaaaaaaa

SEQ ID NO: 28014 - RNA, 1662 nt, Artificial Sequence
  mRNA product Design i-3 (A100) comprising derived and/or modified sequence from LASV(ISTH2010-NIG-2012;Clade II)__AIT17482__GPCmut4 (opt5)
aggagaaagcuuaccaugggccagaucauuaccuucuuucaagaggugccccacgucaucgaagagguuaugaacauugugcugaucgcccucagccugcuugcuauucugaaggggaucuacaauguggccacaugcggacucuucggccuggucuccuuucuucugcucugugggagaucuugcagcacgaccuauaaaggaguguacgaacugcagacacuggagcucgacauggcgucccugaacauguguaugccucuuucuugcaccaagaauaacagccaucacuauaucaugguuggcaaugaaacagggcuggagcucacccugacaaacaccuccauuaucaaucauaaauucuguaaccuuucugaugcucacaagaaaaaucuguacgaccaugcccucaugagcauuaucuccacguuucaccugagcauuccgaacuucaaucaguaugaggccaugucuugcgauuuuaacggaggcaagaucuccgugcaguacaaucugagccacgcuuaugccgucgacgcugccaaccauuguggcaccauugcgaauggggugcuccaaacauucaugcggauggccuggggaggcucuuacaucgcucuggauuccgggaagggaagcugggacugcaucaugaccucuuaccaguaucuuauuauccagaacauuacaugggaagaucacugucaguuuucccgccccagcccuaucggcuaccuggggcuccugucccaaagaacccgggacauuuauaucucucgcagacggcgcggaacguucacauggacccuuagcgauuccgagggcaacgaaacacccggcggguacugccugaccagauggaugcucaucgaggccgagcugaaauguuuuggaaauaccgcuguugccaagugcaacgaaaaacaugacgaggaguucugcgauaugcugcggcucuuugacuucuguaagcaggcgauucgcagacugaaaacgccugcccagaugagcauccagcuuauuaauaaggcugugaacgcccugaucaaugaucaacucauuaugaagaaccaucugcgggacaucaugggcauccccuauugcaauuacucuaaauauuguuaccuuaaccacacagucaccgggaagacaucccugccucgcugcugucucgugagcaauggaucuuaccugaacgaaacccacuucagcgacgauauugaacagcaggcugacaauaugaucacagagcugcuccaaaaagaguauauugauagacagggcaagaccccgcuggggcuuguggaccuguuugucuucuccacgucuuuuuaccucaucagcauuuuccugcaccugguuaaaauccccacacaucggcacguggugggaaagccuugccccaaaccucaucgccuuaaccacaugggcauuuguuccugcggccucuauaagcaccccggggucccggugaaguggaaaagaugaggacuaguuauaagacugacuagcccgaugggccucccaacgggcccuccuccccuccuugcaccgagauuaauaaaaaaaaaaaaaaaaaaaaaaaaaaaaaaaaaaaaaaaaaaaaaaaaaaaaaaaaaaaaaaaaaaaaaaaaaaaaaaaaaaaaaaaaaaaaaaaaaaaa

SEQ ID NO: 28015 - RNA, 1662 nt, Artificial Sequence
  mRNA product Design i-3 (A100) comprising derived and/or modified sequence from LASV(Lassa virus/H.sapiens-wt/NGA/2015/ISTH_0543;Clade II)__AVO03639__GPCmut4 (opt5)
aggagaaagcuuaccaugggccagaucauuaccuucuuucaagaggugccccacgucaucgaagagguuaugaacauugugcugaucgcccucagccugcuugcuauucugaaggggaucuacaauguggccacaugcggacucuucggccuggucuccuuucuucugcucugugggagaucuugcagcacgaccuauaaaggaguguacgaacugcagacacuggagcucgacauggcgaaccugaauauguguaugccucuuuccugcaccaagaacaauucucaucacuauaucaugguuggcaacgaaacagggcuggagcucacccugacaaauaccagcauuaucaaccauaaauucuguaaucuuuccgaugcucacaagaaaaaccuguacgaccaugcccucaugucuauuaucagcacguuucaccuguccauuccgaauuucaaccaguaugaggccaugagcugcgauuuuaauggaggcaagaucucugugcaguacaaccugucccacaccuaugcugucgacgccgcuaaucauuguggcacaauugccaacggggugcuccaaaccuucaugcggauggcguggggaggcagcuacaucgcccuggauucugggaagggauccugggacugcaucaugacaagcuaccaguaucuuguuauucagaacaccacgugggaagaucacugucaguuuucucgccccuccccuaucggcuaccuggggcuccugagccaaagaacacgggacauuuauaucucccgcagacggcgcggaaccuucacauggacccuuucugauagcgagggcaaugaaacccccggcggguacugccugacaagauggaugcucauugaggcugagcugaaauguuuuggaaacacggccguggcuaagugcaaugaaaaacaugacgaggaguucugcgauaugcugcggcucuuugacuucuguaagcaggccauccgcagacugaaaaccccugcgcagauguccauccagcuuauuaacaaggccgucaaugcucugaucaacgaucaacucauuaugaagaaucaucugcgggacaucaugggcauucccuauugcaacuacagcaaauauuguuaccuuaaucacacagugaccgggaagacaucucugccucgcugcugucucguguccaacggaagcuaccugaaugaaacccacuucucugacgauaucgaacagcaggccgacaacaugaucacggagcugcuccaaaaagaguauauugauagacagggcaagacaccgcuggggcuugucgaccuguuuguuuucagcaccuccuuuuaccucaucucuauuuuccugcaccuggugaaaauccccacccaucggcacauuacaggaaagccuugccccaaaccucaucgccuuaaucacaugggcaucuguagcugcggccucuauaagcaccccggggugccggucaaguggaaaagaugaggacuaguuauaagacugacuagcccgaugggccucccaacgggcccuccuccccuccuugcaccgagauuaauaaaaaaaaaaaaaaaaaaaaaaaaaaaaaaaaaaaaaaaaaaaaaaaaaaaaaaaaaaaaaaaaaaaaaaaaaaaaaaaaaaaaaaaaaaaaaaaaaaaa

SEQ ID NO: 28016 - RNA, 1662 nt, Artificial Sequence
  mRNA product Design i-3 (A100) comprising derived and/or modified sequence from LASV(Lassa virus/H.sapiens-wt/NGA/2016/ISTH_0009;Clade II)__AVO03571__GPCmut4 (opt5)
aggagaaagcuuaccaugggccagaucauuaccuucuuucaagaggugccccacgucaucgaagagguuaugaacauugugcugaucgcccucagccugcuugcuauucugaaggggaucuacaauguggccacaugcggacuccugggccuugucuccuuccugcuccugugugggagaucuugcagcacgaccuauaaaggaguguacgaacugcagacacucgagcuggacauggcgucccuuaacauguguaugccucugucuugcaccaagaauaacagccaucacuauaucaugguuggcaaugaaacagggcucgagcugacccuuacaaacaccuccauuaucaaucauaaauuuuguaaccugucugaugcucacaagaaaaaucucuacgaccaugcccugaugagcauuaucuccacguuccaccugagcauuccgaacuuuaaucaguaugaggccaugucuugcgauuucaacggaggccggaucuccgugcaguacaaucucagccacucuuaugcugucgacgccgcuaaccauuguggcaccauugccaauggggugcugcaaacauuuaugcgcauggcguggggaggcuccuacaucgcccuugauagcgggaagggaucuugggacugcaucaugaccuccuaccaguaucugauuauccagaacacaaccugggaagaucacugucaguucagcagacccuccccuauuggcuaccucgggcugcuuucucaacggacgcgcgacaucuauauuagcagacggcgcagaggaacauuuaccuggacacuguccgauagcgagggcaacgaaacccccggcggguacugccucacccgguggaugcugaucgaggcugagcugaaguguuucggaaauacagccguugcuaaaugcaacgaaaagcaugacgaggaauuuugcgauaugcuccgccuguucgacuuuuguaaacaggccaucagacggcuuaagacgccugcgcagaugucuauucagcugaucaauaaagccgugaacgcucucauuaaugaucaacugaucaugaagaaccaccuucgcgacauuaugggcauccccuauugcaauuacuccaaguauuguuaccugaaccacaccgucacagggaaaaccagccucccuagaugcugucuggugucuaauggaagcuaccugaacgagacacauuucuccgacgauaucgaacagcaggccgacaauaugauuaccgagcuccugcaaaaggaguauaucgaucggcagggcaaaacgccgcuugggcugguggaccucuucgucuuuucuaccagcuucuaccugauuuccaucuuucugcaccuuguuaagauucccacacaucgccacaucaccggaaaaccuugccccaagccucauagacucaaccacaugggcauuuguagcugcggccuguauaaucaccccggggugccggugaaauggaagcggugaggacuaguuauaagacugacuagcccgaugggccucccaacgggcccuccuccccuccuugcaccgagauuaauaaaaaaaaaaaaaaaaaaaaaaaaaaaaaaaaaaaaaaaaaaaaaaaaaaaaaaaaaaaaaaaaaaaaaaaaaaaaaaaaaaaaaaaaaaaaaaaaaaaa

SEQ ID NO: 28017 - RNA, 1662 nt, Artificial Sequence
  mRNA product Design i-3 (A100) comprising derived and/or modified sequence from LASV(Lassa virus/H.sapiens-wt/NGA/2016/ISTH_0017;Clade II)__AVO03567__GPCmut4 (opt5)
aggagaaagcuuaccaugggccagaucauuaccuucuuucaagaggugccccacgucaucgaagagguuaugaacauugugcugaucgcccucagccugcuugcuauucugaaggggaucuacaauguggccacaugcggacucuucggccuggucuccuuucuucugcucugugggagaucuugcagcacgaccuauaaaggaguguacgaacugcagacacuggagcucgacauggcgucccugaacauguguaugccucuuucuugcaccaagaauaacagccaucacuauaucaugguuggcaaugaaacagggcuggagcucacccugacaaacaccuccauuaucaaucauaaauucuguaaccuuucugaugcucacaagaaaaaucuguacgaccaugcccucaugagcauuaucuccacguuucaccugagcauuccgaacuucaaucaguaugaggccaugucuugcgauuuuaacggaggcaagaucuccgugcaguacaaucugagccacaccuaugcuauugacgccgcuaaccauuguggcacaaucgccaaugggguccuccaaaccuucaugcggauggcguggggaggcucuuacaucgcccuggauuccgggaagggaagcugggacugcauuaugacaucuuaccaguaucuuaucauucagaacaccacgugggaagaucacugucaguuuucccgccccagcccuaucggcuaccuggggcuccugucccaaagaacacgggacauuuauaucucucgcagacggcgcggaaccuucacauggacccuuagcgauuccgagggcaacgaaacccccggcggguacugccugacaagauggaugcucaucgaggcugagcugaaauguuuuggaaauacggccguggcuaagugcaacgaaaaacaugacgaggaguucugcgauaugcugcggcucuuugacuucuguaagcaggccauucgcagacugaaaaccccugcgcagaugagcauccagcuuauuaauaaggccguuaacgcucugaucaaugaucaacucauuaugaagaaccaucugcgggacaucaugggcauccccuauugcaauuacucuaaauauuguuaccuuaaccacacagugaccgggaagacaucccugccucgcugcugucucgucagcaauggaucuuaccugaacgaaacccacuucagcgacgauauugaacagcaggccgacaauaugaucacggagcugcuccaaaaagaguauauggauagacagggcaagacaccgcuggggcuuguggaccuguuuguguucuccaccucuuuuuaccucauuagcaucuuccugcaccugguccggauucccacccaucgccacguuaucggaaaaccuugccccaagccucauagacuuaaccacaugggcauuuguuccugcggccucuauaaacaccccggggugccggugaaguggaagcggugaggacuaguuauaagacugacuagcccgaugggccucccaacgggcccuccuccccuccuugcaccgagauuaauaaaaaaaaaaaaaaaaaaaaaaaaaaaaaaaaaaaaaaaaaaaaaaaaaaaaaaaaaaaaaaaaaaaaaaaaaaaaaaaaaaaaaaaaaaaaaaaaaaaa

SEQ ID NO: 28018 - RNA, 1662 nt, Artificial Sequence
  mRNA product Design i-3 (A100) comprising derived and/or modified sequence from LASV(Lassa virus/H.sapiens-wt/NGA/2018/ISTH_0959;Clade II)__AVV65099__GPCmut4 (opt5)
aggagaaagcuuaccaugggccagaucauuaccuucuuucaagaggugccccacgucaucgaagagguuaugaacauugugcugaucgcccucagccugcuugcuauucugaaggggaucuacaauguggucacaugcggacucuucggccugguguccuuucuucugcucugugggagaucuugcagcacgaccuauaaaggaguuuacgaacugcagacacuggagcucgacauggccucccugaacauguguaugccucuuucuugcaccaagaauaacagccaucacuauaucauggugggcaaugaaacagggcuggagcucacccugacaaacaccuccauuaucaaucauaaauucuguaaccuuucugaugcgcacaagaaaaaucuguacgaccaugcucucaugagcauuaucuccacguuucaccugagcauuccgaacuucaaucaguaugaggccaugucuugcgauuuuaacggaggcaagaucuccguccaguacaaucugagccacgccuaugcuauugacgccgcuaaccauuguggcaccaucgccaauggggugcuccaaacauucaugcggauggcguggggaggcucuuacaucgcccuggauuccgggaagggaagcugggacugcauuaugaccucuuaccaguaucuuaucauucagaacacaaccugggaagaucacugucaguuuucccgccccagcccuaucggcuaccuggggcuccugucccaaagaacgcgggacauuuauaucucucgcagacggcgcggaacauucaccuggacacuuagcgauuccgagggcaacgaaacccccggcggguacugccugaccagauggaugcucaucgaggcugagcugaaauguuuuggaaauacagccguugcuaagugcaacgaaaaacaugacgaggaguucugcgauaugcugcggcucuuugacuucuguaagcaggccauucgcagacugaaaacgccugcgcagaugagcauccagcuuauuaauaaggccgugaacgcucugaucaaugaucaacucauuaugaagaaccaucugcgggacaucaugggcauccccuauugcaauuacucuaaauauuguuaccuuaaccacaccgucacagggaagaccucccugccucgcugcugucucgugagcaauggaucuuaccugaacgaaacacacuucagcgacgauauugaacagcaggccgacaauaugaucaccgagcugcuccaaaaagaguauauugauagacagggcaagacgccgcuggggcuuguggaccuguuugucuucuccacaucuuuuuaccucaucagcauuuuccugcaccugguuaaaauccccacccaucggcacgugauuggaaagccuugccccaaaccucaucgccuuaaccacaugggcaucuguuccugcggccucuauaagcaccccggggugccggucaaguggaaaagaugaggacuaguuauaagacugacuagcccgaugggccucccaacgggcccuccuccccuccuugcaccgagauuaauaaaaaaaaaaaaaaaaaaaaaaaaaaaaaaaaaaaaaaaaaaaaaaaaaaaaaaaaaaaaaaaaaaaaaaaaaaaaaaaaaaaaaaaaaaaaaaaaaaaa

SEQ ID NO: 28019 - RNA, 1662 nt, Artificial Sequence
  mRNA product Design i-3 (A100) comprising derived and/or modified sequence from LASV(LASV003-NIG-2008;Clade II)__AIT17580__GPCmut4 (opt5)
aggagaaagcuuaccaugggccagaucauuaccuucuuucaagaggugccccacgucaucgaagagguuaugaacauugugcugaucgcccucagccugcuugcuauucugaaggggaucuacaauguggccacaugcggacucuucggccuggucuccuuucuucugcucugugggagaucuugcagcacgaccuauaaaggaguguacgaacugcagacacuggagcucgacauggcgucccugaacauguguaugccucuuucuugcaccaagaauaacagccaucacuauaucaugguuggcaaugaaacagggcuggagcucacccugacaaacaccuccauuaucaaucauaaauucuguaaccuuucugaugcucacaagaaaaaucuguacgaccaugcccucaugagcauuaucuccacguuucaccugagcauuccgaacuucaaucaguaugaggccaugucuugcgauuuuaacggaggcaagaucuccgugcaguacaaucugagccacaccuaugcugucgacgccgcuaaccauuguggcacaauugccaauggggugcuccaaaccuucaugcggauggcguggggaggcucuuacaucgcccuggauuccgggaagggaagcugggacugcaucaugacaucuuaccaguaucuuauuauccagaacaccacgugggaagaucacugucaguuuucccgccccagcccuauuggcuaccuggggcuccugucccaaagaacacgggacaucuauauuucucgcagacggcgcggaaccuucacauggacccuuagcgauuccgagagcaacgaaacccccggcggcuacugccugacaagauggaugcucaucgaggcugagcugaaauguuuugggaauacggccguugcuaagugcaacgaaaaacaugacgaggaguucugcgauaugcugcggcucuuugacuucuguaagcaggccauccgcagacugaaagcgccugcccagaugucuauucagcuuaucaauaaggcugugaacgcccugauuaaugaucaacucaucaugaagaaccaucugcgggacauuaugggaauccccuauugcaauuacuccaaauauuguuaccuuaaccacaccgucacaggccgcaccagccugccuagaugcugucucgugucuaaugggagcuaccugaacgaaacacacuucuccgacgauaucgaacagcaggcugacaauaugauuaccgagcugcuccaaaaggaguauauggaucggcagggaaaaacgccgcugggccuuguggaccuguuugucuucucuaccagcuuuuaccucaucuccauuuuccugcaccugguuaagauccccacacaucgccacgugauugggaaaccuugccccaagccucauagacuuaaccacaugggaaucuguagcugcggccucuauaaacaccccggcgugccggucaaguggaagcggugaggacuaguuauaagacugacuagcccgaugggccucccaacgggcccuccuccccuccuugcaccgagauuaauaaaaaaaaaaaaaaaaaaaaaaaaaaaaaaaaaaaaaaaaaaaaaaaaaaaaaaaaaaaaaaaaaaaaaaaaaaaaaaaaaaaaaaaaaaaaaaaaaaaa

SEQ ID NO: 28020 - RNA, 1662 nt, Artificial Sequence
  mRNA product Design i-3 (A100) comprising derived and/or modified sequence from LASV(LASV035-NIG-2009;Clade II)__AIT17588__GPCmut4 (opt5)
aggagaaagcuuaccaugggccagaucauuaccuucuuucaagaggugccccacgucaucgaagagguuaugaacauugugcugaucgcccucagccugcuugcuauucugaaggggaucuacaauguggccacaugcggacucuucggccuggucuccuuucuucugcucugugggagaucuugcagcacgaccuauaaaggaguguacgaacugcagacacuggagcucgacauggcgucccugaacauguguaugccucuuucuugcaccaagaauaacagccaucacuauaucaugguuggcaaugaaacagggcuggagcucacccugacaaacaccuccauuaucaaucauaaauucuguaaccuuucugaugcucacaagaaaaaucuguacgaccaugcccucaugagcauuaucuccacguuucaccugagcauuccgaacuucaaucaguaugaggccaugucuugcgauuuuaacggaggcaagaucuccgugcaguacaaucugagccacgcuuaugccgucgacgcugccaaccauuguggcaccauugcgaauggggugcuccaaacauucaugcggauggccuggggaggcucuuacaucgcucuggauuccgggaagggaagcugggacugcaucaugaccucuuaccaguaucuuauuauccagaacacaaccugggaagaucacugucaguuuucccgccccagcccuauuggcuaccuggggcuccugucccaaagaacgcgggacaucuauauuucucgcagacggcgcggaacauucaccuggacacuuagcgauuccgagggcaacgaaacccccggcggguacugccugaccagauggaugcucaucgaggccgagcugaaauguuuuggaaauacagcuguugccaagugcaacgaaaaacaugacgaggaguucugcgauaugcugcggcucuuugacuucuguaagcaggcgauccgcagacugaaagccccugcucagaugagcauucagcuuaucaauaaggccgugaacgcucugauuaaugaucaacucaucaugaagaaccaucugcgggacauuaugggcauccccuauugcaauuacucuaaauauuguuaccuuaaccacacggucaccgggaagacaucccugccucgcugcugucucgugagcaauggaucuuaccugaacgaaacccacuucagcgacgauaucgaacagcaggccgacaauaugauuacagagcugcuccaaaaagaguauaucgauagacagggcaagaccccgcuggggcuuguggaccuguuugucuucuccacgucuuuuuaccucauuagcaucuuccugcaccugguuaaaauucccacacaucggcacgugaucggaaagccuugccccaaaccucaucgccuuaaccacaugggcauuuguuccugcggccucuauaagcaccccggggugccggucaaguggaaaagaugaggacuaguuauaagacugacuagcccgaugggccucccaacgggcccuccuccccuccuugcaccgagauuaauaaaaaaaaaaaaaaaaaaaaaaaaaaaaaaaaaaaaaaaaaaaaaaaaaaaaaaaaaaaaaaaaaaaaaaaaaaaaaaaaaaaaaaaaaaaaaaaaaaaa

SEQ ID NO: 28021 - RNA, 1662 nt, Artificial Sequence
  mRNA product Design i-3 (A100) comprising derived and/or modified sequence from LASV(LASV1000-NIG-2009;Clade II)__AIT17782__GPCmut4 (opt5)
aggagaaagcuuaccaugggccagaucauuaccuucuuucaagaggugccccacgucaucgaagagguuaugaacauugugcugaucgcccucagccugcuugcuauucugaaggggaucuacaauguggccacaugcggacucuucggccuggucuccuuucuucugcucugugggagaucuugcagcacgaccuauaaaggaguguacgaacugcagacacuggagcucgacauggcgucccugaacauguguaugccucuuucuugcaccaagaauaacagccaucacuauaucaugguuggcaaugaaacagggcuggagcucacccugacaaacaccuccauuaucaaucauaaauucuguaaccuuucugaugcucacaagaaaaaucuguacgaccaugcccucaugagcauuaucuccacguuucaccugagcauuccgaacuucaaucaguaugaggccaugucuugcgauuuuaacggaggcaagaucuccgugcaguacaaucugagccacaccuaugcugucgacgccgcuaaccauuguggcacaauugccaauggggugcuccaaaccuucaugcggauggcguggggaggcucuuacaucgcccuggauuccgggaagggaagcugggacugcaucaugacaucuuaccaguaucuuauuauccagaacaccacgugggaagaucacugucaguuuucccgccccagcccuauuggcuaccuggggcuccugucccaaagaacacgggacaucuauauuucucgcagacggcgcggaaccuucacauggacccuuagcgauuccgagggcaacgaaacccccggcggguacugccugacaagauggaugcucaucgaggcugagcugaaauguuuuggaaauacggccguugcuaagugcaacgaaaaacaugacgaggaguucugcgauaugcugcggcucuuugacuucuguaagcaggccaucaaacgccugaagaccccugcgcagaugagcauucagcuuaucaauaaggccgugaacgcucugauuaaugaucaacucaucaugaaaaaccaccugagagacauuaugggcauccccuauugcaauuacucuaaguauuguuaccuuaaccacacagucaccgggaaaacaucccugccucggugcugucucgugagcaauggaucuuaccugaacgaaacccauuucagcgacgauaucgaacagcaggccgacaauaugauuacggagcugcuccaaaaggaguauaucgaucgccagggcaaaacaccgcuggggcuuguggaccuguuugucuucuccaccucuuuuuaccucauuagcaucuuccugcaccugguuaagauucccacccauagacacguggugggaaaaccuugccccaagccucaucggcuuaaccacaugggcaucuguuccugcggccucuauaagcaccccggggucccggugaaauggaagcgcugaggacuaguuauaagacugacuagcccgaugggccucccaacgggcccuccuccccuccuugcaccgagauuaauaaaaaaaaaaaaaaaaaaaaaaaaaaaaaaaaaaaaaaaaaaaaaaaaaaaaaaaaaaaaaaaaaaaaaaaaaaaaaaaaaaaaaaaaaaaaaaaaaaaa

SEQ ID NO: 28022 - RNA, 1662 nt, Artificial Sequence
  mRNA product Design i-3 (A100) comprising derived and/or modified sequence from LASV(LASV221-NIG-2010;Clade II)__AIT17624__GPCmut4 (opt5)
aggagaaagcuuaccaugggccagaucauuaccuucuuucaagaggugccccacgucaucgaagagguuaugaacauugugcugaucgcccucagccugcuugcuauucugaaggggaucuacaauguggccacaugcggacucuucggccuggucuccuuucuucugcucugugggagaucuugcagcacgaccuauaaaggaguguacgaacugcagacacuggagcucgacauggcgucccugaacauguguaugccucuuucuugcaccaagaauaacagccaucacuauaucaugguuggcaaugaaacagggcuggagcucacccugacaaacaccuccauuaucaaucauaaauucuguaaccuuucugaugcucacaagaaaaaucuguacgaccaugcccucaugagcauuaucuccacguuucaccugagcauuccgaacuucaaucaguaugaggccaugucuugcgauuuuaacggaggcaagaucuccgugcaguacaaucugagccacaccuaugcuauugacgccgcuaaccauuguggcacaaucgccaaugggguccuccaaaccuucaugcggauggcguggggaggcucuuacaucgcccuggauuccgggaagggaagcugggacugcauuaugacaucuuaccaguaucuuaucauucagaacaccacgugggaagaucacugucaguuuucccgccccagcccuaucggcuaccuggggcuccugucccaaagaacacgggacauuuauaucucucgcagacggcgcggaaccuucacauggacccuuagcgauuccgagggcaacgaaacccccggcggguacugccugacaagauggaugcucaucgaggcugagcugaaauguuuuggaaauacggccguggcuaagugcaacgaaaaacaugacgaggaguucugcgauaugcugcggcucuuugacuucuguaagcaggccauucgcagacugaaaaccccugcgcagaugagcauccagcuuauuaauaaggccguuaacgcucugaucaaugaucaacucauuaugaagaaccaucugcgggacaucaugggcauccccuauugcaauuacucuaaauauuguuaccuuaaccacacagugaccgggaagacaucccugccucgcugcugucucgucagcaauggaucuuaccugaacgaaacccacuucagcgacgauauugaacagcaggccgacaauaugaucacggagaugcugcaaaaagaguauauggauagacagggcaagacaccgcucgggcugguggaccuuuuuguguucuccaccucuuuuuaccugauuagcaucuuccuccaccuggucaaaauucccacccaucggcacguuaucggaaagccuugccccaaaccucaucgccugaaccacaugggcauuuguuccugcggccuuuauaagcaccccggggugccggugaaguggaaaagaugaggacuaguuauaagacugacuagcccgaugggccucccaacgggcccuccuccccuccuugcaccgagauuaauaaaaaaaaaaaaaaaaaaaaaaaaaaaaaaaaaaaaaaaaaaaaaaaaaaaaaaaaaaaaaaaaaaaaaaaaaaaaaaaaaaaaaaaaaaaaaaaaaaaa

SEQ ID NO: 28023 - RNA, 1662 nt, Artificial Sequence
  mRNA product Design i-3 (A100) comprising derived and/or modified sequence from LASV(LASV237-NIG-2010;Clade II)__AIT17638__GPCmut4 (opt5)
aggagaaagcuuaccaugggccagaucauuaccuucuuucaagaggugccccacgucaucgaagagguuaugaacauugugcugaucgcccucagccugcuugcuauucugaaggggaucuacaauguggccacaugcggacucuucggccuggucuccuuucuucugcucugugggagaucuugcagcacgaccuauaaaggaguguacgaacugcagacacuggagcucgacauggcgucccugaacauguguaugccucuuucuugcaccaagaauaacagccaucacuauaucaugguuggcaaugaaacagggcuggagcucacccugacaaacaccuccauuaucaaucauaaauucuguaaccuuucugaugcucacaagaaagaccuguacgaucaugcccucaugagcauuaucuccacguuucaccugagcauuccgaauuucaaccaguaugaggccaugucuugcgacuuuaauggaggcaagaucuccgugcaguacaaccugagccacaccuaugcugucgaugccgcuaaucauuguggcacaauugccaacggggugcuccaaaccuucaugcggauggcguggggaggcucuuacaucgcccuggacuccgggaagggaagcugggauugcaucaugacaucuuaccaguaucuuauuauccagaauaccacgugggaagaccacugucaguuuucccgccccagcccuauuggcuaccuggggcuccugucccaaagaacacgggauaucuauauuucucgcagacggcgcggaaccuucacauggacccuuagcgacuccgagggcaacgaaacccccggcggguacugccugacaagauggaugcucaucgaggcugagcugaaauguuuuggaaacacggccguugcuaagugcaaugaaaaacaugaugaggaguucugcgacaugcugcggcucuuugauuucuguaagcaggccauccgcagacugaaaaccccugcgcagaugagcauucagcuuaucaacaaggccgugaaugcucugauuaacgaccaacucaucaugaagaaucaucugcgggacauuaugggcauccccuauugcaacuacucuaaauauuguuaccuuaaucacacagucaccgggaagacaucccugccucgcugcugucucgugagcaacggaucuuaccugaaugaaacccacuucagcgaugacaucgaacagcaggccgauaacaugauuacggagcugcuccaaaaagaguauauggacagacagggcaagacaccgcuggggcuuguggaucuguuugucuucuccaccucuuuuuaccucaucagcauuuuccugcaccugaucaaaauucccacccaucggcacaucacaggaaagccuugccccaaaccucaucgccuuaaucacaugggcauuuguuccugcggccucuauaagcaccccgggguuccggugaaguggaaaagaugaggacuaguuauaagacugacuagcccgaugggccucccaacgggcccuccuccccuccuugcaccgagauuaauaaaaaaaaaaaaaaaaaaaaaaaaaaaaaaaaaaaaaaaaaaaaaaaaaaaaaaaaaaaaaaaaaaaaaaaaaaaaaaaaaaaaaaaaaaaaaaaaaaaa

SEQ ID NO: 28024 - RNA, 1662 nt, Artificial Sequence
  mRNA product Design i-3 (A100) comprising derived and/or modified sequence from LASV(LASV253-NIG-2011;Clade II)__AIT17670__GPCmut4 (opt5)
aggagaaagcuuaccaugggccagaucauuaccuucuuucaagaggugccccacgucaucgaagagguuaugaacauugugcugaucgcccucagccugcuugcuauucugaaggggaucuacaauguggccacaugcggacucuucggccuggucuccuuucuucugcucugugggagaucuugcagcacgaccuauaaaggaguguacgaacugcagacacuggagcucgacauggcgucccugaacauguguaugccucuuucuugcaccaagaauaacagccaucacuauaucaugguuggcaaugaaacagggcuggagcucacccugacaaacaccuccauuaucaaucauaaauucuguaaccuuucugaugcucacaagaaaaaucuguacgaccaugcccucaugagcauuaucuccacguuucaccugagcauuccgaacuucaaucaguaugaggccaugucuugcgauuuuaacggaggcaagaucuccgugcaguacaaucugagccacaccuaugcugucgacgccgcuaaccauuguggcacaauugccaauggggugcuccaaaccuucaugcggauggcguggggaggcucuuacaucgcccuggauuccgggaagggaagcugggacugcaucaugacaucuuaccaguaucuuauuauccagaacaccacgugggaagaucacugucaguuuucccgccccagcccuauuggcuaccuggggcuccugucccaaagaacacgggacaucuauauuucucgcagacggcgcggaaccuucacauggacccuuagcgauuccgagggcaacgaaacccccggcggguacugccugacaagauggaugcucaucgaggcugagcugaaauguuuuggaaauacggccguugcuaagugcaacgaaaaacaugacgaggaguucugcgauaugcugcggcucuuugacuucuguaagcaggccauccgcagacugaaagcgccugcccagaugagcauucagcuuaucaauaaggcugugaacgcccugauuaaugaucaacucaucaugaagaaccaucugcgggacauuaugggcauccccuauugcaauuacucuaaauauuguuaccuuaaccacaccgucacagggcgcaccucccugccuagaugcugucucgugagcaauggaucuuaccugaacgaaacacacuucagcgacgauaucgaacagcaggcugacaauaugauuaccgagcugcuccaaaaggaguauaucgaucggcagggcaaaacgccgcuggggcuuguggaccuguuugucuucuccacaucuuuuuaccucauuagcaucuuccugcaccugguuaagauucccacccaucgccacaucauuggaaaaccuugccccaagccucauagacuuaaccacaugggcaucuguuccugcggccucuauaaacaccccggggugccggugaaguggaagcggugaggacuaguuauaagacugacuagcccgaugggccucccaacgggcccuccuccccuccuugcaccgagauuaauaaaaaaaaaaaaaaaaaaaaaaaaaaaaaaaaaaaaaaaaaaaaaaaaaaaaaaaaaaaaaaaaaaaaaaaaaaaaaaaaaaaaaaaaaaaaaaaaaaaa

SEQ ID NO: 28025 - RNA, 1662 nt, Artificial Sequence
  mRNA product Design i-3 (A100) comprising derived and/or modified sequence from LASV(LASV254-NIG-2011;Clade II)__AIT17674__GPCmut4 (opt5)
aggagaaagcuuaccaugggccagaucauuaccuucuuucaagaggugccccacgucaucgaagagguuaugaacauugugcugaucgcccucagccugcuugcuauucugaaggggaucuacaauguggccacaugcggacucuucggccuggucuccuuucuucugcucugugggagaucuugcagcacgaccuauaaaggaguguacgaacugcagacacuggagcucgacaugaccaaccugaauauguguaugccucuuuccugcacaaagaacaauucucaucacuauaucaugguuggcaacgaaaccgggcuggagcucacacugaccaauacgagcauuaucaaccauaaauucuguaaucuuuccgaugcgcacaagaaaaaccuguacaaucaugcucucaugucuauuaucagcaccuuucaccuguccauuccgaacuucaaucaguaugaggccaugagcugcgacuuuaacggaggcaagaucucugugcaguacaaucugucccacagcuaugccgucgaugcugccaaccauuguggcacaauugcuaacggggugcuccaaaccuucaugcggauggccuggggaggcucuuacaucgcgcuggacuccgggaagggaaauugggauugcaucaugacaagcuaccaguaucuuauuauccagaacaccacgugggaagaccacugucaguuuucucgccccuccccuauuggcuaccuggggcuccugagccaaagaacacgggauaucuauauuucccgcagacggcgcggaaccuucacauggacccuuucugacagcgagggcaaugaaacccccggcggguacugccugacaagauggaugcucaucgaggccgagcugaaauguuuuggaaacacggcuguugccaagugcaaugaaaaacaugaugaggaguucugcgacaugcugcggcucuuugauuucuguaagcaggcuauccgcagacugaaaaccccugcccaggcgaacauucagcuuaucaauaaggccgugaacgcucugauuaaugaccaacucaucaugaagaaccaucugcgggauauuaugggcauccccuauugcaauuacuccaaauauuguuaccuuaaccacacagucaccgggaagacaagccugccucgcugcugucucgugucuaauggauccuaccugaacgaaacccacuucagcgacgacaucgaacagcaggccgauaauaugauuacggagcugcuccaaaaagaguauauggacagacagggcaagacaccgcuggggcuuguggaucuguuugucuucucuaccagcuuuuaccucaucuccauuuuccugcaccugguuaaaauccccacccaucggcacgugauuggaaagccuugccccaaaccucaucgccuuaaccacaugggcaucuguucuugcggccucuauaagcaccccggggugccggucaaguggaaaagaugaggacuaguuauaagacugacuagcccgaugggccucccaacgggcccuccuccccuccuugcaccgagauuaauaaaaaaaaaaaaaaaaaaaaaaaaaaaaaaaaaaaaaaaaaaaaaaaaaaaaaaaaaaaaaaaaaaaaaaaaaaaaaaaaaaaaaaaaaaaaaaaaaaaa

SEQ ID NO: 28026 - RNA, 1662 nt, Artificial Sequence
  mRNA product Design i-3 (A100) comprising derived and/or modified sequence from LASV(Nig08-A19;Clade III)__ADU56618__GPCmut4 (opt5)
aggagaaagcuuaccaugggccagaucgugaccuucuuucaagaggucccccacguuauugaagaggugaugaacaucgugcugauugcccucagcauccuggcuauucuuaaggggcuguacaauaucgccacaugcggacucaucggccuggucacguuccuucugcucuccgggagaucuuguagcaugaccuauaaaggaguguacgaacugcagacacuggagcucaacaugaauacccugaacaugugcaugccucuuuccuguacaaagaauaacucucaucacuauauuaugguuggcaaugaaaccgggcuggagcucacacugaccaacacgagccuucugcaucacaaauuuugcaaucucuccgacgcgcauaagaaaaaccuguacgaucacacccugaugucuaucauuagcacauuccaccucuccaucccgaauuuuaaccaguaugaggcuaugagcugugacuucaauggaggcaagauuaccgugcaguacaaccugucucauuccuaugccaucgaugccgcuaaucacugcggcacagucgccaacggggugcuucaaaccuuuaugcggauggcuuggggaggcagcuacauugcccuggacucugggcgcggaaagugggauuguaucaugacguccuaccaguaucucaucauucagaacacaaccugggaagaccauugccaguucagcagacccucuccuaucggcuaccuggggcuucugucccaacggacacgcgauauuuauaucagcagacggcgcagaggaaccuuuaccuggacacucuccgacucugagggcaaugaaacgcccggcggguacugucugacccgguggaugcugauugaggcggagcucaaaugcuucggaaacacagccguugcuaaguguaaugaaaaacacgaugaggaauuuugcgacaugcugcgccuuuucgauuuuugcaagcaggccaucagacggcugaaagcuccugcccagaugagcauccagcucauuaacaaggcggugaaugcccugaucaacgaccaacuuauuaugaagaaucaucugcgcgauaucaugggcauucccuauuguaacuacuccaaauauugcuaccucaaucacaccagcacagggagaaccucucugccucgguguugccuggucuccaacggaagcuaccucaaugagacgcacuucucugacgacaucgaacagcaggcugauaacaugaucacagagaugcugcaaaaggaguaucuugaccgccagggcaaaaccccgcuggggcucguggaucuguucguguuuagcaccuccuucuaccugauuucuaucuuucuucaucucgucaagauucccacacacagacauaucguuggaaaaccuugucccaagccucaccggcugaaucacaugggcauuugcagcuguggccuguauaaacagcccggggugccggugagauggaagcgcugaggacuaguuauaagacugacuagcccgaugggccucccaacgggcccuccuccccuccuugcaccgagauuaauaaaaaaaaaaaaaaaaaaaaaaaaaaaaaaaaaaaaaaaaaaaaaaaaaaaaaaaaaaaaaaaaaaaaaaaaaaaaaaaaaaaaaaaaaaaaaaaaaaaa

SEQ ID NO: 28027 - RNA, 1665 nt, Artificial Sequence
  mRNA product Design i-3 (A100) comprising derived and/or modified sequence from LASV(G1180-SLE-2010;Clade IV)__AIT17168__GPCmut4 (opt5)
aggagaaagcuuaccaugggccagaucgugaccuucuuucaagaggucccccacguuauugaagaggugaugaacaucgugcugauugcccucagcauccuggcuguccuuaaggggcuguacaauuucgccacaugcggacucgugggccugcuuacguuucugcuccugugugggagauccugcaccgcgucucgguauaaaggaguuuacgaacugcagacacucgagcugaacauggaaacccuuaauauguguaugccucugagcugcacaaagaacaauucccaucacuauauuauggugggcaacgagaccgggcucgagcugacacuuaccaauacgucuaucaucaaccauaaauucuguaaucugagcgacgcucacaagaaaaaccucuacgaucaugcccugauguccauuaucucuaccuuucaccugagcauuccgaauuucaaccaguaugaagccauguccugcgacuuuaauggaggcaagaucagcguccaguacaaccucucucacuccuaugcuggcgaugccgcuaaucauugugggacaguggccaacggaguucugcaaaccuucaugcgcauggcguggggcgggagcuacauugcccuugacucuggacacggcuccugggauugcaucaugacaagcuaccaguaucugauuauccagaacaccacgugggaggaccauugucaguuuucuagacccuccccuaucggguaccucggacugcuuagccaacggacacgcgauauuuauaucuccagacggcgcagaggcaccuucacauggacccugucugacagcgaaggcaaggauacccccgggggauacugccucacacgguggaugcugauugaggcugagcugaaauguuuuggcaauacggccguggcuaagugcaacgaaaaacacgacgaggaguucugcgauaugcuccgccuguuugacuucuguaagcaggccauccagagacuuaaagcgccugcccagauguccauucaacugaucaauaaggcugucaacgcccucaucaaugaucagcugauuaugaagaaccaccuucgggacaucauggggauucccuauugcaauuacagcaaauauuguuaccugaaccauaccacaaccggaaagacaucucucccuaaaugcugucugguguccaauggcagcuaccugaacgaaacccacuucucugacgauaucgaacagcaagcugacaauaugauuacggagaugcuccagaaggaguauauggaacgccaggggaaaacaccgcugggacuuguggaucuguuugucuucagcaccuccuuuuaccucaucucuaucuuccugcaucugguuaagauucccacccacagacauaucgugggcaaaagcugcccuaagccccaccggcuuaaccacaugggcauuuguuccugcgggcucuauaagcagccuggagugcccgucaaauggaagcgcugaggacuaguuauaagacugacuagcccgaugggccucccaacgggcccuccuccccuccuugcaccgagauuaauaaaaaaaaaaaaaaaaaaaaaaaaaaaaaaaaaaaaaaaaaaaaaaaaaaaaaaaaaaaaaaaaaaaaaaaaaaaaaaaaaaaaaaaaaaaaaaaaaaaa

SEQ ID NO: 28028 - RNA, 1665 nt, Artificial Sequence
  mRNA product Design i-3 (A100) comprising derived and/or modified sequence from LASV(G1442-SLE-2011;Clade IV)__AIT17180__GPCmut4 (opt5)
aggagaaagcuuaccaugggccagaucgugaccuucuuucaagaggucccccacguuauugaagaggugaugaacaucgugcugauugcccucagcauccuggcuguccuuaaggggcuguacaauguggccacaugcggacucauuggccugguuacguuccuucugcucugugggagauccugcaccacaacccuguauaaaggaguguacgaacugcagacacucgagcugaacauggaaacccuuaauauguguaugccucugucuugcacaaagaacaauagccaucacuauauccgggucggcaacgagaccgggcucgagcugacgcuuaccaauacauccaucauuaaccauaaauuuuguaaucugucugacgcgcacaagaaaaaccucuacgaucaugcucugaugagcaucauuuccaccuuccaccugucuaucccgaauuuuaaccaguaugaagccaugagcugcgacuucaauggaggcaagauuuccgugcaguacaaccucagccacucuuaugccggcgaugcugccaaucauugugggacaguugcuaacggagugcugcaaaccuuuaugcgcauggccuggggcggguccuacaucgcgcuugacagcggaagaggcaacugggauugcauuaugacgucuuaccaguaucugaucauccagaauacaaccugggacgaucacugucaguucucccggcccagcccuauuggguaccucggacugcuuucucaacgcacaagagacgucuauaucucccggcgcagacggggcaccuuuaccuggacacugagcgauuccgagggcaaggacacgcccgggggauacugccucacccgcuggaugcugauugaagccgagcugaaauguuucggcaacacagcuguggccaagugcaaugagaaacaugaugaagaguuuugcgacaugcucagacuguucgauuuuuguaagcaggcuauccagcggcuuaaagccccugcgcagaugucuauucaacugaucaacaaggccgugaaugcucucaucaacgaccagcugauuaugaagaaucaccuucgcgacaucauggggauucccuauugcaacuacagcaaauauuguuaccugaauaacaccgccacaggaaagaccucccucccuaaaugcugucugaucagcaauggcucuuaccugaacgaaacgcacuucuccgaugacauugagcaggaagcugauaauaugaucacagagaugcuccaaaaggaguauauggaaagacaggggaaaaccccgcugggacuugucgaccuguucguuuuuagcaccucuuucuaccucaucagcauuuuucugcaucuggugaagauccccacacaccggcauauugugggcaaauccugcccuaagccccaccgccuuaaccauaugggcaucuguucuugcgggcucuauaagcagccuggaguccccgugagauggaaacggugaggacuaguuauaagacugacuagcccgaugggccucccaacgggcccuccuccccuccuugcaccgagauuaauaaaaaaaaaaaaaaaaaaaaaaaaaaaaaaaaaaaaaaaaaaaaaaaaaaaaaaaaaaaaaaaaaaaaaaaaaaaaaaaaaaaaaaaaaaaaaaaaaaaa

SEQ ID NO: 28029 - RNA, 1665 nt, Artificial Sequence
  mRNA product Design i-3 (A100) comprising derived and/or modified sequence from LASV(G3010-SLE-2013;Clade IV)__AIT17344__GPCmut4 (opt5)
aggagaaagcuuaccaugggccagaucgugaccuucuuucaagaggucccccacguuauugaagaggugaugaacaucgugcugauugcccucagcauccuggcuguccuuaaggggcuguacaauuucgccacaugcggacucgugggccugguuacguuucuucugcucugugggagauccugcaccacaucucuguauaaaggaguguacgaacugcagacccucgagcugaacauggaaacacuuaauauguguaugccucugagcugcaccaagaacaauucccaucacuauauuauggucggcaacgagacagggcucgagcugacccuuacgaauaccucuaucaucaaccauaaauucuguaaucugagcgacgcgcacaagaaaaaccucuacaaucaugcucugauguccauuaucucuacauuucaccugagcauuccgaacuucaaucaguaugaagccauguccugcgauuuuaacggaggcaagaucagcgugcaguacaaucucucucacuccuaugccggcgacgcugccagccauugugggaccguugcuaacggagugcugcaaacauucaugcggauggccuggggcgggucuuacauugcgcuugauuccggauacggcaagugggacugcaucaugaccagcuaucaguaccugauuauccagaacacgacaugggaggaucacugucaguuuucucgccccuccccuaucggguaucucggacugcuuagccaaagaacccgggacauuuacaucucccgcagacggcgcggcacauucaccuggacccugucugauagcgaaggcaaagacacacccgggggauauugccucacgagauggaugcugauugaggccgagcugaaguguuuuggcaauaccgcugucgccaaaugcaacgaaaagcaugaugaggaguucugcgacaugcuccggcuguuugauuucuguaaacaggcuauccagcgccuuaagaccccugcccagauguccauucaacugaucaauaaggcggugaacgcccucaucaaugaccagcugauuaugaaaaaccaccuuagagauaucauggggauucccuacugcaauuauagcaaguacuguuaccugaaccacacaacaaccggaaaaacgucucucccuaagugcugucugguguccaauggcagcuaucugaacgaaacacauuucucugacgacaucgaacagcaagcugauaauaugauuaccgagaugcuccagaaagaguacauggaacggcaggggaagaccccgcugggacuugucgaccuguuuguuuucagcacauccuuuuaucucaucucuaucuuccugcaccuggugaaaauucccacccaucgccacaucgugggcaagagcugcccuaagccccauagacuuaaccacaugggcauuuguuccugcgggcucuacaaacagccuggaguccccgugcgguggaagcgcugaggacuaguuauaagacugacuagcccgaugggccucccaacgggcccuccuccccuccuugcaccgagauuaauaaaaaaaaaaaaaaaaaaaaaaaaaaaaaaaaaaaaaaaaaaaaaaaaaaaaaaaaaaaaaaaaaaaaaaaaaaaaaaaaaaaaaaaaaaaaaaaaaaaa

SEQ ID NO: 28030 - RNA, 1665 nt, Artificial Sequence
  mRNA product Design i-3 (A100) comprising derived and/or modified sequence from LASV(G502-SLE-2009;Clade IV)__AIT17126__GPCmut4 (opt5)
aggagaaagcuuaccaugggccagaucgugaccuucuuucaagaggucccccacguuauugaagaggugaugaacaucgugcugauugcccucagcauccuggcuguccuuaaggggcuguacaauuucgccacaugcggacucgugggccugcuuacguuucugcuccugugugggagauccugcaccacaggacuguauaaaggcguuuacgaacuccagacccuggagcuuaacauggaaacacugaauauguguaugccucucucuugcaccaagaacaauagccaucacuauauuaugguggggaacgagacaggacuggagcuuacccugacgaauaccuccaucaucaaccauaaauucuguaaucucucugacgcgcacaagaaaaaccuguacgaucaugcucugaugagcauuaucuccacauuucaccucucuauuccgaauuucaaccaguaugaagccaugagcugcgacuuuaauggcggcaagaucuccguccaguacaaccugagccacucuuaugccggggaugcugccgaccauuguggaaccguggcuaauggcguucuucaaacauucaugcggauggccuggggaggguccuacauugcgcuggauagcggccgcgggagaugggacugcaucaugaccucuuaccaguaucucauuauccagaacacgacaugggaggaucacugucaguuuucccggcccagcccuaucggauaccugggccuucugucucaacgcaccagagacauuuauaucucccggcgcagacggggcacauucaccuggacccucagcgauuccgaagggaaggacacacccggaggcuacugccugacgcgcuggaugcugauugaggccgagcucaaauguuuugggaacaccgcuguggccaagugcaaugaaaaacaugaugaggaguucugcgacaugcugagacuuuuugauuucuguaagcaggcuauccagcggcugaaagccccugcgcagaugucuauucaacucaucaacaaggccgucaaugcucugaucaacgaccagcuugugaugaagaaucaucugcgcgacauuaugggaauccccuauugcaacuacagcagauauuguuaccucaaucacacaaccacaggccggaccucccugccuaaaugcugucuggugagcaacgggucuuaccucaaugaaacgcacuucuccgaugacauugaacagcaagccgauaacaugaucacagagaugcugcagaaggaguauauggaacgccagggaaaaaccccgcuuggccuggucgaccucuuuguuuucagcaccucuuuuuaccugauuagcaucuuccugcaccuugugaagauccccacacauagacacauugugggcaaauccugcccuaagccccaucggcucaaucacauggggaucuguucuugcggacuguauaaacagccuggcguccccgugaaguggaagagaugaggacuaguuauaagacugacuagcccgaugggccucccaacgggcccuccuccccuccuugcaccgagauuaauaaaaaaaaaaaaaaaaaaaaaaaaaaaaaaaaaaaaaaaaaaaaaaaaaaaaaaaaaaaaaaaaaaaaaaaaaaaaaaaaaaaaaaaaaaaaaaaaaaaa

SEQ ID NO: 28031 - RNA, 1665 nt, Artificial Sequence
  mRNA product Design i-3 (A100) comprising derived and/or modified sequence from LASV(G733-SLE-2010;Clade IV)__AIT17154__GPCmut4 (opt5)
aggagaaagcuuaccaugggccagaucgugaccuucuuucaagaggucccccacguuauugaagaggugaugaacaucgugcugauugcccucagcauccuggcuguccuuaaggggcuguacaauuucgccacaugcggaauugugggccucguuuccuuucugcuucugugugggagaucuugcacgaccagccucuauaaaggaguguacgaacugcagacacuggagcucaacauggaaacccugaauauguguaugccucuuuccugcacaaagaacaauucucaucacuauaucauggucggcaacgagaccgggcuggagcucacacugaccaauacgagcaucauuaaccauaaauucuguaaucuuuccgacgcgcacaagaaaaaccuguacgaucaugcucucaugucuaucauuagcaccuuucaccuguccaucccgaauuucaaccaguaugaagccaugagcugcgacuuuaauggaggcaagauuucugugcaguacaaccugucccacagcuaugccggcgaugcugccaaucauugugggacaaucgcuaacggaguucuccaaaccuucaugcggauggccuggggcgggucuuacauugcgcuggacuccggacgcgauagaugggacugcaucaugacaagcuaccaguaucuuaucauucagaacaccacgugggaggaucacugucaguuuucucggcccuccccuaucggcuaccuggggcuccugagccaacgcacaagagacauuuauaucucccggcgcagacggggaaccuucacauggacccuuucugauagcgaaggcaaggacacccccggcggguacugccugacacgcuggaugcucauugaggccgagcugaaauguuuuggaaauacggcuguggccaagugcaacgaaaaacaugaugaggaguucugcgacaugcugagacucuuugauuucuguaagcaggcuauccagcggcugaaagccccugcgcagauguccauccaacuuauuaauaaggccgucaacgcucugaucaaugaccagcucauuaugaagaaccaucugcgcgacaucaugggcauucccuauugcaauuacagcaaauauuguuaccuuaaccacaccacaaccgggaagacaucucugccuaaaugcugucucguguccaauggaagcuaccugaacgaaacccacuucucugaugacaucgaacagcaagccgauaauaugaucacggagaugcugcagaaggaguauauggaaagacagggcaaaacaccgcucgggcugguggaccuuuuugucuucagcaccuccuuuuaccugauuucuaucuuccuccaccugguuaagauucccacccaucggcacguggugggaaaaagcugcccuaagccccaucgccugaaccacaugggcaucuguuccugcggccuuuaugggcagccuggaguccccgugaaguggaaaagaugaggacuaguuauaagacugacuagcccgaugggccucccaacgggcccuccuccccuccuugcaccgagauuaauaaaaaaaaaaaaaaaaaaaaaaaaaaaaaaaaaaaaaaaaaaaaaaaaaaaaaaaaaaaaaaaaaaaaaaaaaaaaaaaaaaaaaaaaaaaaaaaaaaaa

SEQ ID NO: 28032 - RNA, 1665 nt, Artificial Sequence
  mRNA product Design i-3 (A100) comprising derived and/or modified sequence from MOPV/LASV reassortant(IGS-1;Clade IV)__AFY05576__GPCmut4 (opt5)
aggagaaagcuuaccaugggccagaucgugaccuucuuucaagaggucccccacguuauugaagaggugaugaacaucgugcugauugcccucagcguccuggcugugcuuaaggggcuguacaauuucgccacaugcggacucguuggccuggugacguuucuucugcucugugggagauccugcaccacaucucuguauaaaggagucuacgaacugcagacccucgagcugaacauggaaacacuuaauauguguaugccucugagcugcaccaagaacaauucccaucacuauaucauggugggcaacgagacagggcucgagcugacccuuacgaauaccucuauuaucaaccauaaauucuguaaucugagcgacgcgcacaagaaaaaccucuacgaucaugcucugauguccaucauuucuacauuucaccugagcaucccgaauuucaaccaguaugaagccauguccugcgacuuuaauggaggcaagauuagcguucaguacaaccucucucacuccuaugccggcgaugcugccaaucauugugggaccguggcuaacggaguccugcaaacauucaugcggauggccuggggcgggagcuacaucgcgcuugacucuggacgcggcaacugggauugcauuaugaccuccuaccaguaucugaucauucagaauacgacaugggaggaccacugucaguuuagcagacccucuccuaucggguaccucggacugcuuucccaacggacccgcgauaucuauauuagcagacggcgcagaggcacauucaccuggacccuguccgacucugaaggcgaggauacacccgggggauacugccucacgcgguggaugcugaucgaggccgaacugaaguguuuuggcaacaccgcuguggccaaaugcaaugagaagcaugacgaagaguucugcgauaugcuccgccuguuugacuucuguaaacaggcuauucagagacuuaaggccccugcgcagaugagcauccaacugauuaacaaagccgugaaugcucucaucaacgaucagcugaucaugaagaaucaccuucgggacauuauggggauccccuauugcaacuacuccaaguauuguuaccugaaucacacaaccacaggacgcaccagccucccuaaaugcugucuggucucuaacggcuccuaccugaaugaaacgcauuucagcgacgauauugagcagcaagccgacaacaugaucacagagaugcuccagaaggaauauauggagagacaggggaaaaccccgcugggacuuguugaucuguuuguguucucuaccagcuuuuaccucauuuccaucuuccugcaccuggugaagauccccacacaucggcacauugucggcaaaucuugcccuaagccccaucgccuuaaucacaugggcaucuguagcugcgggcucuauaaacagccuggagugcccguuaaguggaagagaugaggacuaguuauaagacugacuagcccgaugggccucccaacgggcccuccuccccuccuugcaccgagauuaauaaaaaaaaaaaaaaaaaaaaaaaaaaaaaaaaaaaaaaaaaaaaaaaaaaaaaaaaaaaaaaaaaaaaaaaaaaaaaaaaaaaaaaaaaaaaaaaaaaaa

SEQ ID NO: 28033 - RNA, 1665 nt, Artificial Sequence
  mRNA product Design i-3 (A100) comprising derived and/or modified sequence from LASV(LM765-SLE-2012;Clade IV)__AIT17814__GPCmut4 (opt5)
aggagaaagcuuaccaugggccagaucgugaccuucuuucaagaggucccccacguuauugaagaggugaugaacaucgugcugauugcccucagcauccuggcuguccuuaaggggcuguacaauuucgccacaugcggacucgugggccugguuacguuucuucugcucugugggagauccugcaccacaucucuguauaaaggaguguacgaacugcagacccucgagcugaacauggaaacacuuaauauguguaugccucugagcugcaccaagaacaauucccaucacuauauuauggucggcaacgagacagggcucgagcugacccuuacgaauaccucuaucaucgaccauaaauucuguaaccugagcgaugcgcaccggaagaaucucuacgaccaugcucugauguccauuaucucuacauuucaccugagcauuccgaacuucaaucaguaugaagccauguccugcgauuuuaacggaggcaaaaucagcgugcaguacaaucucucucacuccuaugccaaggacgcugccgaucauuguggcaccguugcuaacggggugcugcaaacauucaugcgcauggccuggggaggcagcuacauugcgcuugacucugggagaggacggugggauugcaucaugaccuccuaccaguaucugauuauccagaauacgacaugggaggaccacugucaguuuagccgccccucuccuaucggcuaccucgggcugcuuucccaaagaacccgggauauuuauaucagccgcagacggcgcggaacauucaccuggacccuguccgacucugaaggcaaggauacacccggcggguacugccucacgagauggaugcugauugaggccgagcugaaauguuuuggaaacaccgcugucgccaagugcaacgaaaaacaugacgaggaguucugcgauaugcuccggcuguuugacuucuguaagcaggcuauccagcgccuuaaagccccugcgcagaugagcauucaacugaucaauaaggccgugaacgcucucaucaaugaccagcugauuaugaagaaccaccuuagagauaucaugggcauucccuauugcaauuacuccaaauauuguuaccugaaccacacaaccacagggaagaccagccucccuaaaugcugucuggugucuaauggauccuaccugaacgaaacgcauuucagcgacgauaucgaacagcaagccgacaauaugauuacagagaugcuccagaaggaguauauggaacggcagggcaaaaccccgcuggggcuugucgaucuguuuguuuucucuaccagcuuuuaccucaucuccaucuuccugcaccuggugaagauucccacacaucgccacaucgugggaaaaccuugccccaagccucauagacuuaaccacaugggcauuuguucuugcggccucuauaagcagcccggggucccggugaaauggaagcggugaggacuaguuauaagacugacuagcccgaugggccucccaacgggcccuccuccccuccuugcaccgagauuaauaaaaaaaaaaaaaaaaaaaaaaaaaaaaaaaaaaaaaaaaaaaaaaaaaaaaaaaaaaaaaaaaaaaaaaaaaaaaaaaaaaaaaaaaaaaaaaaaaaaa

SEQ ID NO: 28034 - RNA, 1665 nt, Artificial Sequence
  mRNA product Design i-3 (A100) comprising derived and/or modified sequence from LASV(LM776-SLE-2012;Clade IV)__AIT17824__GPCmut4 (opt5)
aggagaaagcuuaccaugggccagaucgugaccuucuuucaagaggucccccacguuauugaagaggugaugaacaucgugcugauugcccucagcauccuggcuguccuuaaggggcuguacaauuucgccacaugcggacucgugggccugguuacguuucuucugcucugugggagauccugcaccacaucuguguauaaaggagucuacgaacugcagacccuggagcucaacauggaaacacugaauauguguaugccucuuagcugcaccaagaacaauucccaucacuauauuauggugggcaacgagacagggcuggagcucacccugacgaauaccucuaucaucaaccauaaauucuguaaucuuagcgacgcgcacaagaaaaaccuguacgaucaugcucucauguccauuaucucuacauuucaccugagcauuccgaauuucaaccaguaugaagccauguccugcgacuuuaauggaggcaagaucagcguucaguacaaccugucucacuccuaugccggcgaugcugccaaucauugugggaccguggcuaacggaguccuccaaacauucaugcggauggccuggggcgggagcuacauugcgcuggacucuggacacggcaagugggauugcaucaugaccuccuaccaguaucuuauuauccagaacacgacaugggaggaccauugucaguuuagccgccccucuccuaucggguaccugggacuccugucccaaagaacccgggauauuuauaucagccgcagacggcgcggcacauucaccuggacccuuuccgacucugaaggcaaagauacacccgggggauacugccugacgagauggaugcucauugaggccgagcugaaguguuuuggcaauaccgcuguggccaaaugcaacgaaaagcacgacgaggaguucugcgauaugcugcggcucuuugacuucuguaaacaggcuauccagcgccugaaggccccugcgcagaugagcauucaacuuaucaauaaggccgugaacgcucugaucaaugaucagcucauuaugaaaaaccaccugagagacaucauggggauucccuauugcaauuacuccaaguauuguuaccuuaaccauacaaccacaggaaaaaccagccugccuaagugcugucucgucucuaauggcuccuaccugaacgaaacgcacuucagcgacgauaucgaacagcaagccgacaauaugauuacagagaugcugcagaaagaguauauggaacggcaggggaagaccccgcucggacugguugaucuuuuuguguucucuaccagcuuuuaccugaucuccaucuuccuccaucuggugaaaauucccacacaccgccauaucgucggcaagucuugcccuaagccccacagacugaaccacaugggcauuuguagcugcgggcuuuauaaacagccuggagugcccguucgguggaagcgcugaggacuaguuauaagacugacuagcccgaugggccucccaacgggcccuccuccccuccuugcaccgagauuaauaaaaaaaaaaaaaaaaaaaaaaaaaaaaaaaaaaaaaaaaaaaaaaaaaaaaaaaaaaaaaaaaaaaaaaaaaaaaaaaaaaaaaaaaaaaaaaaaaaaa

SEQ ID NO: 28035 - RNA, 1665 nt, Artificial Sequence
  mRNA product Design i-3 (A100) comprising derived and/or modified sequence from LASV(Mad39;Clade IV)__ANH09722__GPCmut4 (opt5)
aggagaaagcuuaccaugggccagaucgugaccuucuuucaagaggucccccacguuauugaagaggugaugaacaucgugcugauugcccucagcauccuggcuguccuuaaggggcuguacaauguggccacaugcggacucauuggccugguuacguuccuucugcucugugggagauccugcaccacaacccuguauaaaggaguguacgaacugcaggcgcucgagcugaacauggaaacacuuaauauguguaugccucugucuugcaccaagaacaauagccaucacuauauccgggucggcaacgagacagggcucgagcugacccuuacgaauaccucccugaucaaccauaaauuuuguaaucucucugacgcucacaagaaaaaccuguacgaucaugcccugaugagcauuaucuccacauuccaccucucuauuccgaauuuuaaccaguaugaagccaugagcugcgacuucaaugauggaaagaucuccgugcaguacaaccugagccacaccuaugcuggcgacacagccaaucauuguggcaccguugcuaacggggugcuucaaacguuuaugcgcauggccuggggaggcucuuacauugcgcuggauuccgggagaggaggcugggacugcaucaugacaagcuaccaguaucucauuauccagaacaccacaugggaggaucacugucaguucucucggcccuccccuaucggguaccugggacuucugagccaacgcaccagagacauuuauaucucucggcgcagacggggcaccuuuacauggacgcucuccgauagcgaaggcaaggacacccccgggggauacugccugacacgcuggaugcugauugaggccgagcucaaauguuucggcaauaccgcugucgccaagugcaacgaaaaacaugaugaggaauuuugcgacaugcugagacuuuucgauuuuuguaagcaggcuauccagcggcugaaagccccugcgcagauguccauucaacucaucaauaaggccgugaacgcucugaucaaugaccagcuuauuaugaagaaccaucugcgcgacaucauggggauucccuauugcaauuacucuaaauauuguuaccucaaccacacagugaccggaaagacgagccugccuaaaugcugucuggucuccaauggcagcuaccucaacgagacacacuucucugaugacaucgaacagcaagccgauaauaugauuaccgagaugcugcagaaggaguauauggaaagacaggggaaaaccccgcuuggacugguugaccucuucguguuuuccaccagcuucuaccugaucucuaucuuucugcaccuugugaagauucccacacaucggcacgucgugggcaaaccuugccccaagccucaucgccucaaccacaugggcaucuguagcugcggguucuauaagcagcccggaguuccggugagauggaaacggugaggacuaguuauaagacugacuagcccgaugggccucccaacgggcccuccuccccuccuugcaccgagauuaauaaaaaaaaaaaaaaaaaaaaaaaaaaaaaaaaaaaaaaaaaaaaaaaaaaaaaaaaaaaaaaaaaaaaaaaaaaaaaaaaaaaaaaaaaaaaaaaaaaaa

SEQ ID NO: 28036 - RNA, 1665 nt, Artificial Sequence
  mRNA product Design i-3 (A100) comprising derived and/or modified sequence from LASV(Z0947-SLE-2011;Clade IV)__AIT17840__GPCmut4 (opt5)
aggagaaagcuuaccaugggccagaucgugaccuucuuucaagaggucccccacguuauugaagaggugaugaacaucgugcugauugcccucagcauccuggcuguccuuaaggggcuguacaauuucgccacaugcggacucgugggccugguuacguuucuucugcucugugggagauccugcaccauuucucuguauaaaggaguguacgaacugcagacacucgagcugaacauggaaacccuuaauauguguaugccucugagcugcacaaagaacaauucccaucacuauaucauggucggcaacgagaccgggcucgagcugacacuuaccaauacgucuaucauuaaccauaaauucuguaaucugagcgacgcgcacaagaaaaaccucuacgaucaugcucugauguccaucauuucuaccuuucaccugagcaucccgaauuucaaccaguaugaagccauguccugcgacuuuaauggaggcaagauuagcgugcaguacaaccucucucacuccuaugccggcgaugcugccaaucauugugggacaguugcuaacggagugcugcaaaccuucaugcggauggccuggggcgggagcuacaucgcgcuugacucuggacgcgauagaugggacugcauuaugacauccuaccaguaucugaucauccagaacaccacgugggaggaucacugucaguuuagccggcccucuccuauuggcuaccucgggcugcuuucccaacgcacaagagacaucuauauuagccggcgcagacggggaaccuucacauggacccuguccgauucugaaggcaaggacacccccggcggguacugccucacacgcuggaugcugaucgaggccgagcugaaauguuuuggaaauacggcugucgccaagugcaacgaaaaacaugaugaggaguucugcgacaugcucagacuguuugauuucuguaagcaggcuauucagcggcuuaaagccccugcgcagaugagcauccaacugaucaauaaggccgugaacgcucucauuaaugaccagcugaucaugaagaaccaccuucgcgacauuaugggcauccccuauugcaauuacuccaaauauuguuaccugaaccacaccacaaccgggaagacaagccucccuaaaugcugucuggugucuaauggauccuaccugaacgaaacccauuucagcgaugacauugaacagcaagccgauaauaugaucacggagaugcuccagaaggaguauauggaaagacagggcaaaacaccgcuggggcuugucgaccuguuuguuuucucuaccagcuuuuaccucaucuccauuuuccugcaccuggugaagauccccacccaucggcacauugugggaaaaccuugccccaagccucaucgccuuaaccacaugggcaucuguucuugcggccucuauaagcagcccggggucccggugaaauggaagagaugaggacuaguuauaagacugacuagcccgaugggccucccaacgggcccuccuccccuccuugcaccgagauuaauaaaaaaaaaaaaaaaaaaaaaaaaaaaaaaaaaaaaaaaaaaaaaaaaaaaaaaaaaaaaaaaaaaaaaaaaaaaaaaaaaaaaaaaaaaaaaaaaaaaa

SEQ ID NO: 28037 - protein, 491 aa, Artificial Sequence
  derived and/or modified protein sequence (artificial) from LASV(Josiah;Clade IV)__NP_694870__GPCmut5
MGQIVTFFQEVPHVIEEVMNIVLIALSVLAVLKGLYNFATCGLVGLVTFLLLCGRSCTTSLYKGVYELQTLELNMETLNMTMPLSCTKNNSHHYIMVGNETGLELTLTNTSIINHKFCNLSDAHKKNLYDHALMSIISTFHLSIPNFNQYEAMSCDFNGGKISVQYNLSHSYAGDAANHCGTVANGVLQTFMRMAWGGSYIALDSGCGNWDCIMTSYQYLIIQNTTWEDHCQFSRPSPIGYLGLLSQRTRDIYISRRLLGTFTWTLSDSEGKDTPGGYCLTRWMLIEAELKCFGNTAVAKCNEKHDEEFCDMLRLFDFNKQAIQRLKAPAQMSIQLINKAVNALINDQLIMKNHLRDIMCIPYCNYSKYWYLNHTTTGRTSLPKCWLVSNGSYLNETHFSDDIEQQADNMITEMLQKEYMERQGKTPLGLVDLFVFSTSFYLISIFLHLVKIPTHRHIVGKSCPKPHRLNHMGICSCGLYKQPGVPVKWKR

SEQ ID NO: 28038 - protein, 490 aa, Artificial Sequence
  derived and/or modified protein sequence (artificial) from LASV(LP;Clade I)__AAF86701__GPCmut5
MGQIITFFQEVPHVIEEVMNIVLIALSLLAILKGLYNIATCGIIGLVAFLFLCGKSCSLTLKGGYELQTLELNMETLNMTMPLSCTKNSSHHYIRVGNETGLELTLTNTSIINHKFCNLSDAHKKNLYDHALMSIISTFHLSIPNFNQYEAMSCDFNGGKISVQYNLSHSYAGDAAEHCGTVANGVLQTFMRMAWGGRYIALDSGCGNWDCIMTSYQYLIIQNTTWEDHCQFSRPSPIGYLGLLSQRTRDIYISRRLLGTFTWTLSDSEGNETPGGYCLTRWMLIEAELKCFGNTAVAKCNEKHDEEFCDMLRLFDFNKQAIRRLKAPAQMSIQLINKAVNALINDQLIMKNHLRDIMCIPYCNYSKYWYLNHTSSGRTSLPKCWLISNGSYLNETQFSDDIEQQADNMITEMLQKEYIERQGKTPLGLVDIFIFSTSFYLISIFLHLIKIPTHRHIVGKPCPKPHRLNHMGVCSCGLYKHPGVPTKWKR

SEQ ID NO: 28039 - protein, 490 aa, Artificial Sequence
  derived and/or modified protein sequence (artificial) from LASV(803213;Clade II)__AAF86703__GPCmut5
MGQIITFFQEVPHVIEEVMNIVLIALSLLAILKGIYNVATCGLFGLISFLLLCGRSCSVTYKGVYELQTLELNMANLNMTMPLSCTKNNSHHYIMVGNETGLELTLTNTSIINHKFCNLSDAHKKNLYDHALMSIISTFHLSIPNFNQYEAMSCDFNGGKISVQYNLSHSFAVDAANHCGTIANGVLQTFMRMAWGGSYIALDSGCGNWDCIMTSYQYLIIQNTTWEDHCQFSRPSPIGYLGLLSQRTRDIYISRRLLGTFTWTLSDSEGNEAPGGYCLTRWMLIEAELKCFGNTAVAKCNEKHDEEFCDMLRLFDFNKQAIKRLKTPAQMSIQLINKAVNALINDQLIMKNHLRDIMCIPYCNYSRYWYLNHTVTGKTSLPRCWLVSNGSYLNETHFSDDIEQQADNMITEMLQKEYMDRQGKTPLGLVDLFVFSTSFYLISIFLHLVKIPTHRHIVGKPCPKPHRLNHMGICSCGLYKHPGVPVKWKR

SEQ ID NO: 28040 - protein, 490 aa, Artificial Sequence
  derived and/or modified protein sequence (artificial) from LASV(GA391;Clade III)__CAA36645__GPCmut5
MGQIVTFFQEVPHVIEEVMNIVLIALSILAILKGLYNVATCGLIGLVTFLLLSGRSCSLIYKGTYELQTLELNMETLNMTMPLSCTKNNSHHYIRVGNETGLELTLTNTSILNHKFCNLSDAHKRNLYDHSLMSIISTFHLSIPNFNQYEAMSCDFNGGKITVQYNLSHSFAVDAAGHCGTLANGVLQTFMRMAWGGSYIALDSGCGNWDCIMTSYQYLIIQNTTWDDHCQFSRPSPIGYLGLLSQRTRDIYISRRLLGTFTWTLSDSEGNETPGGYCLTRWMLIEAELKCFGNTAVAKCNEKHDEEFCDMLRLFDFNKQAIRRLKTPAQMSIQLINKAVNALINDQLIMKNHLRDIMCIPYCNYSRYWYLNHTSTGKTSLPRCWLISNGSYLNETKFSDDIEQQADNMITEMLQKEYIDRQGKTPLGLVDLFVFSTSFYLISIFLHLVKIPTHRHIVGKPCPKPHRLNHMGICSCGLYKQPGVPVRWKR

SEQ ID NO: 28041 - protein, 491 aa, Artificial Sequence
  derived and/or modified protein sequence (artificial) from LASV(AV;Clade V)__CCA30314__GPCmut5
MGQIVTFFQEVPHVIEEVMNIVLIALSILAVLKGLYNIATCGLIGLITFLLLCGRSCSSNLYKGVYELQSLDLNMETLNMTMPLSCTKNNSHHYIRVGNDTGLELTLTNTSILNHKFCNLSDAHKKDLYDHALMSIISTFHLSIPNFNQYEAMSCDFNGGKISVQYNLSHSYAIDAANHCGTVANGILQTFMRMAWGGSYIALDSGCGNWDCIMTSYQYLIIQNTTWENHCQFSRPSPIGYLGLLSQRTRDIYISRRLLGTFTWTLSDSEGNATPGGYCLTRWMLIEAELKCFGNTAVAKCNEKHDEEFCDMLRLFDFNKQAISRLKSPAQMSIQLINKAVNALINDQLIMKNHLRDIMCIPYCNYSKYWYLNHTITGKTSLPKCWLVSNGSYLNETHFSDDIEQQADNMITEMLQKEYMERQGKTPLGLVDLFVFSTSFYLISIFLRLVKIPTHRHIVGKPCPKPHRLNHMGICSCGLYKQPGVPVRWKR

SEQ ID NO: 28042 - protein, 490 aa, Artificial Sequence
  derived and/or modified protein sequence (artificial) from LASV(Togo/2016/7082;Clade VI)__AMR44577__GPCmut5
MGQIITFFQEVPHVIEEVMNIVLIALSLLAILKGVYNVATCGIIGLVTFLFLCGRSCSLIYKGSYELQTLELNMETLNMTMPLSCTKNSSHHYIRVGNETGLELTLTNTSIINHKFCNLSDAHKRNLYDHALMSILSTFHLSIPNFNQYEAMSCDFNGGKISVQYNLSHAYAVDAAEHCGTVANGVLQTFMRMAWGGSYIALDSGCGNWDCIMTSYQYLIIQNTTWEDHCQFSRPSPIGYLGLLSQRTRDIYISRRLLGTFTWTLSDSEGNETPGGYCLTRWMLIEAELKCFGNTAVAKCNEKHDEEFCDMLRLFDFNKQAIQRLKSPAQMSIQLINKAVNALINDQLIMKNHLRDMMCIPYCNYSKYWYLNHTSSGRTSLPKCWLVSNGSYLNETHFSDDIEQQADNMITEMLQKEYIDRQGKTPLGLVDLFVFSTSFYLISIFLHLIKIPTHRHIVGKPCPKPHRLNHMGICSCGLYKQPGVPTRWKR

SEQ ID NO: 28043 - protein, 490 aa, Artificial Sequence
  derived and/or modified protein sequence (artificial) from LASV(KAK-428;Clade n.d. (VII))__ANH09740__GPCmut5
MGQIVTFFQEVPHVIEEVMNIVLIALSLLAILKGLYNFATCGVIGLITFLLLCGRSCSATYKGQYELQTLELNMESLNMTMPLSCTKNNSHHYIRAGNNTGLELTLTNTSIISHKFCNLSDAHKKNLYDHTLMSIITTFHLSIPNFNQYEAMSCDFNGGKISIQYNLSHSYAGDAAQHCGTVANGVLQTFMRMAWGGSYLALDSGCRGWDCIISSYQYLIIQNTTWDDHCQFSRPSPIGYLGFVSQKTRDIYISRRLLGTFTWTLSDSEGHDMPGGYCLTRWMLIEADLKCFGNTAVAKCNEKHDEEFCDMWRLFDFNKQAIQRLKAPAQMNIQLINKAVNALINDQLMMKNHLRDIMCIPYCNYSKFWYLNNTTTGRTSLPRCWLISNGSYLNETHFSDDIEQQADNMITEMLQKEYMDRQGKTPLGLVDLFVFSTSFYLITIFLHLVKIPTHRHIVGKPCPKPHRLNHMGICSCGLYKQPGVPVRWKR

SEQ ID NO: 28044 - protein, 490 aa, Artificial Sequence; identical to SEQ ID NO: 28038
  derived and/or modified protein sequence (artificial) from LASV(Pinneo-NIG-1969;Clade I)__AIT17836__GPCmut5

SEQ ID NO: 28045 - protein, 490 aa, Artificial Sequence
  derived and/or modified protein sequence (artificial) from LASV(ISTH0009-NIG-2011;Clade II)__AIT17404__GPCmut5
MGQIITFFQEVPHVIEEVMNIVLIALSLLAILKGIYNVATCGLFGLVSFLLLCGRSCSTTYKGVYELQTLELDMASLNMTMPLSCTKNNSHHYIMVGNETGLELTLTNTSIINHKFCNLSDAHKKNLYDHALMSIISTFHLSIPNFNQYEAMSCDFNGGKISVQYNLSHAYAVDAANHCGTIANGVLQTFMRMAWGGSYIALDSGCGSWDCIMTSYQYLIIQNTTWEDHCQFSRPSPIGYLGLLSQRTRDIYISRRLLGTFTWTLSDSEGNETPGGYCLTRWMLIEAELKCFGNTAVAKCNEKHDEEFCDMLRLFDFNKQAIRRLKTPAQMSIQLINKAVNALINDQLIMKNHLRDIMCIPYCNYSKYWYLNHTVTGKTSLPRCWLVSNGSYLNETHFSDDIEQQADNMITELLQKEYMDRQGKTPLGLVDLFVFSTSFYLISIFLHLIKIPTHRHITGKPCPKPHRLNHMGICSCGLYKHPGVPVKWKR

SEQ ID NO: 28046 - protein, 490 aa, Artificial Sequence
  derived and/or modified protein sequence (artificial) from LASV(ISTH2010-NIG-2012;Clade II)__AIT17482__GPCmut5
MGQIITFFQEVPHVIEEVMNIVLIALSLLAILKGIYNVATCGLFGLVSFLLLCGRSCSTTYKGVYELQTLELDMASLNMTMPLSCTKNNSHHYIMVGNETGLELTLTNTSIINHKFCNLSDAHKKNLYDHALMSIISTFHLSIPNFNQYEAMSCDFNGGKISVQYNLSHAYAVDAANHCGTIANGVLQTFMRMAWGGSYIALDSGCGSWDCIMTSYQYLIIQNITWEDHCQFSRPSPIGYLGLLSQRTRDIYISRRLLGTFTWTLSDSEGNETPGGYCLTRWMLIEAELKCFGNTAVAKCNEKHDEEFCDMLRLFDFNKQAIRRLKTPAQMSIQLINKAVNALINDQLIMKNHLRDIMCIPYCNYSKYWYLNHTVTGKTSLPRCWLVSNGSYLNETHFSDDIEQQADNMITELLQKEYIDRQGKTPLGLVDLFVFSTSFYLISIFLHLVKIPTHRHVVGKPCPKPHRLNHMGICSCGLYKHPGVPVKWKR

SEQ ID NO: 28047 - protein, 490 aa, Artificial Sequence
  derived and/or modified protein sequence (artificial) from LASV(Lassa virus/H.sapiens-wt/NGA/2015/ISTH_0543;Clade II)__AVO03639__GPCmut5
MGQIITFFQEVPHVIEEVMNIVLIALSLLAILKGIYNVATCGLFGLVSFLLLCGRSCSTTYKGVYELQTLELDMANLNMTMPLSCTKNNSHHYIMVGNETGLELTLTNTSIINHKFCNLSDAHKKNLYDHALMSIISTFHLSIPNFNQYEAMSCDFNGGKISVQYNLSHTYAVDAANHCGTIANGVLQTFMRMAWGGSYIALDSGCGSWDCIMTSYQYLVIQNTTWEDHCQFSRPSPIGYLGLLSQRTRDIYISRRLLGTFTWTLSDSEGNETPGGYCLTRWMLIEAELKCFGNTAVAKCNEKHDEEFCDMLRLFDFNKQAIRRLKTPAQMSIQLINKAVNALINDQLIMKNHLRDIMCIPYCNYSKYWYLNHTVTGKTSLPRCWLVSNGSYLNETHFSDDIEQQADNMITELLQKEYIDRQGKTPLGLVDLFVFSTSFYLISIFLHLVKIPTHRHITGKPCPKPHRLNHMGICSCGLYKHPGVPVKWKR

SEQ ID NO: 28048 - protein, 490 aa, Artificial Sequence
  derived and/or modified protein sequence (artificial) from LASV(Lassa virus/H.sapiens-wt/NGA/2016/ISTH_0009;Clade II)__AVO03571__GPCmut5
MGQIITFFQEVPHVIEEVMNIVLIALSLLAILKGIYNVATCGLLGLVSFLLLCGRSCSTTYKGVYELQTLELDMASLNMTMPLSCTKNNSHHYIMVGNETGLELTLTNTSIINHKFCNLSDAHKKNLYDHALMSIISTFHLSIPNFNQYEAMSCDFNGGRISVQYNLSHSYAVDAANHCGTIANGVLQTFMRMAWGGSYIALDSGCGSWDCIMTSYQYLIIQNTTWEDHCQFSRPSPIGYLGLLSQRTRDIYISRRLLGTFTWTLSDSEGNETPGGYCLTRWMLIEAELKCFGNTAVAKCNEKHDEEFCDMLRLFDFNKQAIRRLKTPAQMSIQLINKAVNALINDQLIMKNHLRDIMCIPYCNYSKYWYLNHTVTGKTSLPRCWLVSNGSYLNETHFSDDIEQQADNMITELLQKEYIDRQGKTPLGLVDLFVFSTSFYLISIFLHLVKIPTHRHITGKPCPKPHRLNHMGICSCGLYNHPGVPVKWKR

SEQ ID NO: 28049 - protein, 490 aa, Artificial Sequence
  derived and/or modified protein sequence (artificial) from LASV(Lassa virus/H.sapiens-wt/NGA/2016/ISTH_0017;Clade II)__AVO03567__GPCmut5
MGQIITFFQEVPHVIEEVMNIVLIALSLLAILKGIYNVATCGLFGLVSFLLLCGRSCSTTYKGVYELQTLELDMASLNMTMPLSCTKNNSHHYIMVGNETGLELTLTNTSIINHKFCNLSDAHKKNLYDHALMSIISTFHLSIPNFNQYEAMSCDFNGGKISVQYNLSHTYAIDAANHCGTIANGVLQTFMRMAWGGSYIALDSGCGSWDCIMTSYQYLIIQNTTWEDHCQFSRPSPIGYLGLLSQRTRDIYISRRLLGTFTWTLSDSEGNETPGGYCLTRWMLIEAELKCFGNTAVAKCNEKHDEEFCDMLRLFDFNKQAIRRLKTPAQMSIQLINKAVNALINDQLIMKNHLRDIMCIPYCNYSKYWYLNHTVTGKTSLPRCWLVSNGSYLNETHFSDDIEQQADNMITELLQKEYMDRQGKTPLGLVDLFVFSTSFYLISIFLHLVRIPTHRHVIGKPCPKPHRLNHMGICSCGLYKHPGVPVKWKR

SEQ ID NO: 28050 - protein, 490 aa, Artificial Sequence
  derived and/or modified protein sequence (artificial) from LASV(Lassa virus/H.sapiens-wt/NGA/2018/ISTH_0959;Clade II)__AVV65099__GPCmut5
MGQIITFFQEVPHVIEEVMNIVLIALSLLAILKGIYNVVTCGLFGLVSFLLLCGRSCSTTYKGVYELQTLELDMASLNMTMPLSCTKNNSHHYIMVGNETGLELTLTNTSIINHKFCNLSDAHKKNLYDHALMSIISTFHLSIPNFNQYEAMSCDFNGGKISVQYNLSHAYAIDAANHCGTIANGVLQTFMRMAWGGSYIALDSGCGSWDCIMTSYQYLIIQNTTWEDHCQFSRPSPIGYLGLLSQRTRDIYISRRLLGTFTWTLSDSEGNETPGGYCLTRWMLIEAELKCFGNTAVAKCNEKHDEEFCDMLRLFDFNKQAIRRLKTPAQMSIQLINKAVNALINDQLIMKNHLRDIMCIPYCNYSKYWYLNHTVTGKTSLPRCWLVSNGSYLNETHFSDDIEQQADNMITELLQKEYIDRQGKTPLGLVDLFVFSTSFYLISIFLHLVKIPTHRHVIGKPCPKPHRLNHMGICSCGLYKHPGVPVKWKR

SEQ ID NO: 28051 - protein, 490 aa, Artificial Sequence
  derived and/or modified protein sequence (artificial) from LASV(LASV003-NIG-2008;Clade II)__AIT17580__GPCmut5
MGQIITFFQEVPHVIEEVMNIVLIALSLLAILKGIYNVATCGLFGLVSFLLLCGRSCSTTYKGVYELQTLELDMASLNMTMPLSCTKNNSHHYIMVGNETGLELTLTNTSIINHKFCNLSDAHKKNLYDHALMSIISTFHLSIPNFNQYEAMSCDFNGGKISVQYNLSHTYAVDAANHCGTIANGVLQTFMRMAWGGSYIALDSGCGSWDCIMTSYQYLIIQNTTWEDHCQFSRPSPIGYLGLLSQRTRDIYISRRLLGTFTWTLSDSESNETPGGYCLTRWMLIEAELKCFGNTAVAKCNEKHDEEFCDMLRLFDFNKQAIRRLKAPAQMSIQLINKAVNALINDQLIMKNHLRDIMCIPYCNYSKYWYLNHTVTGRTSLPRCWLVSNGSYLNETHFSDDIEQQADNMITELLQKEYMDRQGKTPLGLVDLFVFSTSFYLISIFLHLVKIPTHRHVIGKPCPKPHRLNHMGICSCGLYKHPGVPVKWKR

SEQ ID NO: 28052 - protein, 490 aa, Artificial Sequence
  derived and/or modified protein sequence (artificial) from LASV(LASV035-NIG-2009;Clade II)__AIT17588__GPCmut5
MGQIITFFQEVPHVIEEVMNIVLIALSLLAILKGIYNVATCGLFGLVSFLLLCGRSCSTTYKGVYELQTLELDMASLNMTMPLSCTKNNSHHYIMVGNETGLELTLTNTSIINHKFCNLSDAHKKNLYDHALMSIISTFHLSIPNFNQYEAMSCDFNGGKISVQYNLSHAYAVDAANHCGTIANGVLQTFMRMAWGGSYIALDSGCGSWDCIMTSYQYLIIQNTTWEDHCQFSRPSPIGYLGLLSQRTRDIYISRRLLGTFTWTLSDSEGNETPGGYCLTRWMLIEAELKCFGNTAVAKCNEKHDEEFCDMLRLFDFNKQAIRRLKAPAQMSIQLINKAVNALINDQLIMKNHLRDIMCIPYCNYSKYWYLNHTVTGKTSLPRCWLVSNGSYLNETHFSDDIEQQADNMITELLQKEYIDRQGKTPLGLVDLFVFSTSFYLISIFLHLVKIPTHRHVIGKPCPKPHRLNHMGICSCGLYKHPGVPVKWKR

SEQ ID NO: 28053 - protein, 490 aa, Artificial Sequence
  derived and/or modified protein sequence (artificial) from LASV(LASV1000-NIG-2009;Clade II)__AIT17782__GPCmut5
MGQIITFFQEVPHVIEEVMNIVLIALSLLAILKGIYNVATCGLFGLVSFLLLCGRSCSTTYKGVYELQTLELDMASLNMTMPLSCTKNNSHHYIMVGNETGLELTLTNTSIINHKFCNLSDAHKKNLYDHALMSIISTFHLSIPNFNQYEAMSCDFNGGKISVQYNLSHTYAVDAANHCGTIANGVLQTFMRMAWGGSYIALDSGCGSWDCIMTSYQYLIIQNTTWEDHCQFSRPSPIGYLGLLSQRTRDIYISRRLLGTFTWTLSDSEGNETPGGYCLTRWMLIEAELKCFGNTAVAKCNEKHDEEFCDMLRLFDFNKQAIKRLKTPAQMSIQLINKAVNALINDQLIMKNHLRDIMCIPYCNYSKYWYLNHTVTGKTSLPRCWLVSNGSYLNETHFSDDIEQQADNMITELLQKEYIDRQGKTPLGLVDLFVFSTSFYLISIFLHLVKIPTHRHVVGKPCPKPHRLNHMGICSCGLYKHPGVPVKWKR

SEQ ID NO: 28054 - protein, 490 aa, Artificial Sequence
  derived and/or modified protein sequence (artificial) from LASV(LASV221-NIG-2010;Clade II)__AIT17624__GPCmut5
MGQIITFFQEVPHVIEEVMNIVLIALSLLAILKGIYNVATCGLFGLVSFLLLCGRSCSTTYKGVYELQTLELDMASLNMTMPLSCTKNNSHHYIMVGNETGLELTLTNTSIINHKFCNLSDAHKKNLYDHALMSIISTFHLSIPNFNQYEAMSCDFNGGKISVQYNLSHTYAIDAANHCGTIANGVLQTFMRMAWGGSYIALDSGCGSWDCIMTSYQYLIIQNTTWEDHCQFSRPSPIGYLGLLSQRTRDIYISRRLLGTFTWTLSDSEGNETPGGYCLTRWMLIEAELKCFGNTAVAKCNEKHDEEFCDMLRLFDFNKQAIRRLKTPAQMSIQLINKAVNALINDQLIMKNHLRDIMCIPYCNYSKYWYLNHTVTGKTSLPRCWLVSNGSYLNETHFSDDIEQQADNMITEMLQKEYMDRQGKTPLGLVDLFVFSTSFYLISIFLHLVKIPTHRHVIGKPCPKPHRLNHMGICSCGLYKHPGVPVKWKR

SEQ ID NO: 28055 - protein, 490 aa, Artificial Sequence
  derived and/or modified protein sequence (artificial) from LASV(LASV237-NIG-2010;Clade II)__AIT17638__GPCmut5
MGQIITFFQEVPHVIEEVMNIVLIALSLLAILKGIYNVATCGLFGLVSFLLLCGRSCSTTYKGVYELQTLELDMASLNMTMPLSCTKNNSHHYIMVGNETGLELTLTNTSIINHKFCNLSDAHKKDLYDHALMSIISTFHLSIPNFNQYEAMSCDFNGGKISVQYNLSHTYAVDAANHCGTIANGVLQTFMRMAWGGSYIALDSGCGSWDCIMTSYQYLIIQNTTWEDHCQFSRPSPIGYLGLLSQRTRDIYISRRLLGTFTWTLSDSEGNETPGGYCLTRWMLIEAELKCFGNTAVAKCNEKHDEEFCDMLRLFDFNKQAIRRLKTPAQMSIQLINKAVNALINDQLIMKNHLRDIMCIPYCNYSKYWYLNHTVTGKTSLPRCWLVSNGSYLNETHFSDDIEQQADNMITELLQKEYMDRQGKTPLGLVDLFVFSTSFYLISIFLHLIKIPTHRHITGKPCPKPHRLNHMGICSCGLYKHPGVPVKWKR

SEQ ID NO: 28056 - protein, 490 aa, Artificial Sequence
  derived and/or modified protein sequence (artificial) from LASV(LASV253-NIG-2011;Clade II)__AIT17670__GPCmut5
MGQIITFFQEVPHVIEEVMNIVLIALSLLAILKGIYNVATCGLFGLVSFLLLCGRSCSTTYKGVYELQTLELDMASLNMTMPLSCTKNNSHHYIMVGNETGLELTLTNTSIINHKFCNLSDAHKKNLYDHALMSIISTFHLSIPNFNQYEAMSCDFNGGKISVQYNLSHTYAVDAANHCGTIANGVLQTFMRMAWGGSYIALDSGCGSWDCIMTSYQYLIIQNTTWEDHCQFSRPSPIGYLGLLSQRTRDIYISRRLLGTFTWTLSDSEGNETPGGYCLTRWMLIEAELKCFGNTAVAKCNEKHDEEFCDMLRLFDFNKQAIRRLKAPAQMSIQLINKAVNALINDQLIMKNHLRDIMCIPYCNYSKYWYLNHTVTGRTSLPRCWLVSNGSYLNETHFSDDIEQQADNMITELLQKEYIDRQGKTPLGLVDLFVFSTSFYLISIFLHLVKIPTHRHIIGKPCPKPHRLNHMGICSCGLYKHPGVPVKWKR

SEQ ID NO: 28057 - protein, 490 aa, Artificial Sequence
  derived and/or modified protein sequence (artificial) from LASV(LASV254-NIG-2011;Clade II)__AIT17674__GPCmut5
MGQIITFFQEVPHVIEEVMNIVLIALSLLAILKGIYNVATCGLFGLVSFLLLCGRSCSTTYKGVYELQTLELDMTNLNMTMPLSCTKNNSHHYIMVGNETGLELTLTNTSIINHKFCNLSDAHKKNLYNHALMSIISTFHLSIPNFNQYEAMSCDFNGGKISVQYNLSHSYAVDAANHCGTIANGVLQTFMRMAWGGSYIALDSGCGNWDCIMTSYQYLIIQNTTWEDHCQFSRPSPIGYLGLLSQRTRDIYISRRLLGTFTWTLSDSEGNETPGGYCLTRWMLIEAELKCFGNTAVAKCNEKHDEEFCDMLRLFDFNKQAIRRLKTPAQANIQLINKAVNALINDQLIMKNHLRDIMCIPYCNYSKYWYLNHTVTGKTSLPRCWLVSNGSYLNETHFSDDIEQQADNMITELLQKEYMDRQGKTPLGLVDLFVFSTSFYLISIFLHLVKIPTHRHVIGKPCPKPHRLNHMGICSCGLYKHPGVPVKWKR

SEQ ID NO: 28058 - protein, 490 aa, Artificial Sequence
  derived and/or modified protein sequence (artificial) from LASV(Nig08-A19;Clade III)__ADU56618__GPCmut5
MGQIVTFFQEVPHVIEEVMNIVLIALSILAILKGLYNIATCGLIGLVTFLLLSGRSCSMTYKGVYELQTLELNMNTLNMTMPLSCTKNNSHHYIMVGNETGLELTLTNTSLLHHKFCNLSDAHKKNLYDHTLMSIISTFHLSIPNFNQYEAMSCDFNGGKITVQYNLSHSYAIDAANHCGTVANGVLQTFMRMAWGGSYIALDSGCGKWDCIMTSYQYLIIQNTTWEDHCQFSRPSPIGYLGLLSQRTRDIYISRRLLGTFTWTLSDSEGNETPGGYCLTRWMLIEAELKCFGNTAVAKCNEKHDEEFCDMLRLFDFNKQAIRRLKAPAQMSIQLINKAVNALINDQLIMKNHLRDIMCIPYCNYSKYWYLNHTSTGRTSLPRCWLVSNGSYLNETHFSDDIEQQADNMITEMLQKEYLDRQGKTPLGLVDLFVFSTSFYLISIFLHLVKIPTHRHIVGKPCPKPHRLNHMGICSCGLYKQPGVPVRWKR

SEQ ID NO: 28059 - protein, 491 aa, Artificial Sequence
  derived and/or modified protein sequence (artificial) from LASV(G1180-SLE-2010;Clade IV)__AIT17168__GPCmut5
MGQIVTFFQEVPHVIEEVMNIVLIALSILAVLKGLYNFATCGLVGLLTFLLLCGRSCTASRYKGVYELQTLELNMETLNMTMPLSCTKNNSHHYIMVGNETGLELTLTNTSIINHKFCNLSDAHKKNLYDHALMSIISTFHLSIPNFNQYEAMSCDFNGGKISVQYNLSHSYAGDAANHCGTVANGVLQTFMRMAWGGSYIALDSGCGSWDCIMTSYQYLIIQNTTWEDHCQFSRPSPIGYLGLLSQRTRDIYISRRLLGTFTWTLSDSEGKDTPGGYCLTRWMLIEAELKCFGNTAVAKCNEKHDEEFCDMLRLFDFNKQAIQRLKAPAQMSIQLINKAVNALINDQLIMKNHLRDIMCIPYCNYSKYWYLNHTTTGKTSLPKCWLVSNGSYLNETHFSDDIEQQADNMITEMLQKEYMERQGKTPLGLVDLFVFSTSFYLISIFLHLVKIPTHRHIVGKSCPKPHRLNHMGICSCGLYKQPGVPVKWKR

SEQ ID NO: 28060 - protein, 491 aa, Artificial Sequence
  derived and/or modified protein sequence (artificial) from LASV(G1442-SLE-2011;Clade IV)__AIT17180__GPCmut5
MGQIVTFFQEVPHVIEEVMNIVLIALSILAVLKGLYNVATCGLIGLVTFLLLCGRSCTTTLYKGVYELQTLELNMETLNMTMPLSCTKNNSHHYIRVGNETGLELTLTNTSIINHKFCNLSDAHKKNLYDHALMSIISTFHLSIPNFNQYEAMSCDFNGGKISVQYNLSHSYAGDAANHCGTVANGVLQTFMRMAWGGSYIALDSGCGNWDCIMTSYQYLIIQNTTWDDHCQFSRPSPIGYLGLLSQRTRDVYISRRLLGTFTWTLSDSEGKDTPGGYCLTRWMLIEAELKCFGNTAVAKCNEKHDEEFCDMLRLFDFNKQAIQRLKAPAQMSIQLINKAVNALINDQLIMKNHLRDIMCIPYCNYSKYWYLNNTATGKTSLPKCWLISNGSYLNETHFSDDIEQEADNMITEMLQKEYMERQGKTPLGLVDLFVFSTSFYLISIFLHLVKIPTHRHIVGKSCPKPHRLNHMGICSCGLYKQPGVPVRWKR

SEQ ID NO: 28061 - protein, 491 aa, Artificial Sequence
  derived and/or modified protein sequence (artificial) from LASV(G3010-SLE-2013;Clade IV)__AIT17344__GPCmut5
MGQIVTFFQEVPHVIEEVMNIVLIALSILAVLKGLYNFATCGLVGLVTFLLLCGRSCTTSLYKGVYELQTLELNMETLNMTMPLSCTKNNSHHYIMVGNETGLELTLTNTSIINHKFCNLSDAHKKNLYNHALMSIISTFHLSIPNFNQYEAMSCDFNGGKISVQYNLSHSYAGDAASHCGTVANGVLQTFMRMAWGGSYIALDSGCGKWDCIMTSYQYLIIQNTTWEDHCQFSRPSPIGYLGLLSQRTRDIYISRRLLGTFTWTLSDSEGKDTPGGYCLTRWMLIEAELKCFGNTAVAKCNEKHDEEFCDMLRLFDFNKQAIQRLKTPAQMSIQLINKAVNALINDQLIMKNHLRDIMCIPYCNYSKYWYLNHTTTGKTSLPKCWLVSNGSYLNETHFSDDIEQQADNMITEMLQKEYMERQGKTPLGLVDLFVFSTSFYLISIFLHLVKIPTHRHIVGKSCPKPHRLNHMGICSCGLYKQPGVPVRWKR

SEQ ID NO: 28062 - protein, 491 aa, Artificial Sequence
  derived and/or modified protein sequence (artificial) from LASV(G502-SLE-2009;Clade IV)__AIT17126__GPCmut5
MGQIVTFFQEVPHVIEEVMNIVLIALSILAVLKGLYNFATCGLVGLLTFLLLCGRSCTTGLYKGVYELQTLELNMETLNMTMPLSCTKNNSHHYIMVGNETGLELTLTNTSIINHKFCNLSDAHKKNLYDHALMSIISTFHLSIPNFNQYEAMSCDFNGGKISVQYNLSHSYAGDAADHCGTVANGVLQTFMRMAWGGSYIALDSGCGRWDCIMTSYQYLIIQNTTWEDHCQFSRPSPIGYLGLLSQRTRDIYISRRLLGTFTWTLSDSEGKDTPGGYCLTRWMLIEAELKCFGNTAVAKCNEKHDEEFCDMLRLFDFNKQAIQRLKAPAQMSIQLINKAVNALINDQLVMKNHLRDIMCIPYCNYSRYWYLNHTTTGRTSLPKCWLVSNGSYLNETHFSDDIEQQADNMITEMLQKEYMERQGKTPLGLVDLFVFSTSFYLISIFLHLVKIPTHRHIVGKSCPKPHRLNHMGICSCGLYKQPGVPVKWKR

SEQ ID NO: 28063 - protein, 491 aa, Artificial Sequence
  derived and/or modified protein sequence (artificial) from LASV(G733-SLE-2010;Clade IV)__AIT17154__GPCmut5
MGQIVTFFQEVPHVIEEVMNIVLIALSILAVLKGLYNFATCGIVGLVSFLLLCGRSCTTSLYKGVYELQTLELNMETLNMTMPLSCTKNNSHHYIMVGNETGLELTLTNTSIINHKFCNLSDAHKKNLYDHALMSIISTFHLSIPNFNQYEAMSCDFNGGKISVQYNLSHSYAGDAANHCGTIANGVLQTFMRMAWGGSYIALDSGCDRWDCIMTSYQYLIIQNTTWEDHCQFSRPSPIGYLGLLSQRTRDIYISRRLLGTFTWTLSDSEGKDTPGGYCLTRWMLIEAELKCFGNTAVAKCNEKHDEEFCDMLRLFDFNKQAIQRLKAPAQMSIQLINKAVNALINDQLIMKNHLRDIMCIPYCNYSKYWYLNHTTTGKTSLPKCWLVSNGSYLNETHFSDDIEQQADNMITEMLQKEYMERQGKTPLGLVDLFVFSTSFYLISIFLHLVKIPTHRHVVGKSCPKPHRLNHMGICSCGLYGQPGVPVKWKR

SEQ ID NO: 28064 - protein, 491 aa, Artificial Sequence
  derived and/or modified protein sequence (artificial) from MOPV/LASV reassortant(IGS-1;Clade IV)__AFY05576__GPCmut5
MGQIVTFFQEVPHVIEEVMNIVLIALSVLAVLKGLYNFATCGLVGLVTFLLLCGRSCTTSLYKGVYELQTLELNMETLNMTMPLSCTKNNSHHYIMVGNETGLELTLTNTSIINHKFCNLSDAHKKNLYDHALMSIISTFHLSIPNFNQYEAMSCDFNGGKISVQYNLSHSYAGDAANHCGTVANGVLQTFMRMAWGGSYIALDSGCGNWDCIMTSYQYLIIQNTTWEDHCQFSRPSPIGYLGLLSQRTRDIYISRRLLGTFTWTLSDSEGEDTPGGYCLTRWMLIEAELKCFGNTAVAKCNEKHDEEFCDMLRLFDFNKQAIQRLKAPAQMSIQLINKAVNALINDQLIMKNHLRDIMCIPYCNYSKYWYLNHTTTGRTSLPKCWLVSNGSYLNETHFSDDIEQQADNMITEMLQKEYMERQGKTPLGLVDLFVFSTSFYLISIFLHLVKIPTHRHIVGKSCPKPHRLNHMGICSCGLYKQPGVPVKWKR

SEQ ID NO: 28065 - protein, 491 aa, Artificial Sequence
  derived and/or modified protein sequence (artificial) from LASV(LM765-SLE-2012;Clade IV)__AIT17814__GPCmut5
MGQIVTFFQEVPHVIEEVMNIVLIALSILAVLKGLYNFATCGLVGLVTFLLLCGRSCTTSLYKGVYELQTLELNMETLNMTMPLSCTKNNSHHYIMVGNETGLELTLTNTSIIDHKFCNLSDAHRKNLYDHALMSIISTFHLSIPNFNQYEAMSCDFNGGKISVQYNLSHSYAKDAADHCGTVANGVLQTFMRMAWGGSYIALDSGCGRWDCIMTSYQYLIIQNTTWEDHCQFSRPSPIGYLGLLSQRTRDIYISRRLLGTFTWTLSDSEGKDTPGGYCLTRWMLIEAELKCFGNTAVAKCNEKHDEEFCDMLRLFDFNKQAIQRLKAPAQMSIQLINKAVNALINDQLIMKNHLRDIMCIPYCNYSKYWYLNHTTTGKTSLPKCWLVSNGSYLNETHFSDDIEQQADNMITEMLQKEYMERQGKTPLGLVDLFVFSTSFYLISIFLHLVKIPTHRHIVGKPCPKPHRLNHMGICSCGLYKQPGVPVKWKR

SEQ ID NO: 28066 - protein, 491 aa, Artificial Sequence
  derived and/or modified protein sequence (artificial) from LASV(LM776-SLE-2012;Clade IV)__AIT17824__GPCmut5
MGQIVTFFQEVPHVIEEVMNIVLIALSILAVLKGLYNFATCGLVGLVTFLLLCGRSCTTSVYKGVYELQTLELNMETLNMTMPLSCTKNNSHHYIMVGNETGLELTLTNTSIINHKFCNLSDAHKKNLYDHALMSIISTFHLSIPNFNQYEAMSCDFNGGKISVQYNLSHSYAGDAANHCGTVANGVLQTFMRMAWGGSYIALDSGCGKWDCIMTSYQYLIIQNTTWEDHCQFSRPSPIGYLGLLSQRTRDIYISRRLLGTFTWTLSDSEGKDTPGGYCLTRWMLIEAELKCFGNTAVAKCNEKHDEEFCDMLRLFDFNKQAIQRLKAPAQMSIQLINKAVNALINDQLIMKNHLRDIMCIPYCNYSKYWYLNHTTTGKTSLPKCWLVSNGSYLNETHFSDDIEQQADNMITEMLQKEYMERQGKTPLGLVDLFVFSTSFYLISIFLHLVKIPTHRHIVGKSCPKPHRLNHMGICSCGLYKQPGVPVRWKR

SEQ ID NO: 28067 - protein, 491 aa, Artificial Sequence
  derived and/or modified protein sequence (artificial) from LASV(Mad39;Clade IV)__ANH09722__GPCmut5
MGQIVTFFQEVPHVIEEVMNIVLIALSILAVLKGLYNVATCGLIGLVTFLLLCGRSCTTTLYKGVYELQALELNMETLNMTMPLSCTKNNSHHYIRVGNETGLELTLTNTSLINHKFCNLSDAHKKNLYDHALMSIISTFHLSIPNFNQYEAMSCDFNDGKISVQYNLSHTYAGDTANHCGTVANGVLQTFMRMAWGGSYIALDSGCGGWDCIMTSYQYLIIQNTTWEDHCQFSRPSPIGYLGLLSQRTRDIYISRRLLGTFTWTLSDSEGKDTPGGYCLTRWMLIEAELKCFGNTAVAKCNEKHDEEFCDMLRLFDFNKQAIQRLKAPAQMSIQLINKAVNALINDQLIMKNHLRDIMCIPYCNYSKYWYLNHTVTGKTSLPKCWLVSNGSYLNETHFSDDIEQQADNMITEMLQKEYMERQGKTPLGLVDLFVFSTSFYLISIFLHLVKIPTHRHVVGKPCPKPHRLNHMGICSCGFYKQPGVPVRWKR

SEQ ID NO: 28068 - protein, 491 aa, Artificial Sequence
  derived and/or modified protein sequence (artificial) from LASV(Z0947-SLE-2011;Clade IV)__AIT17840__GPCmut5
MGQIVTFFQEVPHVIEEVMNIVLIALSILAVLKGLYNFATCGLVGLVTFLLLCGRSCTISLYKGVYELQTLELNMETLNMTMPLSCTKNNSHHYIMVGNETGLELTLTNTSIINHKFCNLSDAHKKNLYDHALMSIISTFHLSIPNFNQYEAMSCDFNGGKISVQYNLSHSYAGDAANHCGTVANGVLQTFMRMAWGGSYIALDSGCDRWDCIMTSYQYLIIQNTTWEDHCQFSRPSPIGYLGLLSQRTRDIYISRRLLGTFTWTLSDSEGKDTPGGYCLTRWMLIEAELKCFGNTAVAKCNEKHDEEFCDMLRLFDFNKQAIQRLKAPAQMSIQLINKAVNALINDQLIMKNHLRDIMCIPYCNYSKYWYLNHTTTGKTSLPKCWLVSNGSYLNETHFSDDIEQQADNMITEMLQKEYMERQGKTPLGLVDLFVFSTSFYLISIFLHLVKIPTHRHIVGKPCPKPHRLNHMGICSCGLYKQPGVPVKWKR

SEQ ID NO: 28069 - RNA, 1476 nt, Artificial Sequence
  derived and/or modified CDS sequence (opt1) from LASV(Josiah;Clade IV)__NP_694870__GPCmut5
augggccagaucgugaccuucuuccaggaggucccccacgugaucgaggaggugaugaacaucguccugaucgcccucagcgugcuggccgugcugaaggggcucuacaacuucgcgaccugcggccuggucgggcuggugacguuccuccugcugugcggccgcuccugcaccaccagccucuacaaggggguguacgagcugcagacccuggagcucaacauggagacgcugaacaugaccaugccgcuguccugcaccaagaacaacagccaccacuacaucauggucggcaacgagaccggccucgagcugacgcugaccaacaccuccaucaucaaccacaaguucugcaaccucagcgacgcccacaagaagaaccuguacgaccacgcccugauguccaucaucagcaccuuccaccucuccauccccaacuucaaccaguacgaggccaugagcugcgacuucaacgggggcaagaucuccgugcaguacaaccugagccacuccuacgccggggacgcggccaaccacugcggcacgguggccaacgggguccugcagaccuucaugcggauggccuggggcggcagcuacaucgcgcucgacuccgggugcggcaacugggacugcaucaugaccagcuaccaguaccugaucauccagaacaccacgugggaggaccacugccaguucucccggcccagccccaucggguaccugggccuccugucccagcgcacccgggacaucuacaucagccgccggcugcucggcaccuucaccuggacgcugagcgacuccgaggggaaggacaccccgggcggguacugccugacccgcuggaugcucaucgaggccgagcugaagugcuucggcaacaccgccguggccaagugcaacgagaagcacgacgaggaguucugcgacaugcugcggcuguucgacuucaacaagcaggccauccagcgccugaaggcgcccgcccagaugagcauccagcugaucaacaaggccgugaacgcccucaucaacgaccagcugaucaugaagaaccaccuccgggacaucaugugcauccccuacugcaacuacuccaaguacugguaccucaaccacacgaccaccggccgcaccagccugcccaagugcuggcuggucuccaacggcagcuaccucaacgagacgcacuucuccgacgacaucgagcagcaggccgacaacaugaucaccgagaugcugcagaaggaguacauggagcggcaggggaagacgccccugggccucguggaccuguucguguucagcaccuccuucuaccugaucagcaucuuccugcaccucgucaagaucccgacccaccgccacaucguggggaaguccugccccaagccccaccggcugaaccacaugggcaucugcagcugcgggcuguacaagcagcccggcgugccggucaaguggaagcgcuga

SEQ ID NO: 28070 - RNA, 1473 nt, Artificial Sequence
  derived and/or modified CDS sequence (opt1) from LASV(LP;Clade I)__AAF86701__GPCmut5
augggccagaucaucaccuucuuccaggaggugccccacgucaucgaggaggugaugaacaucgugcugaucgcccucagccugcuggccauccucaaggggcuguacaacaucgcgaccugcggcaucaucgggcuggucgccuuccucuuccugugcggcaaguccugcagccugacgcucaagggcggguacgagcugcagacccuggagcucaacauggagacccugaacaugaccaugccgcuguccugcacgaagaacagcucccaccacuacauccgcgugggcaacgagaccgggcucgagcugacccugaccaacacgagcaucaucaaccacaaguucugcaaccucuccgacgcccacaagaagaaccuguacgaccacgcccugaugagcaucaucuccaccuuccaccucagcauccccaacuucaaccaguacgaggccauguccugcgacuucaacggcgggaagaucagcgugcaguacaaccugucccacagcuacgcgggcgacgccgccgagcacugcgggaccgucgccaacggcgugcugcagaccuucaugcggauggcguggggcgggcgcuacaucgcccucgacuccggcugcgggaacugggacugcaucaugacgagcuaccaguaccugaucauccagaacaccaccugggaggaccacugccaguucucccggcccagccccaucggcuaccugggccuccugucccagcgcacccgggacaucuacaucagccgccggcugcucgggacguucaccuggacccugagcgacuccgagggcaacgagacccccgggggcuacugccugacgcgcuggaugcucaucgaggccgagcugaagugcuucgggaacaccgccguggccaagugcaacgagaagcacgacgaggaguucugcgacaugcugcggcuguucgacuucaacaagcaggcgauccgccggcugaaggcccccgcccagaugagcauccagcugaucaacaaggccgucaacgcccucaucaacgaccagcugaucaugaagaaccaccuccgcgacaucaugugcauccccuacugcaacuacuccaaguacugguaccucaaccacaccagcuccggccggaccagccugcccaagugcuggcugaucuccaacgggagcuaccucaacgagacgcaguucuccgacgacaucgagcagcaggcggacaacaugaucaccgagaugcugcagaaggaguacaucgagcgccagggcaagaccccgcuggggcucguggacaucuucaucuucagcaccuccuucuaccugaucagcaucuuccugcaccugaucaagaucccgacgcaccggcacaucgugggcaagcccugccccaagccccaccgccucaaccacaugggggucugcuccugcggccuguacaagcacccgggcgugcccaccaaguggaagcgguga

SEQ ID NO: 28071 - RNA, 1473 nt, Artificial Sequence
  derived and/or modified CDS sequence (opt1) from LASV(803213;Clade II)__AAF86703__GPCmut5
augggccagaucaucaccuucuuccaggaggugccccacgucaucgaggaggugaugaacaucgugcugaucgcccucagccugcuggccauccucaaggggaucuacaacgucgcgaccugcggccuguucgggcugaucuccuuccuccugcugugcggccgcagcugcuccgugacguacaaggggguguacgagcuccagacccuggagcugaacauggccaaccucaacaugaccaugccgcugagcugcaccaagaacaacucccaccacuacaucauggucggcaacgagacgggccuggagcucacccugaccaacaccagcaucaucaaccacaaguucugcaaccuguccgacgcccacaagaagaaccucuacgaccacgcccugaugagcaucaucuccacguuccaccugagcauccccaacuucaaccaguacgaggccauguccugcgacuucaacgggggcaagaucagcgugcaguacaaccucucccacagcuucgcgguggacgccgccaaccacugcgggaccaucgccaacggcguccugcagaccuucaugcggauggcguggggcggguccuacaucgcccuggacagcggcugcgggaacugggacugcaucaugaccuccuaccaguaccucaucauccagaacacgaccugggaggaccacugccaguucagccgccccucccccaucggcuaccuggggcugcucagccagcggacccgcgacaucuacaucagccggcgccugcugggcaccuucacguggacccucuccgacagcgagggcaacgaggcccccgggggcuacugccugacccgguggaugcugaucgaggccgagcucaagugcuucgggaacaccgccguggcgaagugcaacgagaagcacgacgaggaguucugcgacaugcugcgccuguucgacuucaacaagcaggccaucaagcggcucaagacgcccgcccagauguccauccagcugaucaacaaggccgugaacgcccugaucaacgaccagcucaucaugaagaaccaccuccgcgacaucaugugcauccccuacugcaacuacagccgguacugguaccugaaccacaccgucaccgggaagaccucccugccccgcugcuggcuggugagcaacggcuccuaccugaacgagacgcacuucagcgacgacaucgagcagcaggcggacaacaugaucaccgagaugcuccagaaggaguacauggaccggcagggcaagaccccgcuggggcugguggaccucuucgucuucuccaccagcuucuaccugaucuccaucuuccugcaccuggugaagaucccgacgcaccgccacaucgugggcaagcccugccccaagccccaccggcucaaccacauggggaucugcagcugcggccuguacaagcacccggggguccccgugaaguggaagcgcuga

SEQ ID NO: 28072 - RNA, 1473 nt, Artificial Sequence
  derived and/or modified CDS sequence (opt1) from LASV(GA391;Clade III)__CAA36645__GPCmut5
augggccagaucgugaccuucuuccaggaggucccccacgugaucgaggaggugaugaacaucguccugaucgcccucagcauccuggccauccugaaggggcucuacaacguggcgaccugcggccugaucgggcuggugacguuccuccugcuguccggccgcagcugcucccucaucuacaaggggaccuacgagcugcagacccuggagcucaacauggagacccugaacaugacgaugccgcugagcugcaccaagaacaacucccaccacuacauccgggucggcaacgagaccggccucgagcugacccugacgaacaccagcauccucaaccacaaguucugcaaccuguccgacgcccacaagcgcaaccuguacgaccacagccucauguccaucaucagcaccuuccaccuguccauccccaacuucaaccaguacgaggccaugagcugcgacuucaacgggggcaagaucaccgugcaguacaaccugucccacagcuucgccguggacgccgcggggcacugcggcacgcucgccaacgggguccugcagaccuucaugcggauggccuggggcggcuccuacaucgcccuggacagcgggugcggcaacugggacugcaucaugaccuccuaccaguaccucaucauccagaacaccacgugggacgaccacugccaguucagccggcccucccccaucggguaccugggccugcucagccagcgcacccgggacaucuacaucagccgccggcugcugggcaccuucaccuggacgcucuccgacagcgaggggaacgagaccccgggcggguacugccugacccgcuggaugcugaucgaggcggagcucaagugcuucggcaacaccgccguggccaagugcaacgagaagcacgacgaggaguucugcgacaugcugcggcuguucgacuucaacaagcaggccauccgccggcucaagacgcccgcccagauguccauccagcugaucaacaaggcggugaacgcccugaucaacgaccagcucaucaugaagaaccaccuccgcgacaucaugugcauccccuacugcaacuacagccgguacugguaccugaaccacaccuccaccggcaagaccagccugccccgcugcuggcugaucuccaacggcagcuaccugaacgagacgaaguucuccgacgacaucgagcagcaggccgacaacaugaucaccgagaugcuccagaaggaguacaucgaccggcaggggaagacgccccugggccuggucgaccuguucguguucagcaccuccuucuaccucaucagcaucuuccugcaccuggugaagaucccgacccaccgccacaucgucgggaagcccugccccaagccccaccggcucaaccacaugggcaucugcuccugcgggcuguacaagcagccgggcgugcccgugcgcuggaagcgguga

SEQ ID NO: 28073 - RNA, 1476 nt, Artificial Sequence
  derived and/or modified CDS sequence (opt1) from LASV(AV;Clade V)__CCA30314__GPCmut5
augggccagaucgugaccuucuuccaggaggucccccacgugaucgaggaggugaugaacaucguccugaucgcccucagcauccuggccgugcugaaggggcucuacaacaucgcgaccugcggccugaucgggcugaucacguuccuccugcugugcggccgcuccugcagcuccaaccucuacaaggggguguacgagcugcagagccuggaccucaacauggagacccugaacaugaccaugccgcuguccugcaccaagaacaacagccaccacuacauccgggucggcaacgacacgggccucgagcugacccugaccaacaccuccauccucaaccacaaguucugcaaccugagcgacgcccacaagaaggaccuguacgaccacgcccucauguccaucaucagcacguuccaccuguccauccccaacuucaaccaguacgaggccaugagcugcgacuucaacgggggcaagaucuccgugcaguacaaccugagccacuccuacgccaucgacgcggccaaccacugcgggaccguggccaacggcauccuccagaccuucaugcgcauggccuggggcgggagcuacaucgcgcuggacuccggcugcgggaacugggacugcaucaugaccagcuaccaguaccugaucauccagaacacgaccugggagaaccacugccaguucucccgccccagccccaucggcuaccucgggcugcugagccagcggacccgcgacaucuacaucucccggcgccuccugggcaccuucacguggacccugagcgacuccgagggcaacgccacccccgggggcuacugccucacccgguggaugcugaucgaggccgagcugaagugcuucgggaacacggccgucgccaagugcaacgagaagcacgacgaggaguucugcgacaugcuccgccuguucgacuucaacaagcaggcgaucagccggcugaagucccccgcccagaugagcauccagcucaucaacaaggccgugaacgcccugaucaacgaccagcugaucaugaagaaccaccuccgcgacaucaugugcauccccuacugcaacuacuccaaguacugguaccugaaccacaccaucaccgggaagaccagccugcccaagugcuggcucguguccaacggcagcuaccugaacgagacgcacuucuccgacgacaucgagcagcaggccgacaacaugaucaccgagaugcugcagaaggaguacauggagcggcagggcaagaccccgcucgggcuggucgaccuguucguguucagcaccuccuucuaccugaucagcaucuuccuccgccuggugaagaucccgacgcaccggcacaucgucggcaagcccugccccaagccccaccgccugaaccacauggggaucugcuccugcggccucuacaagcagccgggggugcccgugcgguggaagcgcuga

SEQ ID NO: 28074 - RNA, 1473 nt, Artificial Sequence
  derived and/or modified CDS sequence (opt1) from LASV(Togo/2016/7082;Clade VI)__AMR44577__GPCmut5
augggccagaucaucaccuucuuccaggaggugccccacgucaucgaggaggugaugaacaucgugcugaucgcccucagccugcuggccauccucaagggggucuacaacguggcgaccugcggcaucaucgggcuggugacguuccuguuccucugcggccgcuccugcagccugaucuacaagggguccuacgagcugcagacccucgagcugaacauggagacccugaacaugaccaugccgcucagcugcacgaagaacuccagccaccacuacauccgggucggcaacgagaccggccuggagcugacccucaccaacacguccaucaucaaccacaaguucugcaaccugagcgacgcccacaagcgcaaccuguacgaccacgcccucauguccauccugagcaccuuccaccuguccauccccaacuucaaccaguacgaggccaugagcugcgacuucaacgggggcaagaucuccgugcaguacaaccucagccacgccuacgcgguggacgccgccgagcacugcgggaccgucgccaacggcgugcugcagaccuucaugcggauggcguggggcggguccuacaucgcccuggacagcggcugcgggaacugggacugcaucaugacguccuaccaguaccucaucauccagaacaccaccugggaggaccacugccaguucagccggcccucccccaucggcuaccuggggcugcucagccagcgcacccgggacaucuacaucagccgccggcugcugggcacguucaccuggacccucuccgacagcgagggcaacgagacccccgggggcuacugccugacgcgcuggaugcugaucgaggccgagcucaagugcuucgggaacaccgccguggccaagugcaacgagaagcacgacgaggaguucugcgacaugcugcggcuguucgacuucaacaagcaggcgauccagcgccucaagucccccgcccagaugagcauccagcugaucaacaaggccgucaacgcccugaucaacgaccagcucaucaugaagaaccaccuccgggacaugaugugcauccccuacugcaacuacuccaaguacugguaccugaaccacaccagcuccgggcgcaccagccugcccaagugcuggcugguguccaacggcagcuaccugaacgagacgcacuucuccgacgacaucgagcagcaggccgacaacaugaucaccgagaugcuccagaaggaguacaucgaccggcagggcaagaccccgcuggggcugguggaccucuucgucuucagcaccuccuucuaccugaucagcaucuuccugcaccugaucaagaucccgacgcaccgccacaucgugggcaagcccugccccaagccccaccggcucaaccacauggggaucugcuccugcggccuguacaagcagccgggggugcccacccgcuggaagcgguga

SEQ ID NO: 28075 - RNA, 1473 nt, Artificial Sequence
  derived and/or modified CDS sequence (opt1) from LASV(KAK-428;Clade n.d. (VII))__ANH09740__GPCmut5
augggccagaucgugaccuucuuccaggaggucccccacgugaucgaggaggugaugaacaucguccugaucgcccucagccugcuggccauccucaaggggcuguacaacuucgcgaccugcggcgugaucgggcugaucacguuccuccugcugugcggccgcuccugcagcgccaccuacaaggggcaguacgagcuccagacccuggagcugaacauggagucccucaacaugaccaugccgcugagcugcacgaagaacaacucccaccacuacauccgggccggcaacaacaccggccuggagcucacccugaccaacacgagcaucaucucccacaaguucugcaaccugagcgacgcccacaagaagaaccucuacgaccacacccugauguccaucaucaccaccuuccaccugagcauccccaacuucaaccaguacgaggccauguccugcgacuucaacgggggcaagaucagcauccaguacaaccucucccacagcuacgcgggggacgccgcccagcacugcggcacgguggccaacgggguccugcagaccuucaugcgcauggcguggggcggcuccuaccuggcccucgacagcgggugccgcggcugggacugcaucaucuccagcuaccaguaccugaucauccagaacaccaccugggacgaccacugccaguucucccggcccagccccaucggguaccugggcuucgugagccagaagacgcgcgacaucuacaucucccggcgccuccugggcaccuucaccuggacccugagcgacuccgaggggcacgacaugccgggcggguacugccucacgcgguggaugcugaucgaggccgaccugaagugcuucggcaacaccgccguggccaagugcaacgagaagcacgacgaggaguucugcgacauguggcgccucuucgacuucaacaagcaggcgauccagcggcugaaggcccccgcccagaugaacauccagcugaucaacaaggccgucaacgcccucaucaacgaccagcugaugaugaagaaccaccuccgcgacaucaugugcauccccuacugcaacuacagcaaguucugguaccugaacaacaccaccacgggccggaccucccugccccgcugcuggcugaucagcaacggcuccuaccucaacgagacccacuucagcgacgacaucgagcagcaggcggacaacaugaucaccgagaugcugcagaaggaguacauggaccggcaggggaagacgccccugggccucguggaccuguucguguucuccaccagcuucuaccugaucaccaucuuccuccaccuggucaagaucccgacccaccgccacaucguggggaagcccugccccaagccccaccggcugaaccacaugggcaucugcuccugcgggcuguacaagcagccgggcgugcccguccgcuggaagcgguga

SEQ ID NO: 28076 - RNA, 1473 nt, Artificial Sequence; identical to SEQ ID NO: 28070
  derived and/or modified CDS sequence (opt1) from LASV(Pinneo-NIG-1969;Clade I)__AIT17836__GPCmut5

SEQ ID NO: 28077 - RNA, 1473 nt, Artificial Sequence
  derived and/or modified CDS sequence (opt1) from LASV(ISTH0009-NIG-2011;Clade II)__AIT17404__GPCmut5
augggccagaucaucaccuucuuccaggaggugccccacgucaucgaggaggugaugaacaucgugcugaucgcccucagccugcuggccauccucaaggggaucuacaacgucgcgaccugcggccuguucgggcugguguccuuccuccugcugugcggccgcagcugcuccacgaccuacaaggggguguacgagcuccagacccuggagcuggacauggccagccucaacaugaccaugccgcuguccugcacgaagaacaacagccaccacuacaucauggucggcaacgagaccggccuggagcucacccugaccaacacguccaucaucaaccacaaguucugcaaccugagcgacgcccacaagaagaaccucuacgaccacgcccugauguccaucaucagcaccuuccaccuguccauccccaacuucaaccaguacgaggccaugagcugcgacuucaacgggggcaagaucuccgugcaguacaaccucagccacgcguacgccguggacgccgccaaccacugcgggaccaucgcgaacggcguccugcagaccuucaugcggauggccuggggcggguccuacaucgcccuggacagcggcugcggguccugggacugcaucaugacgagcuaccaguaccucaucauccagaacaccaccugggaggaccacugccaguucucccgccccagccccaucggcuaccuggggcugcucagccagcggacccgcgacaucuacaucucccggcgccugcugggcacguucaccuggacccucagcgacuccgagggcaacgagacccccgggggcuacugccugacgcgguggaugcugaucgaggccgagcucaagugcuucgggaacaccgccguggcgaagugcaacgagaagcacgacgaggaguucugcgacaugcugcgccuguucgacuucaacaagcaggccauccggcgccucaagacccccgcccagaugagcauccagcugaucaacaaggccgugaacgcccugaucaacgaccagcucaucaugaagaaccaccuccgggacaucaugugcaucccguacugcaacuacuccaaguacugguaccugaaccacaccgucacggggaagaccagccugccccgcugcuggcugguguccaacggcagcuaccugaacgagacccacuucuccgacgacaucgagcagcaggcggacaacaugaucaccgagcuccugcagaaggaguacauggaccggcagggcaagacgccccuggggcucguggaccuguucgucuucagcaccuccuucuaccugaucagcaucuuccugcaccucaucaagaucccgacccaccgccacaucaccggcaagcccugccccaagccccaccggcugaaccacauggggaucugcuccugcggccuguacaagcacccgggggugcccgugaaguggaagcgcuga

SEQ ID NO: 28078 - RNA, 1473 nt, Artificial Sequence
  derived and/or modified CDS sequence (opt1) from LASV(ISTH2010-NIG-2012;Clade II)__AIT17482__GPCmut5
augggccagaucaucaccuucuuccaggaggugccccacgucaucgaggaggugaugaacaucgugcugaucgcccucagccugcuggccauccucaaggggaucuacaacgucgcgaccugcggccuguucgggcugguguccuuccuccugcugugcggccgcagcugcuccacgaccuacaaggggguguacgagcuccagacccuggagcuggacauggccagccucaacaugaccaugccgcuguccugcacgaagaacaacagccaccacuacaucauggucggcaacgagaccggccuggagcucacccugaccaacacguccaucaucaaccacaaguucugcaaccugagcgacgcccacaagaagaaccucuacgaccacgcccugauguccaucaucagcaccuuccaccuguccauccccaacuucaaccaguacgaggccaugagcugcgacuucaacgggggcaagaucuccgugcaguacaaccucagccacgcguacgccguggacgccgccaaccacugcgggaccaucgcgaacggcguccugcagaccuucaugcggauggccuggggcggguccuacaucgcccuggacagcggcugcggguccugggacugcaucaugacgagcuaccaguaccucaucauccagaacaucaccugggaggaccacugccaguucucccgccccagccccaucggcuaccuggggcugcucagccagcggacccgcgacaucuacaucucccggcgccugcugggcaccuucacguggacccucagcgacuccgagggcaacgagacccccgggggcuacugccugacccgguggaugcugaucgaggccgagcucaagugcuucgggaacacggccguggcgaagugcaacgagaagcacgacgaggaguucugcgacaugcugcgccuguucgacuucaacaagcaggccauccggcgccucaagacccccgcccagaugagcauccagcugaucaacaaggccgugaacgcccugaucaacgaccagcucaucaugaagaaccaccuccgggacaucaugugcauccccuacugcaacuacuccaaguacugguaccugaaccacaccgucaccgggaagacgagccugccccgcugcuggcugguguccaacggcagcuaccugaacgagacccacuucuccgacgacaucgagcagcaggcggacaacaugaucaccgagcuccugcagaaggaguacaucgaccggcagggcaagaccccgcuggggcucguggaccuguucgucuucagcacguccuucuaccugaucagcaucuuccugcaccucgugaagaucccgacccaccgccacguggucggcaagcccugccccaagccccaccggcugaaccacauggggaucugcuccugcggccuguacaagcacccgggggugcccgugaaguggaagcgcuga

SEQ ID NO: 28079 - RNA, 1473 nt, Artificial Sequence
  derived and/or modified CDS sequence (opt1) from LASV(Lassa virus/H.sapiens-wt/NGA/2015/ISTH_0543;Clade II)__AVO03639__GPCmut5
augggccagaucaucaccuucuuccaggaggugccccacgucaucgaggaggugaugaacaucgugcugaucgcccucagccugcuggccauccucaaggggaucuacaacgucgcgaccugcggccuguucgggcugguguccuuccuccugcugugcggccgcagcugcuccacgaccuacaaggggguguacgagcuccagacccuggagcuggacauggccaaccucaacaugaccaugccgcugagcugcacgaagaacaacucccaccacuacaucauggucggcaacgagaccggccuggagcucacccugaccaacacgagcaucaucaaccacaaguucugcaaccuguccgacgcccacaagaagaaccucuacgaccacgcccugaugagcaucaucuccaccuuccaccugagcauccccaacuucaaccaguacgaggccauguccugcgacuucaacgggggcaagaucagcgugcaguacaaccucucccacaccuacgcgguggacgccgccaaccacugcgggaccaucgccaacggcguccugcagacguucaugcggauggcguggggcgggagcuacaucgcccuggacuccggcugcgggagcugggacugcaucaugaccuccuaccaguaccucgugauccagaacaccaccugggaggaccacugccaguucagccgccccucccccaucggcuaccuggggcugcucagccagcggacgcgcgacaucuacaucagccggcgccugcugggcaccuucaccuggacccucuccgacagcgagggcaacgagacgcccgggggcuacugccugacccgguggaugcugaucgaggccgagcucaagugcuucgggaacaccgccguggccaagugcaacgagaagcacgacgaggaguucugcgacaugcugcgccuguucgacuucaacaagcaggcgauccggcgccucaagacccccgcccagauguccauccagcugaucaacaaggccgucaacgcccugaucaacgaccagcucaucaugaagaaccaccuccgggacaucaugugcauccccuacugcaacuacagcaaguacugguaccugaaccacacggugaccgggaagaccucccugccccgcugcuggcuggugagcaacggcuccuaccugaacgagacccacuucagcgacgacaucgagcagcaggccgacaacaugaucacggagcuccugcagaaggaguacaucgaccggcagggcaagaccccgcuggggcucgucgaccuguucguguucuccaccagcuucuaccugaucuccaucuuccugcaccucgugaagaucccgacccaccgccacaucacgggcaagcccugccccaagccccaccggcugaaccacauggggaucugcagcugcggccuguacaagcacccggggguccccgugaaguggaagcgcuga

SEQ ID NO: 28080 - RNA, 1473 nt, Artificial Sequence
  derived and/or modified CDS sequence (opt1) from LASV(Lassa virus/H.sapiens-wt/NGA/2016/ISTH_0009;Clade II)__AVO03571__GPCmut5
augggccagaucaucaccuucuuccaggaggugccccacgucaucgaggaggugaugaacaucgugcugaucgcccucagccugcuggccauccucaaggggaucuacaacgucgcgaccugcggccugcuggggcucguguccuuccugcugcucugcggccgcagcugcuccacgaccuacaaggggguguacgagcugcagacccuggagcucgacauggccagccugaacaugaccaugccgcuguccugcacgaagaacaacagccaccacuacaucauggucggcaacgagaccggccucgagcugacccugaccaacacguccaucaucaaccacaaguucugcaaccucagcgacgcccacaagaagaaccuguacgaccacgcccugauguccaucaucagcaccuuccaccucuccauccccaacuucaaccaguacgaggccaugagcugcgacuucaacgggggccggaucuccgugcaguacaaccugagccacuccuacgcgguggacgccgccaaccacugcgggaccaucgccaacggcguccugcagaccuucaugcgcauggcguggggcgggagcuacaucgcccucgacuccggcugcgggagcugggacugcaucaugacguccuaccaguaccugaucauccagaacaccaccugggaggaccacugccaguucagccggcccagccccaucggcuaccuggggcuccugucccagcgcacccgggacaucuacaucagccgccggcugcucggcacguucaccuggacccuguccgacagcgagggcaacgagacccccgggggcuacugccugacgcgcuggaugcucaucgaggccgagcugaagugcuucgggaacaccgccguggccaagugcaacgagaagcacgacgaggaguucugcgacaugcugcggcuguucgacuucaacaagcaggcgauccgccggcugaagacccccgcccagauguccauccagcugaucaacaaggccgugaacgcccucaucaacgaccagcugaucaugaagaaccaccuccgcgacaucaugugcaucccguacugcaacuacagcaaguacugguaccucaaccacaccgucacggggaagaccucccugccccggugcuggcuggugagcaacggcuccuaccucaacgagacccacuucagcgacgacaucgagcagcaggccgacaacaugaucaccgagcugcugcagaaggaguacaucgaccgccagggcaagacgccccucgggcugguggaccuguucgucuucuccaccagcuucuaccugaucuccaucuuccuccaccuggugaagaucccgacccaccggcacaucaccggcaagcccugccccaagccccaccgccugaaccacauggggaucugcagcugcggccucuacaaccacccgggggugcccgucaaguggaagcgguga

SEQ ID NO: 28081 - RNA, 1473 nt, Artificial Sequence
  derived and/or modified CDS sequence (opt1) from LASV(Lassa virus/H.sapiens-wt/NGA/2016/ISTH_0017;Clade II)__AVO03567__GPCmut5
augggccagaucaucaccuucuuccaggaggugccccacgucaucgaggaggugaugaacaucgugcugaucgcccucagccugcuggccauccucaaggggaucuacaacgucgcgaccugcggccuguucgggcugguguccuuccuccugcugugcggccgcagcugcuccacgaccuacaaggggguguacgagcuccagacccuggagcuggacauggccagccucaacaugaccaugccgcuguccugcacgaagaacaacagccaccacuacaucauggucggcaacgagaccggccuggagcucacccugaccaacacguccaucaucaaccacaaguucugcaaccugagcgacgcccacaagaagaaccucuacgaccacgcccugauguccaucaucagcaccuuccaccuguccauccccaacuucaaccaguacgaggccaugagcugcgacuucaacgggggcaagaucuccgugcaguacaaccucagccacaccuacgcgaucgacgccgccaaccacugcgggaccaucgccaacggcgugcugcagacguucaugcggauggcguggggcggguccuacaucgcccuggacagcggcugcggguccugggacugcaucaugaccagcuaccaguaccucaucauccagaacaccaccugggaggaccacugccaguucucccgccccagccccaucggcuaccuggggcugcucagccagcggacgcgcgacaucuacaucucccggcgccugcugggcaccuucaccuggacccucagcgacuccgagggcaacgagacgcccgggggcuacugccugacccgguggaugcugaucgaggccgagcucaagugcuucgggaacaccgccgucgccaagugcaacgagaagcacgacgaggaguucugcgacaugcugcgccuguucgacuucaacaagcaggcgauccggcgccucaagacccccgcccagaugagcauccagcugaucaacaaggccgugaacgcccugaucaacgaccagcucaucaugaagaaccaccuccgggacaucaugugcauccccuacugcaacuacuccaaguacugguaccugaaccacacggugaccgggaagaccagccugccccgcugcuggcuggucuccaacggcagcuaccugaacgagacccacuucuccgacgacaucgagcagcaggccgacaacaugaucacggagcuccugcagaaggaguacauggaccggcagggcaagaccccgcuggggcucguggaccuguucguguucagcaccuccuucuaccugaucagcaucuuccugcaccucguccgcaucccgacccaccggcacgugaucggcaagcccugccccaagccccaccgccugaaccacauggggaucugcuccugcggccuguacaagcacccgggggugcccgucaaguggaagcgguga

SEQ ID NO: 28082 - RNA, 1473 nt, Artificial Sequence
  derived and/or modified CDS sequence (opt1) from LASV(Lassa virus/H.sapiens-wt/NGA/2018/ISTH_0959;Clade II)__AVV65099__GPCmut5
augggccagaucaucaccuucuuccaggaggugccccacgucaucgaggaggugaugaacaucgugcugaucgcccucagccugcuggccauccucaaggggaucuacaacgucgugaccugcggccuguucgggcugguguccuuccuccugcugugcggccgcagcugcuccacgaccuacaagggggucuacgagcuccagacccuggagcuggacauggcgagccucaacaugaccaugccgcuguccugcacgaagaacaacagccaccacuacaucauggugggcaacgagaccggccuggagcucacccugaccaacacguccaucaucaaccacaaguucugcaaccugagcgacgcccacaagaagaaccucuacgaccacgcccugauguccaucaucagcaccuuccaccuguccauccccaacuucaaccaguacgaggccaugagcugcgacuucaacgggggcaagaucuccgugcaguacaaccucagccacgccuacgcgaucgacgccgccaaccacugcgggaccaucgccaacggcguccugcagaccuucaugcggauggcguggggcggguccuacaucgcccuggacagcggcugcggguccugggacugcaucaugacgagcuaccaguaccucaucauccagaacaccaccugggaggaccacugccaguucucccgccccagccccaucggcuaccuggggcugcucagccagcggacccgcgacaucuacaucucccggcgccugcugggcacguucaccuggacccucagcgacuccgagggcaacgagacccccgggggcuacugccugacgcgguggaugcugaucgaggccgagcucaagugcuucgggaacaccgccguggccaagugcaacgagaagcacgacgaggaguucugcgacaugcugcgccuguucgacuucaacaagcaggcgauccggcgccucaagacccccgcccagaugagcauccagcugaucaacaaggccgugaacgcccugaucaacgaccagcucaucaugaagaaccaccuccgggacaucaugugcaucccguacugcaacuacuccaaguacugguaccugaaccacaccgucacggggaagaccagccugccccgcugcuggcugguguccaacggcagcuaccugaacgagacccacuucuccgacgacaucgagcagcaggccgacaacaugaucaccgagcuccugcagaaggaguacaucgaccggcagggcaagacgccccuggggcucguggaccuguucgucuucagcaccuccuucuaccugaucagcaucuuccugcaccucgugaagaucccgacccaccgccacgugaucggcaagcccugccccaagccccaccggcugaaccacauggggaucugcuccugcggccuguacaagcacccggggguccccgugaaguggaagcgcuga

SEQ ID NO: 28083 - RNA, 1473 nt, Artificial Sequence
  derived and/or modified CDS sequence (opt1) from LASV(LASV003-NIG-2008;Clade II)__AIT17580__GPCmut5
augggccagaucaucaccuucuuccaggaggugccccacgucaucgaggaggugaugaacaucgugcugaucgcccucagccugcuggccauccucaaggggaucuacaacgucgcgaccugcggccuguucgggcugguguccuuccuccugcugugcggccgcagcugcuccacgaccuacaaggggguguacgagcuccagacccuggagcuggacauggccagccucaacaugaccaugccgcuguccugcacgaagaacaacagccaccacuacaucauggucggcaacgagaccggccuggagcucacccugaccaacacguccaucaucaaccacaaguucugcaaccugagcgacgcccacaagaagaaccucuacgaccacgcccugauguccaucaucagcaccuuccaccuguccauccccaacuucaaccaguacgaggccaugagcugcgacuucaacgggggcaagaucuccgugcaguacaaccucagccacaccuacgcgguggacgccgccaaccacugcgggaccaucgccaacggcguccugcagacguucaugcggauggcguggggcggguccuacaucgcccuggacagcggcugcggguccugggacugcaucaugaccagcuaccaguaccucaucauccagaacaccaccugggaggaccacugccaguucucccgccccagccccaucggcuaccuggggcugcucagccagcggacgcgcgacaucuacaucucccggcgccugcugggcaccuucaccuggacccucagcgacuccgagagcaacgagacgccgggcggguacugccugacccgguggaugcugaucgaggccgagcucaagugcuucggcaacaccgccguggccaagugcaacgagaagcacgacgaggaguucugcgacaugcugcgccuguucgacuucaacaagcaggcgauccggcgccucaaggcccccgcccagauguccauccagcugaucaacaaggccgugaacgcccugaucaacgaccagcucaucaugaagaaccaccuccgggacaucaugugcauccccuacugcaacuacagcaaguacugguaccugaaccacaccgucacgggccgcaccucccugccccggugcuggcuggugagcaacggguccuaccugaacgagacccacuucagcgacgacaucgagcagcaggcggacaacaugaucaccgagcuccugcagaaggaguacauggaccgccagggcaagacgccccugggccucguggaccuguucgucuucuccaccagcuucuaccugaucuccaucuuccugcaccucgugaagaucccgacccaccggcacgugaucgggaagcccugccccaagccccaccgccugaaccacaugggcaucugcagcugcgggcuguacaagcacccgggcguccccgugaaguggaagcgguga

SEQ ID NO: 28084 - RNA, 1473 nt, Artificial Sequence
  derived and/or modified CDS sequence (opt1) from LASV(LASV035-NIG-2009;Clade II)__AIT17588__GPCmut5
augggccagaucaucaccuucuuccaggaggugccccacgucaucgaggaggugaugaacaucgugcugaucgcccucagccugcuggccauccucaaggggaucuacaacgucgcgaccugcggccuguucgggcugguguccuuccuccugcugugcggccgcagcugcuccacgaccuacaaggggguguacgagcuccagacccuggagcuggacauggccagccucaacaugaccaugccgcuguccugcacgaagaacaacagccaccacuacaucauggucggcaacgagaccggccuggagcucacccugaccaacacguccaucaucaaccacaaguucugcaaccugagcgacgcccacaagaagaaccucuacgaccacgcccugauguccaucaucagcaccuuccaccuguccauccccaacuucaaccaguacgaggccaugagcugcgacuucaacgggggcaagaucuccgugcaguacaaccucagccacgcguacgccguggacgccgccaaccacugcgggaccaucgcgaacggcguccugcagaccuucaugcggauggccuggggcggguccuacaucgcccuggacagcggcugcggguccugggacugcaucaugacgagcuaccaguaccucaucauccagaacaccaccugggaggaccacugccaguucucccgccccagccccaucggcuaccuggggcugcucagccagcggacccgcgacaucuacaucucccggcgccugcugggcacguucaccuggacccucagcgacuccgagggcaacgagacccccgggggcuacugccugacgcgguggaugcugaucgaggccgagcucaagugcuucgggaacaccgccguggcgaagugcaacgagaagcacgacgaggaguucugcgacaugcugcgccuguucgacuucaacaagcaggccauccggcgccucaaggcccccgcccagaugagcauccagcugaucaacaaggccgugaacgcgcugaucaacgaccagcucaucaugaagaaccaccuccgggacaucaugugcauccccuacugcaacuacuccaaguacugguaccugaaccacaccgucaccgggaagacgagccugccccgcugcuggcugguguccaacggcagcuaccugaacgagacccacuucuccgacgacaucgagcagcaggccgacaacaugaucaccgagcuccugcagaaggaguacaucgaccggcagggcaagaccccgcuggggcucguggaccuguucgucuucagcacguccuucuaccugaucagcaucuuccugcaccucgugaagaucccgacccaccgccacgugaucggcaagcccugccccaagccccaccggcugaaccacauggggaucugcuccugcggccuguacaagcacccggggguccccgugaaguggaagcgcuga

SEQ ID NO: 28085 - RNA, 1473 nt, Artificial Sequence
  derived and/or modified CDS sequence (opt1) from LASV(LASV1000-NIG-2009;Clade II)__AIT17782__GPCmut5
augggccagaucaucaccuucuuccaggaggugccccacgucaucgaggaggugaugaacaucgugcugaucgcccucagccugcuggccauccucaaggggaucuacaacgucgcgaccugcggccuguucgggcugguguccuuccuccugcugugcggccgcagcugcuccacgaccuacaaggggguguacgagcuccagacccuggagcuggacauggccagccucaacaugaccaugccgcuguccugcacgaagaacaacagccaccacuacaucauggucggcaacgagaccggccuggagcucacccugaccaacacguccaucaucaaccacaaguucugcaaccugagcgacgcccacaagaagaaccucuacgaccacgcccugauguccaucaucagcaccuuccaccuguccauccccaacuucaaccaguacgaggccaugagcugcgacuucaacgggggcaagaucuccgugcaguacaaccucagccacaccuacgcgguggacgccgccaaccacugcgggaccaucgccaacggcguccugcagacguucaugcggauggcguggggcggguccuacaucgcccuggacagcggcugcggguccugggacugcaucaugaccagcuaccaguaccucaucauccagaacaccaccugggaggaccacugccaguucucccgccccagccccaucggcuaccuggggcugcucagccagcggacgcgcgacaucuacaucucccggcgccugcugggcaccuucaccuggacccucagcgacuccgagggcaacgagacgcccgggggcuacugccugacccgguggaugcugaucgaggccgagcucaagugcuucgggaacaccgccguggccaagugcaacgagaagcacgacgaggaguucugcgacaugcugcgccuguucgacuucaacaagcaggcgaucaagcggcucaagacccccgcccagaugagcauccagcugaucaacaaggccgugaacgcccugaucaacgaccagcucaucaugaagaaccaccuccgcgacaucaugugcauccccuacugcaacuacuccaaguacugguaccugaaccacacggucaccgggaagaccagccugccccggugcuggcugguguccaacggcagcuaccugaacgagacccacuucuccgacgacaucgagcagcaggccgacaacaugaucacggagcuccugcagaaggaguacaucgaccgccagggcaagaccccgcuggggcucguggaccuguucgucuucagcaccuccuucuaccugaucagcaucuuccugcaccucgugaagaucccgacccaccggcacguggucggcaagcccugccccaagccccaccgccugaaccacauggggaucugcuccugcggccuguacaagcacccgggggugcccgugaaguggaagcgguga

SEQ ID NO: 28086 - RNA, 1473 nt, Artificial Sequence
  derived and/or modified CDS sequence (opt1) from LASV(LASV221-NIG-2010;Clade II)__AIT17624__GPCmut5
augggccagaucaucaccuucuuccaggaggugccccacgucaucgaggaggugaugaacaucgugcugaucgcccucagccugcuggccauccucaaggggaucuacaacgucgcgaccugcggccuguucgggcugguguccuuccuccugcugugcggccgcagcugcuccacgaccuacaaggggguguacgagcuccagacccuggagcuggacauggccagccucaacaugaccaugccgcuguccugcacgaagaacaacagccaccacuacaucauggucggcaacgagaccggccuggagcucacccugaccaacacguccaucaucaaccacaaguucugcaaccugagcgacgcccacaagaagaaccucuacgaccacgcccugauguccaucaucagcaccuuccaccuguccauccccaacuucaaccaguacgaggccaugagcugcgacuucaacgggggcaagaucuccgugcaguacaaccucagccacaccuacgcgaucgacgccgccaaccacugcgggaccaucgccaacggcgugcugcagacguucaugcggauggcguggggcggguccuacaucgcccuggacagcggcugcggguccugggacugcaucaugaccagcuaccaguaccucaucauccagaacaccaccugggaggaccacugccaguucucccgccccagccccaucggcuaccuggggcugcucagccagcggacgcgcgacaucuacaucucccggcgccugcugggcaccuucaccuggacccucagcgacuccgagggcaacgagacgcccgggggcuacugccugacccgguggaugcugaucgaggccgagcucaagugcuucgggaacaccgccgucgccaagugcaacgagaagcacgacgaggaguucugcgacaugcugcgccuguucgacuucaacaagcaggcgauccggcgccucaagacccccgcccagaugagcauccagcugaucaacaaggccgugaacgcccugaucaacgaccagcucaucaugaagaaccaccuccgggacaucaugugcauccccuacugcaacuacuccaaguacugguaccugaaccacacggugaccgggaagaccagccugccccgcugcuggcuggucuccaacggcagcuaccugaacgagacccacuucuccgacgacaucgagcagcaggccgacaacaugaucacggagaugcuccagaaggaguacauggaccggcagggcaagaccccgcuggggcugguggaccucuucguguucagcaccuccuucuaccugaucagcaucuuccugcaccuggucaagaucccgacccaccgccacgugaucggcaagcccugccccaagccccaccggcucaaccacauggggaucugcuccugcggccuguacaagcacccgggggugcccgucaaguggaagcgcuga

SEQ ID NO: 28087 - RNA, 1473 nt, Artificial Sequence
  derived and/or modified CDS sequence (opt1) from LASV(LASV237-NIG-2010;Clade II)__AIT17638__GPCmut5
augggccagaucaucaccuucuuccaggaggugccccacgucaucgaggaggugaugaacaucgugcugaucgcccucagccugcuggccauccucaaggggaucuacaacgucgcgaccugcggccuguucgggcugguguccuuccuccugcugugcggccgcagcugcuccacgaccuacaaggggguguacgagcuccagacccuggagcuggacauggccagccucaacaugaccaugccgcuguccugcacgaagaacaacagccaccacuacaucauggucggcaacgagaccggccuggagcucacccugaccaacacguccaucaucaaccacaaguucugcaaccugagcgacgcccacaagaaggaccucuacgaccacgcccugauguccaucaucagcaccuuccaccuguccauccccaacuucaaccaguacgaggccaugagcugcgacuucaacgggggcaagaucuccgugcaguacaaccucagccacaccuacgcgguggacgccgccaaccacugcgggaccaucgccaacggcguccugcagacguucaugcggauggcguggggcggguccuacaucgcccuggacagcggcugcggguccugggacugcaucaugaccagcuaccaguaccucaucauccagaacaccaccugggaggaccacugccaguucucccgccccagccccaucggcuaccuggggcugcucagccagcggacgcgcgacaucuacaucucccggcgccugcugggcaccuucaccuggacccucagcgacuccgagggcaacgagacgcccgggggcuacugccugacccgguggaugcugaucgaggccgagcucaagugcuucgggaacaccgccguggccaagugcaacgagaagcacgacgaggaguucugcgacaugcugcgccuguucgacuucaacaagcaggcgauccggcgccucaagacccccgcccagaugagcauccagcugaucaacaaggccgugaacgcccugaucaacgaccagcucaucaugaagaaccaccuccgggacaucaugugcauccccuacugcaacuacuccaaguacugguaccugaaccacacggucaccgggaagaccagccugccccgcugcuggcugguguccaacggcagcuaccugaacgagacccacuucuccgacgacaucgagcagcaggccgacaacaugaucacggagcuccugcagaaggaguacauggaccggcagggcaagaccccgcuggggcucguggaccuguucgucuucagcaccuccuucuaccugaucagcaucuuccugcaccucaucaagaucccgacccaccgccacaucacgggcaagcccugccccaagccccaccggcugaaccacauggggaucugcuccugcggccuguacaagcacccgggggugcccgugaaguggaagcgcuga

SEQ ID NO: 28088 - RNA, 1473 nt, Artificial Sequence
  derived and/or modified CDS sequence (opt1) from LASV(LASV253-NIG-2011;Clade II)__AIT17670__GPCmut5
augggccagaucaucaccuucuuccaggaggugccccacgucaucgaggaggugaugaacaucgugcugaucgcccucagccugcuggccauccucaaggggaucuacaacgucgcgaccugcggccuguucgggcugguguccuuccuccugcugugcggccgcagcugcuccacgaccuacaaggggguguacgagcuccagacccuggagcuggacauggccagccucaacaugaccaugccgcuguccugcacgaagaacaacagccaccacuacaucauggucggcaacgagaccggccuggagcucacccugaccaacacguccaucaucaaccacaaguucugcaaccugagcgacgcccacaagaagaaccucuacgaccacgcccugauguccaucaucagcaccuuccaccuguccauccccaacuucaaccaguacgaggccaugagcugcgacuucaacgggggcaagaucuccgugcaguacaaccucagccacaccuacgcgguggacgccgccaaccacugcgggaccaucgccaacggcguccugcagacguucaugcggauggcguggggcggguccuacaucgcccuggacagcggcugcggguccugggacugcaucaugaccagcuaccaguaccucaucauccagaacaccaccugggaggaccacugccaguucucccgccccagccccaucggcuaccuggggcugcucagccagcggacgcgcgacaucuacaucucccggcgccugcugggcaccuucaccuggacccucagcgacuccgagggcaacgagacgcccgggggcuacugccugacccgguggaugcugaucgaggccgagcucaagugcuucgggaacaccgccguggccaagugcaacgagaagcacgacgaggaguucugcgacaugcugcgccuguucgacuucaacaagcaggcgauccggcgccucaaggcccccgcccagaugagcauccagcugaucaacaaggccgugaacgcccugaucaacgaccagcucaucaugaagaaccaccuccgggacaucaugugcaucccguacugcaacuacuccaaguacugguaccugaaccacaccgucacggggcgcaccagccugccccggugcuggcugguguccaacggcagcuaccugaacgagacccacuucuccgacgacaucgagcagcaggcggacaacaugaucaccgagcuccugcagaaggaguacaucgaccgccagggcaagacgccccuggggcucguggaccuguucgucuucagcaccuccuucuaccugaucagcaucuuccugcaccucgugaagaucccgacccaccggcacaucaucggcaagcccugccccaagccccaccgccugaaccacauggggaucugcuccugcggccuguacaagcacccgggggugcccgucaaguggaagcgguga

SEQ ID NO: 28089 - RNA, 1473 nt, Artificial Sequence
  derived and/or modified CDS sequence (opt1) from LASV(LASV254-NIG-2011;Clade II)__AIT17674__GPCmut5
augggccagaucaucaccuucuuccaggaggugccccacgucaucgaggaggugaugaacaucgugcugaucgcccucagccugcuggccauccucaaggggaucuacaacgucgcgaccugcggccuguucgggcugguguccuuccuccugcugugcggccgcagcugcuccacgaccuacaaggggguguacgagcuccagacccuggagcuggacaugaccaaccucaacaugacgaugccgcugagcugcaccaagaacaacucccaccacuacaucauggucggcaacgagaccggccuggagcucacccugacgaacaccagcaucaucaaccacaaguucugcaaccuguccgacgcccacaagaagaaccucuacaaccacgcccugaugagcaucaucuccaccuuccaccugagcauccccaacuucaaccaguacgaggccauguccugcgacuucaacgggggcaagaucagcgugcaguacaaccucucccacagcuacgccguggacgcggccaaccacugcgggaccaucgccaacggcguccugcagacguucaugcggauggccuggggcggguccuacaucgcgcuggacagcggcugcgggaacugggacugcaucaugaccuccuaccaguaccucaucauccagaacaccaccugggaggaccacugccaguucagccgccccucccccaucggcuaccuggggcugcucagccagcggacgcgcgacaucuacaucagccggcgccugcugggcaccuucaccuggacccucuccgacagcgagggcaacgagacgcccgggggcuacugccugacccgguggaugcugaucgaggccgagcucaagugcuucgggaacaccgccguggccaagugcaacgagaagcacgacgaggaguucugcgacaugcugcgccuguucgacuucaacaagcaggccauccggcgccucaagacccccgcgcaggccaacauccagcugaucaacaaggccgugaacgcccugaucaacgaccagcucaucaugaagaaccaccuccgggacaucaugugcauccccuacugcaacuacuccaaguacugguaccugaaccacacggucaccgggaagaccagccugccccgcugcuggcugguguccaacggcagcuaccugaacgagacccacuucuccgacgacaucgagcagcaggccgacaacaugaucacggagcuccugcagaaggaguacauggaccggcagggcaagaccccgcuggggcucguggaccuguucgucuucagcaccuccuucuaccugaucagcaucuuccugcaccucgugaagaucccgacccaccgccacgugaucggcaagcccugccccaagccccaccggcugaaccacauggggaucugcuccugcggccuguacaagcacccggggguccccgugaaguggaagcgcuga

SEQ ID NO: 28090 - RNA, 1473 nt, Artificial Sequence
  derived and/or modified CDS sequence (opt1) from LASV(Nig08-A19;Clade III)__ADU56618__GPCmut5
augggccagaucgugaccuucuuccaggaggucccccacgugaucgaggaggugaugaacaucguccugaucgcccucagcauccuggccauccugaaggggcucuacaacaucgcgaccugcggccugaucgggcuggugacguuccuccugcuguccggccgcagcugcuccaugaccuacaaggggguguacgagcuccagacccuggagcugaacaugaacacccucaacaugacgaugccgcugagcugcaccaagaacaacucccaccacuacaucauggucggcaacgagaccggccuggagcucacccugacgaacaccagccugcuccaccacaaguucugcaaccuguccgacgcccacaagaagaaccuguacgaccacacccucaugagcaucaucuccaccuuccaccugagcauccccaacuucaaccaguacgaggccauguccugcgacuucaacgggggcaagaucacggugcaguacaaccugagccacuccuacgccaucgacgccgcgaaccacugcgggaccguggccaacggcguccuccagaccuucaugcggauggccuggggcgggagcuacaucgcccuggacuccggcugcgggaagugggacugcaucaugaccagcuaccaguaccugaucauccagaacacgaccugggaggaccacugccaguucucccggcccagccccaucggcuaccucgggcugcugucccagcgcacccgggacaucuacaucagccgccggcuccugggcaccuucacguggacccugagcgacuccgagggcaacgagacccccgggggcuacugccucacccgcuggaugcugaucgaggcggagcugaagugcuucgggaacacggccguggccaagugcaacgagaagcacgacgaggaguucugcgacaugcuccggcuguucgacuucaacaagcaggccauccgccggcugaaggcccccgcgcagaugagcauccagcucaucaacaaggccgugaacgcccugaucaacgaccagcugaucaugaagaaccaccuccgcgacaucaugugcauccccuacugcaacuacuccaaguacugguaccugaaccacaccagcaccgggcggaccucccugccccgcugcuggcucgucagcaacggcuccuaccugaacgagacgcacuucagcgacgacaucgagcagcaggccgacaacaugaucaccgagaugcugcagaaggaguaccucgaccggcagggcaagaccccgcuggggcugguggaccuguucguguucuccaccagcuucuaccucaucuccaucuuccugcaccuggucaagaucccgacgcaccgccacaucgugggcaagcccugccccaagccccaccggcucaaccacauggggaucugcagcugcggccuguacaagcagccgggggugcccguccgcuggaagcgguga

SEQ ID NO: 28091 - RNA, 1476 nt, Artificial Sequence
  derived and/or modified CDS sequence (opt1) from LASV(G1180-SLE-2010;Clade IV)__AIT17168__GPCmut5
augggccagaucgugaccuucuuccaggaggucccccacgugaucgaggaggugaugaacaucguccugaucgcccucagcauccuggccgugcugaaggggcucuacaacuucgcgaccugcggccugguggggcugcucaccuuccugcugcucugcggccgcuccugcaccgccagccgguacaagggggucuacgagcugcagacccuggagcucaacauggagacccugaacaugacgaugccgcuguccugcaccaagaacaacagccaccacuacaucauggugggcaacgagaccggccucgagcugacccugacgaacaccuccaucaucaaccacaaguucugcaaccucagcgacgcccacaagaagaaccuguacgaccacgcccugauguccaucaucagcaccuuccaccucuccauccccaacuucaaccaguacgaggccaugagcugcgacuucaacgggggcaagaucuccgugcaguacaaccugagccacuccuacgcgggggacgccgccaaccacugcggcaccgucgccaacggggugcugcagacguucaugcgcauggcguggggcggcagcuacaucgcccucgacuccgggugcggcagcugggacugcaucaugaccuccuaccaguaccugaucauccagaacaccaccugggaggaccacugccaguucagccggcccucccccaucggguaccugggccuccugagccagcgcacgcgggacaucuacaucagccgccggcugcucggcaccuucaccuggacccuguccgacagcgaggggaaggacacgccgggcggguacugccugacccgcuggaugcucaucgaggccgagcugaagugcuucggcaacaccgccguggccaagugcaacgagaagcacgacgaggaguucugcgacaugcugcggcuguucgacuucaacaagcaggcgauccagcgccugaaggcccccgcccagauguccauccagcugaucaacaaggccgucaacgcccucaucaacgaccagcugaucaugaagaaccaccuccgggacaucaugugcauccccuacugcaacuacagcaaguacugguaccucaaccacaccacgaccggcaagaccucccugcccaagugcuggcuggugagcaacggcuccuaccucaacgagacccacuucagcgacgacaucgagcagcaggcggacaacaugaucacggagaugcugcagaaggaguacauggagcgccaggggaagacgccccugggccucguggaccuguucgucuucuccaccagcuucuaccugaucuccaucuuccugcaccucgugaagaucccgacccaccggcacaucgugggcaagagcugccccaagccccaccgccugaaccacauggggaucugcuccugcgggcuguacaagcagcccggcgucccggugaaguggaagcgguga

SEQ ID NO: 28092 - RNA, 1476 nt, Artificial Sequence
  derived and/or modified CDS sequence (opt1) from LASV(G1442-SLE-2011;Clade IV)__AIT17180__GPCmut5
augggccagaucgugaccuucuuccaggaggucccccacgugaucgaggaggugaugaacaucguccugaucgcccucagcauccuggccgugcugaaggggcucuacaacguggcgaccugcggccugaucgggcuggucacguuccuccugcugugcggccgcuccugcaccaccacccucuacaaggggguguacgagcugcagacgcuggagcucaacauggagacccugaacaugaccaugccgcugagcugcaccaagaacaacucccaccacuacauccgggugggcaacgagacgggccucgagcugacccugaccaacaccagcaucaucaaccacaaguucugcaaccucuccgacgcccacaagaagaaccuguacgaccacgcccugaugagcaucaucuccacguuccaccucagcauccccaacuucaaccaguacgaggccauguccugcgacuucaacgggggcaagaucagcguccaguacaaccugucccacagcuacgccggggacgcggccaaccacugcggcaccguggccaacggggugcugcagaccuucaugcgcauggccuggggcggcuccuacaucgcgcucgacagcgggugcggcaacugggacugcaucaugaccuccuaccaguaccugaucauccagaacacgaccugggacgaccacugccaguucagccgccccucccccaucggguaccugggccuccugagccagcggacccgcgacgucuacaucucccggcgccugcucggcaccuucacguggacccugagcgacagcgaggggaaggacaccccgggcggguacugccugacccgguggaugcucaucgaggccgagcugaagugcuucggcaacacggccguggccaagugcaacgagaagcacgacgaggaguucugcgacaugcugcgccucuucgacuucaacaagcaggccauccagcggcugaaggcgcccgcccagauguccauccagcugaucaacaaggccgugaacgcccucaucaacgaccagcugaucaugaagaaccaccuccgcgacaucaugugcauccccuacugcaacuacagcaaguacugguaccugaacaacaccgccaccggcaagaccucccugcccaagugcuggcugaucagcaacggcuccuaccucaacgagacgcacuucagcgacgacaucgagcaggaggcggacaacaugaucaccgagaugcugcagaaggaguacauggagcggcaggggaagacgccccugggccucgucgaccuguucguguucuccaccagcuucuaccugaucuccaucuuccugcaccucgugaagaucccgacccaccgccacaucgucggcaagagcugccccaagccccaccggcugaaccacauggggaucugcuccugcgggcuguacaagcagcccggcgugccggugcgcuggaagcgguga

SEQ ID NO: 28093 - RNA, 1476 nt, Artificial Sequence
  derived and/or modified CDS sequence (opt1) from LASV(G3010-SLE-2013;Clade IV)__AIT17344__GPCmut5
augggccagaucgugaccuucuuccaggaggucccccacgugaucgaggaggugaugaacaucguccugaucgcccucagcauccuggccgugcugaaggggcucuacaacuucgcgaccugcggccugguggggcuggucacguuccuccugcugugcggccgcuccugcaccaccagccucuacaaggggguguacgagcugcagacccuggagcucaacauggagacgcugaacaugaccaugccgcuguccugcaccaagaacaacagccaccacuacaucauggugggcaacgagaccggccucgagcugacgcugaccaacaccuccaucaucaaccacaaguucugcaaccucagcgacgcccacaagaagaaccuguacaaccacgcccugauguccaucaucagcaccuuccaccucuccauccccaacuucaaccaguacgaggccaugagcugcgacuucaacgggggcaagaucuccguccaguacaaccugagccacuccuacgccggggacgcggccagccacugcggcacgguggccaacggggugcugcagaccuucaugcggauggccuggggcggcuccuacaucgcgcucgacagcgggugcggcaagugggacugcaucaugaccuccuaccaguaccugaucauccagaacaccacgugggaggaccacugccaguucagccgccccucccccaucggguaccugggccuccugagccagcggacccgcgacaucuacaucagccggcgccugcucggcaccuucaccuggacgcuguccgacagcgaggggaaggacaccccgggcggguacugccugacccgguggaugcucaucgaggccgagcugaagugcuucggcaacaccgccgucgccaagugcaacgagaagcacgacgaggaguucugcgacaugcugcgccucuucgacuucaacaagcaggccauccagcggcugaagacgcccgcgcagauguccauccagcugaucaacaaggccgugaacgcccucaucaacgaccagcugaucaugaagaaccaccuccgcgacaucaugugcauccccuacugcaacuacagcaaguacugguaccugaaccacaccaccaccggcaagacgucccugcccaagugcuggcuggugagcaacggcuccuaccucaacgagacccacuucagcgacgacaucgagcagcaggccgacaacaugaucaccgagaugcugcagaaggaguacauggagcggcaggggaagacgccccugggccucgucgaccuguucguguucuccaccagcuucuaccugaucuccaucuuccugcaccucgugaagaucccgacccaccgccacaucgucggcaagagcugccccaagccccaccggcugaaccacauggggaucugcuccugcgggcuguacaagcagcccggcgugccggugcgcuggaagcgguga

SEQ ID NO: 28094 - RNA, 1476 nt, Artificial Sequence
  derived and/or modified CDS sequence (opt1) from LASV(G502-SLE-2009;Clade IV)__AIT17126__GPCmut5
augggccagaucgugaccuucuuccaggaggucccccacgugaucgaggaggugaugaacaucguccugaucgcccucagcauccuggccgugcugaaggggcucuacaacuucgcgaccugcggccugguggggcugcucacguuccugcugcucugcggccgcuccugcaccaccgggcuguacaagggcgucuacgagcugcagacccucgagcugaacauggagacgcugaacaugaccaugccgcucagcugcaccaagaacaacucccaccacuacaucauggugggcaacgagaccgggcuggagcugacgcucaccaacaccagcaucaucaaccacaaguucugcaaccuguccgacgcccacaagaagaaccuguacgaccacgcccucaugagcaucaucuccaccuuccaccugagcauccccaacuucaaccaguacgaggccauguccugcgacuucaacggcgggaagaucagcgugcaguacaaccugucccacagcuacgccggcgacgcggccgaccacugcgggacggucgccaacggcgugcuccagaccuucaugcggauggccuggggcggguccuacaucgcgcuggacagcggcugcgggcggugggacugcaucaugaccuccuaccaguaccugaucauccagaacaccacgugggaggaccacugccaguucagccgccccucccccaucggcuaccucggccugcugagccagcggacccgcgacaucuacaucucccggcgccuccuggggaccuucaccuggacgcugagcgacagcgagggcaaggacacccccgggggcuacugccucacccgguggaugcugaucgaggccgagcugaagugcuucgggaacaccgccguggccaagugcaacgagaagcacgacgaggaguucugcgacaugcuccgccuguucgacuucaacaagcaggccauccagcggcugaaggcgcccgcccagauguccauccagcucaucaacaaggccgucaacgcccugaucaacgaccagcuggugaugaagaaccaccuccgcgacaucaugugcauccccuacugcaacuacagccgguacugguaccugaaccacacgaccaccggccgcaccucccugcccaagugcuggcucgugagcaacggguccuaccugaacgagacgcacuucagcgacgacaucgagcagcaggccgacaacaugaucaccgagaugcugcagaaggaguacauggagcggcagggcaagaccccgcucgggcuggucgaccuguucguguucuccaccagcuucuaccugaucuccaucuuccuccaccuggugaagaucccgacgcaccgccacaucgucggcaagagcugccccaagccccaccggcugaaccacauggggaucugcuccugcggccucuacaagcagcccggcgugccggugaaguggaagcgcuga

SEQ ID NO: 28095 - RNA, 1476 nt, Artificial Sequence
  derived and/or modified CDS sequence (opt1) from LASV(G733-SLE-2010;Clade IV)__AIT17154__GPCmut5
augggccagaucgugaccuucuuccaggaggucccccacgugaucgaggaggugaugaacaucguccugaucgcccucagcauccuggccgugcugaaggggcucuacaacuucgcgaccugcggcaucguggggcuggucuccuuccugcuccugugcggccgcagcugcacgaccucccuguacaaggggguguacgagcuccagacccuggagcugaacauggagacccucaacaugacgaugccgcugagcugcaccaagaacaacucccaccacuacaucauggugggcaacgagaccggccuggagcucacccugacgaacaccagcaucaucaaccacaaguucugcaaccuguccgacgcccacaagaagaaccucuacgaccacgcccugaugagcaucaucuccaccuuccaccugagcauccccaacuucaaccaguacgaggccauguccugcgacuucaacgggggcaagaucagcguccaguacaaccucucccacagcuacgccggggacgcggccaaccacugcggcaccaucgccaacggggugcugcagacguucaugcggauggccuggggcggcuccuacaucgcgcuggacagcgggugcgaccggugggacugcaucaugaccuccuaccaguaccucaucauccagaacaccaccugggaggaccacugccaguucagccgccccucccccaucggcuaccuggggcugcucagccagcggacgcgcgacaucuacaucagccggcgccugcugggcaccuucaccuggacccucuccgacagcgagggcaaggacacgcccgggggcuacugccugacccgguggaugcugaucgaggccgagcucaagugcuucgggaacaccgccguggccaagugcaacgagaagcacgacgaggaguucugcgacaugcugcgccuguucgacuucaacaagcaggccauccagcggcucaaggcgcccgcccagauguccauccagcugaucaacaaggccgucaacgcccugaucaacgaccagcucaucaugaagaaccaccuccgcgacaucaugugcauccccuacugcaacuacagcaaguacugguaccugaaccacaccacgaccgggaagaccucccugcccaagugcuggcuggugagcaacggcuccuaccugaacgagacccacuucagcgacgacaucgagcagcaggccgacaacaugaucacggagaugcuccagaaggaguacauggagcggcagggcaagaccccgcuggggcugguggaccucuucgucuucuccaccagcuucuaccugaucuccaucuuccugcaccuggugaagaucccgacccaccgccacguggucggcaagagcugccccaagccccaccggcucaaccacauggggaucugcuccugcggccuguacgggcagcccggcgugccggugaaguggaagcgcuga

SEQ ID NO: 28096 - RNA, 1476 nt, Artificial Sequence
  derived and/or modified CDS sequence (opt1) from MOPV/LASV reassortant(IGS-1;Clade IV)__AFY05576__GPCmut5
augggccagaucgugaccuucuuccaggaggucccccacgugaucgaggaggugaugaacaucguccugaucgcccucagcgugcuggccgugcugaaggggcucuacaacuucgcgaccugcggccuggucgggcuggugacguuccuccugcugugcggccgcuccugcaccaccagccucuacaaggggguguacgagcugcagacccuggagcucaacauggagacgcugaacaugaccaugccgcuguccugcaccaagaacaacagccaccacuacaucauggucggcaacgagaccggccucgagcugacgcugaccaacaccuccaucaucaaccacaaguucugcaaccucagcgacgcccacaagaagaaccuguacgaccacgcccugauguccaucaucagcaccuuccaccucuccauccccaacuucaaccaguacgaggccaugagcugcgacuucaacgggggcaagaucuccgugcaguacaaccugagccacuccuacgccggggacgcggccaaccacugcggcacgguggccaacgggguccugcagaccuucaugcggauggccuggggcggcagcuacaucgcgcucgacuccgggugcggcaacugggacugcaucaugaccagcuaccaguaccugaucauccagaacaccacgugggaggaccacugccaguucucccggcccagccccaucggguaccugggccuccugucccagcgcacccgggacaucuacaucagccgccggcugcucggcaccuucaccuggacgcugagcgacuccgagggggaggacaccccgggcggguacugccugacccgcuggaugcucaucgaggccgagcugaagugcuucggcaacaccgccguggccaagugcaacgagaagcacgacgaggaguucugcgacaugcugcggcuguucgacuucaacaagcaggccauccagcgccugaaggcgcccgcccagaugagcauccagcugaucaacaaggccgugaacgcccucaucaacgaccagcugaucaugaagaaccaccuccgggacaucaugugcauccccuacugcaacuacuccaaguacugguaccucaaccacacgaccaccggccgcaccagccugcccaagugcuggcuggucuccaacggcagcuaccucaacgagacgcacuucuccgacgacaucgagcagcaggccgacaacaugaucaccgagaugcugcagaaggaguacauggagcggcaggggaagacgccccugggccucguggaccuguucguguucagcaccuccuucuaccugaucagcaucuuccugcaccucgucaagaucccgacccaccgccacaucguggggaaguccugccccaagccccaccggcugaaccacaugggcaucugcagcugcgggcuguacaagcagcccggcgugccggucaaguggaagcgcuga

SEQ ID NO: 28097 - RNA, 1476 nt, Artificial Sequence
  derived and/or modified CDS sequence (opt1) from LASV(LM765-SLE-2012;Clade IV)__AIT17814__GPCmut5
augggccagaucgugaccuucuuccaggaggucccccacgugaucgaggaggugaugaacaucguccugaucgcccucagcauccuggccgugcugaaggggcucuacaacuucgcgaccugcggccugguggggcuggucacguuccuccugcugugcggccgcuccugcaccaccagccucuacaaggggguguacgagcugcagacccuggagcucaacauggagacgcugaacaugaccaugccgcuguccugcaccaagaacaacagccaccacuacaucauggugggcaacgagaccggccucgagcugacgcugaccaacaccuccaucaucgaccacaaguucugcaaccucagcgacgcccaccggaagaaccuguacgaccacgcccugauguccaucaucagcaccuuccaccucuccauccccaacuucaaccaguacgaggccaugagcugcgacuucaacgggggcaagaucuccguccaguacaaccugagccacuccuacgccaaggacgcggccgaccacugcgggacgguggccaacggcgugcugcagaccuucaugcgcauggccuggggcgggagcuacaucgcgcucgacuccggcugcgggcgcugggacugcaucaugaccagcuaccaguaccugaucauccagaacaccacgugggaggaccacugccaguucucccggcccagccccaucggcuaccuggggcuccugucccagcgcacccgggacaucuacaucagccgccggcugcucggcaccuucaccuggacgcugagcgacuccgagggcaaggacacccccgggggcuacugccugacccgcuggaugcucaucgaggccgagcugaagugcuucgggaacaccgccgucgccaagugcaacgagaagcacgacgaggaguucugcgacaugcugcggcuguucgacuucaacaagcaggccauccagcgccugaaggcgcccgcccagaugagcauccagcugaucaacaaggccgugaacgcccucaucaacgaccagcugaucaugaagaaccaccuccgggacaucaugugcauccccuacugcaacuacuccaaguacugguaccucaaccacacgaccaccgggaagaccagccugcccaagugcuggcugguguccaacggcagcuaccucaacgagacgcacuucuccgacgacaucgagcagcaggccgacaacaugaucaccgagaugcugcagaaggaguacauggagcgccagggcaagaccccgcuggggcucgucgaccuguucguguucagcaccuccuucuaccugaucagcaucuuccugcaccucgugaagaucccgacgcaccggcacaucgucggcaagcccugccccaagccccaccgccugaaccacauggggaucugcuccugcggccuguacaagcagccgggggugcccgugaaguggaagcgguga

SEQ ID NO: 28098 - RNA, 1476 nt, Artificial Sequence
  derived and/or modified CDS sequence (opt1) from LASV(LM776-SLE-2012;Clade IV)__AIT17824__GPCmut5
augggccagaucgugaccuucuuccaggaggucccccacgugaucgaggaggugaugaacaucguccugaucgcccucagcauccuggccgugcugaaggggcucuacaacuucgcgaccugcggccugguggggcuggucacguuccuccugcugugcggccgcuccugcaccaccagcguguacaaggggguguacgagcuccagacccuggagcugaacauggagacgcucaacaugaccaugccgcuguccugcaccaagaacaacagccaccacuacaucauggucggcaacgagaccggccuggagcucacgcugaccaacaccuccaucaucaaccacaaguucugcaaccugagcgacgcccacaagaagaaccucuacgaccacgcccugauguccaucaucagcaccuuccaccuguccauccccaacuucaaccaguacgaggccaugagcugcgacuucaacgggggcaagaucuccgugcaguacaaccucagccacuccuacgccggggacgcggccaaccacugcggcacgguggccaacgggguccugcagaccuucaugcggauggccuggggcggcagcuacaucgcgcuggacuccgggugcggcaagugggacugcaucaugaccagcuaccaguaccucaucauccagaacaccacgugggaggaccacugccaguucucccgccccagccccaucggguaccugggccugcucucccagcggacccgcgacaucuacaucagccggcgccugcugggcaccuucaccuggacgcucagcgacuccgaggggaaggacaccccgggcggguacugccugacccgguggaugcugaucgaggccgagcucaagugcuucggcaacaccgccguggccaagugcaacgagaagcacgacgaggaguucugcgacaugcugcgccuguucgacuucaacaagcaggccauccagcggcucaaggcgcccgcccagaugagcauccagcugaucaacaaggccgugaacgcccugaucaacgaccagcucaucaugaagaaccaccuccgcgacaucaugugcauccccuacugcaacuacuccaaguacugguaccugaaccacacgaccaccggcaagaccagccugcccaagugcuggcuggucuccaacggcagcuaccugaacgagacgcacuucuccgacgacaucgagcagcaggccgacaacaugaucaccgagaugcuccagaaggaguacauggagcggcaggggaagacgccccugggccugguggaccucuucguguucagcaccuccuucuaccugaucagcaucuuccugcaccuggucaagaucccgacccaccgccacaucguggggaaguccugccccaagccccaccggcucaaccacaugggcaucugcagcugcgggcuguacaagcagcccggcgugccgguccgcuggaagcgguga

SEQ ID NO: 28099 - RNA, 1476 nt, Artificial Sequence
  derived and/or modified CDS sequence (opt1) from LASV(Mad39;Clade IV)__ANH09722__GPCmut5
augggccagaucgugaccuucuuccaggaggucccccacgugaucgaggaggugaugaacaucguccugaucgcccucagcauccuggccgugcugaaggggcucuacaacguggcgaccugcggccugaucgggcuggucacguuccuccugcugugcggccgcuccugcaccaccacccucuacaaggggguguacgagcugcaggcccuggagcucaacauggagacgcugaacaugaccaugccgcugagcugcaccaagaacaacucccaccacuacauccgggugggcaacgagaccggccucgagcugacgcugaccaacaccagccucaucaaccacaaguucugcaaccuguccgacgcccacaagaagaaccuguacgaccacgcccucaugagcaucaucuccaccuuccaccugagcauccccaacuucaaccaguacgaggccauguccugcgacuucaacgacgggaagaucagcguccaguacaaccugucccacacguacgcgggcgacaccgccaaccacugcgggaccguggccaacggcgugcuccagaccuucaugcgcauggccuggggcgggagcuacaucgcgcuggacuccggcugcgggggcugggacugcaucaugacgagcuaccaguaccugaucauccagaacaccaccugggaggaccacugccaguucucccggcccagccccaucggguaccucggccugcugucccagcggacccgcgacaucuacaucagccggcgccuccugggcacguucaccuggacccuguccgacagcgaggggaaggacaccccgggcggguacugccucacgcgguggaugcugaucgaggccgagcugaagugcuucggcaacaccgccgucgccaagugcaacgagaagcacgacgaggaguucugcgacaugcuccgccuguucgacuucaacaagcaggccauccagcggcugaaggcgcccgcccagaugagcauccagcucaucaacaaggccgugaacgcccugaucaacgaccagcugaucaugaagaaccaccuccgcgacaucaugugcauccccuacugcaacuacuccaaguacugguaccugaaccacaccgugaccggcaagacgagccugcccaagugcuggcucgucuccaacggcagcuaccugaacgagacccacuucuccgacgacaucgagcagcaggccgacaacaugaucaccgagaugcugcagaaggaguacauggagcggcaggggaagacgccccucggccugguggaccuguucguguucagcaccuccuucuaccugaucagcaucuuccuccaccuggucaagaucccgacccaccgccacgugguggggaagcccugccccaagccccaccggcugaaccacaugggcaucugcuccugcggguucuacaagcagccgggcguccccgugcgcuggaagcgguga

SEQ ID NO: 28100 - RNA, 1476 nt, Artificial Sequence
  derived and/or modified CDS sequence (opt1) from LASV(Z0947-SLE-2011;Clade IV)__AIT17840__GPCmut5
augggccagaucgugaccuucuuccaggaggucccccacgugaucgaggaggugaugaacaucguccugaucgcccucagcauccuggccgugcugaaggggcucuacaacuucgcgaccugcggccugguggggcuggucacguuccuccugcugugcggccgcuccugcaccaucagccucuacaaggggguguacgagcugcagacccuggagcucaacauggagacccugaacaugacgaugccgcuguccugcaccaagaacaacagccaccacuacaucauggugggcaacgagaccggccucgagcugacccugacgaacaccuccaucaucaaccacaaguucugcaaccucagcgacgcccacaagaagaaccuguacgaccacgcccugauguccaucaucagcaccuuccaccucuccauccccaacuucaaccaguacgaggccaugagcugcgacuucaacgggggcaagaucuccguccaguacaaccugagccacuccuacgccggggacgcggccaaccacugcggcaccguggccaacggggugcugcagacguucaugcggauggccuggggcggcagcuacaucgcgcucgacuccgggugcgaccggugggacugcaucaugaccagcuaccaguaccugaucauccagaacaccaccugggaggaccacugccaguucucccgccccagccccaucggcuaccuggggcuccugucccagcggacgcgcgacaucuacaucagccggcgccugcucggcaccuucaccuggacccugagcgacuccgagggcaaggacacgcccgggggcuacugccugacccgguggaugcucaucgaggccgagcugaagugcuucgggaacaccgccgucgccaagugcaacgagaagcacgacgaggaguucugcgacaugcugcgccucuucgacuucaacaagcaggccauccagcggcugaaggcgcccgcccagaugagcauccagcugaucaacaaggccgugaacgcccucaucaacgaccagcugaucaugaagaaccaccuccgcgacaucaugugcauccccuacugcaacuacuccaaguacugguaccugaaccacaccacgaccgggaagaccagccugcccaagugcuggcugguguccaacggcagcuaccucaacgagacccacuucuccgacgacaucgagcagcaggccgacaacaugaucacggagaugcugcagaaggaguacauggagcggcagggcaagaccccgcuggggcucgucgaccuguucguguucagcaccuccuucuaccugaucagcaucuuccugcaccucgugaagaucccgacccaccgccacaucgucggcaagcccugccccaagccccaccggcugaaccacauggggaucugcuccugcggccuguacaagcagccgggggugcccgugaaguggaagcgcuga

SEQ ID NO: 28101 - RNA, 1476 nt, Artificial Sequence
  derived and/or modified CDS sequence (opt1) from LASV(Josiah;Clade IV)__NP_694870__GPCmut5
augggccagaucgugaccuucuuccaggaggucccccacgugaucgaggaggugaugaacaucguccugaucgcccucagcgugcuggccgugcugaaggggcucuacaacuucgcgaccugcggccuggucgggcuggugacguuccuccugcugugcggccgcuccugcaccaccagccucuacaaggggguguacgagcugcagacccuggagcucaacauggagacgcugaacaugaccaugccgcuguccugcaccaagaacaacagccaccacuacaucauggucggcaacgagaccggccucgagcugacgcugaccaacaccuccaucaucaaccacaaguucugcaaccucagcgacgcccacaagaagaaccuguacgaccacgcccugauguccaucaucagcaccuuccaccucuccauccccaacuucaaccaguacgaggccaugagcugcgacuucaacgggggcaagaucuccgugcaguacaaccugagccacuccuacgccggggacgcggccaaccacugcggcacgguggccaacgggguccugcagaccuucaugcggauggccuggggcggcagcuacaucgcgcucgacuccgggugcggcaacugggacugcaucaugaccagcuaccaguaccugaucauccagaacaccacgugggaggaccacugccaguucucccgccccagccccaucggguaccugggccuccugucccagcggacccgcgacaucuacaucagccggcgccugcucggcaccuucaccuggacgcugagcgacuccgaggggaaggacaccccgggcggguacugccugacccgguggaugcucaucgaggccgagcugaagugcuucggcaacaccgccguggccaagugcaacgagaagcacgacgaggaguucugcgacaugcugcgccucuucgacuucaacaagcaggccauccagcggcugaaggcgcccgcccagaugagcauccagcugaucaacaaggccgugaacgcccucaucaacgaccagcugaucaugaagaaccaccuccgcgacaucaugugcauccccuacugcaacuacuccaaguacugguaccugaaccacacgaccaccgggcggaccagccugcccaagugcuggcuggucuccaacggcagcuaccucaacgagacgcacuucuccgacgacaucgagcagcaggccgacaacaugaucaccgagaugcugcagaaggaguacauggagcgccagggcaagaccccgcuggggcugguggaccucuucguguucagcaccuccuucuaccugaucagcaucuuccugcaccucgucaagauccccacgcaccggcacaucgugggcaaguccugccccaagccccaccgccugaaccacauggggaucugcagcugcggccuguacaagcagccgggggugcccgucaaguggaagcgguga

SEQ ID NO: 28102 - RNA, 1473 nt, Artificial Sequence
  derived and/or modified CDS sequence (opt1) from LASV(LP;Clade I)__AAF86701__GPCmut5
augggccagaucaucaccuucuuccaggaggugccccacgucaucgaggaggugaugaacaucgugcugaucgcccucagccugcuggccauccucaaggggcuguacaacaucgcgaccugcggcaucaucgggcuggucgccuuccucuuccugugcggcaaguccugcagccugacgcucaagggcggguacgagcugcagacccuggagcucaacauggagacccugaacaugaccaugccgcuguccugcacgaagaacagcucccaccacuacauccgcgugggcaacgagaccgggcucgagcugacccugaccaacacgagcaucaucaaccacaaguucugcaaccucuccgacgcccacaagaagaaccuguacgaccacgcccugaugagcaucaucuccaccuuccaccucagcauccccaacuucaaccaguacgaggccauguccugcgacuucaacggcgggaagaucagcgugcaguacaaccugucccacagcuacgcgggcgacgccgccgagcacugcgggaccgucgccaacggcgugcugcagaccuucaugcggauggcguggggcgggcgcuacaucgcccucgacuccggcugcgggaacugggacugcaucaugacgagcuaccaguaccugaucauccagaacaccaccugggaggaccacugccaguucucccggcccagccccaucggcuaccugggccuccugucccagcgcacccgggacaucuacaucagccgccggcugcucgggacguucaccuggacccugagcgacuccgagggcaacgagacccccgggggcuacugccugacgcgcuggaugcucaucgaggccgagcugaagugcuucgggaacaccgccguggccaagugcaacgagaagcacgacgaggaguucugcgacaugcugcggcuguucgacuucaacaagcaggcgauccgccggcugaaggccccggcccagaugagcauccagcugaucaacaaggccgucaacgcccucaucaacgaccagcugaucaugaagaaccaccuccgcgacaucaugugcauccccuacugcaacuacuccaaguacugguaccucaaccacaccagcuccggccggaccagccugcccaagugcuggcugaucuccaacggcagcuaccucaacgagacgcaguucuccgacgacaucgagcagcaggcggacaacaugaucaccgagaugcugcagaaggaguacaucgagcgccaggggaagaccccgcugggccugguggacaucuucaucuucagcaccuccuucuaccucaucagcaucuuccugcaccugaucaagauccccacgcaccggcacaucguggggaagcccugccccaagccgcaccgccucaaccacaugggcgucugcuccugcgggcuguacaagcaccccggcgugcccaccaaguggaagcgguga

SEQ ID NO: 28103 - RNA, 1473 nt, Artificial Sequence
  derived and/or modified CDS sequence (opt1) from LASV(803213;Clade II)__AAF86703__GPCmut5
augggccagaucaucaccuucuuccaggaggugccccacgucaucgaggaggugaugaacaucgugcugaucgcccucagccugcuggccauccucaaggggaucuacaacgucgcgaccugcggccuguucgggcugaucuccuuccuccugcugugcggccgcagcugcuccgugacguacaaggggguguacgagcuccagacccuggagcugaacauggccaaccucaacaugaccaugccgcugagcugcaccaagaacaacucccaccacuacaucauggucggcaacgagacgggccuggagcucacccugaccaacaccagcaucaucaaccacaaguucugcaaccuguccgacgcccacaagaagaaccucuacgaccacgcccugaugagcaucaucuccacguuccaccugagcauccccaacuucaaccaguacgaggccauguccugcgacuucaacgggggcaagaucagcgugcaguacaaccucucccacagcuucgcgguggacgccgccaaccacugcgggaccaucgccaacggcguccugcagaccuucaugcggauggcguggggcggguccuacaucgcccuggacagcggcugcgggaacugggacugcaucaugaccuccuaccaguaccucaucauccagaacacgaccugggaggaccacugccaguucagccgccccucccccaucggcuaccuggggcugcucagccagcggacccgcgacaucuacaucagccggcgccugcugggcaccuucacguggacccucuccgacagcgagggcaacgaggcccccgggggcuacugccugacccgguggaugcugaucgaggccgagcucaagugcuucgggaacaccgccguggcgaagugcaacgagaagcacgacgaggaguucugcgacaugcugcgccuguucgacuucaacaagcaggccaucaagcggcucaagacgccggcccagauguccauccagcugaucaacaaggccgugaacgcccugaucaacgaccagcucaucaugaagaaccaccuccgcgacaucaugugcauccccuacugcaacuacagccgguacugguaccugaaccacaccgucaccggcaagaccucccugccccgcugcuggcuggugagcaacggguccuaccugaacgagacgcacuucagcgacgacaucgagcagcaggcggacaacaugaucaccgagaugcuccagaaggaguacauggaccggcagggcaagaccccgcugggccugguggaccuguucgucuucuccaccagcuucuaccucaucuccaucuuccugcaccuggugaagauccccacgcaccgccacaucguggggaagcccugccccaagccgcaccggcucaaccacaugggcaucugcagcugcgggcuguacaagcaccccggcguccccgugaaguggaagcgcuga

SEQ ID NO: 28104 - RNA, 1473 nt, Artificial Sequence
  derived and/or modified CDS sequence (opt1) from LASV(GA391;Clade III)__CAA36645__GPCmut5
augggccagaucgugaccuucuuccaggaggucccccacgugaucgaggaggugaugaacaucguccugaucgcccucagcauccuggccauccugaaggggcucuacaacguggcgaccugcggccugaucgggcuggugacguuccuccugcuguccggccgcagcugcucccucaucuacaaggggaccuacgagcugcagacccuggagcucaacauggagacccugaacaugacgaugccgcugagcugcaccaagaacaacucccaccacuacauccgggucggcaacgagaccggccucgagcugacccugacgaacaccagcauccucaaccacaaguucugcaaccuguccgacgcccacaagcgcaaccuguacgaccacagccucauguccaucaucagcaccuuccaccuguccauccccaacuucaaccaguacgaggccaugagcugcgacuucaacgggggcaagaucaccgugcaguacaaccugucccacagcuucgccguggacgccgcggggcacugcggcacgcucgccaacgggguccugcagaccuucaugcggauggccuggggcggcuccuacaucgcccuggacagcgggugcggcaacugggacugcaucaugaccuccuaccaguaccucaucauccagaacaccacgugggacgaccacugccaguucagccgccccucccccaucggguaccugggccugcucagccagcggacccgcgacaucuacaucagccggcgccugcugggcaccuucaccuggacgcucuccgacagcgaggggaacgagaccccgggcggguacugccugacccgguggaugcugaucgaggcggagcucaagugcuucggcaacaccgccguggccaagugcaacgagaagcacgacgaggaguucugcgacaugcugcgccuguucgacuucaacaagcaggccauccggcgccucaagacgcccgcccagauguccauccagcugaucaacaaggcggugaacgcccugaucaacgaccagcucaucaugaagaaccaccuccgggacaucaugugcauccccuacugcaacuacagccgcuacugguaccugaaccacaccuccaccgggaagaccagccugccccggugcuggcugaucuccaacggcagcuaccugaacgagacgaaguucuccgacgacaucgagcagcaggccgacaacaugaucaccgagaugcugcagaaggaguacaucgaccgccagggcaagaccccgcucgggcuggucgaccuguucguguucagcaccuccuucuaccucaucagcaucuuccugcaccuggugaagauccccacgcaccggcacaucgucggcaagcccugccccaagccgcaccgccucaaccacauggggaucugcuccugcggccuguacaagcagcccggggugcccgugcgguggaagcgcuga

SEQ ID NO: 28105 - RNA, 1476 nt, Artificial Sequence
  derived and/or modified CDS sequence (opt1) from LASV(AV;Clade V)__CCA30314__GPCmut5
augggccagaucgugaccuucuuccaggaggucccccacgugaucgaggaggugaugaacaucguccugaucgcccucagcauccuggccgugcugaaggggcucuacaacaucgcgaccugcggccugaucgggcugaucacguuccuccugcugugcggccgcuccugcagcuccaaccucuacaaggggguguacgagcugcagagccuggaccucaacauggagacccugaacaugaccaugccgcuguccugcaccaagaacaacagccaccacuacauccgggucggcaacgacacgggccucgagcugacccugaccaacaccuccauccucaaccacaaguucugcaaccugagcgacgcccacaagaaggaccuguacgaccacgcccucauguccaucaucagcacguuccaccuguccauccccaacuucaaccaguacgaggccaugagcugcgacuucaacgggggcaagaucuccgugcaguacaaccugagccacuccuacgccaucgacgcggccaaccacugcgggaccguggccaacggcauccuccagaccuucaugcgcauggccuggggcgggagcuacaucgcgcuggacuccggcugcgggaacugggacugcaucaugaccagcuaccaguaccugaucauccagaacacgaccugggagaaccacugccaguucucccggcccagccccaucggcuaccucgggcugcugagccagcgcacccgggacaucuacaucucccgccggcuccugggcaccuucacguggacccugagcgacuccgagggcaacgccacccccgggggcuacugccucacccgcuggaugcugaucgaggccgagcugaagugcuucgggaacacggccgucgccaagugcaacgagaagcacgacgaggaguucugcgacaugcuccggcuguucgacuucaacaagcaggcgaucagccgccugaaguccccggcccagaugagcauccagcucaucaacaaggccgugaacgcccugaucaacgaccagcugaucaugaagaaccaccuccgggacaucaugugcauccccuacugcaacuacuccaaguacugguaccugaaccacaccaucaccggcaagaccagccugcccaagugcuggcucguguccaacgggagcuaccugaacgagacgcacuucuccgacgacaucgagcagcaggccgacaacaugaucaccgagaugcugcagaaggaguacauggagcgccagggcaagaccccgcugggccucgucgaccuguucguguucagcaccuccuucuaccugaucagcaucuuccuccggcuggugaagauccccacgcaccgccacaucgucgggaagcccugccccaagccgcaccggcugaaccacaugggcaucugcuccugcgggcucuacaagcagcccggcgugcccgugcgcuggaagcgguga

SEQ ID NO: 28106 - RNA, 1473 nt, Artificial Sequence
  derived and/or modified CDS sequence (opt1) from LASV(Togo/2016/7082;Clade VI)__AMR44577__GPCmut5
augggccagaucaucaccuucuuccaggaggugccccacgucaucgaggaggugaugaacaucgugcugaucgcccucagccugcuggccauccucaagggggucuacaacguggcgaccugcggcaucaucgggcuggugacguuccuguuccucugcggccgcuccugcagccugaucuacaagggguccuacgagcugcagacccucgagcugaacauggagacccugaacaugaccaugccgcucagcugcacgaagaacuccagccaccacuacauccgggucggcaacgagaccggccuggagcugacccucaccaacacguccaucaucaaccacaaguucugcaaccugagcgacgcccacaagcgcaaccuguacgaccacgcccucauguccauccugagcaccuuccaccuguccauccccaacuucaaccaguacgaggccaugagcugcgacuucaacgggggcaagaucuccgugcaguacaaccucagccacgccuacgcgguggacgccgccgagcacugcgggaccgucgccaacggcgugcugcagaccuucaugcggauggcguggggcggguccuacaucgcccuggacagcggcugcgggaacugggacugcaucaugacguccuaccaguaccucaucauccagaacaccaccugggaggaccacugccaguucagccgccccucccccaucggcuaccuggggcugcucagccagcggacccgcgacaucuacaucagccggcgccugcugggcacguucaccuggacccucuccgacagcgagggcaacgagacccccgggggcuacugccugacgcgguggaugcugaucgaggccgagcucaagugcuucgggaacaccgccguggccaagugcaacgagaagcacgacgaggaguucugcgacaugcugcgccuguucgacuucaacaagcaggcgauccagcggcucaaguccccggcccagaugagcauccagcugaucaacaaggccgucaacgcccugaucaacgaccagcucaucaugaagaaccaccuccgcgacaugaugugcauccccuacugcaacuacuccaaguacugguaccugaaccacaccagcuccggccggaccagccugcccaagugcuggcugguguccaacgggagcuaccugaacgagacgcacuucuccgacgacaucgagcagcaggccgacaacaugaucaccgagaugcuccagaaggaguacaucgaccgccagggcaagaccccgcugggccugguggaccuguucgucuucagcaccuccuucuaccucaucagcaucuuccugcaccugaucaagauccccacgcaccggcacaucguggggaagcccugccccaagccgcaccgccucaaccacaugggcaucugcuccugcgggcuguacaagcagcccggcgugcccacccgguggaagcgcuga

SEQ ID NO: 28107 - RNA, 1473 nt, Artificial Sequence
  derived and/or modified CDS sequence (opt1) from LASV(KAK-428;Clade n.d. (VII))__ANH09740__GPCmut5
augggccagaucgugaccuucuuccaggaggucccccacgugaucgaggaggugaugaacaucguccugaucgcccucagccugcuggccauccucaaggggcuguacaacuucgcgaccugcggcgugaucgggcugaucacguuccuccugcugugcggccgcuccugcagcgccaccuacaaggggcaguacgagcuccagacccuggagcugaacauggagucccucaacaugaccaugccgcugagcugcacgaagaacaacucccaccacuacauccgggccggcaacaacaccggccuggagcucacccugaccaacacgagcaucaucucccacaaguucugcaaccugagcgacgcccacaagaagaaccucuacgaccacacccugauguccaucaucaccaccuuccaccugagcauccccaacuucaaccaguacgaggccauguccugcgacuucaacgggggcaagaucagcauccaguacaaccucucccacagcuacgcgggggacgccgcccagcacugcggcacgguggccaacgggguccugcagaccuucaugcgcauggcguggggcggcuccuaccuggcccucgacagcgggugccggggcugggacugcaucaucuccagcuaccaguaccugaucauccagaacaccaccugggacgaccacugccaguucucccgccccagccccaucggguaccugggcuucgugagccagaagacgcgggacaucuacaucucccgccggcuccugggcaccuucaccuggacccugagcgacuccgaggggcacgacaugccgggcggguacugccucacgcgcuggaugcugaucgaggccgaccugaagugcuucggcaacaccgccguggccaagugcaacgagaagcacgacgaggaguucugcgacauguggcggcuguucgacuucaacaagcaggcgauccagcgccugaaggcccccgcccagaugaacauccagcugaucaacaaggccgucaacgcccucaucaacgaccagcugaugaugaagaaccaccuccgggacaucaugugcauccccuacugcaacuacagcaaguucugguaccucaacaacaccaccacggggcgcaccucccugccccggugcuggcugaucagcaacggcuccuaccucaacgagacccacuucagcgacgacaucgagcagcaggcggacaacaugaucaccgagaugcugcagaaggaguacauggaccgccagggcaagacgccgcuggggcucguggaccuguucguguucuccaccagcuucuaccugaucaccaucuuccugcaccucgucaagauccccacccaccggcacaucgugggcaagcccugccccaagccgcaccgccugaaccacauggggaucugcuccugcggccuguacaagcagcccggggugcccguccgguggaagcgcuga

SEQ ID NO: 28108 - RNA, 1473 nt, Artificial Sequence; identical to SEQ ID NO: 28102
  derived and/or modified CDS sequence (opt1) from LASV(Pinneo-NIG-1969;Clade I)__AIT17836__GPCmut5

SEQ ID NO: 28109 - RNA, 1473 nt, Artificial Sequence
  derived and/or modified CDS sequence (opt1) from LASV(ISTH0009-NIG-2011;Clade II)__AIT17404__GPCmut5
augggccagaucaucaccuucuuccaggaggugccccacgucaucgaggaggugaugaacaucgugcugaucgcccucagccugcuggccauccucaaggggaucuacaacgucgcgaccugcggccuguucgggcugguguccuuccuccugcugugcggccgcagcugcuccacgaccuacaaggggguguacgagcuccagacccuggagcuggacauggccagccucaacaugaccaugccgcuguccugcacgaagaacaacagccaccacuacaucauggucggcaacgagaccggccuggagcucacccugaccaacacguccaucaucaaccacaaguucugcaaccugagcgacgcccacaagaagaaccucuacgaccacgcccugauguccaucaucagcaccuuccaccuguccauccccaacuucaaccaguacgaggccaugagcugcgacuucaacgggggcaagaucuccgugcaguacaaccucagccacgcguacgccguggacgccgccaaccacugcgggaccaucgcgaacggcguccugcagaccuucaugcggauggccuggggcggguccuacaucgcccuggacagcggcugcggguccugggacugcaucaugacgagcuaccaguaccucaucauccagaacaccaccugggaggaccacugccaguucucccgccccagccccaucggcuaccuggggcugcucagccagcggacccgcgacaucuacaucucccggcgccugcugggcacguucaccuggacccucagcgacuccgagggcaacgagacccccgggggcuacugccugacgcgguggaugcugaucgaggccgagcucaagugcuucgggaacaccgccguggcgaagugcaacgagaagcacgacgaggaguucugcgacaugcugcgccuguucgacuucaacaagcaggccauccggcgccucaagaccccggcccagaugagcauccagcugaucaacaaggccgugaacgcccugaucaacgaccagcucaucaugaagaaccaccuccgggacaucaugugcauccccuacugcaacuacuccaaguacugguaccugaaccacaccgucacgggcaagaccagccugccccgcugcuggcugguguccaacgggagcuaccugaacgagacccacuucuccgacgacaucgagcagcaggcggacaacaugaucaccgagcuccugcagaaggaguacauggaccggcagggcaagacgccgcugggccugguggaccucuucgucuucagcaccuccuucuaccugaucagcaucuuccugcaccucaucaagauccccacccaccgccacaucaccgggaagcccugccccaagccgcaccggcugaaccacaugggcaucugcuccugcgggcuguacaagcaccccggcgugcccgugaaguggaagcgcuga

SEQ ID NO: 28110 - RNA, 1473 nt, Artificial Sequence
  derived and/or modified CDS sequence (opt1) from LASV(ISTH2010-NIG-2012;Clade II)__AIT17482__GPCmut5
augggccagaucaucaccuucuuccaggaggugccccacgucaucgaggaggugaugaacaucgugcugaucgcccucagccugcuggccauccucaaggggaucuacaacgucgcgaccugcggccuguucgggcugguguccuuccuccugcugugcggccgcagcugcuccacgaccuacaaggggguguacgagcuccagacccuggagcuggacauggccagccucaacaugaccaugccgcuguccugcacgaagaacaacagccaccacuacaucauggucggcaacgagaccggccuggagcucacccugaccaacacguccaucaucaaccacaaguucugcaaccugagcgacgcccacaagaagaaccucuacgaccacgcccugauguccaucaucagcaccuuccaccuguccauccccaacuucaaccaguacgaggccaugagcugcgacuucaacgggggcaagaucuccgugcaguacaaccucagccacgcguacgccguggacgccgccaaccacugcgggaccaucgcgaacggcguccugcagaccuucaugcggauggccuggggcggguccuacaucgcccuggacagcggcugcggguccugggacugcaucaugacgagcuaccaguaccucaucauccagaacaucaccugggaggaccacugccaguucucccgccccagccccaucggcuaccuggggcugcucagccagcggacccgcgacaucuacaucucccggcgccugcugggcaccuucacguggacccucagcgacuccgagggcaacgagacccccgggggcuacugccugacccgguggaugcugaucgaggccgagcucaagugcuucgggaacacggccguggcgaagugcaacgagaagcacgacgaggaguucugcgacaugcugcgccuguucgacuucaacaagcaggccauccggcgccucaagaccccggcccagaugagcauccagcugaucaacaaggccgugaacgcccugaucaacgaccagcucaucaugaagaaccaccuccgggacaucaugugcauccccuacugcaacuacuccaaguacugguaccugaaccacaccgucaccggcaagacgagccugccccgcugcuggcugguguccaacgggagcuaccugaacgagacccacuucuccgacgacaucgagcagcaggcggacaacaugaucaccgagcuccugcagaaggaguacaucgaccggcagggcaagaccccgcugggccugguggaccucuucgucuucagcacguccuucuaccugaucagcaucuuccugcaccucgugaagauccccacccaccgccacguggucgggaagcccugccccaagccgcaccggcugaaccacaugggcaucugcuccugcgggcuguacaagcaccccggcgugcccgugaaguggaagcgcuga

SEQ ID NO: 28111 - RNA, 1473 nt, Artificial Sequence
  derived and/or modified CDS sequence (opt1) from LASV(Lassa virus/H.sapiens-wt/NGA/2015/ISTH_0543;Clade II)__AVO03639__GPCmut5
augggccagaucaucaccuucuuccaggaggugccccacgucaucgaggaggugaugaacaucgugcugaucgcccucagccugcuggccauccucaaggggaucuacaacgucgcgaccugcggccuguucgggcugguguccuuccuccugcugugcggccgcagcugcuccacgaccuacaaggggguguacgagcuccagacccuggagcuggacauggccaaccucaacaugaccaugccgcugagcugcacgaagaacaacucccaccacuacaucauggucggcaacgagaccggccuggagcucacccugaccaacacgagcaucaucaaccacaaguucugcaaccuguccgacgcccacaagaagaaccucuacgaccacgcccugaugagcaucaucuccaccuuccaccugagcauccccaacuucaaccaguacgaggccauguccugcgacuucaacgggggcaagaucagcgugcaguacaaccucucccacaccuacgcgguggacgccgccaaccacugcgggaccaucgccaacggcguccugcagacguucaugcggauggcguggggcgggagcuacaucgcccuggacuccggcugcgggagcugggacugcaucaugaccuccuaccaguaccucgugauccagaacaccaccugggaggaccacugccaguucagccgccccucccccaucggcuaccuggggcugcucagccagcggacgcgcgacaucuacaucagccggcgccugcugggcaccuucaccuggacccucuccgacagcgagggcaacgagacgcccgggggcuacugccugacccgguggaugcugaucgaggccgagcucaagugcuucgggaacaccgccguggccaagugcaacgagaagcacgacgaggaguucugcgacaugcugcgccuguucgacuucaacaagcaggcgauccggcgccucaagaccccggcccagauguccauccagcugaucaacaaggccgucaacgcccugaucaacgaccagcucaucaugaagaaccaccuccgggacaucaugugcauccccuacugcaacuacagcaaguacugguaccugaaccacacggugaccggcaagaccucccugccccgcugcuggcuggugagcaacggguccuaccugaacgagacccacuucagcgacgacaucgagcagcaggccgacaacaugaucacggagcuccugcagaaggaguacaucgaccggcagggcaagaccccgcugggccuggucgaccucuucguguucuccaccagcuucuaccugaucuccaucuuccugcaccucgugaagauccccacccaccgccacaucacggggaagcccugccccaagccgcaccggcugaaccacaugggcaucugcagcugcgggcuguacaagcaccccggcguccccgugaaguggaagcgcuga

SEQ ID NO: 28112 - RNA, 1473 nt, Artificial Sequence
  derived and/or modified CDS sequence (opt1) from LASV(Lassa virus/H.sapiens-wt/NGA/2016/ISTH_0009;Clade II)__AVO03571__GPCmut5
augggccagaucaucaccuucuuccaggaggugccccacgucaucgaggaggugaugaacaucgugcugaucgcccucagccugcuggccauccucaaggggaucuacaacgucgcgaccugcggccugcuggggcucguguccuuccugcugcucugcggccgcagcugcuccacgaccuacaaggggguguacgagcugcagacccuggagcucgacauggccagccugaacaugaccaugccgcuguccugcacgaagaacaacagccaccacuacaucauggucggcaacgagaccggccucgagcugacccugaccaacacguccaucaucaaccacaaguucugcaaccucagcgacgcccacaagaagaaccuguacgaccacgcccugauguccaucaucagcaccuuccaccucuccauccccaacuucaaccaguacgaggccaugagcugcgacuucaacgggggccggaucuccgugcaguacaaccugagccacuccuacgcgguggacgccgccaaccacugcgggaccaucgccaacggcguccugcagaccuucaugcgcauggcguggggcgggagcuacaucgcccucgacuccggcugcgggagcugggacugcaucaugacguccuaccaguaccugaucauccagaacaccaccugggaggaccacugccaguucagccggcccagccccaucggcuaccuggggcuccugucccagcgcacccgggacaucuacaucagccgccggcugcucggcacguucaccuggacccuguccgacagcgagggcaacgagacccccgggggcuacugccugacgcgcuggaugcucaucgaggccgagcugaagugcuucgggaacaccgccguggccaagugcaacgagaagcacgacgaggaguucugcgacaugcugcggcuguucgacuucaacaagcaggcgauccgccggcugaagaccccggcccagauguccauccagcugaucaacaaggccgugaacgcccucaucaacgaccagcugaucaugaagaaccaccuccgcgacaucaugugcauccccuacugcaacuacagcaaguacugguaccucaaccacaccgucacgggcaagaccucccugccccggugcuggcuggugagcaacggguccuaccucaacgagacccacuucagcgacgacaucgagcagcaggccgacaacaugaucaccgagcugcugcagaaggaguacaucgaccgccagggcaagacgccgcugggccucguggaccuguucgucuucuccaccagcuucuaccugaucuccaucuuccuccaccuggugaagauccccacccaccggcacaucaccgggaagcccugccccaagccgcaccgccugaaccacaugggcaucugcagcugcgggcucuacaaccaccccggcgugcccgucaaguggaagcgguga

SEQ ID NO: 28113 - RNA, 1473 nt, Artificial Sequence
  derived and/or modified CDS sequence (opt1) from LASV(Lassa virus/H.sapiens-wt/NGA/2016/ISTH_0017;Clade II)__AVO03567__GPCmut5
augggccagaucaucaccuucuuccaggaggugccccacgucaucgaggaggugaugaacaucgugcugaucgcccucagccugcuggccauccucaaggggaucuacaacgucgcgaccugcggccuguucgggcugguguccuuccuccugcugugcggccgcagcugcuccacgaccuacaaggggguguacgagcuccagacccuggagcuggacauggccagccucaacaugaccaugccgcuguccugcacgaagaacaacagccaccacuacaucauggucggcaacgagaccggccuggagcucacccugaccaacacguccaucaucaaccacaaguucugcaaccugagcgacgcccacaagaagaaccucuacgaccacgcccugauguccaucaucagcaccuuccaccuguccauccccaacuucaaccaguacgaggccaugagcugcgacuucaacgggggcaagaucuccgugcaguacaaccucagccacaccuacgcgaucgacgccgccaaccacugcgggaccaucgccaacggcgugcugcagacguucaugcggauggcguggggcggguccuacaucgcccuggacagcggcugcggguccugggacugcaucaugaccagcuaccaguaccucaucauccagaacaccaccugggaggaccacugccaguucucccgccccagccccaucggcuaccuggggcugcucagccagcggacgcgcgacaucuacaucucccggcgccugcugggcaccuucaccuggacccucagcgacuccgagggcaacgagacgcccgggggcuacugccugacccgguggaugcugaucgaggccgagcucaagugcuucgggaacaccgccgucgccaagugcaacgagaagcacgacgaggaguucugcgacaugcugcgccuguucgacuucaacaagcaggcgauccggcgccucaagaccccggcccagaugagcauccagcugaucaacaaggccgugaacgcccugaucaacgaccagcucaucaugaagaaccaccuccgggacaucaugugcauccccuacugcaacuacuccaaguacugguaccugaaccacacggugaccggcaagaccagccugccccgcugcuggcuggucuccaacgggagcuaccugaacgagacccacuucuccgacgacaucgagcagcaggccgacaacaugaucacggagcuccugcagaaggaguacauggaccggcagggcaagaccccgcugggccugguggaccucuucguguucagcaccuccuucuaccugaucagcaucuuccugcaccucguccgcauccccacccaccggcacgugaucgggaagcccugccccaagccgcaccgccugaaccacaugggcaucugcuccugcgggcuguacaagcaccccggcgugcccgucaaguggaagcgguga

SEQ ID NO: 28114 - RNA, 1473 nt, Artificial Sequence
  derived and/or modified CDS sequence (opt1) from LASV(Lassa virus/H.sapiens-wt/NGA/2018/ISTH_0959;Clade II)__AVV65099__GPCmut5
augggccagaucaucaccuucuuccaggaggugccccacgucaucgaggaggugaugaacaucgugcugaucgcccucagccugcuggccauccucaaggggaucuacaacgucgugaccugcggccuguucgggcugguguccuuccuccugcugugcggccgcagcugcuccacgaccuacaagggggucuacgagcuccagacccuggagcuggacauggcgagccucaacaugaccaugccgcuguccugcacgaagaacaacagccaccacuacaucauggugggcaacgagaccggccuggagcucacccugaccaacacguccaucaucaaccacaaguucugcaaccugagcgacgcccacaagaagaaccucuacgaccacgcccugauguccaucaucagcaccuuccaccuguccauccccaacuucaaccaguacgaggccaugagcugcgacuucaacgggggcaagaucuccgugcaguacaaccucagccacgccuacgcgaucgacgccgccaaccacugcgggaccaucgccaacggcguccugcagaccuucaugcggauggcguggggcggguccuacaucgcccuggacagcggcugcggguccugggacugcaucaugacgagcuaccaguaccucaucauccagaacaccaccugggaggaccacugccaguucucccgccccagccccaucggcuaccuggggcugcucagccagcggacccgcgacaucuacaucucccggcgccugcugggcacguucaccuggacccucagcgacuccgagggcaacgagacccccgggggcuacugccugacgcgguggaugcugaucgaggccgagcucaagugcuucgggaacaccgccguggccaagugcaacgagaagcacgacgaggaguucugcgacaugcugcgccuguucgacuucaacaagcaggcgauccggcgccucaagaccccggcccagaugagcauccagcugaucaacaaggccgugaacgcccugaucaacgaccagcucaucaugaagaaccaccuccgggacaucaugugcauccccuacugcaacuacuccaaguacugguaccugaaccacaccgucacgggcaagaccagccugccccgcugcuggcugguguccaacgggagcuaccugaacgagacccacuucuccgacgacaucgagcagcaggccgacaacaugaucaccgagcuccugcagaaggaguacaucgaccggcagggcaagacgccgcugggccugguggaccucuucgucuucagcaccuccuucuaccugaucagcaucuuccugcaccucgugaagauccccacccaccgccacgugaucgggaagcccugccccaagccgcaccggcugaaccacaugggcaucugcuccugcgggcuguacaagcaccccggcguccccgugaaguggaagcgcuga

SEQ ID NO: 28115 - RNA, 1473 nt, Artificial Sequence
  derived and/or modified CDS sequence (opt1) from LASV(LASV003-NIG-2008;Clade II)__AIT17580__GPCmut5
augggccagaucaucaccuucuuccaggaggugccccacgucaucgaggaggugaugaacaucgugcugaucgcccucagccugcuggccauccucaaggggaucuacaacgucgcgaccugcggccuguucgggcugguguccuuccuccugcugugcggccgcagcugcuccacgaccuacaaggggguguacgagcuccagacccuggagcuggacauggccagccucaacaugaccaugccgcuguccugcacgaagaacaacagccaccacuacaucauggucggcaacgagaccggccuggagcucacccugaccaacacguccaucaucaaccacaaguucugcaaccugagcgacgcccacaagaagaaccucuacgaccacgcccugauguccaucaucagcaccuuccaccuguccauccccaacuucaaccaguacgaggccaugagcugcgacuucaacgggggcaagaucuccgugcaguacaaccucagccacaccuacgcgguggacgccgccaaccacugcgggaccaucgccaacggcguccugcagacguucaugcggauggcguggggcggguccuacaucgcccuggacagcggcugcggguccugggacugcaucaugaccagcuaccaguaccucaucauccagaacaccaccugggaggaccacugccaguucucccgccccagccccaucggcuaccuggggcugcucagccagcggacgcgcgacaucuacaucucccggcgccugcugggcaccuucaccuggacccucagcgacuccgagagcaacgagacgccgggcggguacugccugacccgguggaugcugaucgaggccgagcucaagugcuucggcaacaccgccguggccaagugcaacgagaagcacgacgaggaguucugcgacaugcugcgccuguucgacuucaacaagcaggcgauccggcgccucaaggcccccgcccagauguccauccagcugaucaacaaggccgugaacgcccugaucaacgaccagcucaucaugaagaaccaccuccgggacaucaugugcauccccuacugcaacuacagcaaguacugguaccugaaccacaccgucacggggcgcaccucccugccccggugcuggcuggugagcaacggcuccuaccugaacgagacccacuucagcgacgacaucgagcagcaggcggacaacaugaucaccgagcuccugcagaaggaguacauggaccgccaggggaagacgccgcugggccugguggaccucuucgucuucuccaccagcuucuaccugaucuccaucuuccugcaccucgugaagauccccacccaccggcacgugaucggcaagcccugccccaagccgcaccgccugaaccacauggggaucugcagcugcggccuguacaagcaccccgggguccccgugaaguggaagcgguga

SEQ ID NO: 28116 - RNA, 1473 nt, Artificial Sequence
  derived and/or modified CDS sequence (opt1) from LASV(LASV035-NIG-2009;Clade II)__AIT17588__GPCmut5
augggccagaucaucaccuucuuccaggaggugccccacgucaucgaggaggugaugaacaucgugcugaucgcccucagccugcuggccauccucaaggggaucuacaacgucgcgaccugcggccuguucgggcugguguccuuccuccugcugugcggccgcagcugcuccacgaccuacaaggggguguacgagcuccagacccuggagcuggacauggccagccucaacaugaccaugccgcuguccugcacgaagaacaacagccaccacuacaucauggucggcaacgagaccggccuggagcucacccugaccaacacguccaucaucaaccacaaguucugcaaccugagcgacgcccacaagaagaaccucuacgaccacgcccugauguccaucaucagcaccuuccaccuguccauccccaacuucaaccaguacgaggccaugagcugcgacuucaacgggggcaagaucuccgugcaguacaaccucagccacgcguacgccguggacgccgccaaccacugcgggaccaucgcgaacggcguccugcagaccuucaugcggauggccuggggcggguccuacaucgcccuggacagcggcugcggguccugggacugcaucaugacgagcuaccaguaccucaucauccagaacaccaccugggaggaccacugccaguucucccgccccagccccaucggcuaccuggggcugcucagccagcggacccgcgacaucuacaucucccggcgccugcugggcacguucaccuggacccucagcgacuccgagggcaacgagacccccgggggcuacugccugacgcgguggaugcugaucgaggccgagcucaagugcuucgggaacaccgccguggcgaagugcaacgagaagcacgacgaggaguucugcgacaugcugcgccuguucgacuucaacaagcaggccauccggcgccucaaggccccggcccagaugagcauccagcugaucaacaaggccgugaacgcgcugaucaacgaccagcucaucaugaagaaccaccuccgggacaucaugugcauccccuacugcaacuacuccaaguacugguaccugaaccacaccgucaccggcaagacgagccugccccgcugcuggcugguguccaacgggagcuaccugaacgagacccacuucuccgacgacaucgagcagcaggccgacaacaugaucaccgagcuccugcagaaggaguacaucgaccggcagggcaagaccccgcugggccugguggaccucuucgucuucagcacguccuucuaccugaucagcaucuuccugcaccucgugaagauccccacccaccgccacgugaucgggaagcccugccccaagccgcaccggcugaaccacaugggcaucugcuccugcgggcuguacaagcaccccggcguccccgugaaguggaagcgcuga

SEQ ID NO: 28117 - RNA, 1473 nt, Artificial Sequence
  derived and/or modified CDS sequence (opt1) from LASV(LASV1000-NIG-2009;Clade II)__AIT17782__GPCmut5
augggccagaucaucaccuucuuccaggaggugccccacgucaucgaggaggugaugaacaucgugcugaucgcccucagccugcuggccauccucaaggggaucuacaacgucgcgaccugcggccuguucgggcugguguccuuccuccugcugugcggccgcagcugcuccacgaccuacaaggggguguacgagcuccagacccuggagcuggacauggccagccucaacaugaccaugccgcuguccugcacgaagaacaacagccaccacuacaucauggucggcaacgagaccggccuggagcucacccugaccaacacguccaucaucaaccacaaguucugcaaccugagcgacgcccacaagaagaaccucuacgaccacgcccugauguccaucaucagcaccuuccaccuguccauccccaacuucaaccaguacgaggccaugagcugcgacuucaacgggggcaagaucuccgugcaguacaaccucagccacaccuacgcgguggacgccgccaaccacugcgggaccaucgccaacggcguccugcagacguucaugcggauggcguggggcggguccuacaucgcccuggacagcggcugcggguccugggacugcaucaugaccagcuaccaguaccucaucauccagaacaccaccugggaggaccacugccaguucucccgccccagccccaucggcuaccuggggcugcucagccagcggacgcgcgacaucuacaucucccggcgccugcugggcaccuucaccuggacccucagcgacuccgagggcaacgagacgcccgggggcuacugccugacccgguggaugcugaucgaggccgagcucaagugcuucgggaacaccgccguggccaagugcaacgagaagcacgacgaggaguucugcgacaugcugcgccuguucgacuucaacaagcaggcgaucaagcggcucaagaccccggcccagaugagcauccagcugaucaacaaggccgugaacgcccugaucaacgaccagcucaucaugaagaaccaccuccgcgacaucaugugcauccccuacugcaacuacuccaaguacugguaccugaaccacacggucaccggcaagaccagccugccccggugcuggcugguguccaacgggagcuaccugaacgagacccacuucuccgacgacaucgagcagcaggccgacaacaugaucacggagcuccugcagaaggaguacaucgaccgccagggcaagaccccgcugggccugguggaccucuucgucuucagcaccuccuucuaccugaucagcaucuuccugcaccucgugaagauccccacccaccggcacguggucgggaagcccugccccaagccgcaccgccugaaccacaugggcaucugcuccugcgggcuguacaagcaccccggcgugcccgugaaguggaagcgguga

SEQ ID NO: 28118 - RNA, 1473 nt, Artificial Sequence
  derived and/or modified CDS sequence (opt1) from LASV(LASV221-NIG-2010;Clade II)__AIT17624__GPCmut5
augggccagaucaucaccuucuuccaggaggugccccacgucaucgaggaggugaugaacaucgugcugaucgcccucagccugcuggccauccucaaggggaucuacaacgucgcgaccugcggccuguucgggcugguguccuuccuccugcugugcggccgcagcugcuccacgaccuacaaggggguguacgagcuccagacccuggagcuggacauggccagccucaacaugaccaugccgcuguccugcacgaagaacaacagccaccacuacaucauggucggcaacgagaccggccuggagcucacccugaccaacacguccaucaucaaccacaaguucugcaaccugagcgacgcccacaagaagaaccucuacgaccacgcccugauguccaucaucagcaccuuccaccuguccauccccaacuucaaccaguacgaggccaugagcugcgacuucaacgggggcaagaucuccgugcaguacaaccucagccacaccuacgcgaucgacgccgccaaccacugcgggaccaucgccaacggcgugcugcagacguucaugcggauggcguggggcggguccuacaucgcccuggacagcggcugcggguccugggacugcaucaugaccagcuaccaguaccucaucauccagaacaccaccugggaggaccacugccaguucucccgccccagccccaucggcuaccuggggcugcucagccagcggacgcgcgacaucuacaucucccggcgccugcugggcaccuucaccuggacccucagcgacuccgagggcaacgagacgcccgggggcuacugccugacccgguggaugcugaucgaggccgagcucaagugcuucgggaacaccgccgucgccaagugcaacgagaagcacgacgaggaguucugcgacaugcugcgccuguucgacuucaacaagcaggcgauccggcgccucaagaccccggcccagaugagcauccagcugaucaacaaggccgugaacgcccugaucaacgaccagcucaucaugaagaaccaccuccgggacaucaugugcauccccuacugcaacuacuccaaguacugguaccugaaccacacggugaccggcaagaccagccugccccgcugcuggcuggucuccaacgggagcuaccugaacgagacccacuucuccgacgacaucgagcagcaggccgacaacaugaucacggagaugcuccagaaggaguacauggaccggcagggcaagaccccgcugggccugguggaccuguucguguucagcaccuccuucuaccucaucagcaucuuccugcaccuggucaagauccccacccaccgccacgugaucgggaagcccugccccaagccgcaccggcucaaccacaugggcaucugcuccugcgggcuguacaagcaccccggcgugcccgucaaguggaagcgcuga

SEQ ID NO: 28119 - RNA, 1473 nt, Artificial Sequence
  derived and/or modified CDS sequence (opt1) from LASV(LASV237-NIG-2010;Clade II)__AIT17638__GPCmut5
augggccagaucaucaccuucuuccaggaggugccccacgucaucgaggaggugaugaacaucgugcugaucgcccucagccugcuggccauccucaaggggaucuacaacgucgcgaccugcggccuguucgggcugguguccuuccuccugcugugcggccgcagcugcuccacgaccuacaaggggguguacgagcuccagacccuggagcuggacauggccagccucaacaugaccaugccgcuguccugcacgaagaacaacagccaccacuacaucauggucggcaacgagaccggccuggagcucacccugaccaacacguccaucaucaaccacaaguucugcaaccugagcgacgcccacaagaaggaccucuacgaccacgcccugauguccaucaucagcaccuuccaccuguccauccccaacuucaaccaguacgaggccaugagcugcgacuucaacgggggcaagaucuccgugcaguacaaccucagccacaccuacgcgguggacgccgccaaccacugcgggaccaucgccaacggcguccugcagacguucaugcggauggcguggggcggguccuacaucgcccuggacagcggcugcggguccugggacugcaucaugaccagcuaccaguaccucaucauccagaacaccaccugggaggaccacugccaguucucccgccccagccccaucggcuaccuggggcugcucagccagcggacgcgcgacaucuacaucucccggcgccugcugggcaccuucaccuggacccucagcgacuccgagggcaacgagacgcccgggggcuacugccugacccgguggaugcugaucgaggccgagcucaagugcuucgggaacaccgccguggccaagugcaacgagaagcacgacgaggaguucugcgacaugcugcgccuguucgacuucaacaagcaggcgauccggcgccucaagaccccggcccagaugagcauccagcugaucaacaaggccgugaacgcccugaucaacgaccagcucaucaugaagaaccaccuccgggacaucaugugcauccccuacugcaacuacuccaaguacugguaccugaaccacacggucaccggcaagaccagccugccccgcugcuggcugguguccaacgggagcuaccugaacgagacccacuucuccgacgacaucgagcagcaggccgacaacaugaucacggagcuccugcagaaggaguacauggaccggcagggcaagaccccgcugggccugguggaccucuucgucuucagcaccuccuucuaccugaucagcaucuuccugcaccucaucaagauccccacccaccgccacaucacggggaagcccugccccaagccgcaccggcugaaccacaugggcaucugcuccugcgggcuguacaagcaccccggcgugcccgugaaguggaagcgcuga

SEQ ID NO: 28120 - RNA, 1473 nt, Artificial Sequence
  derived and/or modified CDS sequence (opt1) from LASV(LASV253-NIG-2011;Clade II)__AIT17670__GPCmut5
augggccagaucaucaccuucuuccaggaggugccccacgucaucgaggaggugaugaacaucgugcugaucgcccucagccugcuggccauccucaaggggaucuacaacgucgcgaccugcggccuguucgggcugguguccuuccuccugcugugcggccgcagcugcuccacgaccuacaaggggguguacgagcuccagacccuggagcuggacauggccagccucaacaugaccaugccgcuguccugcacgaagaacaacagccaccacuacaucauggucggcaacgagaccggccuggagcucacccugaccaacacguccaucaucaaccacaaguucugcaaccugagcgacgcccacaagaagaaccucuacgaccacgcccugauguccaucaucagcaccuuccaccuguccauccccaacuucaaccaguacgaggccaugagcugcgacuucaacgggggcaagaucuccgugcaguacaaccucagccacaccuacgcgguggacgccgccaaccacugcgggaccaucgccaacggcguccugcagacguucaugcggauggcguggggcggguccuacaucgcccuggacagcggcugcggguccugggacugcaucaugaccagcuaccaguaccucaucauccagaacaccaccugggaggaccacugccaguucucccgccccagccccaucggcuaccuggggcugcucagccagcggacgcgcgacaucuacaucucccggcgccugcugggcaccuucaccuggacccucagcgacuccgagggcaacgagacgcccgggggcuacugccugacccgguggaugcugaucgaggccgagcucaagugcuucgggaacaccgccguggccaagugcaacgagaagcacgacgaggaguucugcgacaugcugcgccuguucgacuucaacaagcaggcgauccggcgccucaaggccccggcccagaugagcauccagcugaucaacaaggccgugaacgcccugaucaacgaccagcucaucaugaagaaccaccuccgggacaucaugugcauccccuacugcaacuacuccaaguacugguaccugaaccacaccgucacgggccgcaccagccugccccggugcuggcugguguccaacgggagcuaccugaacgagacccacuucuccgacgacaucgagcagcaggcggacaacaugaucaccgagcuccugcagaaggaguacaucgaccgccagggcaagacgccgcugggccugguggaccucuucgucuucagcaccuccuucuaccugaucagcaucuuccugcaccucgugaagauccccacccaccggcacaucaucgggaagcccugccccaagccgcaccgccugaaccacaugggcaucugcuccugcgggcuguacaagcaccccggcgugcccgucaaguggaagcgguga

SEQ ID NO: 28121 - RNA, 1473 nt, Artificial Sequence
  derived and/or modified CDS sequence (opt1) from LASV(LASV254-NIG-2011;Clade II)__AIT17674__GPCmut5
augggccagaucaucaccuucuuccaggaggugccccacgucaucgaggaggugaugaacaucgugcugaucgcccucagccugcuggccauccucaaggggaucuacaacgucgcgaccugcggccuguucgggcugguguccuuccuccugcugugcggccgcagcugcuccacgaccuacaaggggguguacgagcuccagacccuggagcuggacaugaccaaccucaacaugacgaugccgcugagcugcaccaagaacaacucccaccacuacaucauggucggcaacgagaccggccuggagcucacccugacgaacaccagcaucaucaaccacaaguucugcaaccuguccgacgcccacaagaagaaccucuacaaccacgcccugaugagcaucaucuccaccuuccaccugagcauccccaacuucaaccaguacgaggccauguccugcgacuucaacgggggcaagaucagcgugcaguacaaccucucccacagcuacgccguggacgcggccaaccacugcgggaccaucgccaacggcguccugcagacguucaugcggauggccuggggcggguccuacaucgcgcuggacagcggcugcgggaacugggacugcaucaugaccuccuaccaguaccucaucauccagaacaccaccugggaggaccacugccaguucagccgccccucccccaucggcuaccuggggcugcucagccagcggacgcgcgacaucuacaucagccggcgccugcugggcaccuucaccuggacccucuccgacagcgagggcaacgagacgcccgggggcuacugccugacccgguggaugcugaucgaggccgagcucaagugcuucgggaacaccgccguggccaagugcaacgagaagcacgacgaggaguucugcgacaugcugcgccuguucgacuucaacaagcaggccauccggcgccucaagaccccggcgcaggccaacauccagcugaucaacaaggccgugaacgcccugaucaacgaccagcucaucaugaagaaccaccuccgggacaucaugugcauccccuacugcaacuacuccaaguacugguaccugaaccacacggucaccggcaagaccagccugccccgcugcuggcugguguccaacgggagcuaccugaacgagacccacuucuccgacgacaucgagcagcaggccgacaacaugaucacggagcuccugcagaaggaguacauggaccggcagggcaagaccccgcugggccugguggaccucuucgucuucagcaccuccuucuaccugaucagcaucuuccugcaccucgugaagauccccacccaccgccacgugaucgggaagcccugccccaagccgcaccggcugaaccacaugggcaucugcuccugcgggcuguacaagcaccccggcguccccgugaaguggaagcgcuga

SEQ ID NO: 28122 - RNA, 1473 nt, Artificial Sequence
  derived and/or modified CDS sequence (opt1) from LASV(Nig08-A19;Clade III)__ADU56618__GPCmut5
augggccagaucgugaccuucuuccaggaggucccccacgugaucgaggaggugaugaacaucguccugaucgcccucagcauccuggccauccugaaggggcucuacaacaucgcgaccugcggccugaucgggcuggugacguuccuccugcuguccggccgcagcugcuccaugaccuacaaggggguguacgagcuccagacccuggagcugaacaugaacacccucaacaugacgaugccgcugagcugcaccaagaacaacucccaccacuacaucauggucggcaacgagaccggccuggagcucacccugacgaacaccagccugcuccaccacaaguucugcaaccuguccgacgcccacaagaagaaccuguacgaccacacccucaugagcaucaucuccaccuuccaccugagcauccccaacuucaaccaguacgaggccauguccugcgacuucaacgggggcaagaucacggugcaguacaaccugagccacuccuacgccaucgacgccgcgaaccacugcgggaccguggccaacggcguccuccagaccuucaugcggauggccuggggcgggagcuacaucgcccuggacuccggcugcgggaagugggacugcaucaugaccagcuaccaguaccugaucauccagaacacgaccugggaggaccacugccaguucucccgccccagccccaucggcuaccucgggcugcugucccagcggacccgcgacaucuacaucagccggcgccuccugggcaccuucacguggacccugagcgacuccgagggcaacgagacccccgggggcuacugccucacccgguggaugcugaucgaggcggagcugaagugcuucgggaacacggccguggccaagugcaacgagaagcacgacgaggaguucugcgacaugcuccgccuguucgacuucaacaagcaggccauccggcgccugaaggccccggcgcagaugagcauccagcucaucaacaaggccgugaacgcccugaucaacgaccagcugaucaugaagaaccaccuccgggacaucaugugcauccccuacugcaacuacuccaaguacugguaccugaaccacaccagcaccggccgcaccucccugccccggugcuggcucgucagcaacggguccuaccugaacgagacgcacuucagcgacgacaucgagcagcaggccgacaacaugaucaccgagaugcugcagaaggaguaccuggaccgccagggcaagaccccgcucggccugguggaccuguucguguucuccaccagcuucuaccucaucuccaucuuccugcaccuggucaagauccccacgcaccggcacaucguggggaagcccugccccaagccgcaccgccucaaccacaugggcaucugcagcugcgggcuguacaagcagcccggcgugcccguccgguggaagcgcuga

SEQ ID NO: 28123 - RNA, 1476 nt, Artificial Sequence
  derived and/or modified CDS sequence (opt1) from LASV(G1180-SLE-2010;Clade IV)__AIT17168__GPCmut5
augggccagaucgugaccuucuuccaggaggucccccacgugaucgaggaggugaugaacaucguccugaucgcccucagcauccuggccgugcugaaggggcucuacaacuucgcgaccugcggccugguggggcugcucacguuccugcugcucugcggccgcuccugcaccgccagccgguacaagggggucuacgagcugcagacccuggagcucaacauggagacccugaacaugacgaugccgcuguccugcaccaagaacaacagccaccacuacaucauggugggcaacgagaccggccucgagcugacccugacgaacaccuccaucaucaaccacaaguucugcaaccucagcgacgcccacaagaagaaccuguacgaccacgcccugauguccaucaucagcaccuuccaccucuccauccccaacuucaaccaguacgaggccaugagcugcgacuucaacgggggcaagaucuccgugcaguacaaccugagccacuccuacgcgggggacgccgccaaccacugcggcaccgucgccaacggggugcugcagacguucaugcgcauggcguggggcggcagcuacaucgcccucgacuccgggugcggcagcugggacugcaucaugaccuccuaccaguaccugaucauccagaacaccaccugggaggaccacugccaguucagccggcccucccccaucggguaccugggccuccugagccagcgcacgcgggacaucuacaucagccgccggcugcucggcaccuucaccuggacccuguccgacagcgaggggaaggacacgccgggcggguacugccugacccgcuggaugcucaucgaggccgagcugaagugcuucggcaacaccgccguggccaagugcaacgagaagcacgacgaggaguucugcgacaugcugcggcuguucgacuucaacaagcaggcgauccagcgccugaaggcccccgcccagauguccauccagcugaucaacaaggccgucaacgcccucaucaacgaccagcugaucaugaagaaccaccuccgggacaucaugugcauccccuacugcaacuacagcaaguacugguaccucaaccacaccacgaccgggaagaccucccugcccaagugcuggcuggugagcaacggcuccuaccucaacgagacccacuucagcgacgacaucgagcagcaggcggacaacaugaucacggagaugcugcagaaggaguacauggagcgccagggcaagaccccgcuggggcugguggaccucuucgucuucuccaccagcuucuaccugaucuccaucuuccugcaccucgugaagauccccacccaccggcacaucgugggcaagagcugccccaagccccaccgccugaaccacauggggaucugcuccugcggccuguacaagcagccggggguccccgugaaguggaagcgguga
